United States Patent Application Publication US 2026/0226133 A1 - sequence listing, part 6

SEQ ID NO: 7691 - DNA, 2601 bp, synthetic construct
  source 1..2601: mol_type = other DNA
atggccttaccagtgaccgccttgctcctgccgctggccttgctgctccacgccgccaggccggaagtgcagctggttgaatctggcggaggactggttcagcctggcggatctctgagactgtcttgtgccgccagcggcttcagcttcagcgacttttggatgagctgggtccgacaggcccctggcaaaggacttgaatgggtcgccacaatcagccaggccggcagcgagaaggactacgtggactctgtgaagggcagattcaccatcagccgggacaacgccaagaagtccctgtacctccagatgaacagcctgagagccgaggacaccgccgtgtactattgtgcctctggcgtgtacagcttcgactacagaggccagggcaccctggtcacagtctcttctggtaccggcggaggcggatctggcggcggaggtagcggtggcggaggatctgaattccagctggtgctgacacagtctccaagcgcctctgccagcctgggatctagcgtgaagctgacctgtacactgagcagcggccacaagaccgacaccatcgactggtatcagcagcagcctggcaaggcccctagatacctgatgaagctggaaggcagcggcagctacaacaaaggctctggcgtgcccgatagattcagcggcagttcttctggcgctgattggtatctgaccatcagcagcctccagagcgaggacgaggccgattactactgcggcacagactaccccggcaactacctgtttggcggcggaacacagctgacagtgcttggcctcgagatccagaaccctgatcctgccgtgtaccagctgcgggatagcaagagcagcgacaagagcgtgtgtctgttcaccgacttcgacagccagaccaacgtgtcccagagcaaggactccgacgtgtacatcaccgataagtgcgtgctggacatgcggagcatggacttcaagagcaactccgccgtggcctggtccaacaagtccgatttcgcctgcgccaacgccttcaacaacagcattatccccgaggacacattcttcccaagccccgagagcagcgactccaccgaccacgtgaagcccaaagagacagagaacaccaagcagcccagcaagagctgccacaagcccaaggccatcgtgcacaccgagaaagtgaacatgatgagcctgaccgtgctgggcctgcggatgctgttcgccaaaaccgtggccgtgaacttcctgctgaccgccaagctgttcttcctccgcgccaagagaagcggatctggcgtgaagcagaccctgaatttcgacctgctgaagctggctggcgacgtggaatccaacccaggccctactagtatggactggatttggcgcatccttttccttgtcggcgctgctaccggcgcgcattccttcgaacaagaacagctggttgaaagcggcggaggactggttcaacctggcggttctctgagactgagctgtgccgccagcggcttcaccttcagcgactactacatgagctggatcagacaggccccaggcaaaggactggaatgggtcgccacaatctaccccagcagcggcaagacctactacgccgattctgccaagggcagactgaccatctccagcgacaacgccaaggacagcctgtacctccagatgaacagcctgagagccgaggacaccgccgtgtactactgcaccagagatagctacgccgacgacgccgctctgtttgacatttggggccagggcaccaccgtgaccgtttcttctacgcgtgaggacctgaagaacgtgttcccacctgaggtggccgtgttcgagcctagcgaggccgagatcagccacacccagaaagccaccctcgtgtgcctggctaccggcttctaccccgaccatgtggaactgtcttggtgggtcaacggcaaagaggtgcacagcggcgtgtgtaccgacccccagccactgaaagaacagcccgccctgaacgacagccggtactgcctgagcagcagactgagagtgtccgccaccttctggcagaacccccggaaccacttcagatgccaggtgcagttctacggcctgagcgagaacgacgagtggacccaggacagagccaagcccgtgacccagatcgtgtctgccgaagcctggggcagagccgatgatgtgattaagatccactggcaggaaaagaagtccaacaccatcctgggcagccaggaaggcaacaccatgaagaccaacgacacctacatgaagttcagctggctgaccgtgcccgagaagtccctggacaaagaacacagatgcatcgtgcggcacgaaaacaacaagaacggcgtggaccaggaaatcatcttcccacccatcaagaccgatgtgattacaatggaccccaaggacaactgctccaaggacgccaacgataccctgctgctccagctgaccaacaccagcgcctactacatgtacttgttgctgctgctgaagtccgtggtgtacttcgccatcatcacatgctgcctgctgcggagaaccgccttctgctgcaacggcgagaagtct

SEQ ID NO: 7692 - DNA, 2577 bp, synthetic construct; identical to SEQ ID NO: 7688
  source 1..2577: mol_type = other DNA

SEQ ID NO: 7693 - DNA, 2598 bp, synthetic construct; identical to SEQ ID NO: 7689
  source 1..2598: mol_type = other DNA

SEQ ID NO: 7694 - DNA, 2577 bp, synthetic construct; identical to SEQ ID NO: 7690
  source 1..2577: mol_type = other DNA

SEQ ID NO: 7695 - DNA, 2601 bp, synthetic construct; identical to SEQ ID NO: 7691
  source 1..2601: mol_type = other DNA

SEQ ID NO: 7696 - DNA, 2598 bp, synthetic construct
  source 1..2598: mol_type = other DNA
atggccttaccagtgaccgccttgctcctgccgctggccttgctgctccacgccgccaggccggaagtgcagctggttgaatctggcggaggactggttcagcctggcggatctctgagactgtcttgtgccgccagcggcttcagcttcagcgacttttggatgagctgggtccgacaggcccctggcaaaggacttgaatgggtcgccacaatcagccaggccggcagcgagaaggactacgtggactctgtgaagggcagattcaccatcagccgggacaacgccaagaagtccctgtacctccagatgaacagcctgagagccgaggacaccgccgtgtactattgtgcctctggcgtgtacagcttcgactacagaggccagggcaccctggtcacagtctcttctggtaccggcggaggcggatctggcggcggaggtagcggtggcggaggatctgaattcgatatccagctcactcaaagcccctctagtctctctgcctcagtgggggatcgggtcagttttacttgtcaagcttcacaggatatcaacaacttccttaattggtatcagcagaagccaggaaaagcacccaagctgctcatctatgatgcctcaaatttggagacgggtgttcccagtcgattctctgggtcagggtccgggaccgactttacgtttacgatctcctctctgcagcccgaagacatcgccacatactattgtcaacagtacggcaacttgcctttcacatttgggggcgggactaaggttgaaatcaagaggctcgagatccagaaccctgatcctgccgtgtaccagctgcgggatagcaagagcagcgacaagagcgtgtgtctgttcaccgacttcgacagccagaccaacgtgtcccagagcaaggactccgacgtgtacatcaccgataagtgcgtgctggacatgcggagcatggacttcaagagcaactccgccgtggcctggtccaacaagtccgatttcgcctgcgccaacgccttcaacaacagcattatccccgaggacacattcttcccaagccccgagagcagcgactccaccgaccacgtgaagcccaaagagacagagaacaccaagcagcccagcaagagctgccacaagcccaaggccatcgtgcacaccgagaaagtgaacatgatgagcctgaccgtgctgggcctgcggatgctgttcgccaaaaccgtggccgtgaacttcctgctgaccgccaagctgttcttcctccgcgccaagagaagcggatctggcgtgaagcagaccctgaatttcgacctgctgaagctggctggcgacgtggaatccaacccaggccctactagtatggactggatttggcgcatccttttccttgtcggcgctgctaccggcgcgcattccttcgaacaggtacagctgcaggaatctgggcccggacttgtcaagccaagtcagacactttctcttacatgtaccgtgagcggcggaagtataagcagtggaggcttttactggtcttggatacggcagcacccaggcaaaggcttggagtggattggatacattcatcattcaggatctacacactataatccatcccttaagtcccgggtcaccattagcattgatacgtctaagaatctgttcagtctcaggctgtcctccgtcactgctgccgacacagccgtgtactactgcgcctccttggtttactgcggaggcgactgttatagcggctttgattattgggggcaggggaccctcgtaaccgtgagctctacgcgtgaggacctgaagaacgtgttcccacctgaggtggccgtgttcgagcctagcgaggccgagatcagccacacccagaaagccaccctcgtgtgcctggctaccggcttctaccccgaccatgtggaactgtcttggtgggtcaacggcaaagaggtgcacagcggcgtgtgtaccgacccccagccactgaaagaacagcccgccctgaacgacagccggtactgcctgagcagcagactgagagtgtccgccaccttctggcagaacccccggaaccacttcagatgccaggtgcagttctacggcctgagcgagaacgacgagtggacccaggacagagccaagcccgtgacccagatcgtgtctgccgaagcctggggcagagccgatgatgtgattaagatccactggcaggaaaagaagtccaacaccatcctgggcagccaggaaggcaacaccatgaagaccaacgacacctacatgaagttcagctggctgaccgtgcccgagaagtccctggacaaagaacacagatgcatcgtgcggcacgaaaacaacaagaacggcgtggaccaggaaatcatcttcccacccatcaagaccgatgtgattacaatggaccccaaggacaactgctccaaggacgccaacgataccctgctgctccagctgaccaacaccagcgcctactacatgtacttgttgctgctgctgaagtccgtggtgtacttcgccatcatcacatgctgcctgctgcggagaaccgccttctgctgcaacggcgagaagtct

SEQ ID NO: 7697 - DNA, 2586 bp, synthetic construct
  source 1..2586: mol_type = other DNA
atggccttaccagtgaccgccttgctcctgccgctggccttgctgctccacgccgccaggccggaagtgcagctggttgaatctggcggaggactggttcagcctggcggatctctgagactgtcttgtgccgccagcggcttcagcttcagcgacttttggatgagctgggtccgacaggcccctggcaaaggacttgaatgggtcgccacaatcagccaggccggcagcgagaaggactacgtggactctgtgaagggcagattcaccatcagccgggacaacgccaagaagtccctgtacctccagatgaacagcctgagagccgaggacaccgccgtgtactattgtgcctctggcgtgtacagcttcgactacagaggccagggcaccctggtcacagtctcttctggtaccggcggaggcggatctggcggcggaggtagcggtggcggaggatctgaattcgacattcagatgacacagagccctagcagcctgagcgcctctgtgggagacagagtgaccatcacatgcaagagcagccagagcgtgctgtactccagcaatcagaagaactacctggcctggttccagcagaagcctggcaaggctcctaagctgctgatctactgggccagcaccagagaaagcggcgtgccaagcagattttctggcagcggctctggcaccgacttcaccctgacaatatccagcctccagcctgaggacttcgccacctacttttgccaccagtacctgagcagctacacattcggacagggcaccaaggtggaaatcaagcggctcgagatccagaaccctgatcctgccgtgtaccagctgcgggatagcaagagcagcgacaagagcgtgtgtctgttcaccgacttcgacagccagaccaacgtgtcccagagcaaggactccgacgtgtacatcaccgataagtgcgtgctggacatgcggagcatggacttcaagagcaactccgccgtggcctggtccaacaagtccgatttcgcctgcgccaacgccttcaacaacagcattatccccgaggacacattcttcccaagccccgagagcagcgactccaccgaccacgtgaagcccaaagagacagagaacaccaagcagcccagcaagagctgccacaagcccaaggccatcgtgcacaccgagaaagtgaacatgatgagcctgaccgtgctgggcctgcggatgctgttcgccaaaaccgtggccgtgaacttcctgctgaccgccaagctgttcttcctccgcgccaagagaagcggatctggcgtgaagcagaccctgaatttcgacctgctgaagctggctggcgacgtggaatccaacccaggccctactagtatggactggatttggcgcatccttttccttgtcggcgctgctaccggcgcgcattccttcgaagaggtgcagctggttgaatctggcggaggactggttcagcctggcggatctctgagactgtcttgtgccgccagcggctacaccttcaccacctattggatgcactgggtccgacaggcccctggcaaaggacttgagtgggtcggatatatcaggcccagcaccggctacacagagtacaaccagaagttcaaggaccgcttcaccatcagcgccgacaccagcaagaataccgcctacctccagatgaacagcctgagagccgaggacaccgccgtgtactactgtgccagatccagatggctgctggactattggggccagggcacactggttacagtttctacgcgtgaggacctgaagaacgtgttcccacctgaggtggccgtgttcgagcctagcgaggccgagatcagccacacccagaaagccaccctcgtgtgcctggctaccggcttctaccccgaccatgtggaactgtcttggtgggtcaacggcaaagaggtgcacagcggcgtgtgtaccgacccccagccactgaaagaacagcccgccctgaacgacagccggtactgcctgagcagcagactgagagtgtccgccaccttctggcagaacccccggaaccacttcagatgccaggtgcagttctacggcctgagcgagaacgacgagtggacccaggacagagccaagcccgtgacccagatcgtgtctgccgaagcctggggcagagccgatgatgtgattaagatccactggcaggaaaagaagtccaacaccatcctgggcagccaggaaggcaacaccatgaagaccaacgacacctacatgaagttcagctggctgaccgtgcccgagaagtccctggacaaagaacacagatgcatcgtgcggcacgaaaacaacaagaacggcgtggaccaggaaatcatcttcccacccatcaagaccgatgtgattacaatggaccccaaggacaactgctccaaggacgccaacgataccctgctgctccagctgaccaacaccagcgcctactacatgtacttgttgctgctgctgaagtccgtggtgtacttcgccatcatcacatgctgcctgctgcggagaaccgccttctgctgcaacggcgagaagtct

SEQ ID NO: 7698 - DNA, 2577 bp, synthetic construct
  source 1..2577: mol_type = other DNA
atggccttaccagtgaccgccttgctcctgccgctggccttgctgctccacgccgccaggccggaagtgcagctggttgaatctggcggaggactggttcagcctggcggatctctgagactgtcttgtgccgccagcggcttcagcttcagcgacttttggatgagctgggtccgacaggcccctggcaaaggacttgaatgggtcgccacaatcagccaggccggcagcgagaaggactacgtggactctgtgaagggcagattcaccatcagccgggacaacgccaagaagtccctgtacctccagatgaacagcctgagagccgaggacaccgccgtgtactattgtgcctctggcgtgtacagcttcgactacagaggccagggcaccctggtcacagtctcttctggtaccggcggaggcggatctggcggcggaggtagcggtggcggaggatctgaattcgacatccagatgacacagagccctagcagcctgtctgccagcgtgggagacagagtgaccatcacctgtagagccagccaggacatcagcaactacctgaactggtatcagcagaagcccggcaaggcccctaagctgctgatctactacaccagcagactgcacagcggcgtgcccagcagattttctggctctggcagcggcaccgacttcaccctgacaatatctagcctccagcctgaggacttcgccacctactattgccagcagggcaacaccctgccttacacatttggacagggcaccaaggtggaaatcaagagactcgagatccagaaccctgatcctgccgtgtaccagctgcgggatagcaagagcagcgacaagagcgtgtgtctgttcaccgacttcgacagccagaccaacgtgtcccagagcaaggactccgacgtgtacatcaccgataagtgcgtgctggacatgcggagcatggacttcaagagcaactccgccgtggcctggtccaacaagtccgatttcgcctgcgccaacgccttcaacaacagcattatccccgaggacacattcttcccaagccccgagagcagcgactccaccgaccacgtgaagcccaaagagacagagaacaccaagcagcccagcaagagctgccacaagcccaaggccatcgtgcacaccgagaaagtgaacatgatgagcctgaccgtgctgggcctgcggatgctgttcgccaaaaccgtggccgtgaacttcctgctgaccgccaagctgttcttcctccgcgccaagagaagcggatctggcgtgaagcagaccctgaatttcgacctgctgaagctggctggcgacgtggaatccaacccaggccctactagtatggactggatttggcgcatccttttccttgtcggcgctgctaccggcgcgcattccttcgaagaagtgcagctggttgaatcaggtggcggcctggttcaacctggcggatctctgagactgagctgtgccgccagcggcttcaccttcagcgactactttatgagctgggtccgacaggcccctggcaaaggacttgaatgggtcgccaccatcagcaatggcggcacctacacttactaccccgacagcgtgaagggcagattcaccatctccagagacaacagcaagaacaccctgtacctccagatgaactccctgagagccgaggacaccgccgtgtactactgcgccagattcgacggctacatcttcgactattggggccagggcaccctggtcacagtctcttctacgcgtgaggacctgaagaacgtgttcccacctgaggtggccgtgttcgagcctagcgaggccgagatcagccacacccagaaagccaccctcgtgtgcctggctaccggcttctaccccgaccatgtggaactgtcttggtgggtcaacggcaaagaggtgcacagcggcgtgtgtaccgacccccagccactgaaagaacagcccgccctgaacgacagccggtactgcctgagcagcagactgagagtgtccgccaccttctggcagaacccccggaaccacttcagatgccaggtgcagttctacggcctgagcgagaacgacgagtggacccaggacagagccaagcccgtgacccagatcgtgtctgccgaagcctggggcagagccgatgatgtgattaagatccactggcaggaaaagaagtccaacaccatcctgggcagccaggaaggcaacaccatgaagaccaacgacacctacatgaagttcagctggctgaccgtgcccgagaagtccctggacaaagaacacagatgcatcgtgcggcacgaaaacaacaagaacggcgtggaccaggaaatcatcttcccacccatcaagaccgatgtgattacaatggaccccaaggacaactgctccaaggacgccaacgataccctgctgctccagctgaccaacaccagcgcctactacatgtacttgttgctgctgctgaagtccgtggtgtacttcgccatcatcacatgctgcctgctgcggagaaccgccttctgctgcaacggcgagaagtct

SEQ ID NO: 7699 - DNA, 2979 bp, synthetic construct
  source 1..2979: mol_type = other DNA
atggccttaccagtgaccgccttgctcctgccgctggccttgctgctccacgccgccaggccggaagtgcagctggttgaatctggcggaggactggttcagcctggcggatctctgagactgtcttgtgccgccagcggcttcagcttcagcgacttttggatgagctgggtccgacaggcccctggcaaaggacttgaatgggtcgccacaatcagccaggccggcagcgagaaggactacgtggactctgtgaagggcagattcaccatcagccgggacaacgccaagaagtccctgtacctccagatgaacagcctgagagccgaggacaccgccgtgtactattgtgcctctggcgtgtacagcttcgactacagaggccagggcaccctggtcacagtctcttctggtaccggcggaggcggatctggcggcggaggtagcggtggcggaggatctgaattcgacatccagatgacacagactacatcctccctgtctgcctctctgggagacagagtcaccatcagttgcagggcaagtcaggacattagtaagtacctgaactggtatcagcagaaaccagatggaactgttaaactcctgatctaccatacatcaagattacactcaggagtcccatcaaggttcagtggcagtgggtctggaacagattattctctcaccattagcaacctggagcaagaagatattgccacttacttttgccaacagggtaatacgcttccgtacacgttcggaggggggaccaagctggagatcacactcgaggacctgaagaacgtgttcccacctgaggtggccgtgttcgagcctagcgaggccgagatcagccacacccagaaagccaccctcgtgtgcctggctaccggcttctaccccgaccatgtggaactgtcttggtgggtcaacggcaaagaggtgcacagcggcgtgtgtaccgacccccagccactgaaagaacagcccgccctgaacgacagccggtactgcctgagcagcagactgagagtgtccgccaccttctggcagaacccccggaaccacttcagatgccaggtgcagttctacggcctgagcgagaacgacgagtggacccaggacagagccaagcccgtgacccagatcgtgtctgccgaagcctggggcagagccgatgatgtgattaagatccactggcaggaaaagaagtccaacaccatcctgggcagccaggaaggcaacaccatgaagaccaacgacacctacatgaagttcagctggctgaccgtgcccgagaagtccctggacaaagaacacagatgcatcgtgcggcacgaaaacaacaagaacggcgtggaccaggaaatcatcttcccacccatcaagaccgatgtgattacaatggaccccaaggacaactgctccaaggacgccaacgataccctgctgctccagctgaccaacaccagcgcctactacatgtacttgttgctgctgctgaagtccgtggtgtacttcgccatcatcacatgctgcctgctgcggagaaccgccttctgctgcaacggcgagaagtctagggccaagcgatctggatctggagcaacaaacttctcactactcaaacaagcaggtgacgtggaggagaatcccgggcctactagtatggactggatttggcgcatccttttccttgtcggcgctgctaccggcgcgcattccgggccccagctccagctgcaagagtctggacctggcctggtcaagcctagcgagacactgagcctgacctgtaccgtgtccggcgatagcatcagcagcggcgattactactggggctggatcagacagcctcctggcaaaggactggaatggatcggccacatctactacagcggcgtgacctactacaaccccagcctgaagtccagagtgaccatcagcgtggacaccagccggaaccagttctccctgaagctgtctagcgtgacagccgccgataccgccgtgtactactgcaccagagaggacagcagcaactggcggagtagaggccagggaacactggtcacagttagctctggatccggcggaggcggaagtggaggcggaggatctggcggcggaggctctttcgaagtgaaactgcaggagtcaggacctggcctggtggcgccctcacagagcctgtccgtcacatgcactgtctcaggggtctcattacccgactatggtgtaagctggattcgccagcctccacgaaagggtctggagtggctgggagtaatatggggtagtgaaaccacatactataattcagctctcaaatccagactgaccatcatcaaggacaactccaagagccaagttttcttaaaaatgaacagtctgcaaactgatgacacagccatttactactgtgccaaacattattactacggtggtagctatgctatggactactggggccaaggaacctcagtcaccgtctcctcaacgcgtatccagaaccctgatcctgccgtgtaccagctgcgggatagcaagagcagcgacaagagcgtgtgtctgttcaccgacttcgacagccagaccaacgtgtcccagagcaaggactccgacgtgtacatcaccgataagtgcgtgctggacatgcggagcatggacttcaagagcaactccgccgtggcctggtccaacaagtccgatttcgcctgcgccaacgccttcaacaacagcattatccccgaggacacattcttcccaagccccgagagcagcgactccaccgaccacgtgaagcccaaagagacagagaacaccaagcagcccagcaagagctgccacaagcccaaggccatcgtgcacaccgagaaagtgaacatgatgagcctgaccgtgctgggcctgcggatgctgttcgccaaaaccgtggccgtgaacttcctgctgaccgccaagctgttcttcctc

SEQ ID NO: 7700 - DNA, 2982 bp, synthetic construct
  source 1..2982: mol_type = other DNA
atggccttaccagtgaccgccttgctcctgccgctggccttgctgctccacgccgccaggccggaagtgcagctggttgaatctggcggaggactggttcagcctggcggatctctgagactgtcttgtgccgccagcggcttcagcttcagcgacttttggatgagctgggtccgacaggcccctggcaaaggacttgaatgggtcgccacaatcagccaggccggcagcgagaaggactacgtggactctgtgaagggcagattcaccatcagccgggacaacgccaagaagtccctgtacctccagatgaacagcctgagagccgaggacaccgccgtgtactattgtgcctctggcgtgtacagcttcgactacagaggccagggcaccctggtcacagtctcttctggtaccggcggaggcggatctggcggcggaggtagcggtggcggaggatctgaattcgagatcgtgatgacccagagccctgccaccctgtctctgagccctggcgaaagagccaccctgagctgtagagccagccaggacatcagcaagtacctgaactggtatcagcagaagcccggccaggcccccagactgctgatctaccacaccagcagactgcacagcggcatccccgccagattttctggctctggcagcggcaccgactacaccctgacaatcagcagcctccagcccgaggacttcgccgtgtacttctgtcagcaaggcaacaccctgccctacaccttcggccagggcaccaagctggaaatcaagctcgaggacctgaagaacgtgttcccacctgaggtggccgtgttcgagcctagcgaggccgagatcagccacacccagaaagccaccctcgtgtgcctggctaccggcttctaccccgaccatgtggaactgtcttggtgggtcaacggcaaagaggtgcacagcggcgtgtgtaccgacccccagccactgaaagaacagcccgccctgaacgacagccggtactgcctgagcagcagactgagagtgtccgccaccttctggcagaacccccggaaccacttcagatgccaggtgcagttctacggcctgagcgagaacgacgagtggacccaggacagagccaagcccgtgacccagatcgtgtctgccgaagcctggggcagagccgatgatgtgattaagatccactggcaggaaaagaagtccaacaccatcctgggcagccaggaaggcaacaccatgaagaccaacgacacctacatgaagttcagctggctgaccgtgcccgagaagtccctggacaaagaacacagatgcatcgtgcggcacgaaaacaacaagaacggcgtggaccaggaaatcatcttcccacccatcaagaccgatgtgattacaatggaccccaaggacaactgctccaaggacgccaacgataccctgctgctccagctgaccaacaccagcgcctactacatgtacttgttgctgctgctgaagtccgtggtgtacttcgccatcatcacatgctgcctgctgcggagaaccgccttctgctgcaacggcgagaagtctagggccaagcgatctggatctggagcaacaaacttctcactactcaaacaagcaggtgacgtggaggagaatcccgggcctactagtatggactggatttggcgcatccttttccttgtcggcgctgctaccggcgcgcattccgggccccagctccagctgcaagagtctggacctggcctggtcaagcctagcgagacactgagcctgacctgtaccgtgtccggcgatagcatcagcagcggcgattactactggggctggatcagacagcctcctggcaaaggactggaatggatcggccacatctactacagcggcgtgacctactacaaccccagcctgaagtccagagtgaccatcagcgtggacaccagccggaaccagttctccctgaagctgtctagcgtgacagccgccgataccgccgtgtactactgcaccagagaggacagcagcaactggcggagtagaggccagggaacactggtcacagttagctctggatccggcggaggcggaagtggaggcggaggatctggcggcggaggctctttcgaacaggtgcaactccaggaatctggccctggcctcgtgaagcccagcgagacactgagcctgacctgtaccgtgtccggcgtgtccctgcctgactatggcgtgtcctggatcagacagccccctggcaagggcctggaatggatcggagtgatttggggcagcgaaaccacctactacaacagctccctgaagtccagagtgaccatctccaaggacaactccaagaaccaggtgtccctgaagctgagcagcgtgacagccgccgacaccgccgtgtattactgcgccaagcactactactacggcggcagctacgctatggactactggggccagggaaccctcgtgaccgtgtctagtacgcgtatccagaaccctgatcctgccgtgtaccagctgcgggatagcaagagcagcgacaagagcgtgtgtctgttcaccgacttcgacagccagaccaacgtgtcccagagcaaggactccgacgtgtacatcaccgataagtgcgtgctggacatgcggagcatggacttcaagagcaactccgccgtggcctggtccaacaagtccgatttcgcctgcgccaacgccttcaacaacagcattatccccgaggacacattcttcccaagccccgagagcagcgactccaccgaccacgtgaagcccaaagagacagagaacaccaagcagcccagcaagagctgccacaagcccaaggccatcgtgcacaccgagaaagtgaacatgatgagcctgaccgtgctgggcctgcggatgctgttcgccaaaaccgtggccgtgaacttcctgctgaccgccaagctgttcttcctc

SEQ ID NO: 7701 - DNA, 2985 bp, synthetic construct
  source 1..2985: mol_type = other DNA
atggccttaccagtgaccgccttgctcctgccgctggccttgctgctccacgccgccaggccggaagtgcagctggttgaatctggcggaggactggttcagcctggcggatctctgagactgtcttgtgccgccagcggcttcagcttcagcgacttttggatgagctgggtccgacaggcccctggcaaaggacttgaatgggtcgccacaatcagccaggccggcagcgagaaggactacgtggactctgtgaagggcagattcaccatcagccgggacaacgccaagaagtccctgtacctccagatgaacagcctgagagccgaggacaccgccgtgtactattgtgcctctggcgtgtacagcttcgactacagaggccagggcaccctggtcacagtctcttctggtaccggcggaggcggatctggcggcggaggtagcggtggcggaggatctgaattcgacgagatcgtgctgacacagagccccgccaccctgtcactgtctccaggcgaaagagccaccctgagctgtagcgccagcagcagcgtgtcctacatgcactggtatcagcagaagcccggccaggcccccagactgctgatctacgataccagcaagctggcctccggcatccccgccagattttctggcagcggctccggcaccgacttcaccctgacaatcagcagcctggaacccgaggacgtggccgtgtactactgttttcaaggcagcgtgtaccccttcaccttcggccagggcaccaagctggaaatcaagagactcgaggacctgaagaacgtgttcccacctgaggtggccgtgttcgagcctagcgaggccgagatcagccacacccagaaagccaccctcgtgtgcctggctaccggcttctaccccgaccatgtggaactgtcttggtgggtcaacggcaaagaggtgcacagcggcgtgtgtaccgacccccagccactgaaagaacagcccgccctgaacgacagccggtactgcctgagcagcagactgagagtgtccgccaccttctggcagaacccccggaaccacttcagatgccaggtgcagttctacggcctgagcgagaacgacgagtggacccaggacagagccaagcccgtgacccagatcgtgtctgccgaagcctggggcagagccgatgatgtgattaagatccactggcaggaaaagaagtccaacaccatcctgggcagccaggaaggcaacaccatgaagaccaacgacacctacatgaagttcagctggctgaccgtgcccgagaagtccctggacaaagaacacagatgcatcgtgcggcacgaaaacaacaagaacggcgtggaccaggaaatcatcttcccacccatcaagaccgatgtgattacaatggaccccaaggacaactgctccaaggacgccaacgataccctgctgctccagctgaccaacaccagcgcctactacatgtacttgttgctgctgctgaagtccgtggtgtacttcgccatcatcacatgctgcctgctgcggagaaccgccttctgctgcaacggcgagaagtctagggccaagcgatctggatctggagcaacaaacttctcactactcaaacaagcaggtgacgtggaggagaatcccgggcctactagtatggactggatttggcgcatccttttccttgtcggcgctgctaccggcgcgcattccgggccccagctccagctgcaagagtctggacctggcctggtcaagcctagcgagacactgagcctgacctgtaccgtgtccggcgatagcatcagcagcggcgattactactggggctggatcagacagcctcctggcaaaggactggaatggatcggccacatctactacagcggcgtgacctactacaaccccagcctgaagtccagagtgaccatcagcgtggacaccagccggaaccagttctccctgaagctgtctagcgtgacagccgccgataccgccgtgtactactgcaccagagaggacagcagcaactggcggagtagaggccagggaacactggtcacagttagctctggatccggcggaggcggaagtggaggcggaggatctggcggcggaggctctttcgaacaggtgcagctccaggaatctggccctggcctcgtgaagcctagccagaccctgagcctgacctgtaccgtgtctggcggcagcatcagcacaagcggcatgggcgtgggctggatcagacagcaccctggcaagggcctggaatggatcggccacatttggtgggacgacgacaagcggtacaaccccgccctgaagtccagagtgaccatcagcgtggacaccagcaagaaccagttcagcctgaagctgagcagcgtgacagccgccgataccgccgtgtattattgcgcccggatggaactgtggtcctactacttcgactactggggccagggaaccctcgtgaccgtgtctagtacgcgtatccagaaccctgatcctgccgtgtaccagctgcgggatagcaagagcagcgacaagagcgtgtgtctgttcaccgacttcgacagccagaccaacgtgtcccagagcaaggactccgacgtgtacatcaccgataagtgcgtgctggacatgcggagcatggacttcaagagcaactccgccgtggcctggtccaacaagtccgatttcgcctgcgccaacgccttcaacaacagcattatccccgaggacacattcttcccaagccccgagagcagcgactccaccgaccacgtgaagcccaaagagacagagaacaccaagcagcccagcaagagctgccacaagcccaaggccatcgtgcacaccgagaaagtgaacatgatgagcctgaccgtgctgggcctgcggatgctgttcgccaaaaccgtggccgtgaacttcctgctgaccgccaagctgttcttcctc

SEQ ID NO: 7702 - DNA, 2979 bp, synthetic construct
  source 1..2979: mol_type = other DNA
atggccttaccagtgaccgccttgctcctgccgctggccttgctgctccacgccgccaggccggaagtgcagctggttgaatctggcggaggactggttcagcctggcggatctctgagactgtcttgtgccgccagcggcttcagcttcagcgacttttggatgagctgggtccgacaggcccctggcaaaggacttgaatgggtcgccacaatcagccaggccggcagcgagaaggactacgtggactctgtgaagggcagattcaccatcagccgggacaacgccaagaagtccctgtacctccagatgaacagcctgagagccgaggacaccgccgtgtactattgtgcctctggcgtgtacagcttcgactacagaggccagggcaccctggtcacagtctcttctggtaccggcggaggcggatctggcggcggaggtagcggtggcggaggatctgaattcgactacatccacgtgacacagagccctagcagcctgtccgtgtccatcggcgatagagtgaccatcaactgccagacctctcaaggcgtgggcagcgacctgcactggtatcagcacaaacctggcagagcccctaagctgctgatccaccatgccagctctgtggaagatggcgtgcccagcagattttccggcaccggatttcacaccagcttcaacctgacaatcaacgacctccaggccgacgacatcggcacctactactgtcaagtgctccagagcttcggcagaggcagcagactggatacaaaactcgaggacctgaagaacgtgttcccacctgaggtggccgtgttcgagcctagcgaggccgagatcagccacacccagaaagccaccctcgtgtgcctggctaccggcttctaccccgaccatgtggaactgtcttggtgggtcaacggcaaagaggtgcacagcggcgtgtgtaccgacccccagccactgaaagaacagcccgccctgaacgacagccggtactgcctgagcagcagactgagagtgtccgccaccttctggcagaacccccggaaccacttcagatgccaggtgcagttctacggcctgagcgagaacgacgagtggacccaggacagagccaagcccgtgacccagatcgtgtctgccgaagcctggggcagagccgatgatgtgattaagatccactggcaggaaaagaagtccaacaccatcctgggcagccaggaaggcaacaccatgaagaccaacgacacctacatgaagttcagctggctgaccgtgcccgagaagtccctggacaaagaacacagatgcatcgtgcggcacgaaaacaacaagaacggcgtggaccaggaaatcatcttcccacccatcaagaccgatgtgattacaatggaccccaaggacaactgctccaaggacgccaacgataccctgctgctccagctgaccaacaccagcgcctactacatgtacttgttgctgctgctgaagtccgtggtgtacttcgccatcatcacatgctgcctgctgcggagaaccgccttctgctgcaacggcgagaagtctagggccaagcgatctggatctggagcaacaaacttctcactactcaaacaagcaggtgacgtggaggagaatcccgggcctactagtatggactggatttggcgcatccttttccttgtcggcgctgctaccggcgcgcattccgggccccagctccagctgcaagagtctggacctggcctggtcaagcctagcgagacactgagcctgacctgtaccgtgtccggcgatagcatcagcagcggcgattactactggggctggatcagacagcctcctggcaaaggactggaatggatcggccacatctactacagcggcgtgacctactacaaccccagcctgaagtccagagtgaccatcagcgtggacaccagccggaaccagttctccctgaagctgtctagcgtgacagccgccgataccgccgtgtactactgcaccagagaggacagcagcaactggcggagtagaggccagggaacactggtcacagttagctctggatccggcggaggcggaagtggaggcggaggatctggcggcggaggctctttcgaaagggcacacctggtgcagtctggcaccgccatgaagaaacctggcgcttccgtcagagtgtcctgtcagacaagcggctacaccttcacagcccacatcctgttctggttcagacaggccccaggcagaggactggaatgggtcggatggatcaagccccagtacggggccgtgaatttcggcggaggcttcagagacagagtgaccctgaccagggacgtgtaccgggaaatcgcctacatggacatccggggcctgaagcctgatgacaccgccgtgtactactgcgccagggatagaagctacggcgacagctcttgggctctcgatgcttggggacagggcacaacagtggtggtgtctgctacgcgtatccagaaccctgatcctgccgtgtaccagctgcgggatagcaagagcagcgacaagagcgtgtgtctgttcaccgacttcgacagccagaccaacgtgtcccagagcaaggactccgacgtgtacatcaccgataagtgcgtgctggacatgcggagcatggacttcaagagcaactccgccgtggcctggtccaacaagtccgatttcgcctgcgccaacgccttcaacaacagcattatccccgaggacacattcttcccaagccccgagagcagcgactccaccgaccacgtgaagcccaaagagacagagaacaccaagcagcccagcaagagctgccacaagcccaaggccatcgtgcacaccgagaaagtgaacatgatgagcctgaccgtgctgggcctgcggatgctgttcgccaaaaccgtggccgtgaacttcctgctgaccgccaagctgttcttcctc

SEQ ID NO: 7703 - DNA, 3009 bp, synthetic construct
  source 1..3009: mol_type = other DNA
atggccttaccagtgaccgccttgctcctgccgctggccttgctgctccacgccgccaggccggaagtgcagctggttgaatctggcggaggactggttcagcctggcggatctctgagactgtcttgtgccgccagcggcttcagcttcagcgacttttggatgagctgggtccgacaggcccctggcaaaggacttgaatgggtcgccacaatcagccaggccggcagcgagaaggactacgtggactctgtgaagggcagattcaccatcagccgggacaacgccaagaagtccctgtacctccagatgaacagcctgagagccgaggacaccgccgtgtactattgtgcctctggcgtgtacagcttcgactacagaggccagggcaccctggtcacagtctcttctggtaccggcggaggcggatctggcggcggaggtagcggtggcggaggatctgaattcgacgtgcagatgatccagacccccgatagcctggccgtgtccctgggacagagagccaccatctcttgcagagccagcgagagcgtggacaactacggcatcagcttcatgcactggtatcagcagaagcccggccagagccccaagctgctgatctacagagcctccaacctggaaagcggcatccccgccagattttccggcagcggcagcagaaccgacttcaccctgaccatcaaccccgtggaaaccgacgacgtggcaacctactactgccagcagaacaacaaggacccccccacctttggcggaggcaccaagctggaaatcaagctcgaggacctgaagaacgtgttcccacctgaggtggccgtgttcgagcctagcgaggccgagatcagccacacccagaaagccaccctcgtgtgcctggctaccggcttctaccccgaccatgtggaactgtcttggtgggtcaacggcaaagaggtgcacagcggcgtgtgtaccgacccccagccactgaaagaacagcccgccctgaacgacagccggtactgcctgagcagcagactgagagtgtccgccaccttctggcagaacccccggaaccacttcagatgccaggtgcagttctacggcctgagcgagaacgacgagtggacccaggacagagccaagcccgtgacccagatcgtgtctgccgaagcctggggcagagccgatgatgtgattaagatccactggcaggaaaagaagtccaacaccatcctgggcagccaggaaggcaacaccatgaagaccaacgacacctacatgaagttcagctggctgaccgtgcccgagaagtccctggacaaagaacacagatgcatcgtgcggcacgaaaacaacaagaacggcgtggaccaggaaatcatcttcccacccatcaagaccgatgtgattacaatggaccccaaggacaactgctccaaggacgccaacgataccctgctgctccagctgaccaacaccagcgcctactacatgtacttgttgctgctgctgaagtccgtggtgtacttcgccatcatcacatgctgcctgctgcggagaaccgccttctgctgcaacggcgagaagtctagggccaagcgatctggatctggagcaacaaacttctcactactcaaacaagcaggtgacgtggaggagaatcccgggcctactagtatggactggatttggcgcatccttttccttgtcggcgctgctaccggcgcgcattccgggccccagctccagctgcaagagtctggacctggcctggtcaagcctagcgagacactgagcctgacctgtaccgtgtccggcgatagcatcagcagcggcgattactactggggctggatcagacagcctcctggcaaaggactggaatggatcggccacatctactacagcggcgtgacctactacaaccccagcctgaagtccagagtgaccatcagcgtggacaccagccggaaccagttctccctgaagctgtctagcgtgacagccgccgataccgccgtgtactactgcaccagagaggacagcagcaactggcggagtagaggccagggaacactggtcacagttagctctggatccggcggaggcggaagtggaggcggaggatctggcggcggaggctctttcgaagggggaggcggctctcaggtgcaactccagcagtctggcgctgagcttgtgaagcctggggccagcgtgaagattagctgcaaggccagcggctacgccttcagcagctactggatgaactgggtcaagcagcggcctggcaagggcctggaatggatcggccaaatctaccccggcgacggcgacaccacctacaacggcaagttcaagggcaaggccaccctgacagccgacaagagcagcagcaccgtgtacatgcaactgaacagcctgaccagcgaggacagcgccgtgtacttctgcgtgcggtactactacggcagctccggctacttcgactattggggccagggcaccacactgaccgtgtcctctacgcgtatccagaaccctgatcctgccgtgtaccagctgcgggatagcaagagcagcgacaagagcgtgtgtctgttcaccgacttcgacagccagaccaacgtgtcccagagcaaggactccgacgtgtacatcaccgataagtgcgtgctggacatgcggagcatggacttcaagagcaactccgccgtggcctggtccaacaagtccgatttcgcctgcgccaacgccttcaacaacagcattatccccgaggacacattcttcccaagccccgagagcagcgactccaccgaccacgtgaagcccaaagagacagagaacaccaagcagcccagcaagagctgccacaagcccaaggccatcgtgcacaccgagaaagtgaacatgatgagcctgaccgtgctgggcctgcggatgctgttcgccaaaaccgtggccgtgaacttcctgctgaccgccaagctgttcttcctc

SEQ ID NO: 7704 - DNA, 2982 bp, synthetic construct
  source 1..2982: mol_type = other DNA
atggccttaccagtgaccgccttgctcctgccgctggccttgctgctccacgccgccaggccggaagtgcagctggttgaatctggcggaggactggttcagcctggcggatctctgagactgtcttgtgccgccagcggcttcagcttcagcgacttttggatgagctgggtccgacaggcccctggcaaaggacttgaatgggtcgccacaatcagccaggccggcagcgagaaggactacgtggactctgtgaagggcagattcaccatcagccgggacaacgccaagaagtccctgtacctccagatgaacagcctgagagccgaggacaccgccgtgtactattgtgcctctggcgtgtacagcttcgactacagaggccagggcaccctggtcacagtctcttctggtaccggcggaggcggatctggcggcggaggtagcggtggcggaggatctgaattcgacgtgcagatgatccagacccccagcagcctgtctgccagcctgggcgatagagtgaccatcagctgtcgggccagccaggacatcggcaactacctgaactggtatcagcagaaacccgacggcaccgtgaagctgctgatctactacaccagcagactgcacagcggcgtgcccagcagattttctggcagcggctctggcaccgagtacagcctgaccatctccaacctggaacaggaagatattgctacctacttctgtcagcaaggcagcgccctgccccctacatttggcggcggaacaaagctggaaatcaacctcgaggacctgaagaacgtgttcccacctgaggtggccgtgttcgagcctagcgaggccgagatcagccacacccagaaagccaccctcgtgtgcctggctaccggcttctaccccgaccatgtggaactgtcttggtgggtcaacggcaaagaggtgcacagcggcgtgtgtaccgacccccagccactgaaagaacagcccgccctgaacgacagccggtactgcctgagcagcagactgagagtgtccgccaccttctggcagaacccccggaaccacttcagatgccaggtgcagttctacggcctgagcgagaacgacgagtggacccaggacagagccaagcccgtgacccagatcgtgtctgccgaagcctggggcagagccgatgatgtgattaagatccactggcaggaaaagaagtccaacaccatcctgggcagccaggaaggcaacaccatgaagaccaacgacacctacatgaagttcagctggctgaccgtgcccgagaagtccctggacaaagaacacagatgcatcgtgcggcacgaaaacaacaagaacggcgtggaccaggaaatcatcttcccacccatcaagaccgatgtgattacaatggaccccaaggacaactgctccaaggacgccaacgataccctgctgctccagctgaccaacaccagcgcctactacatgtacttgttgctgctgctgaagtccgtggtgtacttcgccatcatcacatgctgcctgctgcggagaaccgccttctgctgcaacggcgagaagtctagggccaagcgatctggatctggagcaacaaacttctcactactcaaacaagcaggtgacgtggaggagaatcccgggcctactagtatggactggatttggcgcatccttttccttgtcggcgctgctaccggcgcgcattccgggccccagctccagctgcaagagtctggacctggcctggtcaagcctagcgagacactgagcctgacctgtaccgtgtccggcgatagcatcagcagcggcgattactactggggctggatcagacagcctcctggcaaaggactggaatggatcggccacatctactacagcggcgtgacctactacaaccccagcctgaagtccagagtgaccatcagcgtggacaccagccggaaccagttctccctgaagctgtctagcgtgacagccgccgataccgccgtgtactactgcaccagagaggacagcagcaactggcggagtagaggccagggaacactggtcacagttagctctggatccggcggaggcggaagtggaggcggaggatctggcggcggaggctctttcgaagctctccagctccagcagtctggcgcagaactcgtgcggcctggcgcttctgtgaccctgagctgtaaagccagcggctacaccttcaccgactacgagatgcactgggtcaagcagacccctgtgcacggcctggaatggatcggagccatcgaccctgagacaggcggcaccgcctacaaccagaagttcgagggcaaggccatcctgaccgccgacaagagcagcagcacagcctacatggaactgcggagcctgacctccgaggacagccccgtgtactactgtgccagacggcggtactacggcagcagctccttcgactattggggccagggcaccaccctgaccgtgtctagtacgcgtatccagaaccctgatcctgccgtgtaccagctgcgggatagcaagagcagcgacaagagcgtgtgtctgttcaccgacttcgacagccagaccaacgtgtcccagagcaaggactccgacgtgtacatcaccgataagtgcgtgctggacatgcggagcatggacttcaagagcaactccgccgtggcctggtccaacaagtccgatttcgcctgcgccaacgccttcaacaacagcattatccccgaggacacattcttcccaagccccgagagcagcgactccaccgaccacgtgaagcccaaagagacagagaacaccaagcagcccagcaagagctgccacaagcccaaggccatcgtgcacaccgagaaagtgaacatgatgagcctgaccgtgctgggcctgcggatgctgttcgccaaaaccgtggccgtgaacttcctgctgaccgccaagctgttcttcctc

SEQ ID NO: 7705 - DNA, 2994 bp, synthetic construct
  source 1..2994: mol_type = other DNA
atggccttaccagtgaccgccttgctcctgccgctggccttgctgctccacgccgccaggccggaagtgcagctggttgaatctggcggaggactggttcagcctggcggatctctgagactgtcttgtgccgccagcggcttcagcttcagcgacttttggatgagctgggtccgacaggcccctggcaaaggacttgaatgggtcgccacaatcagccaggccggcagcgagaaggactacgtggactctgtgaagggcagattcaccatcagccgggacaacgccaagaagtccctgtacctccagatgaacagcctgagagccgaggacaccgccgtgtactattgtgcctctggcgtgtacagcttcgactacagaggccagggcaccctggtcacagtctcttctggtaccggcggaggcggatctggcggcggaggtagcggtggcggaggatctgaattcgacatcgtcctgacccagtccccagccagcctggcggtgtccctgggtcaacgagctaccatttcctgcagagcctctaagtccgtatccacttccggctatagttacctgcattggtaccaacagaaaccagggcagccacccaagctgctcatctatctggcctcaaacctggagtccggcgtgcccgccagattctccggaagtgggagcggcaccgactttacattgaacatccacccagtcgaagaggaagatgctgccacttattactgtcagcactccagggagctgccatttacatttggctctggcacaaaactggagatcaaactcgaggacctgaagaacgtgttcccacctgaggtggccgtgttcgagcctagcgaggccgagatcagccacacccagaaagccaccctcgtgtgcctggctaccggcttctaccccgaccatgtggaactgtcttggtgggtcaacggcaaagaggtgcacagcggcgtgtgtaccgacccccagccactgaaagaacagcccgccctgaacgacagccggtactgcctgagcagcagactgagagtgtccgccaccttctggcagaacccccggaaccacttcagatgccaggtgcagttctacggcctgagcgagaacgacgagtggacccaggacagagccaagcccgtgacccagatcgtgtctgccgaagcctggggcagagccgatgatgtgattaagatccactggcaggaaaagaagtccaacaccatcctgggcagccaggaaggcaacaccatgaagaccaacgacacctacatgaagttcagctggctgaccgtgcccgagaagtccctggacaaagaacacagatgcatcgtgcggcacgaaaacaacaagaacggcgtggaccaggaaatcatcttcccacccatcaagaccgatgtgattacaatggaccccaaggacaactgctccaaggacgccaacgataccctgctgctccagctgaccaacaccagcgcctactacatgtacttgttgctgctgctgaagtccgtggtgtacttcgccatcatcacatgctgcctgctgcggagaaccgccttctgctgcaacggcgagaagtctagggccaagcgatctggatctggagcaacaaacttctcactactcaaacaagcaggtgacgtggaggagaatcccgggcctactagtatggactggatttggcgcatccttttccttgtcggcgctgctaccggcgcgcattccgggccccagctccagctgcaagagtctggacctggcctggtcaagcctagcgagacactgagcctgacctgtaccgtgtccggcgatagcatcagcagcggcgattactactggggctggatcagacagcctcctggcaaaggactggaatggatcggccacatctactacagcggcgtgacctactacaaccccagcctgaagtccagagtgaccatcagcgtggacaccagccggaaccagttctccctgaagctgtctagcgtgacagccgccgataccgccgtgtactactgcaccagagaggacagcagcaactggcggagtagaggccagggaacactggtcacagttagctctggatccggcggaggcggaagtggaggcggaggatctggcggcggaggctctttcgaacaggttcagctggtcgagtccgggggaggtctggtacagccgggtggcagcctcaagctgtcatgtgccgcatctggttttgactttagcaggtattggatgagctgggtccgccaggccccgggcaagggacttgagtggattggagaaataaaccctacttccagcacaatcaacttcacaccttctttgaaagataaggtttttatctctcgggataacgctaaaaacacactgtacttgcagatgtctaaggtgcgaagcgaagacaccgccctctattattgcgcccggggtaattactaccgctatggggatgcgatggactattgggggcaaggtacctccgtcacggtctcaacgcgtatccagaaccctgatcctgccgtgtaccagctgcgggatagcaagagcagcgacaagagcgtgtgtctgttcaccgacttcgacagccagaccaacgtgtcccagagcaaggactccgacgtgtacatcaccgataagtgcgtgctggacatgcggagcatggacttcaagagcaactccgccgtggcctggtccaacaagtccgatttcgcctgcgccaacgccttcaacaacagcattatccccgaggacacattcttcccaagccccgagagcagcgactccaccgaccacgtgaagcccaaagagacagagaacaccaagcagcccagcaagagctgccacaagcccaaggccatcgtgcacaccgagaaagtgaacatgatgagcctgaccgtgctgggcctgcggatgctgttcgccaaaaccgtggccgtgaacttcctgctgaccgccaagctgttcttcctc

SEQ ID NO: 7706 - DNA, 2988 bp, synthetic construct
  source 1..2988: mol_type = other DNA
atggccttaccagtgaccgccttgctcctgccgctggccttgctgctccacgccgccaggccggaagtgcagctggttgaatctggcggaggactggttcagcctggcggatctctgagactgtcttgtgccgccagcggcttcagcttcagcgacttttggatgagctgggtccgacaggcccctggcaaaggacttgaatgggtcgccacaatcagccaggccggcagcgagaaggactacgtggactctgtgaagggcagattcaccatcagccgggacaacgccaagaagtccctgtacctccagatgaacagcctgagagccgaggacaccgccgtgtactattgtgcctctggcgtgtacagcttcgactacagaggccagggcaccctggtcacagtctcttctggtaccggcggaggcggatctggcggcggaggtagcggtggcggaggatctgaattcgacatccagatgacccagagccctagctcactgagcgccagcgtgggcgacagggtgaccattacctgctccgccagccaggacatcagcaactacctgaactggtaccagcagaagcccggcaaggcccccaagctgctgatctactacacctccaacctgcactccggcgtgcccagcaggttcagcggaagcggcagcggcaccgatttcaccctgaccatctccagcctgcagcccgaggacttcgccacctactactgccagcagtacaggaagctcccctggactttcggccagggcaccaaactggagatcaagcgtctcgaggacctgaagaacgtgttcccacctgaggtggccgtgttcgagcctagcgaggccgagatcagccacacccagaaagccaccctcgtgtgcctggctaccggcttctaccccgaccatgtggaactgtcttggtgggtcaacggcaaagaggtgcacagcggcgtgtgtaccgacccccagccactgaaagaacagcccgccctgaacgacagccggtactgcctgagcagcagactgagagtgtccgccaccttctggcagaacccccggaaccacttcagatgccaggtgcagttctacggcctgagcgagaacgacgagtggacccaggacagagccaagcccgtgacccagatcgtgtctgccgaagcctggggcagagccgatgatgtgattaagatccactggcaggaaaagaagtccaacaccatcctgggcagccaggaaggcaacaccatgaagaccaacgacacctacatgaagttcagctggctgaccgtgcccgagaagtccctggacaaagaacacagatgcatcgtgcggcacgaaaacaacaagaacggcgtggaccaggaaatcatcttcccacccatcaagaccgatgtgattacaatggaccccaaggacaactgctccaaggacgccaacgataccctgctgctccagctgaccaacaccagcgcctactacatgtacttgttgctgctgctgaagtccgtggtgtacttcgccatcatcacatgctgcctgctgcggagaaccgccttctgctgcaacggcgagaagtctagggccaagcgatctggatctggagcaacaaacttctcactactcaaacaagcaggtgacgtggaggagaatcccgggcctactagtatggactggatttggcgcatccttttccttgtcggcgctgctaccggcgcgcattccgggccccagctccagctgcaagagtctggacctggcctggtcaagcctagcgagacactgagcctgacctgtaccgtgtccggcgatagcatcagcagcggcgattactactggggctggatcagacagcctcctggcaaaggactggaatggatcggccacatctactacagcggcgtgacctactacaaccccagcctgaagtccagagtgaccatcagcgtggacaccagccggaaccagttctccctgaagctgtctagcgtgacagccgccgataccgccgtgtactactgcaccagagaggacagcagcaactggcggagtagaggccagggaacactggtcacagttagctctggatccggcggaggcggaagtggaggcggaggatctggcggcggaggctctttcgaacaggtgcagctggtccagagcggcgccgaagtgaagaagcccggcagctccgtgaaagtgagctgcaaggccagcggcggcaccttcagcaactactggatgcactgggtgaggcaggcccccggacagggcctggagtggatgggcgccacctacaggggccacagcgacacctactacaaccagaagttcaagggccgggtgaccatcaccgccgacaagagcaccagcaccgcctacatggaactgagcagcctcaggagcgaggacaccgctgtgtattactgcgccaggggcgccatctacgacggctacgacgtgctggacaactggggccagggcacactggtgaccgtgtccagcacgcgtatccagaaccctgatcctgccgtgtaccagctgcgggatagcaagagcagcgacaagagcgtgtgtctgttcaccgacttcgacagccagaccaacgtgtcccagagcaaggactccgacgtgtacatcaccgataagtgcgtgctggacatgcggagcatggacttcaagagcaactccgccgtggcctggtccaacaagtccgatttcgcctgcgccaacgccttcaacaacagcattatccccgaggacacattcttcccaagccccgagagcagcgactccaccgaccacgtgaagcccaaagagacagagaacaccaagcagcccagcaagagctgccacaagcccaaggccatcgtgcacaccgagaaagtgaacatgatgagcctgaccgtgctgggcctgcggatgctgttcgccaaaaccgtggccgtgaacttcctgctgaccgccaagctgttcttcctc

SEQ ID NO: 7707 - DNA, 2988 bp, synthetic construct
  source 1..2988: mol_type = other DNA
atggccttaccagtgaccgccttgctcctgccgctggccttgctgctccacgccgccaggccggaagtgcagctggttgaatctggcggaggactggttcagcctggcggatctctgagactgtcttgtgccgccagcggcttcagcttcagcgacttttggatgagctgggtccgacaggcccctggcaaaggacttgaatgggtcgccacaatcagccaggccggcagcgagaaggactacgtggactctgtgaagggcagattcaccatcagccgggacaacgccaagaagtccctgtacctccagatgaacagcctgagagccgaggacaccgccgtgtactattgtgcctctggcgtgtacagcttcgactacagaggccagggcaccctggtcacagtctcttctggtaccggcggaggcggatctggcggcggaggtagcggtggcggaggatctgaattcgacatcgtgctgacacagagccctgccaccctgtctctgagccctggcgatagagccaccatcagctgtagagccagcgagagcgtgaccatcctgggcagccacctgatctactggtatcagcagaagcccggccagccccccagactgctgattcagctggcctccaatgtgcagaccggcgtgccagccagattttccggcagcggcagcagaaccgacttcaccctgaccatcagcagcgtggaacccgaggacttcgccgtgtactactgcctccagagccggaccatccccagaacattcggccagggcaccaagctggaaatcaagagactcgaggacctgaagaacgtgttcccacctgaggtggccgtgttcgagcctagcgaggccgagatcagccacacccagaaagccaccctcgtgtgcctggctaccggcttctaccccgaccatgtggaactgtcttggtgggtcaacggcaaagaggtgcacagcggcgtgtgtaccgacccccagccactgaaagaacagcccgccctgaacgacagccggtactgcctgagcagcagactgagagtgtccgccaccttctggcagaacccccggaaccacttcagatgccaggtgcagttctacggcctgagcgagaacgacgagtggacccaggacagagccaagcccgtgacccagatcgtgtctgccgaagcctggggcagagccgatgatgtgattaagatccactggcaggaaaagaagtccaacaccatcctgggcagccaggaaggcaacaccatgaagaccaacgacacctacatgaagttcagctggctgaccgtgcccgagaagtccctggacaaagaacacagatgcatcgtgcggcacgaaaacaacaagaacggcgtggaccaggaaatcatcttcccacccatcaagaccgatgtgattacaatggaccccaaggacaactgctccaaggacgccaacgataccctgctgctccagctgaccaacaccagcgcctactacatgtacttgttgctgctgctgaagtccgtggtgtacttcgccatcatcacatgctgcctgctgcggagaaccgccttctgctgcaacggcgagaagtctagggccaagcgatctggatctggagcaacaaacttctcactactcaaacaagcaggtgacgtggaggagaatcccgggcctactagtatggactggatttggcgcatccttttccttgtcggcgctgctaccggcgcgcattccgggccccagctccagctgcaagagtctggacctggcctggtcaagcctagcgagacactgagcctgacctgtaccgtgtccggcgatagcatcagcagcggcgattactactggggctggatcagacagcctcctggcaaaggactggaatggatcggccacatctactacagcggcgtgacctactacaaccccagcctgaagtccagagtgaccatcagcgtggacaccagccggaaccagttctccctgaagctgtctagcgtgacagccgccgataccgccgtgtactactgcaccagagaggacagcagcaactggcggagtagaggccagggaacactggtcacagttagctctggatccggcggaggcggaagtggaggcggaggatctggcggcggaggctctttcgaacaggtgcagctggtgcagtctggccccgaagtgaagaaacccggcgagtccgtgaagatcagctgcaaggccagcggctacaccttccggcactacagcatgaactgggtcaagcaggccccaggccagggcctgaagtggatgggcagaatcaacaccgagagcggcgtgcccatctacgccgacgacttcaagggccggttcagcttcaccgtggacaccagcgccagcaccgcctacctggaaatctccagcctgaccagcgaggataccgccgtgtatttctgctccaacgactacctgtacagcctggatttctggggccagggaaccaccctgacagtgtcctctacgcgtatccagaaccctgatcctgccgtgtaccagctgcgggatagcaagagcagcgacaagagcgtgtgtctgttcaccgacttcgacagccagaccaacgtgtcccagagcaaggactccgacgtgtacatcaccgataagtgcgtgctggacatgcggagcatggacttcaagagcaactccgccgtggcctggtccaacaagtccgatttcgcctgcgccaacgccttcaacaacagcattatccccgaggacacattcttcccaagccccgagagcagcgactccaccgaccacgtgaagcccaaagagacagagaacaccaagcagcccagcaagagctgccacaagcccaaggccatcgtgcacaccgagaaagtgaacatgatgagcctgaccgtgctgggcctgcggatgctgttcgccaaaaccgtggccgtgaacttcctgctgaccgccaagctgttcttcctc

SEQ ID NO: 7708 - DNA, 2991 bp, synthetic construct
  source 1..2991: mol_type = other DNA
atggccttaccagtgaccgccttgctcctgccgctggccttgctgctccacgccgccaggccggaagtgcagctggttgaatctggcggaggactggttcagcctggcggatctctgagactgtcttgtgccgccagcggcttcagcttcagcgacttttggatgagctgggtccgacaggcccctggcaaaggacttgaatgggtcgccacaatcagccaggccggcagcgagaaggactacgtggactctgtgaagggcagattcaccatcagccgggacaacgccaagaagtccctgtacctccagatgaacagcctgagagccgaggacaccgccgtgtactattgtgcctctggcgtgtacagcttcgactacagaggccagggcaccctggtcacagtctcttctggtaccggcggaggcggatctggcggcggaggtagcggtggcggaggatctgaattccagtctgtgctgacacagcctcctagtgtgtctggcgctcctggacagagagtgaccatcagctgtacaggcagcagcagcaatatcggagccggctttgacgtgcactggtatcagcagctgcctggcacagcccctaaactgctgatctacggcaacagcaacagacccagcggcgtgcccgatagattttccggctctaagagcggcacaagcgccagcctggctattactggactccaggccgaggacgaggccgactactactgtcagagctacgacagcagcctgagcggctacgttttcggcaccggcaccaaagtgacagtgcttggtctcgaggacctgaagaacgtgttcccacctgaggtggccgtgttcgagcctagcgaggccgagatcagccacacccagaaagccaccctcgtgtgcctggctaccggcttctaccccgaccatgtggaactgtcttggtgggtcaacggcaaagaggtgcacagcggcgtgtgtaccgacccccagccactgaaagaacagcccgccctgaacgacagccggtactgcctgagcagcagactgagagtgtccgccaccttctggcagaacccccggaaccacttcagatgccaggtgcagttctacggcctgagcgagaacgacgagtggacccaggacagagccaagcccgtgacccagatcgtgtctgccgaagcctggggcagagccgatgatgtgattaagatccactggcaggaaaagaagtccaacaccatcctgggcagccaggaaggcaacaccatgaagaccaacgacacctacatgaagttcagctggctgaccgtgcccgagaagtccctggacaaagaacacagatgcatcgtgcggcacgaaaacaacaagaacggcgtggaccaggaaatcatcttcccacccatcaagaccgatgtgattacaatggaccccaaggacaactgctccaaggacgccaacgataccctgctgctccagctgaccaacaccagcgcctactacatgtacttgttgctgctgctgaagtccgtggtgtacttcgccatcatcacatgctgcctgctgcggagaaccgccttctgctgcaacggcgagaagtctagggccaagcgatctggatctggagcaacaaacttctcactactcaaacaagcaggtgacgtggaggagaatcccgggcctactagtatggactggatttggcgcatccttttccttgtcggcgctgctaccggcgcgcattccgggccccagctccagctgcaagagtctggacctggcctggtcaagcctagcgagacactgagcctgacctgtaccgtgtccggcgatagcatcagcagcggcgattactactggggctggatcagacagcctcctggcaaaggactggaatggatcggccacatctactacagcggcgtgacctactacaaccccagcctgaagtccagagtgaccatcagcgtggacaccagccggaaccagttctccctgaagctgtctagcgtgacagccgccgataccgccgtgtactactgcaccagagaggacagcagcaactggcggagtagaggccagggaacactggtcacagttagctctggatccggcggaggcggaagtggaggcggaggatctggcggcggaggctctttcgaacaagttcagctggttcagagcggagccgaagtgaagaaacctggggcctctgtgaaggtgtcctgcaaggcttccggctacacctttaccgattactacatgcactgggtccgacaggctcccggccaaagacttgaatggatgggctggatcaaccccaacagcggcggcacaaattacgcccagaagttccaggaccggatcaccgtgaccagagacaccagctccaacaccggctacatggaactgacccggctgagatccgatgacaccgccgtgtactactgcgctagaagcccttactccggcgtgctggataagtggggacagggcacactggtcaccgtgtcatctacgcgtatccagaaccctgatcctgccgtgtaccagctgcgggatagcaagagcagcgacaagagcgtgtgtctgttcaccgacttcgacagccagaccaacgtgtcccagagcaaggactccgacgtgtacatcaccgataagtgcgtgctggacatgcggagcatggacttcaagagcaactccgccgtggcctggtccaacaagtccgatttcgcctgcgccaacgccttcaacaacagcattatccccgaggacacattcttcccaagccccgagagcagcgactccaccgaccacgtgaagcccaaagagacagagaacaccaagcagcccagcaagagctgccacaagcccaaggccatcgtgcacaccgagaaagtgaacatgatgagcctgaccgtgctgggcctgcggatgctgttcgccaaaaccgtggccgtgaacttcctgctgaccgccaagctgttcttcctc

SEQ ID NO: 7709 - DNA, 2982 bp, synthetic construct
  source 1..2982: mol_type = other DNA
atggccttaccagtgaccgccttgctcctgccgctggccttgctgctccacgccgccaggccggaagtgcagctggttgaatctggcggaggactggttcagcctggcggatctctgagactgtcttgtgccgccagcggcttcagcttcagcgacttttggatgagctgggtccgacaggcccctggcaaaggacttgaatgggtcgccacaatcagccaggccggcagcgagaaggactacgtggactctgtgaagggcagattcaccatcagccgggacaacgccaagaagtccctgtacctccagatgaacagcctgagagccgaggacaccgccgtgtactattgtgcctctggcgtgtacagcttcgactacagaggccagggcaccctggtcacagtctcttctggtaccggcggaggcggatctggcggcggaggtagcggtggcggaggatctgaattccaggctgttctgacacagcctccatctgcctctggcacacctggacagagagtgaccatctcctgtagcggcagcagcagcaacatcggcagctacaccgtgtcctggtatcagcagctccctggaacagcccctaagttcctgatctacagcaacaaccagcggcctagcggcgtgcccgatagattttctggcagcaagagcggcacaagcgccagcctggctatttctggactccagtctgaggacgaggccgactactattgtgccgcctgggacgatagcctgaacggctatgtgtttggcaccggcaccaaagtgacagtgcttggtctcgaggacctgaagaacgtgttcccacctgaggtggccgtgttcgagcctagcgaggccgagatcagccacacccagaaagccaccctcgtgtgcctggctaccggcttctaccccgaccatgtggaactgtcttggtgggtcaacggcaaagaggtgcacagcggcgtgtgtaccgacccccagccactgaaagaacagcccgccctgaacgacagccggtactgcctgagcagcagactgagagtgtccgccaccttctggcagaacccccggaaccacttcagatgccaggtgcagttctacggcctgagcgagaacgacgagtggacccaggacagagccaagcccgtgacccagatcgtgtctgccgaagcctggggcagagccgatgatgtgattaagatccactggcaggaaaagaagtccaacaccatcctgggcagccaggaaggcaacaccatgaagaccaacgacacctacatgaagttcagctggctgaccgtgcccgagaagtccctggacaaagaacacagatgcatcgtgcggcacgaaaacaacaagaacggcgtggaccaggaaatcatcttcccacccatcaagaccgatgtgattacaatggaccccaaggacaactgctccaaggacgccaacgataccctgctgctccagctgaccaacaccagcgcctactacatgtacttgttgctgctgctgaagtccgtggtgtacttcgccatcatcacatgctgcctgctgcggagaaccgccttctgctgcaacggcgagaagtctagggccaagcgatctggatctggagcaacaaacttctcactactcaaacaagcaggtgacgtggaggagaatcccgggcctactagtatggactggatttggcgcatccttttccttgtcggcgctgctaccggcgcgcattccgggccccagctccagctgcaagagtctggacctggcctggtcaagcctagcgagacactgagcctgacctgtaccgtgtccggcgatagcatcagcagcggcgattactactggggctggatcagacagcctcctggcaaaggactggaatggatcggccacatctactacagcggcgtgacctactacaaccccagcctgaagtccagagtgaccatcagcgtggacaccagccggaaccagttctccctgaagctgtctagcgtgacagccgccgataccgccgtgtactactgcaccagagaggacagcagcaactggcggagtagaggccagggaacactggtcacagttagctctggatccggcggaggcggaagtggaggcggaggatctggcggcggaggctctttcgaagttcaactggttcagagcggagccgaagtgaagaagcctggcgagagcctgaagattagctgcaaaggcagcggctacgacttcaccacctactggatcggctgggtccgacagatgcctggcaaaggactggaatggatgggcatcatctaccccggcgacagcgacaccagatacagccctagcgttagaggccgcgtgaccatcagcgccgacaagtctatcaacaccgcctacctccagtggtccagcctggaagcctctgacaccgccatgtactactgcgccagaatgtggaccttcagccaggatggatggggccagggaacactggtcacagtgtcatctacgcgtatccagaaccctgatcctgccgtgtaccagctgcgggatagcaagagcagcgacaagagcgtgtgtctgttcaccgacttcgacagccagaccaacgtgtcccagagcaaggactccgacgtgtacatcaccgataagtgcgtgctggacatgcggagcatggacttcaagagcaactccgccgtggcctggtccaacaagtccgatttcgcctgcgccaacgccttcaacaacagcattatccccgaggacacattcttcccaagccccgagagcagcgactccaccgaccacgtgaagcccaaagagacagagaacaccaagcagcccagcaagagctgccacaagcccaaggccatcgtgcacaccgagaaagtgaacatgatgagcctgaccgtgctgggcctgcggatgctgttcgccaaaaccgtggccgtgaacttcctgctgaccgccaagctgttcttcctc

SEQ ID NO: 7710 - DNA, 2991 bp, synthetic construct
  source 1..2991: mol_type = other DNA
atggccttaccagtgaccgccttgctcctgccgctggccttgctgctccacgccgccaggccggaagtgcagctggttgaatctggcggaggactggttcagcctggcggatctctgagactgtcttgtgccgccagcggcttcagcttcagcgacttttggatgagctgggtccgacaggcccctggcaaaggacttgaatgggtcgccacaatcagccaggccggcagcgagaaggactacgtggactctgtgaagggcagattcaccatcagccgggacaacgccaagaagtccctgtacctccagatgaacagcctgagagccgaggacaccgccgtgtactattgtgcctctggcgtgtacagcttcgactacagaggccagggcaccctggtcacagtctcttctggtaccggcggaggcggatctggcggcggaggtagcggtggcggaggatctgaattcgacatcgtgatgacccagagccccgatagcctggccgtgtctctgggagagagagccaccatcaactgcaagagcagccagagcatcctgtacagcagcaaccagaagaactacctggcctggtatcagcagaagcccggccagagccctaagctgctgatctactgggccagcaccagagaaagcggcgtgcccgatagattcagcggcagcggctctggcaccgacttcaccctgaccatcagttctcttcaggccgaggacgtggccgtgtactactgccaccagtacatcagctcctacaccttcggccagggcaccaagctggaaatcaagctcgaggacctgaagaacgtgttcccacctgaggtggccgtgttcgagcctagcgaggccgagatcagccacacccagaaagccaccctcgtgtgcctggctaccggcttctaccccgaccatgtggaactgtcttggtgggtcaacggcaaagaggtgcacagcggcgtgtgtaccgacccccagccactgaaagaacagcccgccctgaacgacagccggtactgcctgagcagcagactgagagtgtccgccaccttctggcagaacccccggaaccacttcagatgccaggtgcagttctacggcctgagcgagaacgacgagtggacccaggacagagccaagcccgtgacccagatcgtgtctgccgaagcctggggcagagccgatgatgtgattaagatccactggcaggaaaagaagtccaacaccatcctgggcagccaggaaggcaacaccatgaagaccaacgacacctacatgaagttcagctggctgaccgtgcccgagaagtccctggacaaagaacacagatgcatcgtgcggcacgaaaacaacaagaacggcgtggaccaggaaatcatcttcccacccatcaagaccgatgtgattacaatggaccccaaggacaactgctccaaggacgccaacgataccctgctgctccagctgaccaacaccagcgcctactacatgtacttgttgctgctgctgaagtccgtggtgtacttcgccatcatcacatgctgcctgctgcggagaaccgccttctgctgcaacggcgagaagtctagggccaagcgatctggatctggagcaacaaacttctcactactcaaacaagcaggtgacgtggaggagaatcccgggcctactagtatggactggatttggcgcatccttttccttgtcggcgctgctaccggcgcgcattccgggccccagctccagctgcaagagtctggacctggcctggtcaagcctagcgagacactgagcctgacctgtaccgtgtccggcgatagcatcagcagcggcgattactactggggctggatcagacagcctcctggcaaaggactggaatggatcggccacatctactacagcggcgtgacctactacaaccccagcctgaagtccagagtgaccatcagcgtggacaccagccggaaccagttctccctgaagctgtctagcgtgacagccgccgataccgccgtgtactactgcaccagagaggacagcagcaactggcggagtagaggccagggaacactggtcacagttagctctggatccggcggaggcggaagtggaggcggaggatctggcggcggaggctctttcgaacaggtgcagctggtgcagtctggcgctgaagtgaagaaacctggggccagcgtgaaggtgtcctgcaaggccagcggctacacctttgccagccagtggatgcactggatgagacaggcccctggacagggcctggaatggatcggctggatcaaccccggcaacgtgaacaccaagtacaacgagaagttcaagggcagagccaccctgacagtggacaccagcaccaacaccgcctacatggaactgagcagcctgcggagcgaggacaccgccgtgtattattgcgccagaagcacctggtacagacccctggattattggggccagggaacccttgtgaccgtgtcctctacgcgtatccagaaccctgatcctgccgtgtaccagctgcgggatagcaagagcagcgacaagagcgtgtgtctgttcaccgacttcgacagccagaccaacgtgtcccagagcaaggactccgacgtgtacatcaccgataagtgcgtgctggacatgcggagcatggacttcaagagcaactccgccgtggcctggtccaacaagtccgatttcgcctgcgccaacgccttcaacaacagcattatccccgaggacacattcttcccaagccccgagagcagcgactccaccgaccacgtgaagcccaaagagacagagaacaccaagcagcccagcaagagctgccacaagcccaaggccatcgtgcacaccgagaaagtgaacatgatgagcctgaccgtgctgggcctgcggatgctgttcgccaaaaccgtggccgtgaacttcctgctgaccgccaagctgttcttcctc

SEQ ID NO: 7711 - DNA, 2991 bp, synthetic construct
  source 1..2991: mol_type = other DNA
atggccttaccagtgaccgccttgctcctgccgctggccttgctgctccacgccgccaggccggaagtgcagctggttgaatctggcggaggactggttcagcctggcggatctctgagactgtcttgtgccgccagcggcttcagcttcagcgacttttggatgagctgggtccgacaggcccctggcaaaggacttgaatgggtcgccacaatcagccaggccggcagcgagaaggactacgtggactctgtgaagggcagattcaccatcagccgggacaacgccaagaagtccctgtacctccagatgaacagcctgagagccgaggacaccgccgtgtactattgtgcctctggcgtgtacagcttcgactacagaggccagggcaccctggtcacagtctcttctggtaccggcggaggcggatctggcggcggaggtagcggtggcggaggatctgaattcgaccacatcgtgctgacccagagccctagcagcctgtctgccagcctgggcgacagagtgaccatcagctgtagagccagccaggacatcagcacctacctgaactggtatcagcagaaacccgacggcaccgtgaagctgctgatcttctacaccagcagactgcacgccggggtgcccagcagattttctggcagcggctctggcacccaccacagcctgaccatctccaacctggaacaggaagatattgctacctacttctgtcagcaaggcaacagcctgcccttcaccttcggcagcggcaccaagctggaaatcaagagactcgaggacctgaagaacgtgttcccacctgaggtggccgtgttcgagcctagcgaggccgagatcagccacacccagaaagccaccctcgtgtgcctggctaccggcttctaccccgaccatgtggaactgtcttggtgggtcaacggcaaagaggtgcacagcggcgtgtgtaccgacccccagccactgaaagaacagcccgccctgaacgacagccggtactgcctgagcagcagactgagagtgtccgccaccttctggcagaacccccggaaccacttcagatgccaggtgcagttctacggcctgagcgagaacgacgagtggacccaggacagagccaagcccgtgacccagatcgtgtctgccgaagcctggggcagagccgatgatgtgattaagatccactggcaggaaaagaagtccaacaccatcctgggcagccaggaaggcaacaccatgaagaccaacgacacctacatgaagttcagctggctgaccgtgcccgagaagtccctggacaaagaacacagatgcatcgtgcggcacgaaaacaacaagaacggcgtggaccaggaaatcatcttcccacccatcaagaccgatgtgattacaatggaccccaaggacaactgctccaaggacgccaacgataccctgctgctccagctgaccaacaccagcgcctactacatgtacttgttgctgctgctgaagtccgtggtgtacttcgccatcatcacatgctgcctgctgcggagaaccgccttctgctgcaacggcgagaagtctagggccaagcgatctggatctggagcaacaaacttctcactactcaaacaagcaggtgacgtggaggagaatcccgggcctactagtatggactggatttggcgcatccttttccttgtcggcgctgctaccggcgcgcattccgggccccagctccagctgcaagagtctggacctggcctggtcaagcctagcgagacactgagcctgacctgtaccgtgtccggcgatagcatcagcagcggcgattactactggggctggatcagacagcctcctggcaaaggactggaatggatcggccacatctactacagcggcgtgacctactacaaccccagcctgaagtccagagtgaccatcagcgtggacaccagccggaaccagttctccctgaagctgtctagcgtgacagccgccgataccgccgtgtactactgcaccagagaggacagcagcaactggcggagtagaggccagggaacactggtcacagttagctctggatccggcggaggcggaagtggaggcggaggatctggcggcggaggctctttcgaacaggtgcagctgaaagagagcggccctgagctggaaaagcctggggccagcgtgaagattagctgcaaggccagcggctacagcttcaccgcctacagcatgaactgggtcaagcagaacaacggcatgagcctggaatggatcggcagcatcgacccctactacggcgacaccaaatacgcccagaagttcaagggcaaggccaccctgaccgtggataaggccagcagcaccgcctacctccagctgaagtctctgaccagcgaggacagcgccgtgtactactgcgccagacggatgattaccaccggcgactggtacttcgacgtgtggggagccggaaccaccgtgacagtgtctagcacgcgtatccagaaccctgatcctgccgtgtaccagctgcgggatagcaagagcagcgacaagagcgtgtgtctgttcaccgacttcgacagccagaccaacgtgtcccagagcaaggactccgacgtgtacatcaccgataagtgcgtgctggacatgcggagcatggacttcaagagcaactccgccgtggcctggtccaacaagtccgatttcgcctgcgccaacgccttcaacaacagcattatccccgaggacacattcttcccaagccccgagagcagcgactccaccgaccacgtgaagcccaaagagacagagaacaccaagcagcccagcaagagctgccacaagcccaaggccatcgtgcacaccgagaaagtgaacatgatgagcctgaccgtgctgggcctgcggatgctgttcgccaaaaccgtggccgtgaacttcctgctgaccgccaagctgttcttcctc

SEQ ID NO: 7712 - DNA, 2991 bp, synthetic construct; identical to SEQ ID NO: 7711
  source 1..2991: mol_type = other DNA

SEQ ID NO: 7713 - DNA, 2991 bp, synthetic construct
  source 1..2991: mol_type = other DNA
atggccttaccagtgaccgccttgctcctgccgctggccttgctgctccacgccgccaggccggaagtgcagctggttgaatctggcggaggactggttcagcctggcggatctctgagactgtcttgtgccgccagcggcttcagcttcagcgacttttggatgagctgggtccgacaggcccctggcaaaggacttgaatgggtcgccacaatcagccaggccggcagcgagaaggactacgtggactctgtgaagggcagattcaccatcagccgggacaacgccaagaagtccctgtacctccagatgaacagcctgagagccgaggacaccgccgtgtactattgtgcctctggcgtgtacagcttcgactacagaggccagggcaccctggtcacagtctcttctggtaccggcggaggcggatctggcggcggaggtagcggtggcggaggatctgaattcgacgagatcgtgctgacacagagccctgccaccctgtctctgagccctggcgaaagagccaccctgagctgtagagccagccagagcgtgtccagctacctggcctggtatcagcagaagcccggccaggctccccggctgctgatctacgatgccagcaatagagccaccggcatccccgccagattttccggctctggcagcggcaccgacttcaccctgaccatcagctccctggaacccgaggacttcgccgtgtactactgccagcagcggagcaactggcccatcacattcggccagggcacccggctggaaatcaaactcgaggacctgaagaacgtgttcccacctgaggtggccgtgttcgagcctagcgaggccgagatcagccacacccagaaagccaccctcgtgtgcctggctaccggcttctaccccgaccatgtggaactgtcttggtgggtcaacggcaaagaggtgcacagcggcgtgtgtaccgacccccagccactgaaagaacagcccgccctgaacgacagccggtactgcctgagcagcagactgagagtgtccgccaccttctggcagaacccccggaaccacttcagatgccaggtgcagttctacggcctgagcgagaacgacgagtggacccaggacagagccaagcccgtgacccagatcgtgtctgccgaagcctggggcagagccgatgatgtgattaagatccactggcaggaaaagaagtccaacaccatcctgggcagccaggaaggcaacaccatgaagaccaacgacacctacatgaagttcagctggctgaccgtgcccgagaagtccctggacaaagaacacagatgcatcgtgcggcacgaaaacaacaagaacggcgtggaccaggaaatcatcttcccacccatcaagaccgatgtgattacaatggaccccaaggacaactgctccaaggacgccaacgataccctgctgctccagctgaccaacaccagcgcctactacatgtacttgttgctgctgctgaagtccgtggtgtacttcgccatcatcacatgctgcctgctgcggagaaccgccttctgctgcaacggcgagaagtctagggccaagcgatctggatctggagcaacaaacttctcactactcaaacaagcaggtgacgtggaggagaatcccgggcctactagtatggactggatttggcgcatccttttccttgtcggcgctgctaccggcgcgcattccgggccccagctccagctgcaagagtctggacctggcctggtcaagcctagcgagacactgagcctgacctgtaccgtgtccggcgatagcatcagcagcggcgattactactggggctggatcagacagcctcctggcaaaggactggaatggatcggccacatctactacagcggcgtgacctactacaaccccagcctgaagtccagagtgaccatcagcgtggacaccagccggaaccagttctccctgaagctgtctagcgtgacagccgccgataccgccgtgtactactgcaccagagaggacagcagcaactggcggagtagaggccagggaacactggtcacagttagctctggatccggcggaggcggaagtggaggcggaggatctggcggcggaggctctttcgaagaagtgcagctggtggaatcaggcggcggactggtgcagcctggcagaagcctgagactgagctgtgccgccagcggcttcaccttcaacgactacgccatgcactgggtgcgccaggcccctggaaaaggactggaatgggtgtccacaatcagctggaacagcggcagcatcggctacgccgatagcgtgaagggccggttcaccatcagccgggacaacgccaagaagtccctgtacctccagatgaacagcctgcgggccgaggacacagccctgtactattgcgccaaggacatccagtacggcaactactactacggcatggacgtgtggggccagggaaccaccgtgaccgtgtcatctacgcgtatccagaaccctgatcctgccgtgtaccagctgcgggatagcaagagcagcgacaagagcgtgtgtctgttcaccgacttcgacagccagaccaacgtgtcccagagcaaggactccgacgtgtacatcaccgataagtgcgtgctggacatgcggagcatggacttcaagagcaactccgccgtggcctggtccaacaagtccgatttcgcctgcgccaacgccttcaacaacagcattatccccgaggacacattcttcccaagccccgagagcagcgactccaccgaccacgtgaagcccaaagagacagagaacaccaagcagcccagcaagagctgccacaagcccaaggccatcgtgcacaccgagaaagtgaacatgatgagcctgaccgtgctgggcctgcggatgctgttcgccaaaaccgtggccgtgaacttcctgctgaccgccaagctgttcttcctc

SEQ ID NO: 7714 - DNA, 2997 bp, synthetic construct
  source 1..2997: mol_type = other DNA
atggccttaccagtgaccgccttgctcctgccgctggccttgctgctccacgccgccaggccggaagtgcagctggttgaatctggcggaggactggttcagcctggcggatctctgagactgtcttgtgccgccagcggcttcagcttcagcgacttttggatgagctgggtccgacaggcccctggcaaaggacttgaatgggtcgccacaatcagccaggccggcagcgagaaggactacgtggactctgtgaagggcagattcaccatcagccgggacaacgccaagaagtccctgtacctccagatgaacagcctgagagccgaggacaccgccgtgtactattgtgcctctggcgtgtacagcttcgactacagaggccagggcaccctggtcacagtctcttctggtaccggcggaggcggatctggcggcggaggtagcggtggcggaggatctgaattcgacatcgtgatgacccagacccccctgagcctgcctgtgacacctggcgagcctgccagcatctcctgcagaagcagcaagagcctgctgcacagcaacggcatcacctacctgtactggtatctgcagaaacccggccagagcccccaactgctgatctaccagatgagcaacctggtgtccggcgtgcccgacagattttctggcagcggctccggcaccgacttcaccctgaagatcagccgggtggaagccgaggacgtgggcgtgtactactgcgcccagaacctggaactgccctacacctttggcggcggaacaaaggtggaaatcaagcggctcgaggacctgaagaacgtgttcccacctgaggtggccgtgttcgagcctagcgaggccgagatcagccacacccagaaagccaccctcgtgtgcctggctaccggcttctaccccgaccatgtggaactgtcttggtgggtcaacggcaaagaggtgcacagcggcgtgtgtaccgacccccagccactgaaagaacagcccgccctgaacgacagccggtactgcctgagcagcagactgagagtgtccgccaccttctggcagaacccccggaaccacttcagatgccaggtgcagttctacggcctgagcgagaacgacgagtggacccaggacagagccaagcccgtgacccagatcgtgtctgccgaagcctggggcagagccgatgatgtgattaagatccactggcaggaaaagaagtccaacaccatcctgggcagccaggaaggcaacaccatgaagaccaacgacacctacatgaagttcagctggctgaccgtgcccgagaagtccctggacaaagaacacagatgcatcgtgcggcacgaaaacaacaagaacggcgtggaccaggaaatcatcttcccacccatcaagaccgatgtgattacaatggaccccaaggacaactgctccaaggacgccaacgataccctgctgctccagctgaccaacaccagcgcctactacatgtacttgttgctgctgctgaagtccgtggtgtacttcgccatcatcacatgctgcctgctgcggagaaccgccttctgctgcaacggcgagaagtctagggccaagcgatctggatctggagcaacaaacttctcactactcaaacaagcaggtgacgtggaggagaatcccgggcctactagtatggactggatttggcgcatccttttccttgtcggcgctgctaccggcgcgcattccgggccccagctccagctgcaagagtctggacctggcctggtcaagcctagcgagacactgagcctgacctgtaccgtgtccggcgatagcatcagcagcggcgattactactggggctggatcagacagcctcctggcaaaggactggaatggatcggccacatctactacagcggcgtgacctactacaaccccagcctgaagtccagagtgaccatcagcgtggacaccagccggaaccagttctccctgaagctgtctagcgtgacagccgccgataccgccgtgtactactgcaccagagaggacagcagcaactggcggagtagaggccagggaacactggtcacagttagctctggatccggcggaggcggaagtggaggcggaggatctggcggcggaggctctttcgaacaggtgcaactggtgcagagcggagccgaagtgaaaaagcccggcagcagcgtgaaggtgtcctgcaaggccagcggctacgccttcagctactcctggatcaactgggtgcgccaggcccctggacagggcctggaatggatgggcagaatcttccccggcgacggcgacaccgactacaacggcaagttcaagggcagagtgaccatcaccgccgacaagagcaccagcaccgcctacatggaactgagcagcctgcggagcgaggataccgccgtgtactattgtgccagaaacgtgttcgacggctactggctggtgtactggggccagggaacacttgtgaccgtgtccagcacgcgtatccagaaccctgatcctgccgtgtaccagctgcgggatagcaagagcagcgacaagagcgtgtgtctgttcaccgacttcgacagccagaccaacgtgtcccagagcaaggactccgacgtgtacatcaccgataagtgcgtgctggacatgcggagcatggacttcaagagcaactccgccgtggcctggtccaacaagtccgatttcgcctgcgccaacgccttcaacaacagcattatccccgaggacacattcttcccaagccccgagagcagcgactccaccgaccacgtgaagcccaaagagacagagaacaccaagcagcccagcaagagctgccacaagcccaaggccatcgtgcacaccgagaaagtgaacatgatgagcctgaccgtgctgggcctgcggatgctgttcgccaaaaccgtggccgtgaacttcctgctgaccgccaagctgttcttcctc

SEQ ID NO: 7715 - DNA, 3000 bp, synthetic construct
  source 1..3000: mol_type = other DNA
atggccttaccagtgaccgccttgctcctgccgctggccttgctgctccacgccgccaggccggaagtgcagctggttgaatctggcggaggactggttcagcctggcggatctctgagactgtcttgtgccgccagcggcttcagcttcagcgacttttggatgagctgggtccgacaggcccctggcaaaggacttgaatgggtcgccacaatcagccaggccggcagcgagaaggactacgtggactctgtgaagggcagattcaccatcagccgggacaacgccaagaagtccctgtacctccagatgaacagcctgagagccgaggacaccgccgtgtactattgtgcctctggcgtgtacagcttcgactacagaggccagggcaccctggtcacagtctcttctggtaccggcggaggcggatctggcggcggaggtagcggtggcggaggatctgaattcgacatccagatgacccagagccccagcagcctgtctgccagcgtgggcgacagagtgaccatcacctgtcggagcagccagagcatcgtgcactccgtgggcaacaccttcctggaatggtatcagcagaagcccggcaaggcccccaagctgctgatctacaaggtgtccaacagattcagcggcgtgcccagcaggtttagcggctctggcagcggcaccgacttcaccctgaccatctctagcctccagcccgaggacttcgccacctactactgttttcaaggcagccagttcccctacaccttcggccagggaacaaaggtggaaatcaagcggctcgaggacctgaagaacgtgttcccacctgaggtggccgtgttcgagcctagcgaggccgagatcagccacacccagaaagccaccctcgtgtgcctggctaccggcttctaccccgaccatgtggaactgtcttggtgggtcaacggcaaagaggtgcacagcggcgtgtgtaccgacccccagccactgaaagaacagcccgccctgaacgacagccggtactgcctgagcagcagactgagagtgtccgccaccttctggcagaacccccggaaccacttcagatgccaggtgcagttctacggcctgagcgagaacgacgagtggacccaggacagagccaagcccgtgacccagatcgtgtctgccgaagcctggggcagagccgatgatgtgattaagatccactggcaggaaaagaagtccaacaccatcctgggcagccaggaaggcaacaccatgaagaccaacgacacctacatgaagttcagctggctgaccgtgcccgagaagtccctggacaaagaacacagatgcatcgtgcggcacgaaaacaacaagaacggcgtggaccaggaaatcatcttcccacccatcaagaccgatgtgattacaatggaccccaaggacaactgctccaaggacgccaacgataccctgctgctccagctgaccaacaccagcgcctactacatgtacttgttgctgctgctgaagtccgtggtgtacttcgccatcatcacatgctgcctgctgcggagaaccgccttctgctgcaacggcgagaagtctagggccaagcgatctggatctggagcaacaaacttctcactactcaaacaagcaggtgacgtggaggagaatcccgggcctactagtatggactggatttggcgcatccttttccttgtcggcgctgctaccggcgcgcattccgggccccagctccagctgcaagagtctggacctggcctggtcaagcctagcgagacactgagcctgacctgtaccgtgtccggcgatagcatcagcagcggcgattactactggggctggatcagacagcctcctggcaaaggactggaatggatcggccacatctactacagcggcgtgacctactacaaccccagcctgaagtccagagtgaccatcagcgtggacaccagccggaaccagttctccctgaagctgtctagcgtgacagccgccgataccgccgtgtactactgcaccagagaggacagcagcaactggcggagtagaggccagggaacactggtcacagttagctctggatccggcggaggcggaagtggaggcggaggatctggcggcggaggctctttcgaagaagtgcaactggtggaaagcggaggcggcctggtgcagcctggcggatctctgagactgagctgtgccgccagcggctacgagttcagccggtcctggatgaactgggtgcgccaggcccctggcaagggactggaatgggtgggaagaatctaccccggcgacggcgacaccaactacagcggcaagttcaagggccggttcaccatcagcgccgacaccagcaagaacaccgcctacctccagatgaacagcctgcgggccgaggataccgccgtgtactactgtgccagagatggcagctcctgggactggtacttcgacgtgtggggacagggaacccttgtgaccgtgtccagcacgcgtatccagaaccctgatcctgccgtgtaccagctgcgggatagcaagagcagcgacaagagcgtgtgtctgttcaccgacttcgacagccagaccaacgtgtcccagagcaaggactccgacgtgtacatcaccgataagtgcgtgctggacatgcggagcatggacttcaagagcaactccgccgtggcctggtccaacaagtccgatttcgcctgcgccaacgccttcaacaacagcattatccccgaggacacattcttcccaagccccgagagcagcgactccaccgaccacgtgaagcccaaagagacagagaacaccaagcagcccagcaagagctgccacaagcccaaggccatcgtgcacaccgagaaagtgaacatgatgagcctgaccgtgctgggcctgcggatgctgttcgccaaaaccgtggccgtgaacttcctgctgaccgccaagctgttcttcctc

SEQ ID NO: 7716 - DNA, 2994 bp, synthetic construct
  source 1..2994: mol_type = other DNA
atggccttaccagtgaccgccttgctcctgccgctggccttgctgctccacgccgccaggccggaagtgcagctggttgaatctggcggaggactggttcagcctggcggatctctgagactgtcttgtgccgccagcggcttcagcttcagcgacttttggatgagctgggtccgacaggcccctggcaaaggacttgaatgggtcgccacaatcagccaggccggcagcgagaaggactacgtggactctgtgaagggcagattcaccatcagccgggacaacgccaagaagtccctgtacctccagatgaacagcctgagagccgaggacaccgccgtgtactattgtgcctctggcgtgtacagcttcgactacagaggccagggcaccctggtcacagtctcttctggtaccggcggaggcggatctggcggcggaggtagcggtggcggaggatctgaattcgacatccagatgacccagagccccagcagcctgtctgccagcgtgggcgacagagtgaccatcacctgtagagccagccagaccatctggtcctacctgaactggtatcagcagaggcccggcaaggcccccaacctgctgatctatgccgccagctctctccagagcggcgtgcccagcagattttccggcagaggcagcggcaccgacttcaccctgaccatcagttccttgcaggccgaggacttcgccacctactactgccagcagagctacagcatcccccagattttcggccagggcaccaagctggaaatcaagctcgaggacctgaagaacgtgttcccacctgaggtggccgtgttcgagcctagcgaggccgagatcagccacacccagaaagccaccctcgtgtgcctggctaccggcttctaccccgaccatgtggaactgtcttggtgggtcaacggcaaagaggtgcacagcggcgtgtgtaccgacccccagccactgaaagaacagcccgccctgaacgacagccggtactgcctgagcagcagactgagagtgtccgccaccttctggcagaacccccggaaccacttcagatgccaggtgcagttctacggcctgagcgagaacgacgagtggacccaggacagagccaagcccgtgacccagatcgtgtctgccgaagcctggggcagagccgatgatgtgattaagatccactggcaggaaaagaagtccaacaccatcctgggcagccaggaaggcaacaccatgaagaccaacgacacctacatgaagttcagctggctgaccgtgcccgagaagtccctggacaaagaacacagatgcatcgtgcggcacgaaaacaacaagaacggcgtggaccaggaaatcatcttcccacccatcaagaccgatgtgattacaatggaccccaaggacaactgctccaaggacgccaacgataccctgctgctccagctgaccaacaccagcgcctactacatgtacttgttgctgctgctgaagtccgtggtgtacttcgccatcatcacatgctgcctgctgcggagaaccgccttctgctgcaacggcgagaagtctagggccaagcgatctggatctggagcaacaaacttctcactactcaaacaagcaggtgacgtggaggagaatcccgggcctactagtatggactggatttggcgcatccttttccttgtcggcgctgctaccggcgcgcattccgggccccagctccagctgcaagagtctggacctggcctggtcaagcctagcgagacactgagcctgacctgtaccgtgtccggcgatagcatcagcagcggcgattactactggggctggatcagacagcctcctggcaaaggactggaatggatcggccacatctactacagcggcgtgacctactacaaccccagcctgaagtccagagtgaccatcagcgtggacaccagccggaaccagttctccctgaagctgtctagcgtgacagccgccgataccgccgtgtactactgcaccagagaggacagcagcaactggcggagtagaggccagggaacactggtcacagttagctctggatccggcggaggcggaagtggaggcggaggatctggcggcggaggctctttcgaacaggtgcagctccagcagtctggacccggcctcgtgaagcctagccagacactgagcctgacctgcgccatcagcggcgatagcgtgtccagcaatagcgccgcctggaactggatcagacagtccccctctcggggcctggaatggctgggccggacctactaccgcagcaagtggtacaacgactacgccgtgtccgtgaagtcccggatcaccatcaaccccgacaccagcaagaaccagttctccttgcaactgaacagcgtgacccccgaggacaccgccgtgtactactgcgccagagaagtgaccggcgacctggaagatgccttcgacatctggggccagggaacaatggtcacagtgtccagcacgcgtatccagaaccctgatcctgccgtgtaccagctgcgggatagcaagagcagcgacaagagcgtgtgtctgttcaccgacttcgacagccagaccaacgtgtcccagagcaaggactccgacgtgtacatcaccgataagtgcgtgctggacatgcggagcatggacttcaagagcaactccgccgtggcctggtccaacaagtccgatttcgcctgcgccaacgccttcaacaacagcattatccccgaggacacattcttcccaagccccgagagcagcgactccaccgaccacgtgaagcccaaagagacagagaacaccaagcagcccagcaagagctgccacaagcccaaggccatcgtgcacaccgagaaagtgaacatgatgagcctgaccgtgctgggcctgcggatgctgttcgccaaaaccgtggccgtgaacttcctgctgaccgccaagctgttcttcctc

SEQ ID NO: 7717 - DNA, 2973 bp, synthetic construct
  source 1..2973: mol_type = other DNA
atggccttaccagtgaccgccttgctcctgccgctggccttgctgctccacgccgccaggccggaagtgcagctggttgaatctggcggaggactggttcagcctggcggatctctgagactgtcttgtgccgccagcggcttcagcttcagcgacttttggatgagctgggtccgacaggcccctggcaaaggacttgaatgggtcgccacaatcagccaggccggcagcgagaaggactacgtggactctgtgaagggcagattcaccatcagccgggacaacgccaagaagtccctgtacctccagatgaacagcctgagagccgaggacaccgccgtgtactattgtgcctctggcgtgtacagcttcgactacagaggccagggcaccctggtcacagtctcttctggtaccggcggaggcggatctggcggcggaggtagcggtggcggaggatctgaattcgacatccagatgacccagagccccgccaccatcgagaacacaagcctgtctgccagcgtgggcgacagagtgaccatcacctgtagagccagccagggcatcagctcttggctgacctggtatcagcagaagcccgagaaggcccccaagagcctgatctacgccgccagctctctgcagtctggcgtgcccagcagattttccggcagcggctctggcaccgacttcaccctgacaatcagcagcctgcagcccgaggacttcgccacctactactgccagcagtacgacagctaccccatcaccttcggccagggcacccggctggaaatcaagctcgaggacctgaagaacgtgttcccacctgaggtggccgtgttcgagcctagcgaggccgagatcagccacacccagaaagccaccctcgtgtgcctggctaccggcttctaccccgaccatgtggaactgtcttggtgggtcaacggcaaagaggtgcacagcggcgtgtgtaccgacccccagccactgaaagaacagcccgccctgaacgacagccggtactgcctgagcagcagactgagagtgtccgccaccttctggcagaacccccggaaccacttcagatgccaggtgcagttctacggcctgagcgagaacgacgagtggacccaggacagagccaagcccgtgacccagatcgtgtctgccgaagcctggggcagagccgatgatgtgattaagatccactggcaggaaaagaagtccaacaccatcctgggcagccaggaaggcaacaccatgaagaccaacgacacctacatgaagttcagctggctgaccgtgcccgagaagtccctggacaaagaacacagatgcatcgtgcggcacgaaaacaacaagaacggcgtggaccaggaaatcatcttcccacccatcaagaccgatgtgattacaatggaccccaaggacaactgctccaaggacgccaacgataccctgctgctccagctgaccaacaccagcgcctactacatgtacttgttgctgctgctgaagtccgtggtgtacttcgccatcatcacatgctgcctgctgcggagaaccgccttctgctgcaacggcgagaagtctagggccaagcgatctggatctggagcaacaaacttctcactactcaaacaagcaggtgacgtggaggagaatcccgggcctactagtatggactggatttggcgcatccttttccttgtcggcgctgctaccggcgcgcattccgggccccagctccagctgcaagagtctggacctggcctggtcaagcctagcgagacactgagcctgacctgtaccgtgtccggcgatagcatcagcagcggcgattactactggggctggatcagacagcctcctggcaaaggactggaatggatcggccacatctactacagcggcgtgacctactacaaccccagcctgaagtccagagtgaccatcagcgtggacaccagccggaaccagttctccctgaagctgtctagcgtgacagccgccgataccgccgtgtactactgcaccagagaggacagcagcaactggcggagtagaggccagggaacactggtcacagttagctctggatccggcggaggcggaagtggaggcggaggatctggcggcggaggctctttcgaacaggtgcaactgcagcagtggggagccggactgctgaagcctagcgagacactgagcctgacctgcgccgtgtacggcggcagcttcagcgcctactattggagctggatcagacagccccctggcaagggcctggaatggatcggcgacatcaatcacggcggaggcaccaactacaaccccagcctgaagtcccgcgtgaccatctccgtggacaccagcaagaaccagttctccctgaagctgaacagcgtgacagccgccgacacagccgtgtactactgtgccagcctgaccgcctattggggccagggatctcttgtgaccgtgtccagcacgcgtatccagaaccctgatcctgccgtgtaccagctgcgggatagcaagagcagcgacaagagcgtgtgtctgttcaccgacttcgacagccagaccaacgtgtcccagagcaaggactccgacgtgtacatcaccgataagtgcgtgctggacatgcggagcatggacttcaagagcaactccgccgtggcctggtccaacaagtccgatttcgcctgcgccaacgccttcaacaacagcattatccccgaggacacattcttcccaagccccgagagcagcgactccaccgaccacgtgaagcccaaagagacagagaacaccaagcagcccagcaagagctgccacaagcccaaggccatcgtgcacaccgagaaagtgaacatgatgagcctgaccgtgctgggcctgcggatgctgttcgccaaaaccgtggccgtgaacttcctgctgaccgccaagctgttcttcctc

SEQ ID NO: 7718 - DNA, 2988 bp, synthetic construct
  source 1..2988: mol_type = other DNA
atggccttaccagtgaccgccttgctcctgccgctggccttgctgctccacgccgccaggccggaagtgcagctggttgaatctggcggaggactggttcagcctggcggatctctgagactgtcttgtgccgccagcggcttcagcttcagcgacttttggatgagctgggtccgacaggcccctggcaaaggacttgaatgggtcgccacaatcagccaggccggcagcgagaaggactacgtggactctgtgaagggcagattcaccatcagccgggacaacgccaagaagtccctgtacctccagatgaacagcctgagagccgaggacaccgccgtgtactattgtgcctctggcgtgtacagcttcgactacagaggccagggcaccctggtcacagtctcttctggtaccggcggaggcggatctggcggcggaggtagcggtggcggaggatctgaattcgacgagatcgtgctgacccagagccctgatagcctggccgtgtctctgggcgagagagccaccatcaactgcaaggccagccagagcgtggacttcgacggcgacagctacctgaactggtatcagcagaagcccggccagccccccaaggtgctgatctatgccgccagcacactgcagagcggcgtgcccagcagattttctggcagcggctccggcaccgacttcaccctgaccatcaacagcctggaagccgaggacgccgccacctactactgccagcagagcaacgaggacccctggacctttggcggcggaacaaaggtggaaatcaagctcgaggacctgaagaacgtgttcccacctgaggtggccgtgttcgagcctagcgaggccgagatcagccacacccagaaagccaccctcgtgtgcctggctaccggcttctaccccgaccatgtggaactgtcttggtgggtcaacggcaaagaggtgcacagcggcgtgtgtaccgacccccagccactgaaagaacagcccgccctgaacgacagccggtactgcctgagcagcagactgagagtgtccgccaccttctggcagaacccccggaaccacttcagatgccaggtgcagttctacggcctgagcgagaacgacgagtggacccaggacagagccaagcccgtgacccagatcgtgtctgccgaagcctggggcagagccgatgatgtgattaagatccactggcaggaaaagaagtccaacaccatcctgggcagccaggaaggcaacaccatgaagaccaacgacacctacatgaagttcagctggctgaccgtgcccgagaagtccctggacaaagaacacagatgcatcgtgcggcacgaaaacaacaagaacggcgtggaccaggaaatcatcttcccacccatcaagaccgatgtgattacaatggaccccaaggacaactgctccaaggacgccaacgataccctgctgctccagctgaccaacaccagcgcctactacatgtacttgttgctgctgctgaagtccgtggtgtacttcgccatcatcacatgctgcctgctgcggagaaccgccttctgctgcaacggcgagaagtctagggccaagcgatctggatctggagcaacaaacttctcactactcaaacaagcaggtgacgtggaggagaatcccgggcctactagtatggactggatttggcgcatccttttccttgtcggcgctgctaccggcgcgcattccgggccccagctccagctgcaagagtctggacctggcctggtcaagcctagcgagacactgagcctgacctgtaccgtgtccggcgatagcatcagcagcggcgattactactggggctggatcagacagcctcctggcaaaggactggaatggatcggccacatctactacagcggcgtgacctactacaaccccagcctgaagtccagagtgaccatcagcgtggacaccagccggaaccagttctccctgaagctgtctagcgtgacagccgccgataccgccgtgtactactgcaccagagaggacagcagcaactggcggagtagaggccagggaacactggtcacagttagctctggatccggcggaggcggaagtggaggcggaggatctggcggcggaggctctttcgaacaggtgcaactggtgcagtccggcgctgaagtgaagaaacctggggccagcgtgaaggtgtcctgcaaggtgtccggctacacctttaccgactactacattacctgggtgcgccaggcccctggacaggccctggaatggatgggctggatctaccccggcagcggcaacaccaagtacagccagaagttccagggcagattcgtgttcagcgtggacaccagcgccagcaccgcctacctgcaactgtctagcctgaaggccgaagataccgccgtgtactactgcgccaactacggcaactattggttcgcctattggggccagggaacccttgtgaccgtgtcctctacgcgtatccagaaccctgatcctgccgtgtaccagctgcgggatagcaagagcagcgacaagagcgtgtgtctgttcaccgacttcgacagccagaccaacgtgtcccagagcaaggactccgacgtgtacatcaccgataagtgcgtgctggacatgcggagcatggacttcaagagcaactccgccgtggcctggtccaacaagtccgatttcgcctgcgccaacgccttcaacaacagcattatccccgaggacacattcttcccaagccccgagagcagcgactccaccgaccacgtgaagcccaaagagacagagaacaccaagcagcccagcaagagctgccacaagcccaaggccatcgtgcacaccgagaaagtgaacatgatgagcctgaccgtgctgggcctgcggatgctgttcgccaaaaccgtggccgtgaacttcctgctgaccgccaagctgttcttcctc

SEQ ID NO: 7719 - DNA, 2979 bp, synthetic construct
  source 1..2979: mol_type = other DNA
atggccttaccagtgaccgccttgctcctgccgctggccttgctgctccacgccgccaggccggaagtgcagctggttgaatctggcggaggactggttcagcctggcggatctctgagactgtcttgtgccgccagcggcttcagcttcagcgacttttggatgagctgggtccgacaggcccctggcaaaggacttgaatgggtcgccacaatcagccaggccggcagcgagaaggactacgtggactctgtgaagggcagattcaccatcagccgggacaacgccaagaagtccctgtacctccagatgaacagcctgagagccgaggacaccgccgtgtactattgtgcctctggcgtgtacagcttcgactacagaggccagggcaccctggtcacagtctcttctggtaccggcggaggcggatctggcggcggaggtagcggtggcggaggatctgaattcgacatccagatgacccagagccccagcagcctgtctgccagcgtgggcgacagagtgaccatcacctgtagagccagccagggcatcagctcttggctggcctggtatcagcagaagcccgagaaggcccccaagagcctgatctacgccgcctctagtctccagagcggcgtgcccagcagattttctggcagcggctccggcaccgacttcaccctgacaatcagctccctccagcccgaggacttcgccacctactactgccagcagtacaacagctaccctcccacctttggcggaggcaccaaggtggaaatcaagctcgaggacctgaagaacgtgttcccacctgaggtggccgtgttcgagcctagcgaggccgagatcagccacacccagaaagccaccctcgtgtgcctggctaccggcttctaccccgaccatgtggaactgtcttggtgggtcaacggcaaagaggtgcacagcggcgtgtgtaccgacccccagccactgaaagaacagcccgccctgaacgacagccggtactgcctgagcagcagactgagagtgtccgccaccttctggcagaacccccggaaccacttcagatgccaggtgcagttctacggcctgagcgagaacgacgagtggacccaggacagagccaagcccgtgacccagatcgtgtctgccgaagcctggggcagagccgatgatgtgattaagatccactggcaggaaaagaagtccaacaccatcctgggcagccaggaaggcaacaccatgaagaccaacgacacctacatgaagttcagctggctgaccgtgcccgagaagtccctggacaaagaacacagatgcatcgtgcggcacgaaaacaacaagaacggcgtggaccaggaaatcatcttcccacccatcaagaccgatgtgattacaatggaccccaaggacaactgctccaaggacgccaacgataccctgctgctccagctgaccaacaccagcgcctactacatgtacttgttgctgctgctgaagtccgtggtgtacttcgccatcatcacatgctgcctgctgcggagaaccgccttctgctgcaacggcgagaagtctagggccaagcgatctggatctggagcaacaaacttctcactactcaaacaagcaggtgacgtggaggagaatcccgggcctactagtatggactggatttggcgcatccttttccttgtcggcgctgctaccggcgcgcattccgggccccagctccagctgcaagagtctggacctggcctggtcaagcctagcgagacactgagcctgacctgtaccgtgtccggcgatagcatcagcagcggcgattactactggggctggatcagacagcctcctggcaaaggactggaatggatcggccacatctactacagcggcgtgacctactacaaccccagcctgaagtccagagtgaccatcagcgtggacaccagccggaaccagttctccctgaagctgtctagcgtgacagccgccgataccgccgtgtactactgcaccagagaggacagcagcaactggcggagtagaggccagggaacactggtcacagttagctctggatccggcggaggcggaagtggaggcggaggatctggcggcggaggctctttcgaagaagtgcaactggtgcagtctggcggagggctggtgcatcctgggggaagcctgagactgagctgtgccggctctggcttcgccttcagcagcagcaccatgcactggatcagacaggcccctggcaagggcctggaatggatcagcctgatcggaagcggagggggcatctactacggcgacagcgtgaagggccggttcaccatcagccgggacaacgccaagaacagcctgtacctccagatgaactccctgcgggccgaggacatggccgtgtactattgtgtgcggggctacttcgactgggtggactacttcgattactggggccagggcaccctcgtgaccgtgtcatctacgcgtatccagaaccctgatcctgccgtgtaccagctgcgggatagcaagagcagcgacaagagcgtgtgtctgttcaccgacttcgacagccagaccaacgtgtcccagagcaaggactccgacgtgtacatcaccgataagtgcgtgctggacatgcggagcatggacttcaagagcaactccgccgtggcctggtccaacaagtccgatttcgcctgcgccaacgccttcaacaacagcattatccccgaggacacattcttcccaagccccgagagcagcgactccaccgaccacgtgaagcccaaagagacagagaacaccaagcagcccagcaagagctgccacaagcccaaggccatcgtgcacaccgagaaagtgaacatgatgagcctgaccgtgctgggcctgcggatgctgttcgccaaaaccgtggccgtgaacttcctgctgaccgccaagctgttcttcctc

SEQ ID NO: 7720 - DNA, 3009 bp, synthetic construct
  source 1..3009: mol_type = other DNA
atggccttaccagtgaccgccttgctcctgccgctggccttgctgctccacgccgccaggccggaagtgcagctggttgaatctggcggaggactggttcagcctggcggatctctgagactgtcttgtgccgccagcggcttcagcttcagcgacttttggatgagctgggtccgacaggcccctggcaaaggacttgaatgggtcgccacaatcagccaggccggcagcgagaaggactacgtggactctgtgaagggcagattcaccatcagccgggacaacgccaagaagtccctgtacctccagatgaacagcctgagagccgaggacaccgccgtgtactattgtgcctctggcgtgtacagcttcgactacagaggccagggcaccctggtcacagtctcttctggtaccggcggaggcggatctggcggcggaggtagcggtggcggaggatctgaattcgacgacatcgtgatgacacagtcaccagatagcctcaccgtctccctgggggagcggaccaccattaattgtaaatccagccaaagcgtgctggactcaagcaagaacaagaatagcctcgcctggtatcagcagaagcccggtcagcctccaaagctgctgctttcttgggcctccaccagagagtccgggattcctgataggtttagtggttcaggctccggcacagattttactctgaccattgattctctccagccagaggattctgcaacttattactgccagcaaagcgcccactttcctataacttttggccagggaacccgacttgaaatcaagctcgaggacctgaagaacgtgttcccacctgaggtggccgtgttcgagcctagcgaggccgagatcagccacacccagaaagccaccctcgtgtgcctggctaccggcttctaccccgaccatgtggaactgtcttggtgggtcaacggcaaagaggtgcacagcggcgtgtgtaccgacccccagccactgaaagaacagcccgccctgaacgacagccggtactgcctgagcagcagactgagagtgtccgccaccttctggcagaacccccggaaccacttcagatgccaggtgcagttctacggcctgagcgagaacgacgagtggacccaggacagagccaagcccgtgacccagatcgtgtctgccgaagcctggggcagagccgatgatgtgattaagatccactggcaggaaaagaagtccaacaccatcctgggcagccaggaaggcaacaccatgaagaccaacgacacctacatgaagttcagctggctgaccgtgcccgagaagtccctggacaaagaacacagatgcatcgtgcggcacgaaaacaacaagaacggcgtggaccaggaaatcatcttcccacccatcaagaccgatgtgattacaatggaccccaaggacaactgctccaaggacgccaacgataccctgctgctccagctgaccaacaccagcgcctactacatgtacttgttgctgctgctgaagtccgtggtgtacttcgccatcatcacatgctgcctgctgcggagaaccgccttctgctgcaacggcgagaagtctagggccaagcgatctggatctggagcaacaaacttctcactactcaaacaagcaggtgacgtggaggagaatcccgggcctactagtatggactggatttggcgcatccttttccttgtcggcgctgctaccggcgcgcattccgggccccagctccagctgcaagagtctggacctggcctggtcaagcctagcgagacactgagcctgacctgtaccgtgtccggcgatagcatcagcagcggcgattactactggggctggatcagacagcctcctggcaaaggactggaatggatcggccacatctactacagcggcgtgacctactacaaccccagcctgaagtccagagtgaccatcagcgtggacaccagccggaaccagttctccctgaagctgtctagcgtgacagccgccgataccgccgtgtactactgcaccagagaggacagcagcaactggcggagtagaggccagggaacactggtcacagttagctctggatccggcggaggcggaagtggaggcggaggatctggcggcggaggctctttcgaacaggtgcagctggtgcagagcggtgccgaagtgaagaaaccaggtgcatccgttaaagtttcatgtaaggctagtggatataccttcaccaattacggaatgaactgggtgaaacaggcccctggccagggactgaagtggatggggtggattaacacctacaccggggagccgacttatgcagacgactttaaggggcgggtcacgatgacctccgacacctccaccagtaccgcctacctggagctgcacaaccttaggtcagacgataccgccgtgtattactgtgcccgatggtcttggtccgacggatactatgtctacttcgactattggggccaggggaccacagttaccgtgtcctctacgcgtatccagaaccctgatcctgccgtgtaccagctgcgggatagcaagagcagcgacaagagcgtgtgtctgttcaccgacttcgacagccagaccaacgtgtcccagagcaaggactccgacgtgtacatcaccgataagtgcgtgctggacatgcggagcatggacttcaagagcaactccgccgtggcctggtccaacaagtccgatttcgcctgcgccaacgccttcaacaacagcattatccccgaggacacattcttcccaagccccgagagcagcgactccaccgaccacgtgaagcccaaagagacagagaacaccaagcagcccagcaagagctgccacaagcccaaggccatcgtgcacaccgagaaagtgaacatgatgagcctgaccgtgctgggcctgcggatgctgttcgccaaaaccgtggccgtgaacttcctgctgaccgccaagctgttcttcctc

SEQ ID NO: 7721 - DNA, 2997 bp, synthetic construct
  source 1..2997: mol_type = other DNA
atggccttaccagtgaccgccttgctcctgccgctggccttgctgctccacgccgccaggccggaagtgcagctggttgaatctggcggaggactggttcagcctggcggatctctgagactgtcttgtgccgccagcggcttcagcttcagcgacttttggatgagctgggtccgacaggcccctggcaaaggacttgaatgggtcgccacaatcagccaggccggcagcgagaaggactacgtggactctgtgaagggcagattcaccatcagccgggacaacgccaagaagtccctgtacctccagatgaacagcctgagagccgaggacaccgccgtgtactattgtgcctctggcgtgtacagcttcgactacagaggccagggcaccctggtcacagtctcttctggtaccggcggaggcggatctggcggcggaggtagcggtggcggaggatctgaattcgacgagatcgtgctgacacagagccctggaagcctggccgtgtctcctggcgagcgcgtgacaatgagctgcaagagcagccagagcgtgttcttcagcagctcccagaagaactacctggcctggtatcagcagatccccggccagagccccagactgctgatctactgggccagcaccagagaaagcggcgtgcccgatagattcaccggcagcggctctggcaccgacttcaccctgacaatcagcagcgtgcagcccgaggacctggctatctactactgccaccagtacctgagcagccggaccttcggccagggcaccaagctggaaatcaagagactcgaggacctgaagaacgtgttcccacctgaggtggccgtgttcgagcctagcgaggccgagatcagccacacccagaaagccaccctcgtgtgcctggctaccggcttctaccccgaccatgtggaactgtcttggtgggtcaacggcaaagaggtgcacagcggcgtgtgtaccgacccccagccactgaaagaacagcccgccctgaacgacagccggtactgcctgagcagcagactgagagtgtccgccaccttctggcagaacccccggaaccacttcagatgccaggtgcagttctacggcctgagcgagaacgacgagtggacccaggacagagccaagcccgtgacccagatcgtgtctgccgaagcctggggcagagccgatgatgtgattaagatccactggcaggaaaagaagtccaacaccatcctgggcagccaggaaggcaacaccatgaagaccaacgacacctacatgaagttcagctggctgaccgtgcccgagaagtccctggacaaagaacacagatgcatcgtgcggcacgaaaacaacaagaacggcgtggaccaggaaatcatcttcccacccatcaagaccgatgtgattacaatggaccccaaggacaactgctccaaggacgccaacgataccctgctgctccagctgaccaacaccagcgcctactacatgtacttgttgctgctgctgaagtccgtggtgtacttcgccatcatcacatgctgcctgctgcggagaaccgccttctgctgcaacggcgagaagtctagggccaagcgatctggatctggagcaacaaacttctcactactcaaacaagcaggtgacgtggaggagaatcccgggcctactagtatggactggatttggcgcatccttttccttgtcggcgctgctaccggcgcgcattccgggccccagctccagctgcaagagtctggacctggcctggtcaagcctagcgagacactgagcctgacctgtaccgtgtccggcgatagcatcagcagcggcgattactactggggctggatcagacagcctcctggcaaaggactggaatggatcggccacatctactacagcggcgtgacctactacaaccccagcctgaagtccagagtgaccatcagcgtggacaccagccggaaccagttctccctgaagctgtctagcgtgacagccgccgataccgccgtgtactactgcaccagagaggacagcagcaactggcggagtagaggccagggaacactggtcacagttagctctggatccggcggaggcggaagtggaggcggaggatctggcggcggaggctctttcgaacaggtgcaactgcagcagcctggcgctgaggtcgtgaagccaggcgcttccgtgaagatgtcctgcaaggccagcggctacaccttcaccagctactacatccactggatcaagcagacccctggacagggcctggaatgggtgggagtgatctaccccggcaacgacgacatcagctacaaccagaagttccagggcaaggccaccctgaccgccgacaagtctagcaccaccgcctacatgcaactgtccagcctgaccagcgaggacagcgccgtgtactactgcgccagagaagtgcggctgcggtacttcgatgtgtggggccagggaaccaccgtgaccgtgtcatctacgcgtatccagaaccctgatcctgccgtgtaccagctgcgggatagcaagagcagcgacaagagcgtgtgtctgttcaccgacttcgacagccagaccaacgtgtcccagagcaaggactccgacgtgtacatcaccgataagtgcgtgctggacatgcggagcatggacttcaagagcaactccgccgtggcctggtccaacaagtccgatttcgcctgcgccaacgccttcaacaacagcattatccccgaggacacattcttcccaagccccgagagcagcgactccaccgaccacgtgaagcccaaagagacagagaacaccaagcagcccagcaagagctgccacaagcccaaggccatcgtgcacaccgagaaagtgaacatgatgagcctgaccgtgctgggcctgcggatgctgttcgccaaaaccgtggccgtgaacttcctgctgaccgccaagctgttcttcctc

SEQ ID NO: 7722 - DNA, 3009 bp, synthetic construct
  source 1..3009: mol_type = other DNA
atggccttaccagtgaccgccttgctcctgccgctggccttgctgctccacgccgccaggccggaagtgcagctggttgaatctggcggaggactggttcagcctggcggatctctgagactgtcttgtgccgccagcggcttcagcttcagcgacttttggatgagctgggtccgacaggcccctggcaaaggacttgaatgggtcgccacaatcagccaggccggcagcgagaaggactacgtggactctgtgaagggcagattcaccatcagccgggacaacgccaagaagtccctgtacctccagatgaacagcctgagagccgaggacaccgccgtgtactattgtgcctctggcgtgtacagcttcgactacagaggccagggcaccctggtcacagtctcttctggtaccggcggaggcggatctggcggcggaggtagcggtggcggaggatctgaattcgatgtgctgctgacccagagccctctgagcctgcctgtgacactgggacagcctgccagcatctcctgtcggagcagccagaccatcgtgcacagcaacggcaacacctacctggaatggttccagcagcggccaggccagagccccagactgctgatctaccaggtgtccaacagattcagcggcgtgcccgacagattctccggcagcggctctggcaccgacttcaccctgaagatcagccgggtggaagccgaggacgtgggcgtgtactactgttttcaaggcagccacgtgccccggacctttggcggaggaacaaaggtggaaatcaagagagccctcgaggacctgaagaacgtgttcccacctgaggtggccgtgttcgagcctagcgaggccgagatcagccacacccagaaagccaccctcgtgtgcctggctaccggcttctaccccgaccatgtggaactgtcttggtgggtcaacggcaaagaggtgcacagcggcgtgtgtaccgacccccagccactgaaagaacagcccgccctgaacgacagccggtactgcctgagcagcagactgagagtgtccgccaccttctggcagaacccccggaaccacttcagatgccaggtgcagttctacggcctgagcgagaacgacgagtggacccaggacagagccaagcccgtgacccagatcgtgtctgccgaagcctggggcagagccgatgatgtgattaagatccactggcaggaaaagaagtccaacaccatcctgggcagccaggaaggcaacaccatgaagaccaacgacacctacatgaagttcagctggctgaccgtgcccgagaagtccctggacaaagaacacagatgcatcgtgcggcacgaaaacaacaagaacggcgtggaccaggaaatcatcttcccacccatcaagaccgatgtgattacaatggaccccaaggacaactgctccaaggacgccaacgataccctgctgctccagctgaccaacaccagcgcctactacatgtacttgttgctgctgctgaagtccgtggtgtacttcgccatcatcacatgctgcctgctgcggagaaccgccttctgctgcaacggcgagaagtctagggccaagcgatctggatctggagcaacaaacttctcactactcaaacaagcaggtgacgtggaggagaatcccgggcctactagtatggactggatttggcgcatccttttccttgtcggcgctgctaccggcgcgcattccgggccccagctccagctgcaagagtctggacctggcctggtcaagcctagcgagacactgagcctgacctgtaccgtgtccggcgatagcatcagcagcggcgattactactggggctggatcagacagcctcctggcaaaggactggaatggatcggccacatctactacagcggcgtgacctactacaaccccagcctgaagtccagagtgaccatcagcgtggacaccagccggaaccagttctccctgaagctgtctagcgtgacagccgccgataccgccgtgtactactgcaccagagaggacagcagcaactggcggagtagaggccagggaacactggtcacagttagctctggatccggcggaggcggaagtggaggcggaggatctggcggcggaggctctttcgaacagatccaactggtgcagagcggcagcgagctgaagaaacctggggccagcgtgaaggtgtcctgcaaggccagcggctacacctttaccaactacggcatgaactgggtgcgccaggcccctggacagggcctgaaatggatgggctggatcaacaccaacaccggcgagcctaagtacgccgaagagttcaagggcagattcgccctgagcctggacaccagcgtgtccacagcctacctccagatcaacagcctgaaggccgaggataccgccgtgtacttctgcgccagaggctacggcaactacgccagaggggcttggctggcctattggggccagggaacactcgtgaccgtgtcctctacgcgtatccagaaccctgatcctgccgtgtaccagctgcgggatagcaagagcagcgacaagagcgtgtgtctgttcaccgacttcgacagccagaccaacgtgtcccagagcaaggactccgacgtgtacatcaccgataagtgcgtgctggacatgcggagcatggacttcaagagcaactccgccgtggcctggtccaacaagtccgatttcgcctgcgccaacgccttcaacaacagcattatccccgaggacacattcttcccaagccccgagagcagcgactccaccgaccacgtgaagcccaaagagacagagaacaccaagcagcccagcaagagctgccacaagcccaaggccatcgtgcacaccgagaaagtgaacatgatgagcctgaccgtgctgggcctgcggatgctgttcgccaaaaccgtggccgtgaacttcctgctgaccgccaagctgttcttcctc

SEQ ID NO: 7723 - DNA, 2964 bp, synthetic construct
  source 1..2964: mol_type = other DNA
atggccttaccagtgaccgccttgctcctgccgctggccttgctgctccacgccgccaggccggaagtgcagctggttgaatctggcggaggactggttcagcctggcggatctctgagactgtcttgtgccgccagcggcttcagcttcagcgacttttggatgagctgggtccgacaggcccctggcaaaggacttgaatgggtcgccacaatcagccaggccggcagcgagaaggactacgtggactctgtgaagggcagattcaccatcagccgggacaacgccaagaagtccctgtacctccagatgaacagcctgagagccgaggacaccgccgtgtactattgtgcctctggcgtgtacagcttcgactacagaggccagggcaccctggtcacagtctcttctggtaccggcggaggcggatctggcggcggaggtagcggtggcggaggatctgaattcgacgagatcgtgctgacacagagccctgccacactctctctgagccctggcgaaagagccaccctgagctgtagcgccagcagcagcatcaactacatctactggctccagcagaagcccggccaggcccccagaatcctgatctacctgaccagcaacctggcctccggcgtgccagccagattttctggcagcggctccggcaccgacttcaccctgacaatcagcagcctggaacccgaggacttcgccgtgtactactgcctccagtggtccagcaaccccctgacctttggcggaggcaccaaggtggaaatcaagctcgaggacctgaagaacgtgttcccacctgaggtggccgtgttcgagcctagcgaggccgagatcagccacacccagaaagccaccctcgtgtgcctggctaccggcttctaccccgaccatgtggaactgtcttggtgggtcaacggcaaagaggtgcacagcggcgtgtgtaccgacccccagccactgaaagaacagcccgccctgaacgacagccggtactgcctgagcagcagactgagagtgtccgccaccttctggcagaacccccggaaccacttcagatgccaggtgcagttctacggcctgagcgagaacgacgagtggacccaggacagagccaagcccgtgacccagatcgtgtctgccgaagcctggggcagagccgatgatgtgattaagatccactggcaggaaaagaagtccaacaccatcctgggcagccaggaaggcaacaccatgaagaccaacgacacctacatgaagttcagctggctgaccgtgcccgagaagtccctggacaaagaacacagatgcatcgtgcggcacgaaaacaacaagaacggcgtggaccaggaaatcatcttcccacccatcaagaccgatgtgattacaatggaccccaaggacaactgctccaaggacgccaacgataccctgctgctccagctgaccaacaccagcgcctactacatgtacttgttgctgctgctgaagtccgtggtgtacttcgccatcatcacatgctgcctgctgcggagaaccgccttctgctgcaacggcgagaagtctagggccaagcgatctggatctggagcaacaaacttctcactactcaaacaagcaggtgacgtggaggagaatcccgggcctactagtatggactggatttggcgcatccttttccttgtcggcgctgctaccggcgcgcattccgggccccagctccagctgcaagagtctggacctggcctggtcaagcctagcgagacactgagcctgacctgtaccgtgtccggcgatagcatcagcagcggcgattactactggggctggatcagacagcctcctggcaaaggactggaatggatcggccacatctactacagcggcgtgacctactacaaccccagcctgaagtccagagtgaccatcagcgtggacaccagccggaaccagttctccctgaagctgtctagcgtgacagccgccgataccgccgtgtactactgcaccagagaggacagcagcaactggcggagtagaggccagggaacactggtcacagttagctctggatccggcggaggcggaagtggaggcggaggatctggcggcggaggctctttcgaagaagtgcaactggtggaaagcgggggaggacttgtgaagcctggcggctctctgagactgagctgtgccgcctctggcttcaccttcagcagctacgacatgagctgggtgcgccaggctcctggcaagggactggaatgggtgtccaccatcagcagcggcggcagctacacctactacctggacagcatcaagggccggttcaccatctccagagacaacgccaagaacagcctgtacctccagatgaactccctgcgggccgaggacacagccgtgtattattgcgccagacagggcctggattactggggcagaggcacccttgtgaccgtgtcctctacgcgtatccagaaccctgatcctgccgtgtaccagctgcgggatagcaagagcagcgacaagagcgtgtgtctgttcaccgacttcgacagccagaccaacgtgtcccagagcaaggactccgacgtgtacatcaccgataagtgcgtgctggacatgcggagcatggacttcaagagcaactccgccgtggcctggtccaacaagtccgatttcgcctgcgccaacgccttcaacaacagcattatccccgaggacacattcttcccaagccccgagagcagcgactccaccgaccacgtgaagcccaaagagacagagaacaccaagcagcccagcaagagctgccacaagcccaaggccatcgtgcacaccgagaaagtgaacatgatgagcctgaccgtgctgggcctgcggatgctgttcgccaaaaccgtggccgtgaacttcctgctgaccgccaagctgttcttcctc

SEQ ID NO: 7724 - DNA, 2991 bp, synthetic construct
  source 1..2991: mol_type = other DNA
atggccttaccagtgaccgccttgctcctgccgctggccttgctgctccacgccgccaggccggaagtgcagctggttgaatctggcggaggactggttcagcctggcggatctctgagactgtcttgtgccgccagcggcttcagcttcagcgacttttggatgagctgggtccgacaggcccctggcaaaggacttgaatgggtcgccacaatcagccaggccggcagcgagaaggactacgtggactctgtgaagggcagattcaccatcagccgggacaacgccaagaagtccctgtacctccagatgaacagcctgagagccgaggacaccgccgtgtactattgtgcctctggcgtgtacagcttcgactacagaggccagggcaccctggtcacagtctcttctggtaccggcggaggcggatctggcggcggaggtagcggtggcggaggatctgaattcgacatcgtgatgacccagagccccgatagcctggccgtgtctctgggagagagagccaccatcaactgccgggccagcaagagcgtgtccaccagcggctacagcttcatgcactggtatcagcagaagcccggccagccccccaagctgctgatctacctggcctccaacctggaaagcggcgtgcccgatagattcagcggcagcggctctggcaccgacttcaccctgaccatcagttctcttcaggccgaggacgtggccgtgtactactgccagcacagcagagaggtgccctggacattcggccagggcacaaaggtggaaatcaagcggctcgaggacctgaagaacgtgttcccacctgaggtggccgtgttcgagcctagcgaggccgagatcagccacacccagaaagccaccctcgtgtgcctggctaccggcttctaccccgaccatgtggaactgtcttggtgggtcaacggcaaagaggtgcacagcggcgtgtgtaccgacccccagccactgaaagaacagcccgccctgaacgacagccggtactgcctgagcagcagactgagagtgtccgccaccttctggcagaacccccggaaccacttcagatgccaggtgcagttctacggcctgagcgagaacgacgagtggacccaggacagagccaagcccgtgacccagatcgtgtctgccgaagcctggggcagagccgatgatgtgattaagatccactggcaggaaaagaagtccaacaccatcctgggcagccaggaaggcaacaccatgaagaccaacgacacctacatgaagttcagctggctgaccgtgcccgagaagtccctggacaaagaacacagatgcatcgtgcggcacgaaaacaacaagaacggcgtggaccaggaaatcatcttcccacccatcaagaccgatgtgattacaatggaccccaaggacaactgctccaaggacgccaacgataccctgctgctccagctgaccaacaccagcgcctactacatgtacttgttgctgctgctgaagtccgtggtgtacttcgccatcatcacatgctgcctgctgcggagaaccgccttctgctgcaacggcgagaagtctagggccaagcgatctggatctggagcaacaaacttctcactactcaaacaagcaggtgacgtggaggagaatcccgggcctactagtatggactggatttggcgcatccttttccttgtcggcgctgctaccggcgcgcattccgggccccagctccagctgcaagagtctggacctggcctggtcaagcctagcgagacactgagcctgacctgtaccgtgtccggcgatagcatcagcagcggcgattactactggggctggatcagacagcctcctggcaaaggactggaatggatcggccacatctactacagcggcgtgacctactacaaccccagcctgaagtccagagtgaccatcagcgtggacaccagccggaaccagttctccctgaagctgtctagcgtgacagccgccgataccgccgtgtactactgcaccagagaggacagcagcaactggcggagtagaggccagggaacactggtcacagttagctctggatccggcggaggcggaagtggaggcggaggatctggcggcggaggctctttcgaacaggtgcagctggtgcagtctggggccgaagtgaagaaacctggggccagcgtgaaggtgtcctgcaaggccagcggatacacctttaccaactacggcatgaactgggtgcgccaggcccctggacagggcctggaatggatgggctggatcaacacctacaccggcgagcccacatacgccgacgccttcaagggcagattcgccttcagcctggacaccagcacctccaccgcctacctccagatcaacagcctgcggagcgacgacaccgccgtgtattattgcgccagagattacggcgactacgggatggactattggggccagggaaccaccgtgaccgtgtcctctacgcgtatccagaaccctgatcctgccgtgtaccagctgcgggatagcaagagcagcgacaagagcgtgtgtctgttcaccgacttcgacagccagaccaacgtgtcccagagcaaggactccgacgtgtacatcaccgataagtgcgtgctggacatgcggagcatggacttcaagagcaactccgccgtggcctggtccaacaagtccgatttcgcctgcgccaacgccttcaacaacagcattatccccgaggacacattcttcccaagccccgagagcagcgactccaccgaccacgtgaagcccaaagagacagagaacaccaagcagcccagcaagagctgccacaagcccaaggccatcgtgcacaccgagaaagtgaacatgatgagcctgaccgtgctgggcctgcggatgctgttcgccaaaaccgtggccgtgaacttcctgctgaccgccaagctgttcttcctc

SEQ ID NO: 7725 - DNA, 2979 bp, synthetic construct
  source 1..2979: mol_type = other DNA
atggccttaccagtgaccgccttgctcctgccgctggccttgctgctccacgccgccaggccggaagtgcagctggttgaatctggcggaggactggttcagcctggcggatctctgagactgtcttgtgccgccagcggcttcagcttcagcgacttttggatgagctgggtccgacaggcccctggcaaaggacttgaatgggtcgccacaatcagccaggccggcagcgagaaggactacgtggactctgtgaagggcagattcaccatcagccgggacaacgccaagaagtccctgtacctccagatgaacagcctgagagccgaggacaccgccgtgtactattgtgcctctggcgtgtacagcttcgactacagaggccagggcaccctggtcacagtctcttctggtaccggcggaggcggatctggcggcggaggtagcggtggcggaggatctgaattcgacatcgtgatgacccagacccccctgaccctgagcgtgacaatcggacagcctgccagcatctcctgcaagagcagccagagcctgctggacagcgacggcaagacctacctgaactggctgctgcagaggccaggccagagccccgagagactgatctacctggtgtccaagctggactccggcgtgcccgatagattcacaggcagcggctccggcaccgacttcaccctgaagatcagccgggtggaagccgaggacctgggcgtgtactgttgttggcagggcacccacttcccttacaccttcggcggagggaccaaggtggaaatcaagggcctcgaggacctgaagaacgtgttcccacctgaggtggccgtgttcgagcctagcgaggccgagatcagccacacccagaaagccaccctcgtgtgcctggctaccggcttctaccccgaccatgtggaactgtcttggtgggtcaacggcaaagaggtgcacagcggcgtgtgtaccgacccccagccactgaaagaacagcccgccctgaacgacagccggtactgcctgagcagcagactgagagtgtccgccaccttctggcagaacccccggaaccacttcagatgccaggtgcagttctacggcctgagcgagaacgacgagtggacccaggacagagccaagcccgtgacccagatcgtgtctgccgaagcctggggcagagccgatgatgtgattaagatccactggcaggaaaagaagtccaacaccatcctgggcagccaggaaggcaacaccatgaagaccaacgacacctacatgaagttcagctggctgaccgtgcccgagaagtccctggacaaagaacacagatgcatcgtgcggcacgaaaacaacaagaacggcgtggaccaggaaatcatcttcccacccatcaagaccgatgtgattacaatggaccccaaggacaactgctccaaggacgccaacgataccctgctgctccagctgaccaacaccagcgcctactacatgtacttgttgctgctgctgaagtccgtggtgtacttcgccatcatcacatgctgcctgctgcggagaaccgccttctgctgcaacggcgagaagtctagggccaagcgatctggatctggagcaacaaacttctcactactcaaacaagcaggtgacgtggaggagaatcccgggcctactagtatggactggatttggcgcatccttttccttgtcggcgctgctaccggcgcgcattccgggccccagctccagctgcaagagtctggacctggcctggtcaagcctagcgagacactgagcctgacctgtaccgtgtccggcgatagcatcagcagcggcgattactactggggctggatcagacagcctcctggcaaaggactggaatggatcggccacatctactacagcggcgtgacctactacaaccccagcctgaagtccagagtgaccatcagcgtggacaccagccggaaccagttctccctgaagctgtctagcgtgacagccgccgataccgccgtgtactactgcaccagagaggacagcagcaactggcggagtagaggccagggaacactggtcacagttagctctggatccggcggaggcggaagtggaggcggaggatctggcggcggaggctctttcgaacaggtgcaactgcagcagcctggcgctgaacttgtgcggccaggcgcctctgtgaagctgagctgtaaagccagcggctacaccttcaccagctactggatgaactgggtcaagcagcgcccaggccagggcctggaatggatcggaatgatcgaccccagcgacagcgagacacactacaaccacatcttcaaggacaaggccaccctgaccgtggacaagtccagcagcacagcctacctgcaactgtccagcctgaccagcgaggacagcgccgtgtactactgcgcccggaacctgtatctgtggggccagggaacaagcgtgaccgtgtctagcacgcgtatccagaaccctgatcctgccgtgtaccagctgcgggatagcaagagcagcgacaagagcgtgtgtctgttcaccgacttcgacagccagaccaacgtgtcccagagcaaggactccgacgtgtacatcaccgataagtgcgtgctggacatgcggagcatggacttcaagagcaactccgccgtggcctggtccaacaagtccgatttcgcctgcgccaacgccttcaacaacagcattatccccgaggacacattcttcccaagccccgagagcagcgactccaccgaccacgtgaagcccaaagagacagagaacaccaagcagcccagcaagagctgccacaagcccaaggccatcgtgcacaccgagaaagtgaacatgatgagcctgaccgtgctgggcctgcggatgctgttcgccaaaaccgtggccgtgaacttcctgctgaccgccaagctgttcttcctc

SEQ ID NO: 7726 - DNA, 3003 bp, synthetic construct
  source 1..3003: mol_type = other DNA
atggccttaccagtgaccgccttgctcctgccgctggccttgctgctccacgccgccaggccggaagtgcagctggttgaatctggcggaggactggttcagcctggcggatctctgagactgtcttgtgccgccagcggcttcagcttcagcgacttttggatgagctgggtccgacaggcccctggcaaaggacttgaatgggtcgccacaatcagccaggccggcagcgagaaggactacgtggactctgtgaagggcagattcaccatcagccgggacaacgccaagaagtccctgtacctccagatgaacagcctgagagccgaggacaccgccgtgtactattgtgcctctggcgtgtacagcttcgactacagaggccagggcaccctggtcacagtctcttctggtaccggcggaggcggatctggcggcggaggtagcggtggcggaggatctgaattcgacatcgtgatgacccagagccccgatagcctggccgtgtctctgggagagagagccaccatcaactgcgagagcagccagagcctgctgaacagcggcaaccagaagaactacctgacctggtatcagcagaagcccggccagccccccaagcccctgatctattgggccagcaccagagaaagcggcgtgcccgatagattcagcggcagcggaagcggcaccgacttcaccctgaccatcagttctcttcaggccgaggacgtggccgtgtactactgccagaacgactacagctacccctacaccttcggccagggcaccaagctggaaatcaagagactcgaggacctgaagaacgtgttcccacctgaggtggccgtgttcgagcctagcgaggccgagatcagccacacccagaaagccaccctcgtgtgcctggctaccggcttctaccccgaccatgtggaactgtcttggtgggtcaacggcaaagaggtgcacagcggcgtgtgtaccgacccccagccactgaaagaacagcccgccctgaacgacagccggtactgcctgagcagcagactgagagtgtccgccaccttctggcagaacccccggaaccacttcagatgccaggtgcagttctacggcctgagcgagaacgacgagtggacccaggacagagccaagcccgtgacccagatcgtgtctgccgaagcctggggcagagccgatgatgtgattaagatccactggcaggaaaagaagtccaacaccatcctgggcagccaggaaggcaacaccatgaagaccaacgacacctacatgaagttcagctggctgaccgtgcccgagaagtccctggacaaagaacacagatgcatcgtgcggcacgaaaacaacaagaacggcgtggaccaggaaatcatcttcccacccatcaagaccgatgtgattacaatggaccccaaggacaactgctccaaggacgccaacgataccctgctgctccagctgaccaacaccagcgcctactacatgtacttgttgctgctgctgaagtccgtggtgtacttcgccatcatcacatgctgcctgctgcggagaaccgccttctgctgcaacggcgagaagtctagggccaagcgatctggatctggagcaacaaacttctcactactcaaacaagcaggtgacgtggaggagaatcccgggcctactagtatggactggatttggcgcatccttttccttgtcggcgctgctaccggcgcgcattccgggccccagctccagctgcaagagtctggacctggcctggtcaagcctagcgagacactgagcctgacctgtaccgtgtccggcgatagcatcagcagcggcgattactactggggctggatcagacagcctcctggcaaaggactggaatggatcggccacatctactacagcggcgtgacctactacaaccccagcctgaagtccagagtgaccatcagcgtggacaccagccggaaccagttctccctgaagctgtctagcgtgacagccgccgataccgccgtgtactactgcaccagagaggacagcagcaactggcggagtagaggccagggaacactggtcacagttagctctggatccggcggaggcggaagtggaggcggaggatctggcggcggaggctctttcgaagaagtgcagctggtgcagtctggggccgaagtgaagaagcctggcgagagcctgaagatcagctgcaagggcagcggctacagcttcaccgactactacatgaagtgggccagacagatgcccggcaagggcctggaatggatgggcgacatcatccccagcaacggggccaccttctacaaccagaaattcaagggccaagtgaccatctccgccgacaagagcatcagcaccacctacctccagtggtccagcctgaaggccagcgacaccgccatgtactattgcgccagaagccatctgctgcgggccagttggttcgcctattggggccagggaacaatggtcacagtgtccagcacgcgtatccagaaccctgatcctgccgtgtaccagctgcgggatagcaagagcagcgacaagagcgtgtgtctgttcaccgacttcgacagccagaccaacgtgtcccagagcaaggactccgacgtgtacatcaccgataagtgcgtgctggacatgcggagcatggacttcaagagcaactccgccgtggcctggtccaacaagtccgatttcgcctgcgccaacgccttcaacaacagcattatccccgaggacacattcttcccaagccccgagagcagcgactccaccgaccacgtgaagcccaaagagacagagaacaccaagcagcccagcaagagctgccacaagcccaaggccatcgtgcacaccgagaaagtgaacatgatgagcctgaccgtgctgggcctgcggatgctgttcgccaaaaccgtggccgtgaacttcctgctgaccgccaagctgttcttcctc

SEQ ID NO: 7727 - DNA, 2988 bp, synthetic construct
  source 1..2988: mol_type = other DNA
atggccttaccagtgaccgccttgctcctgccgctggccttgctgctccacgccgccaggccggaagtgcagctggttgaatctggcggaggactggttcagcctggcggatctctgagactgtcttgtgccgccagcggcttcagcttcagcgacttttggatgagctgggtccgacaggcccctggcaaaggacttgaatgggtcgccacaatcagccaggccggcagcgagaaggactacgtggactctgtgaagggcagattcaccatcagccgggacaacgccaagaagtccctgtacctccagatgaacagcctgagagccgaggacaccgccgtgtactattgtgcctctggcgtgtacagcttcgactacagaggccagggcaccctggtcacagtctcttctggtaccggcggaggcggatctggcggcggaggtagcggtggcggaggatctgaattcgacatccagatgacccagtctaccagttccctgagtgcatccctcggagacagggtgacgatcagttgcagcgcaagccaagggatcaataactatctgaactggtatcagcagaaaccggacggaacagtcgaactcctgatttattacaccagcacccttcagagtggcgtcccttcccggttcagtggctccggaagcgggaccgattactccctgaccatttctaatctggagccagaggacataggaacgtattattgccagcagtatagtaaactgccacgaacttttggaggggggacgaaactggagatcaaactcgaggacctgaagaacgtgttcccacctgaggtggccgtgttcgagcctagcgaggccgagatcagccacacccagaaagccaccctcgtgtgcctggctaccggcttctaccccgaccatgtggaactgtcttggtgggtcaacggcaaagaggtgcacagcggcgtgtgtaccgacccccagccactgaaagaacagcccgccctgaacgacagccggtactgcctgagcagcagactgagagtgtccgccaccttctggcagaacccccggaaccacttcagatgccaggtgcagttctacggcctgagcgagaacgacgagtggacccaggacagagccaagcccgtgacccagatcgtgtctgccgaagcctggggcagagccgatgatgtgattaagatccactggcaggaaaagaagtccaacaccatcctgggcagccaggaaggcaacaccatgaagaccaacgacacctacatgaagttcagctggctgaccgtgcccgagaagtccctggacaaagaacacagatgcatcgtgcggcacgaaaacaacaagaacggcgtggaccaggaaatcatcttcccacccatcaagaccgatgtgattacaatggaccccaaggacaactgctccaaggacgccaacgataccctgctgctccagctgaccaacaccagcgcctactacatgtacttgttgctgctgctgaagtccgtggtgtacttcgccatcatcacatgctgcctgctgcggagaaccgccttctgctgcaacggcgagaagtctagggccaagcgatctggatctggagcaacaaacttctcactactcaaacaagcaggtgacgtggaggagaatcccgggcctactagtatggactggatttggcgcatccttttccttgtcggcgctgctaccggcgcgcattccgggccccagctccagctgcaagagtctggacctggcctggtcaagcctagcgagacactgagcctgacctgtaccgtgtccggcgatagcatcagcagcggcgattactactggggctggatcagacagcctcctggcaaaggactggaatggatcggccacatctactacagcggcgtgacctactacaaccccagcctgaagtccagagtgaccatcagcgtggacaccagccggaaccagttctccctgaagctgtctagcgtgacagccgccgataccgccgtgtactactgcaccagagaggacagcagcaactggcggagtagaggccagggaacactggtcacagttagctctggatccggcggaggcggaagtggaggcggaggatctggcggcggaggctctttcgaacaggtgcaactccagcagtccggaagcgagcttatgatgccaggggcatcagtgaagatcagctgcaaggctactggctacaccttctctaattactggatagagtgggttaaacaaaggccagggcacggcctggaatggatcggcgagatcctgcctgggacaggccgaaccatttataacgagaagttcaaaggcaaggctactttcaccgcagatataagctctaatacagtgcaaatgcagctctcttccctgacaagtgaggatagtgccgtgtattattgcgcacgaagagattactatggaaatttttattacgctatggattattggggtcaaggaacaagtgtgaccgttagcagcacgcgtatccagaaccctgatcctgccgtgtaccagctgcgggatagcaagagcagcgacaagagcgtgtgtctgttcaccgacttcgacagccagaccaacgtgtcccagagcaaggactccgacgtgtacatcaccgataagtgcgtgctggacatgcggagcatggacttcaagagcaactccgccgtggcctggtccaacaagtccgatttcgcctgcgccaacgccttcaacaacagcattatccccgaggacacattcttcccaagccccgagagcagcgactccaccgaccacgtgaagcccaaagagacagagaacaccaagcagcccagcaagagctgccacaagcccaaggccatcgtgcacaccgagaaagtgaacatgatgagcctgaccgtgctgggcctgcggatgctgttcgccaaaaccgtggccgtgaacttcctgctgaccgccaagctgttcttcctc

SEQ ID NO: 7728 - DNA, 2973 bp, synthetic construct
  source 1..2973: mol_type = other DNA
atggccttaccagtgaccgccttgctcctgccgctggccttgctgctccacgccgccaggccggaagtgcagctggttgaatctggcggaggactggttcagcctggcggatctctgagactgtcttgtgccgccagcggcttcagcttcagcgacttttggatgagctgggtccgacaggcccctggcaaaggacttgaatgggtcgccacaatcagccaggccggcagcgagaaggactacgtggactctgtgaagggcagattcaccatcagccgggacaacgccaagaagtccctgtacctccagatgaacagcctgagagccgaggacaccgccgtgtactattgtgcctctggcgtgtacagcttcgactacagaggccagggcaccctggtcacagtctcttctggtaccggcggaggcggatctggcggcggaggtagcggtggcggaggatctgaattcgacatccagatgacccagagccctgccagcctgtccgtgtctgtgggcgagacagtgaccatcacctgtcgggccagcgagaacatctacagcaacctggcctggtatcagcagaagcagggcaagagcccccaactgctggtgtacgccgccaccaatctggccgatggcgtgcccagcagattttccggctctggcagcggcacccagtacagcctgaagatcaacagcctccagagcgaggacttcggcagctactactgccagcacttctggggcacctggacctttggaggaggcaccaccctggaaatcaagctcgaggacctgaagaacgtgttcccacctgaggtggccgtgttcgagcctagcgaggccgagatcagccacacccagaaagccaccctcgtgtgcctggctaccggcttctaccccgaccatgtggaactgtcttggtgggtcaacggcaaagaggtgcacagcggcgtgtgtaccgacccccagccactgaaagaacagcccgccctgaacgacagccggtactgcctgagcagcagactgagagtgtccgccaccttctggcagaacccccggaaccacttcagatgccaggtgcagttctacggcctgagcgagaacgacgagtggacccaggacagagccaagcccgtgacccagatcgtgtctgccgaagcctggggcagagccgatgatgtgattaagatccactggcaggaaaagaagtccaacaccatcctgggcagccaggaaggcaacaccatgaagaccaacgacacctacatgaagttcagctggctgaccgtgcccgagaagtccctggacaaagaacacagatgcatcgtgcggcacgaaaacaacaagaacggcgtggaccaggaaatcatcttcccacccatcaagaccgatgtgattacaatggaccccaaggacaactgctccaaggacgccaacgataccctgctgctccagctgaccaacaccagcgcctactacatgtacttgttgctgctgctgaagtccgtggtgtacttcgccatcatcacatgctgcctgctgcggagaaccgccttctgctgcaacggcgagaagtctagggccaagcgatctggatctggagcaacaaacttctcactactcaaacaagcaggtgacgtggaggagaatcccgggcctactagtatggactggatttggcgcatccttttccttgtcggcgctgctaccggcgcgcattccgggccccagctccagctgcaagagtctggacctggcctggtcaagcctagcgagacactgagcctgacctgtaccgtgtccggcgatagcatcagcagcggcgattactactggggctggatcagacagcctcctggcaaaggactggaatggatcggccacatctactacagcggcgtgacctactacaaccccagcctgaagtccagagtgaccatcagcgtggacaccagccggaaccagttctccctgaagctgtctagcgtgacagccgccgataccgccgtgtactactgcaccagagaggacagcagcaactggcggagtagaggccagggaacactggtcacagttagctctggatccggcggaggcggaagtggaggcggaggatctggcggcggaggctctttcgaagaagtgcaactccagcagagcggccctgagcttgtgaagcctggcgcttccgtgaagatgagctgcaaggccagcggctacaccttcaccgactactacatgaagtggatgaagcagagccacggcaagtccctggaatggatcggcgacatcaaccccaacaacggcggcaccacctacaaccagaagttcaagggcaaggccaccctgaccgtggacaagagcagcagcaccgcctacatgcaactgaacagcctgaccagcgaggacagcgccgtgtactactgcgccagagactacggctacggctatttcgactactggggccagggcacaaccctgacagtgtcctctacgcgtatccagaaccctgatcctgccgtgtaccagctgcgggatagcaagagcagcgacaagagcgtgtgtctgttcaccgacttcgacagccagaccaacgtgtcccagagcaaggactccgacgtgtacatcaccgataagtgcgtgctggacatgcggagcatggacttcaagagcaactccgccgtggcctggtccaacaagtccgatttcgcctgcgccaacgccttcaacaacagcattatccccgaggacacattcttcccaagccccgagagcagcgactccaccgaccacgtgaagcccaaagagacagagaacaccaagcagcccagcaagagctgccacaagcccaaggccatcgtgcacaccgagaaagtgaacatgatgagcctgaccgtgctgggcctgcggatgctgttcgccaaaaccgtggccgtgaacttcctgctgaccgccaagctgttcttcctc

SEQ ID NO: 7729 - DNA, 2982 bp, synthetic construct
  source 1..2982: mol_type = other DNA
atggccttaccagtgaccgccttgctcctgccgctggccttgctgctccacgccgccaggccggaagtgcagctggttgaatctggcggaggactggttcagcctggcggatctctgagactgtcttgtgccgccagcggcttcagcttcagcgacttttggatgagctgggtccgacaggcccctggcaaaggacttgaatgggtcgccacaatcagccaggccggcagcgagaaggactacgtggactctgtgaagggcagattcaccatcagccgggacaacgccaagaagtccctgtacctccagatgaacagcctgagagccgaggacaccgccgtgtactattgtgcctctggcgtgtacagcttcgactacagaggccagggcaccctggtcacagtctcttctggtaccggcggaggcggatctggcggcggaggtagcggtggcggaggatctgaattcgagatcgtgctgacacagagccctggcaccctgagcctgtctccaggcgaaagagccacactgagctgtcgggcctctcagagcgtgggaggctacctggcttggtatcagcagaagccaggccaggcccccagactgctgatctacgacgccagcaatcgggccacaggcatccccgccagattttctggcagcggctccggcaccgacttcaccctgacaatcagcagcctggaacccgaggacttcgccgtgtactactgccagcagcggaacaactggccccccatgtacacattcggccagggcaccaagctggaaatcaagagactcgaggacctgaagaacgtgttcccacctgaggtggccgtgttcgagcctagcgaggccgagatcagccacacccagaaagccaccctcgtgtgcctggctaccggcttctaccccgaccatgtggaactgtcttggtgggtcaacggcaaagaggtgcacagcggcgtgtgtaccgacccccagccactgaaagaacagcccgccctgaacgacagccggtactgcctgagcagcagactgagagtgtccgccaccttctggcagaacccccggaaccacttcagatgccaggtgcagttctacggcctgagcgagaacgacgagtggacccaggacagagccaagcccgtgacccagatcgtgtctgccgaagcctggggcagagccgatgatgtgattaagatccactggcaggaaaagaagtccaacaccatcctgggcagccaggaaggcaacaccatgaagaccaacgacacctacatgaagttcagctggctgaccgtgcccgagaagtccctggacaaagaacacagatgcatcgtgcggcacgaaaacaacaagaacggcgtggaccaggaaatcatcttcccacccatcaagaccgatgtgattacaatggaccccaaggacaactgctccaaggacgccaacgataccctgctgctccagctgaccaacaccagcgcctactacatgtacttgttgctgctgctgaagtccgtggtgtacttcgccatcatcacatgctgcctgctgcggagaaccgccttctgctgcaacggcgagaagtctagggccaagcgatctggatctggagcaacaaacttctcactactcaaacaagcaggtgacgtggaggagaatcccgggcctactagtatggactggatttggcgcatccttttccttgtcggcgctgctaccggcgcgcattccgggccccagctccagctgcaagagtctggacctggcctggtcaagcctagcgagacactgagcctgacctgtaccgtgtccggcgatagcatcagcagcggcgattactactggggctggatcagacagcctcctggcaaaggactggaatggatcggccacatctactacagcggcgtgacctactacaaccccagcctgaagtccagagtgaccatcagcgtggacaccagccggaaccagttctccctgaagctgtctagcgtgacagccgccgataccgccgtgtactactgcaccagagaggacagcagcaactggcggagtagaggccagggaacactggtcacagttagctctggatccggcggaggcggaagtggaggcggaggatctggcggcggaggctctttcgaacaggtgcaactggtgcagagcggagccgaagtgaagaaacccggcagcagcgtgaaggtgtcctgcaaggcttccggcggcaccttcagcagctacgccatttcttgggtgcgccaggctcctggacagggcctggaatggatgggcggcatcatccctatcctgggcaccgccaactacgcccagaaattccagggcagagtgaccatcaccgccgacgagagcaccagcaccgcctacatggaactgagcagcctgcggagcgaggacacagccgtgtattattgcgccagatggggcggaggggccttcgacatttggggccagggaacaatggtcaccgtgtccagcacgcgtatccagaaccctgatcctgccgtgtaccagctgcgggatagcaagagcagcgacaagagcgtgtgtctgttcaccgacttcgacagccagaccaacgtgtcccagagcaaggactccgacgtgtacatcaccgataagtgcgtgctggacatgcggagcatggacttcaagagcaactccgccgtggcctggtccaacaagtccgatttcgcctgcgccaacgccttcaacaacagcattatccccgaggacacattcttcccaagccccgagagcagcgactccaccgaccacgtgaagcccaaagagacagagaacaccaagcagcccagcaagagctgccacaagcccaaggccatcgtgcacaccgagaaagtgaacatgatgagcctgaccgtgctgggcctgcggatgctgttcgccaaaaccgtggccgtgaacttcctgctgaccgccaagctgttcttcctc

SEQ ID NO: 7730 - DNA, 2967 bp, synthetic construct
  source 1..2967: mol_type = other DNA
atggccttaccagtgaccgccttgctcctgccgctggccttgctgctccacgccgccaggccggaagtgcagctggttgaatctggcggaggactggttcagcctggcggatctctgagactgtcttgtgccgccagcggcttcagcttcagcgacttttggatgagctgggtccgacaggcccctggcaaaggacttgaatgggtcgccacaatcagccaggccggcagcgagaaggactacgtggactctgtgaagggcagattcaccatcagccgggacaacgccaagaagtccctgtacctccagatgaacagcctgagagccgaggacaccgccgtgtactattgtgcctctggcgtgtacagcttcgactacagaggccagggcaccctggtcacagtctcttctggtaccggcggaggcggatctggcggcggaggtagcggtggcggaggatctgaattccagatcgtgctgacacagagccctgccctgatgagcgccagccctggcgagaaagtgaccatgacctgtagcgccagcagcagcgtgcgctacatgtactggtatcagcagaagcccagaagcagccccaagccctggattcacctgaccagcaatctggcctctggcgtgcccgctagattttccggctctggcagcggcaccagctacagcctgaccatcagcagcatggaagccgaggacgccgccacctactactgccagcagtggtccagccaccccttcacatttggctccggcaccaagctggaaatcaagctcgaggacctgaagaacgtgttcccacctgaggtggccgtgttcgagcctagcgaggccgagatcagccacacccagaaagccaccctcgtgtgcctggctaccggcttctaccccgaccatgtggaactgtcttggtgggtcaacggcaaagaggtgcacagcggcgtgtgtaccgacccccagccactgaaagaacagcccgccctgaacgacagccggtactgcctgagcagcagactgagagtgtccgccaccttctggcagaacccccggaaccacttcagatgccaggtgcagttctacggcctgagcgagaacgacgagtggacccaggacagagccaagcccgtgacccagatcgtgtctgccgaagcctggggcagagccgatgatgtgattaagatccactggcaggaaaagaagtccaacaccatcctgggcagccaggaaggcaacaccatgaagaccaacgacacctacatgaagttcagctggctgaccgtgcccgagaagtccctggacaaagaacacagatgcatcgtgcggcacgaaaacaacaagaacggcgtggaccaggaaatcatcttcccacccatcaagaccgatgtgattacaatggaccccaaggacaactgctccaaggacgccaacgataccctgctgctccagctgaccaacaccagcgcctactacatgtacttgttgctgctgctgaagtccgtggtgtacttcgccatcatcacatgctgcctgctgcggagaaccgccttctgctgcaacggcgagaagtctagggccaagcgatctggatctggagcaacaaacttctcactactcaaacaagcaggtgacgtggaggagaatcccgggcctactagtatggactggatttggcgcatccttttccttgtcggcgctgctaccggcgcgcattccgggccccagctccagctgcaagagtctggacctggcctggtcaagcctagcgagacactgagcctgacctgtaccgtgtccggcgatagcatcagcagcggcgattactactggggctggatcagacagcctcctggcaaaggactggaatggatcggccacatctactacagcggcgtgacctactacaaccccagcctgaagtccagagtgaccatcagcgtggacaccagccggaaccagttctccctgaagctgtctagcgtgacagccgccgataccgccgtgtactactgcaccagagaggacagcagcaactggcggagtagaggccagggaacactggtcacagttagctctggatccggcggaggcggaagtggaggcggaggatctggcggcggaggctctttcgaagatgtgcaactccaggaaagcggccctggccttgtgaagcctagccagagcctgtccctgacctgtaccgtgaccggcttcagcatcaccagcgactactcttggaactggatcagacagttccctggcaacaaactggaatggatgggctacatcagctactccggccacacctcctacaaccccagcctggaaagccggatctccatcaccagagacaccagcaagaaccagttcttcttgcaactgaacagcgtgaccaccgaggataccgccacatattactgtaccagaggcaactgggacgtggtgtactggggccagggcacacttgtgaccgtgtctgctacgcgtatccagaaccctgatcctgccgtgtaccagctgcgggatagcaagagcagcgacaagagcgtgtgtctgttcaccgacttcgacagccagaccaacgtgtcccagagcaaggactccgacgtgtacatcaccgataagtgcgtgctggacatgcggagcatggacttcaagagcaactccgccgtggcctggtccaacaagtccgatttcgcctgcgccaacgccttcaacaacagcattatccccgaggacacattcttcccaagccccgagagcagcgactccaccgaccacgtgaagcccaaagagacagagaacaccaagcagcccagcaagagctgccacaagcccaaggccatcgtgcacaccgagaaagtgaacatgatgagcctgaccgtgctgggcctgcggatgctgttcgccaaaaccgtggccgtgaacttcctgctgaccgccaagctgttcttcctc

SEQ ID NO: 7731 - DNA, 2997 bp, synthetic construct
  source 1..2997: mol_type = other DNA
atggccttaccagtgaccgccttgctcctgccgctggccttgctgctccacgccgccaggccggaagtgcagctggttgaatctggcggaggactggttcagcctggcggatctctgagactgtcttgtgccgccagcggcttcagcttcagcgacttttggatgagctgggtccgacaggcccctggcaaaggacttgaatgggtcgccacaatcagccaggccggcagcgagaaggactacgtggactctgtgaagggcagattcaccatcagccgggacaacgccaagaagtccctgtacctccagatgaacagcctgagagccgaggacaccgccgtgtactattgtgcctctggcgtgtacagcttcgactacagaggccagggcaccctggtcacagtctcttctggtaccggcggaggcggatctggcggcggaggtagcggtggcggaggatctgaattcgacgtcgtgatgacccagagccctctgagcctgcctgtgacactgggacagcctgccagcatctcctgtcggagcagccagagcatcgtgcacagcgacggcaacacctacctggaatggtatcagcagcggccaggccagagccccagacggctgatctacaaggtgtccaacagattcagcggcgtgcccgacagattctccggcagcggctctggcaccgacttcaccctgaagatcagcagagtggaagccgaggacgtgggcgtgtactactgttttcaaggcagccacgccccctggacctttggcggaggaacaaaggtggaaatcaagctcgaggacctgaagaacgtgttcccacctgaggtggccgtgttcgagcctagcgaggccgagatcagccacacccagaaagccaccctcgtgtgcctggctaccggcttctaccccgaccatgtggaactgtcttggtgggtcaacggcaaagaggtgcacagcggcgtgtgtaccgacccccagccactgaaagaacagcccgccctgaacgacagccggtactgcctgagcagcagactgagagtgtccgccaccttctggcagaacccccggaaccacttcagatgccaggtgcagttctacggcctgagcgagaacgacgagtggacccaggacagagccaagcccgtgacccagatcgtgtctgccgaagcctggggcagagccgatgatgtgattaagatccactggcaggaaaagaagtccaacaccatcctgggcagccaggaaggcaacaccatgaagaccaacgacacctacatgaagttcagctggctgaccgtgcccgagaagtccctggacaaagaacacagatgcatcgtgcggcacgaaaacaacaagaacggcgtggaccaggaaatcatcttcccacccatcaagaccgatgtgattacaatggaccccaaggacaactgctccaaggacgccaacgataccctgctgctccagctgaccaacaccagcgcctactacatgtacttgttgctgctgctgaagtccgtggtgtacttcgccatcatcacatgctgcctgctgcggagaaccgccttctgctgcaacggcgagaagtctagggccaagcgatctggatctggagcaacaaacttctcactactcaaacaagcaggtgacgtggaggagaatcccgggcctactagtatggactggatttggcgcatccttttccttgtcggcgctgctaccggcgcgcattccgggccccagctccagctgcaagagtctggacctggcctggtcaagcctagcgagacactgagcctgacctgtaccgtgtccggcgatagcatcagcagcggcgattactactggggctggatcagacagcctcctggcaaaggactggaatggatcggccacatctactacagcggcgtgacctactacaaccccagcctgaagtccagagtgaccatcagcgtggacaccagccggaaccagttctccctgaagctgtctagcgtgacagccgccgataccgccgtgtactactgcaccagagaggacagcagcaactggcggagtagaggccagggaacactggtcacagttagctctggatccggcggaggcggaagtggaggcggaggatctggcggcggaggctctttcgaagaagtgcaactggtggaatcaggcggcggactggtgcagcctggcggatctctgagactgagctgtgccgccagcggcttcaccttcagcagctacggaatgcactgggtgcgccaggcccctggcaaaggactggaatgggtggcctacatcaccaccagaagcagcaccatctactacgccgacagcgtgaagggccggttcaccatctccagagacaacgccaagaacagcctgtacctccagatgaactccctgcgggccgaggacaccgccgtgtactattgcaccagagagcccctgaccggctactacgctatggactattggggccagggcaccagcgtgaccgtgtctagtacgcgtatccagaaccctgatcctgccgtgtaccagctgcgggatagcaagagcagcgacaagagcgtgtgtctgttcaccgacttcgacagccagaccaacgtgtcccagagcaaggactccgacgtgtacatcaccgataagtgcgtgctggacatgcggagcatggacttcaagagcaactccgccgtggcctggtccaacaagtccgatttcgcctgcgccaacgccttcaacaacagcattatccccgaggacacattcttcccaagccccgagagcagcgactccaccgaccacgtgaagcccaaagagacagagaacaccaagcagcccagcaagagctgccacaagcccaaggccatcgtgcacaccgagaaagtgaacatgatgagcctgaccgtgctgggcctgcggatgctgttcgccaaaaccgtggccgtgaacttcctgctgaccgccaagctgttcttcctc

SEQ ID NO: 7732 - DNA, 2973 bp, synthetic construct
  source 1..2973: mol_type = other DNA
atggccttaccagtgaccgccttgctcctgccgctggccttgctgctccacgccgccaggccggaagtgcagctggttgaatctggcggaggactggttcagcctggcggatctctgagactgtcttgtgccgccagcggcttcagcttcagcgacttttggatgagctgggtccgacaggcccctggcaaaggacttgaatgggtcgccacaatcagccaggccggcagcgagaaggactacgtggactctgtgaagggcagattcaccatcagccgggacaacgccaagaagtccctgtacctccagatgaacagcctgagagccgaggacaccgccgtgtactattgtgcctctggcgtgtacagcttcgactacagaggccagggcaccctggtcacagtctcttctggtaccggcggaggcggatctggcggcggaggtagcggtggcggaggatctgaattcgacatccagatgacccagagccccagcagcctgtctgccagcgtgggcgacagagtgaccatcacctgtagagccagccagagcatcagcctgtggctgaactggtatcagcagaagcccggcaaggcccccaagctgctgatctacgccgccagcacactccagagcggcgtgccaagcagattttccggcagcggctccggcaccgacttcaccctgacaatcagctccctccagcccgaggacttcgccacctactactgccagcagtactacaccagcccctacaccttcggccagggcaccaaggtggaaatcaagagactcgaggacctgaagaacgtgttcccacctgaggtggccgtgttcgagcctagcgaggccgagatcagccacacccagaaagccaccctcgtgtgcctggctaccggcttctaccccgaccatgtggaactgtcttggtgggtcaacggcaaagaggtgcacagcggcgtgtgtaccgacccccagccactgaaagaacagcccgccctgaacgacagccggtactgcctgagcagcagactgagagtgtccgccaccttctggcagaacccccggaaccacttcagatgccaggtgcagttctacggcctgagcgagaacgacgagtggacccaggacagagccaagcccgtgacccagatcgtgtctgccgaagcctggggcagagccgatgatgtgattaagatccactggcaggaaaagaagtccaacaccatcctgggcagccaggaaggcaacaccatgaagaccaacgacacctacatgaagttcagctggctgaccgtgcccgagaagtccctggacaaagaacacagatgcatcgtgcggcacgaaaacaacaagaacggcgtggaccaggaaatcatcttcccacccatcaagaccgatgtgattacaatggaccccaaggacaactgctccaaggacgccaacgataccctgctgctccagctgaccaacaccagcgcctactacatgtacttgttgctgctgctgaagtccgtggtgtacttcgccatcatcacatgctgcctgctgcggagaaccgccttctgctgcaacggcgagaagtctagggccaagcgatctggatctggagcaacaaacttctcactactcaaacaagcaggtgacgtggaggagaatcccgggcctactagtatggactggatttggcgcatccttttccttgtcggcgctgctaccggcgcgcattccgggccccagctccagctgcaagagtctggacctggcctggtcaagcctagcgagacactgagcctgacctgtaccgtgtccggcgatagcatcagcagcggcgattactactggggctggatcagacagcctcctggcaaaggactggaatggatcggccacatctactacagcggcgtgacctactacaaccccagcctgaagtccagagtgaccatcagcgtggacaccagccggaaccagttctccctgaagctgtctagcgtgacagccgccgataccgccgtgtactactgcaccagagaggacagcagcaactggcggagtagaggccagggaacactggtcacagttagctctggatccggcggaggcggaagtggaggcggaggatctggcggcggaggctctttcgaacaggtgcaactgctggaatctggcggcggactggtgcagcctggcggatctctgagactgagctgtgccgccagcggcttcaccttcagcagctacgccatgagctgggtgcgccaggcccctggaaaaggactggaatgggtgtccgtgatccggtccagcggcagcagcacctattacgccgatagcgtgaagggccggttcaccatcagccgggacaacagcaagaacaccctgtacctccagatgaacagcctgcgggccgaggacaccgccgtgtactattgtgctaggggaggcggctacttcgactactggggccagggaacactcgtgaccgtgtcctctacgcgtatccagaaccctgatcctgccgtgtaccagctgcgggatagcaagagcagcgacaagagcgtgtgtctgttcaccgacttcgacagccagaccaacgtgtcccagagcaaggactccgacgtgtacatcaccgataagtgcgtgctggacatgcggagcatggacttcaagagcaactccgccgtggcctggtccaacaagtccgatttcgcctgcgccaacgccttcaacaacagcattatccccgaggacacattcttcccaagccccgagagcagcgactccaccgaccacgtgaagcccaaagagacagagaacaccaagcagcccagcaagagctgccacaagcccaaggccatcgtgcacaccgagaaagtgaacatgatgagcctgaccgtgctgggcctgcggatgctgttcgccaaaaccgtggccgtgaacttcctgctgaccgccaagctgttcttcctc

SEQ ID NO: 7733 - DNA, 2982 bp, synthetic construct
  source 1..2982: mol_type = other DNA
atggccttaccagtgaccgccttgctcctgccgctggccttgctgctccacgccgccaggccggaagtgcagctggttgaatctggcggaggactggttcagcctggcggatctctgagactgtcttgtgccgccagcggcttcagcttcagcgacttttggatgagctgggtccgacaggcccctggcaaaggacttgaatgggtcgccacaatcagccaggccggcagcgagaaggactacgtggactctgtgaagggcagattcaccatcagccgggacaacgccaagaagtccctgtacctccagatgaacagcctgagagccgaggacaccgccgtgtactattgtgcctctggcgtgtacagcttcgactacagaggccagggcaccctggtcacagtctcttctggtaccggcggaggcggatctggcggcggaggtagcggtggcggaggatctgaattcgacatccagatgacccagagccccagcagcctgtctgccagcgtgggcgacagagtgaccatcacctgtagagccagccagagcatcagcagctacctgaactggtatcagcagaagcccggcaaggcccccaaactgctgatctacgccgtgtccacactccagagcggcgtgcccagcagattttctggcagcggctccggcaccgacttcaccctgacaatcagctccctccagcccgaggacttcgccacctactactgtcagcagagcggcaccttccctcccaccacatttggacagggcaccaaggtggaaatcaagagactcgaggacctgaagaacgtgttcccacctgaggtggccgtgttcgagcctagcgaggccgagatcagccacacccagaaagccaccctcgtgtgcctggctaccggcttctaccccgaccatgtggaactgtcttggtgggtcaacggcaaagaggtgcacagcggcgtgtgtaccgacccccagccactgaaagaacagcccgccctgaacgacagccggtactgcctgagcagcagactgagagtgtccgccaccttctggcagaacccccggaaccacttcagatgccaggtgcagttctacggcctgagcgagaacgacgagtggacccaggacagagccaagcccgtgacccagatcgtgtctgccgaagcctggggcagagccgatgatgtgattaagatccactggcaggaaaagaagtccaacaccatcctgggcagccaggaaggcaacaccatgaagaccaacgacacctacatgaagttcagctggctgaccgtgcccgagaagtccctggacaaagaacacagatgcatcgtgcggcacgaaaacaacaagaacggcgtggaccaggaaatcatcttcccacccatcaagaccgatgtgattacaatggaccccaaggacaactgctccaaggacgccaacgataccctgctgctccagctgaccaacaccagcgcctactacatgtacttgttgctgctgctgaagtccgtggtgtacttcgccatcatcacatgctgcctgctgcggagaaccgccttctgctgcaacggcgagaagtctagggccaagcgatctggatctggagcaacaaacttctcactactcaaacaagcaggtgacgtggaggagaatcccgggcctactagtatggactggatttggcgcatccttttccttgtcggcgctgctaccggcgcgcattccgggccccagctccagctgcaagagtctggacctggcctggtcaagcctagcgagacactgagcctgacctgtaccgtgtccggcgatagcatcagcagcggcgattactactggggctggatcagacagcctcctggcaaaggactggaatggatcggccacatctactacagcggcgtgacctactacaaccccagcctgaagtccagagtgaccatcagcgtggacaccagccggaaccagttctccctgaagctgtctagcgtgacagccgccgataccgccgtgtactactgcaccagagaggacagcagcaactggcggagtagaggccagggaacactggtcacagttagctctggatccggcggaggcggaagtggaggcggaggatctggcggcggaggctctttcgaacaggtgcaactgctggaatctggcggcggactggtgcagcctggcggatctctgagactgagctgtgccgccagcggcttcaccttcagcagccacggaatgcactgggtgcgccaggcccctggaaagggactggaatgggtgtccgtgatctccggcagcggcagcaataccggctacgccgatagcgtgaagggccggttcaccatcagccgggacaacagcaagaacaccctgtacctccagatgaacagcctgcgggccgaggacaccgccgtgtactattgtgccagacagtggggcagctacgccttcgattcttggggccagggcaccctcgtgaccgtgtcatctacgcgtatccagaaccctgatcctgccgtgtaccagctgcgggatagcaagagcagcgacaagagcgtgtgtctgttcaccgacttcgacagccagaccaacgtgtcccagagcaaggactccgacgtgtacatcaccgataagtgcgtgctggacatgcggagcatggacttcaagagcaactccgccgtggcctggtccaacaagtccgatttcgcctgcgccaacgccttcaacaacagcattatccccgaggacacattcttcccaagccccgagagcagcgactccaccgaccacgtgaagcccaaagagacagagaacaccaagcagcccagcaagagctgccacaagcccaaggccatcgtgcacaccgagaaagtgaacatgatgagcctgaccgtgctgggcctgcggatgctgttcgccaaaaccgtggccgtgaacttcctgctgaccgccaagctgttcttcctc

SEQ ID NO: 7734 - DNA, 3012 bp, synthetic construct
  source 1..3012: mol_type = other DNA
atggccttaccagtgaccgccttgctcctgccgctggccttgctgctccacgccgccaggccggaagtgcagctggttgaatctggcggaggactggttcagcctggcggatctctgagactgtcttgtgccgccagcggcttcagcttcagcgacttttggatgagctgggtccgacaggcccctggcaaaggacttgaatgggtcgccacaatcagccaggccggcagcgagaaggactacgtggactctgtgaagggcagattcaccatcagccgggacaacgccaagaagtccctgtacctccagatgaacagcctgagagccgaggacaccgccgtgtactattgtgcctctggcgtgtacagcttcgactacagaggccagggcaccctggtcacagtctcttctggtaccggcggaggcggatctggcggcggaggtagcggtggcggaggatctgaattcgacatcgtgatgagccagagccctagcagcctggccgtgtccgtgggcgagaaagtgaccatgagctgcaagagcagccagtccctgctgcacagcagcaaccagaagaactacctggcctggtatcagcagaagcccggccagtcccccaaggtgctgatctactgggccagcaccagagaaagcggcgtgcccgatagattcaccggcagcggctctggcaccgacttcaccctgaccatcaccagcgtgaagtccgaggacctggctgtgtactactgccagcagtattacagctacccctggaccttcggcggaggcacccggctggaaatcaaaagactcgaggacctgaagaacgtgttcccacctgaggtggccgtgttcgagcctagcgaggccgagatcagccacacccagaaagccaccctcgtgtgcctggctaccggcttctaccccgaccatgtggaactgtcttggtgggtcaacggcaaagaggtgcacagcggcgtgtgtaccgacccccagccactgaaagaacagcccgccctgaacgacagccggtactgcctgagcagcagactgagagtgtccgccaccttctggcagaacccccggaaccacttcagatgccaggtgcagttctacggcctgagcgagaacgacgagtggacccaggacagagccaagcccgtgacccagatcgtgtctgccgaagcctggggcagagccgatgatgtgattaagatccactggcaggaaaagaagtccaacaccatcctgggcagccaggaaggcaacaccatgaagaccaacgacacctacatgaagttcagctggctgaccgtgcccgagaagtccctggacaaagaacacagatgcatcgtgcggcacgaaaacaacaagaacggcgtggaccaggaaatcatcttcccacccatcaagaccgatgtgattacaatggaccccaaggacaactgctccaaggacgccaacgataccctgctgctccagctgaccaacaccagcgcctactacatgtacttgttgctgctgctgaagtccgtggtgtacttcgccatcatcacatgctgcctgctgcggagaaccgccttctgctgcaacggcgagaagtctagggccaagcgatctggatctggagcaacaaacttctcactactcaaacaagcaggtgacgtggaggagaatcccgggcctactagtatggactggatttggcgcatccttttccttgtcggcgctgctaccggcgcgcattccgggccccagctccagctgcaagagtctggacctggcctggtcaagcctagcgagacactgagcctgacctgtaccgtgtccggcgatagcatcagcagcggcgattactactggggctggatcagacagcctcctggcaaaggactggaatggatcggccacatctactacagcggcgtgacctactacaaccccagcctgaagtccagagtgaccatcagcgtggacaccagccggaaccagttctccctgaagctgtctagcgtgacagccgccgataccgccgtgtactactgcaccagagaggacagcagcaactggcggagtagaggccagggaacactggtcacagttagctctggatccggcggaggcggaagtggaggcggaggatctggcggcggaggctctttcgaagaagtgcaactccagcagagcgtggccgagcttgtgaagcctggcgcttccgtgaagatgtcctgcaaggtgtccggctacaccctgacagaccacaccatccactggatgaagcagcggcctgagcagggcctggaatggatcggctacatctaccccagggacggcatcaccggctacaacgagaagttcaagggcaaggccacactgaccgccgacaccagcagcagcacagcctacatgcaactgaacagcctgaccagcgaggacagcgccgtgtacttctgtgccagatggggctacagctacagaaactacgcctactactacgactactggggccagggcacaaccctgaccgtgtctagtacgcgtatccagaaccctgatcctgccgtgtaccagctgcgggatagcaagagcagcgacaagagcgtgtgtctgttcaccgacttcgacagccagaccaacgtgtcccagagcaaggactccgacgtgtacatcaccgataagtgcgtgctggacatgcggagcatggacttcaagagcaactccgccgtggcctggtccaacaagtccgatttcgcctgcgccaacgccttcaacaacagcattatccccgaggacacattcttcccaagccccgagagcagcgactccaccgaccacgtgaagcccaaagagacagagaacaccaagcagcccagcaagagctgccacaagcccaaggccatcgtgcacaccgagaaagtgaacatgatgagcctgaccgtgctgggcctgcggatgctgttcgccaaaaccgtggccgtgaacttcctgctgaccgccaagctgttcttcctc

SEQ ID NO: 7735 - DNA, 3003 bp, synthetic construct
  source 1..3003: mol_type = other DNA
atggccttaccagtgaccgccttgctcctgccgctggccttgctgctccacgccgccaggccggaagtgcagctggttgaatctggcggaggactggttcagcctggcggatctctgagactgtcttgtgccgccagcggcttcagcttcagcgacttttggatgagctgggtccgacaggcccctggcaaaggacttgaatgggtcgccacaatcagccaggccggcagcgagaaggactacgtggactctgtgaagggcagattcaccatcagccgggacaacgccaagaagtccctgtacctccagatgaacagcctgagagccgaggacaccgccgtgtactattgtgcctctggcgtgtacagcttcgactacagaggccagggcaccctggtcacagtctcttctggtaccggcggaggcggatctggcggcggaggtagcggtggcggaggatctgaattcgagatcgtgctgacacagagccctggcaccctgagcctgtctccaggcgaaagagccacactgagctgtcgggccagccagagcgtgtccagctcttacctggcctggtatcagcagaagcccggccaggctccccggctgctgatctacggaacaagcagcagagccaccggcatccccgacagattttctggcagcggctccggcaccgacttcaccctgacaatcagcagactggaacccgaggacttcgccgtgtactactgccagcagtacggcagcagccccttcacctttggcggaggcaccaaggtggaaatcaagagactcgaggacctgaagaacgtgttcccacctgaggtggccgtgttcgagcctagcgaggccgagatcagccacacccagaaagccaccctcgtgtgcctggctaccggcttctaccccgaccatgtggaactgtcttggtgggtcaacggcaaagaggtgcacagcggcgtgtgtaccgacccccagccactgaaagaacagcccgccctgaacgacagccggtactgcctgagcagcagactgagagtgtccgccaccttctggcagaacccccggaaccacttcagatgccaggtgcagttctacggcctgagcgagaacgacgagtggacccaggacagagccaagcccgtgacccagatcgtgtctgccgaagcctggggcagagccgatgatgtgattaagatccactggcaggaaaagaagtccaacaccatcctgggcagccaggaaggcaacaccatgaagaccaacgacacctacatgaagttcagctggctgaccgtgcccgagaagtccctggacaaagaacacagatgcatcgtgcggcacgaaaacaacaagaacggcgtggaccaggaaatcatcttcccacccatcaagaccgatgtgattacaatggaccccaaggacaactgctccaaggacgccaacgataccctgctgctccagctgaccaacaccagcgcctactacatgtacttgttgctgctgctgaagtccgtggtgtacttcgccatcatcacatgctgcctgctgcggagaaccgccttctgctgcaacggcgagaagtctagggccaagcgatctggatctggagcaacaaacttctcactactcaaacaagcaggtgacgtggaggagaatcccgggcctactagtatggactggatttggcgcatccttttccttgtcggcgctgctaccggcgcgcattccgggccccagctccagctgcaagagtctggacctggcctggtcaagcctagcgagacactgagcctgacctgtaccgtgtccggcgatagcatcagcagcggcgattactactggggctggatcagacagcctcctggcaaaggactggaatggatcggccacatctactacagcggcgtgacctactacaaccccagcctgaagtccagagtgaccatcagcgtggacaccagccggaaccagttctccctgaagctgtctagcgtgacagccgccgataccgccgtgtactactgcaccagagaggacagcagcaactggcggagtagaggccagggaacactggtcacagttagctctggatccggcggaggcggaagtggaggcggaggatctggcggcggaggctctttcgaacaggtgcaactccaggaatctggccccggactggctaagcccagcgagacactgagcctgacctgtaccgtgtccggcgacagcatcaccagctactactggtcctggatcagacagccccctggcaagggcctggaatggatcggctacatctactacagcggcagcaccaactacaaccccagcctgaagtccagagtgaccatcagcgtggacaccagcaagaaccagttctccctgaagctgagcagcgtgacagccgccgacaccgccgtgtattattgcgccagagatcagcggagaatcgccgctgccggcacccacttttacggcatggatgtgtggggccagggcaccaccgtgaccgtgtcatctacgcgtatccagaaccctgatcctgccgtgtaccagctgcgggatagcaagagcagcgacaagagcgtgtgtctgttcaccgacttcgacagccagaccaacgtgtcccagagcaaggactccgacgtgtacatcaccgataagtgcgtgctggacatgcggagcatggacttcaagagcaactccgccgtggcctggtccaacaagtccgatttcgcctgcgccaacgccttcaacaacagcattatccccgaggacacattcttcccaagccccgagagcagcgactccaccgaccacgtgaagcccaaagagacagagaacaccaagcagcccagcaagagctgccacaagcccaaggccatcgtgcacaccgagaaagtgaacatgatgagcctgaccgtgctgggcctgcggatgctgttcgccaaaaccgtggccgtgaacttcctgctgaccgccaagctgttcttcctc

SEQ ID NO: 7736 - DNA, 2979 bp, synthetic construct
  source 1..2979: mol_type = other DNA
atggccttaccagtgaccgccttgctcctgccgctggccttgctgctccacgccgccaggccggaagtgcagctggttgaatctggcggaggactggttcagcctggcggatctctgagactgtcttgtgccgccagcggcttcagcttcagcgacttttggatgagctgggtccgacaggcccctggcaaaggacttgaatgggtcgccacaatcagccaggccggcagcgagaaggactacgtggactctgtgaagggcagattcaccatcagccgggacaacgccaagaagtccctgtacctccagatgaacagcctgagagccgaggacaccgccgtgtactattgtgcctctggcgtgtacagcttcgactacagaggccagggcaccctggtcacagtctcttctggtaccggcggaggcggatctggcggcggaggtagcggtggcggaggatctgaattcgacatcctgctgacccagagccccgtgatcctgtccgtgtctcctggcgagagagtgtccttcagctgtcgggccagccagagcatcggcaccaacatccactggtatcagcagcggaccaacggcagccccagactgctgattaagtacgccagcgagtccatcagcggcatccccagcagattttccggcagcggctccggcaccgacttcaccctgagcatcaacagcgtggaaagcgaggacattgccgactactactgccagcagaacaacaactggcccaccaccttcggagccggcaccaagctggaactgaagctcgaggacctgaagaacgtgttcccacctgaggtggccgtgttcgagcctagcgaggccgagatcagccacacccagaaagccaccctcgtgtgcctggctaccggcttctaccccgaccatgtggaactgtcttggtgggtcaacggcaaagaggtgcacagcggcgtgtgtaccgacccccagccactgaaagaacagcccgccctgaacgacagccggtactgcctgagcagcagactgagagtgtccgccaccttctggcagaacccccggaaccacttcagatgccaggtgcagttctacggcctgagcgagaacgacgagtggacccaggacagagccaagcccgtgacccagatcgtgtctgccgaagcctggggcagagccgatgatgtgattaagatccactggcaggaaaagaagtccaacaccatcctgggcagccaggaaggcaacaccatgaagaccaacgacacctacatgaagttcagctggctgaccgtgcccgagaagtccctggacaaagaacacagatgcatcgtgcggcacgaaaacaacaagaacggcgtggaccaggaaatcatcttcccacccatcaagaccgatgtgattacaatggaccccaaggacaactgctccaaggacgccaacgataccctgctgctccagctgaccaacaccagcgcctactacatgtacttgttgctgctgctgaagtccgtggtgtacttcgccatcatcacatgctgcctgctgcggagaaccgccttctgctgcaacggcgagaagtctagggccaagcgatctggatctggagcaacaaacttctcactactcaaacaagcaggtgacgtggaggagaatcccgggcctactagtatggactggatttggcgcatccttttccttgtcggcgctgctaccggcgcgcattccgggccccagctccagctgcaagagtctggacctggcctggtcaagcctagcgagacactgagcctgacctgtaccgtgtccggcgatagcatcagcagcggcgattactactggggctggatcagacagcctcctggcaaaggactggaatggatcggccacatctactacagcggcgtgacctactacaaccccagcctgaagtccagagtgaccatcagcgtggacaccagccggaaccagttctccctgaagctgtctagcgtgacagccgccgataccgccgtgtactactgcaccagagaggacagcagcaactggcggagtagaggccagggaacactggtcacagttagctctggatccggcggaggcggaagtggaggcggaggatctggcggcggaggctctttcgaacaggtgcagctgaagcagagcggacctggcctggtgcagcctagccagagcctgtccatcacctgtaccgtgtccggcttcagcctgaccaactacggcgtgcactgggtgcgccagagccctggaaaaggactggaatggctgggagtgatttggagcggcggcaacaccgactacaacacccccttcaccagcagactgtctatcaacaaggacaacagcaagagccaggtgttcttcaagatgaacagcctccagagcaacgacaccgccatctactactgtgctagagccctgacctactatgactacgagttcgcctactggggccagggcacactcgtgacagtgtctgctacgcgtatccagaaccctgatcctgccgtgtaccagctgcgggatagcaagagcagcgacaagagcgtgtgtctgttcaccgacttcgacagccagaccaacgtgtcccagagcaaggactccgacgtgtacatcaccgataagtgcgtgctggacatgcggagcatggacttcaagagcaactccgccgtggcctggtccaacaagtccgatttcgcctgcgccaacgccttcaacaacagcattatccccgaggacacattcttcccaagccccgagagcagcgactccaccgaccacgtgaagcccaaagagacagagaacaccaagcagcccagcaagagctgccacaagcccaaggccatcgtgcacaccgagaaagtgaacatgatgagcctgaccgtgctgggcctgcggatgctgttcgccaaaaccgtggccgtgaacttcctgctgaccgccaagctgttcttcctc

SEQ ID NO: 7737 - DNA, 2958 bp, synthetic construct
  source 1..2958: mol_type = other DNA
atggccttaccagtgaccgccttgctcctgccgctggccttgctgctccacgccgccaggccggaagtgcagctggttgaatctggcggaggactggttcagcctggcggatctctgagactgtcttgtgccgccagcggcttcagcttcagcgacttttggatgagctgggtccgacaggcccctggcaaaggacttgaatgggtcgccacaatcagccaggccggcagcgagaaggactacgtggactctgtgaagggcagattcaccatcagccgggacaacgccaagaagtccctgtacctccagatgaacagcctgagagccgaggacaccgccgtgtactattgtgcctctggcgtgtacagcttcgactacagaggccagggcaccctggtcacagtctcttctggtaccggcggaggcggatctggcggcggaggtagcggtggcggaggatctgaattcatgacccagagccccaagttcctgctggtgtctgccggcgacagagtgaccctgacatgcaaggccagccagagcgtgaacaacgacgtgtactggtatcagcaggaacccggccagtcccccaagctgctgatctactgggccagcaccagagaaagcggcgtgcccgatagattcaccggcagcggctctggcaccgacttcaccctgacaatcagcagcgtgcaggccgaggacctggccgtgtactactgcaagcagagctacaacctgtacaccttcggcggaggcaccaagctggaaatcaagagactcgaggacctgaagaacgtgttcccacctgaggtggccgtgttcgagcctagcgaggccgagatcagccacacccagaaagccaccctcgtgtgcctggctaccggcttctaccccgaccatgtggaactgtcttggtgggtcaacggcaaagaggtgcacagcggcgtgtgtaccgacccccagccactgaaagaacagcccgccctgaacgacagccggtactgcctgagcagcagactgagagtgtccgccaccttctggcagaacccccggaaccacttcagatgccaggtgcagttctacggcctgagcgagaacgacgagtggacccaggacagagccaagcccgtgacccagatcgtgtctgccgaagcctggggcagagccgatgatgtgattaagatccactggcaggaaaagaagtccaacaccatcctgggcagccaggaaggcaacaccatgaagaccaacgacacctacatgaagttcagctggctgaccgtgcccgagaagtccctggacaaagaacacagatgcatcgtgcggcacgaaaacaacaagaacggcgtggaccaggaaatcatcttcccacccatcaagaccgatgtgattacaatggaccccaaggacaactgctccaaggacgccaacgataccctgctgctccagctgaccaacaccagcgcctactacatgtacttgttgctgctgctgaagtccgtggtgtacttcgccatcatcacatgctgcctgctgcggagaaccgccttctgctgcaacggcgagaagtctagggccaagcgatctggatctggagcaacaaacttctcactactcaaacaagcaggtgacgtggaggagaatcccgggcctactagtatggactggatttggcgcatccttttccttgtcggcgctgctaccggcgcgcattccgggccccagctccagctgcaagagtctggacctggcctggtcaagcctagcgagacactgagcctgacctgtaccgtgtccggcgatagcatcagcagcggcgattactactggggctggatcagacagcctcctggcaaaggactggaatggatcggccacatctactacagcggcgtgacctactacaaccccagcctgaagtccagagtgaccatcagcgtggacaccagccggaaccagttctccctgaagctgtctagcgtgacagccgccgataccgccgtgtactactgcaccagagaggacagcagcaactggcggagtagaggccagggaacactggtcacagttagctctggatccggcggaggcggaagtggaggcggaggatctggcggcggaggctctttcgaagaatctggaagaggactggtgcagcctggcggcagcagaaagctgtcttgtgccgccagcggcttcaccttcagcaccagcggaatgcactgggtgcgccaggcccctgagaagggactggaatgggtggcctacatcagctccggcagcaccaccatctaccacgccgataccgtgaagggccggttcaccatcagccgggacaaccccaagaataccctgttcctccagatgaccagcctgcggagcgaggacaccgccatgtactattgctgcgccagaagcggccagttcggcaactacttcgactactggggccagggcaccaccctgaccgtgtcatctacgcgtatccagaaccctgatcctgccgtgtaccagctgcgggatagcaagagcagcgacaagagcgtgtgtctgttcaccgacttcgacagccagaccaacgtgtcccagagcaaggactccgacgtgtacatcaccgataagtgcgtgctggacatgcggagcatggacttcaagagcaactccgccgtggcctggtccaacaagtccgatttcgcctgcgccaacgccttcaacaacagcattatccccgaggacacattcttcccaagccccgagagcagcgactccaccgaccacgtgaagcccaaagagacagagaacaccaagcagcccagcaagagctgccacaagcccaaggccatcgtgcacaccgagaaagtgaacatgatgagcctgaccgtgctgggcctgcggatgctgttcgccaaaaccgtggccgtgaacttcctgctgaccgccaagctgttcttcctc

SEQ ID NO: 7738 - DNA, 2973 bp, synthetic construct
  source 1..2973: mol_type = other DNA
atggccttaccagtgaccgccttgctcctgccgctggccttgctgctccacgccgccaggccggaagtgcagctggttgaatctggcggaggactggttcagcctggcggatctctgagactgtcttgtgccgccagcggcttcagcttcagcgacttttggatgagctgggtccgacaggcccctggcaaaggacttgaatgggtcgccacaatcagccaggccggcagcgagaaggactacgtggactctgtgaagggcagattcaccatcagccgggacaacgccaagaagtccctgtacctccagatgaacagcctgagagccgaggacaccgccgtgtactattgtgcctctggcgtgtacagcttcgactacagaggccagggcaccctggtcacagtctcttctggtaccggcggaggcggatctggcggcggaggtagcggtggcggaggatctgaattccagagcccatctagcctggctgtgtctgccggcgagaaagtgaccatgagctgcaagagcagccagagcctgctgaacagccggacccggaagaactacctggcctggtatcagcagaagcccggccagagccccaagctgctgatctactgggccagcaccagagaaagcggcgtgcccgatagattcaccggctctggcagcggcaccgacttcaccctgacaatcagcagcgtgcaggccgaggacctggccgtgtactactgcaagcagagcaacctgtacaccttcggcggaggcaccaagctggaaatcaagctcgaggacctgaagaacgtgttcccacctgaggtggccgtgttcgagcctagcgaggccgagatcagccacacccagaaagccaccctcgtgtgcctggctaccggcttctaccccgaccatgtggaactgtcttggtgggtcaacggcaaagaggtgcacagcggcgtgtgtaccgacccccagccactgaaagaacagcccgccctgaacgacagccggtactgcctgagcagcagactgagagtgtccgccaccttctggcagaacccccggaaccacttcagatgccaggtgcagttctacggcctgagcgagaacgacgagtggacccaggacagagccaagcccgtgacccagatcgtgtctgccgaagcctggggcagagccgatgatgtgattaagatccactggcaggaaaagaagtccaacaccatcctgggcagccaggaaggcaacaccatgaagaccaacgacacctacatgaagttcagctggctgaccgtgcccgagaagtccctggacaaagaacacagatgcatcgtgcggcacgaaaacaacaagaacggcgtggaccaggaaatcatcttcccacccatcaagaccgatgtgattacaatggaccccaaggacaactgctccaaggacgccaacgataccctgctgctccagctgaccaacaccagcgcctactacatgtacttgttgctgctgctgaagtccgtggtgtacttcgccatcatcacatgctgcctgctgcggagaaccgccttctgctgcaacggcgagaagtctagggccaagcgatctggatctggagcaacaaacttctcactactcaaacaagcaggtgacgtggaggagaatcccgggcctactagtatggactggatttggcgcatccttttccttgtcggcgctgctaccggcgcgcattccgggccccagctccagctgcaagagtctggacctggcctggtcaagcctagcgagacactgagcctgacctgtaccgtgtccggcgatagcatcagcagcggcgattactactggggctggatcagacagcctcctggcaaaggactggaatggatcggccacatctactacagcggcgtgacctactacaaccccagcctgaagtccagagtgaccatcagcgtggacaccagccggaaccagttctccctgaagctgtctagcgtgacagccgccgataccgccgtgtactactgcaccagagaggacagcagcaactggcggagtagaggccagggaacactggtcacagttagctctggatccggcggaggcggaagtggaggcggaggatctggcggcggaggctctttcgaacaggtgcagctggaagagtctggacccgagcttgtgaagcctggggccagcgtgaagctgtcctgtaaagccagcggctacaccttcaccgagtacatcatccactgggtcaagcagcggagcggccagggcctggaatggatcggctggttttaccctggctccggcagcatcaagtacaacgagaagttcaaggacaaggccaccctgaccgccgacaagtccagcagcaccgtgtacatggaactgagcggcctgaccagcgaggacagcgccgtgtatttctgcgccagacacgacggctacagctacttcgactattggggccagggcaccacactgaccgtgtcctctacgcgtatccagaaccctgatcctgccgtgtaccagctgcgggatagcaagagcagcgacaagagcgtgtgtctgttcaccgacttcgacagccagaccaacgtgtcccagagcaaggactccgacgtgtacatcaccgataagtgcgtgctggacatgcggagcatggacttcaagagcaactccgccgtggcctggtccaacaagtccgatttcgcctgcgccaacgccttcaacaacagcattatccccgaggacacattcttcccaagccccgagagcagcgactccaccgaccacgtgaagcccaaagagacagagaacaccaagcagcccagcaagagctgccacaagcccaaggccatcgtgcacaccgagaaagtgaacatgatgagcctgaccgtgctgggcctgcggatgctgttcgccaaaaccgtggccgtgaacttcctgctgaccgccaagctgttcttcctc

SEQ ID NO: 7739 - DNA, 2982 bp, synthetic construct
  source 1..2982: mol_type = other DNA
atggccttaccagtgaccgccttgctcctgccgctggccttgctgctccacgccgccaggccggaagtgcagctggttgaatctggcggaggactggttcagcctggcggatctctgagactgtcttgtgccgccagcggcttcagcttcagcgacttttggatgagctgggtccgacaggcccctggcaaaggacttgaatgggtcgccacaatcagccaggccggcagcgagaaggactacgtggactctgtgaagggcagattcaccatcagccgggacaacgccaagaagtccctgtacctccagatgaacagcctgagagccgaggacaccgccgtgtactattgtgcctctggcgtgtacagcttcgactacagaggccagggcaccctggtcacagtctcttctggtaccggcggaggcggatctggcggcggaggtagcggtggcggaggatctgaattcgacatccagatgacccagagccccagcagcctgtctgcctctctgggcgagagagtgtccctgacctgtcgggccacacaggaactgagcggctacctgtcttggctgcagcagaagcccgacggcaccatcaagcggctgatctacgccgccagcaccctggatagcggcgtgcccaagagattcagcggcaacagaagcggcagcgactacagcctgaccatcagctccctggaaagcgaggacttcgccgactactactgcctgcagtacgccatctacccctacaccttcggcggaggcaccaagctggaaatcaagctcgaggacctgaagaacgtgttcccacctgaggtggccgtgttcgagcctagcgaggccgagatcagccacacccagaaagccaccctcgtgtgcctggctaccggcttctaccccgaccatgtggaactgtcttggtgggtcaacggcaaagaggtgcacagcggcgtgtgtaccgacccccagccactgaaagaacagcccgccctgaacgacagccggtactgcctgagcagcagactgagagtgtccgccaccttctggcagaacccccggaaccacttcagatgccaggtgcagttctacggcctgagcgagaacgacgagtggacccaggacagagccaagcccgtgacccagatcgtgtctgccgaagcctggggcagagccgatgatgtgattaagatccactggcaggaaaagaagtccaacaccatcctgggcagccaggaaggcaacaccatgaagaccaacgacacctacatgaagttcagctggctgaccgtgcccgagaagtccctggacaaagaacacagatgcatcgtgcggcacgaaaacaacaagaacggcgtggaccaggaaatcatcttcccacccatcaagaccgatgtgattacaatggaccccaaggacaactgctccaaggacgccaacgataccctgctgctccagctgaccaacaccagcgcctactacatgtacttgttgctgctgctgaagtccgtggtgtacttcgccatcatcacatgctgcctgctgcggagaaccgccttctgctgcaacggcgagaagtctagggccaagcgatctggatctggagcaacaaacttctcactactcaaacaagcaggtgacgtggaggagaatcccgggcctactagtatggactggatttggcgcatccttttccttgtcggcgctgctaccggcgcgcattccgggccccagctccagctgcaagagtctggacctggcctggtcaagcctagcgagacactgagcctgacctgtaccgtgtccggcgatagcatcagcagcggcgattactactggggctggatcagacagcctcctggcaaaggactggaatggatcggccacatctactacagcggcgtgacctactacaaccccagcctgaagtccagagtgaccatcagcgtggacaccagccggaaccagttctccctgaagctgtctagcgtgacagccgccgataccgccgtgtactactgcaccagagaggacagcagcaactggcggagtagaggccagggaacactggtcacagttagctctggatccggcggaggcggaagtggaggcggaggatctggcggcggaggctctttcgaagaggtgcaactgcagcagtctggccccgagcttgtgaagcctggcgcctccgtgaagatgagctgcaaggccagcggctacacctttaccagctacttcatccactgggtcaagcagaaacccggccagggcctggaatggatcggcttcatcaacccttacaacgacggcagcaagtacaacgagaagttcaagggcaaggccaccctgaccagcgacaagagcagcagcaccgcctacatggaactgtccagcctgacatccgaggacagcgccgtgtactactgcaccagggacgacggctactacggctacgccatggactactggggccagggaacaagcgtcaccgtgtcctctacgcgtatccagaaccctgatcctgccgtgtaccagctgcgggatagcaagagcagcgacaagagcgtgtgtctgttcaccgacttcgacagccagaccaacgtgtcccagagcaaggactccgacgtgtacatcaccgataagtgcgtgctggacatgcggagcatggacttcaagagcaactccgccgtggcctggtccaacaagtccgatttcgcctgcgccaacgccttcaacaacagcattatccccgaggacacattcttcccaagccccgagagcagcgactccaccgaccacgtgaagcccaaagagacagagaacaccaagcagcccagcaagagctgccacaagcccaaggccatcgtgcacaccgagaaagtgaacatgatgagcctgaccgtgctgggcctgcggatgctgttcgccaaaaccgtggccgtgaacttcctgctgaccgccaagctgttcttcctc

SEQ ID NO: 7740 - DNA, 2997 bp, synthetic construct
  source 1..2997: mol_type = other DNA
atggccttaccagtgaccgccttgctcctgccgctggccttgctgctccacgccgccaggccggaagtgcagctggttgaatctggcggaggactggttcagcctggcggatctctgagactgtcttgtgccgccagcggcttcagcttcagcgacttttggatgagctgggtccgacaggcccctggcaaaggacttgaatgggtcgccacaatcagccaggccggcagcgagaaggactacgtggactctgtgaagggcagattcaccatcagccgggacaacgccaagaagtccctgtacctccagatgaacagcctgagagccgaggacaccgccgtgtactattgtgcctctggcgtgtacagcttcgactacagaggccagggcaccctggtcacagtctcttctggtaccggcggaggcggatctggcggcggaggtagcggtggcggaggatctgaattcgacaccatcgtgctgacacagagccctgcttccctggccgtgtccctgggacagagagccaccatctcttgcagagccagcgagagcgtggacagctacggcaacagcttcatgcactggtatcagcagaagcccggccagccccccaagctgctgatctacctggcctccaacctggaaagcggcgtgcccgccagattttctggcagcggcagcagaaccgacttcaccctgaccatcgaccccgtggaagccgatgatgccgccacctactactgccagcagaacaactacgacccctggaccttcggcggaggcaccaagctggaaatcaagctcgaggacctgaagaacgtgttcccacctgaggtggccgtgttcgagcctagcgaggccgagatcagccacacccagaaagccaccctcgtgtgcctggctaccggcttctaccccgaccatgtggaactgtcttggtgggtcaacggcaaagaggtgcacagcggcgtgtgtaccgacccccagccactgaaagaacagcccgccctgaacgacagccggtactgcctgagcagcagactgagagtgtccgccaccttctggcagaacccccggaaccacttcagatgccaggtgcagttctacggcctgagcgagaacgacgagtggacccaggacagagccaagcccgtgacccagatcgtgtctgccgaagcctggggcagagccgatgatgtgattaagatccactggcaggaaaagaagtccaacaccatcctgggcagccaggaaggcaacaccatgaagaccaacgacacctacatgaagttcagctggctgaccgtgcccgagaagtccctggacaaagaacacagatgcatcgtgcggcacgaaaacaacaagaacggcgtggaccaggaaatcatcttcccacccatcaagaccgatgtgattacaatggaccccaaggacaactgctccaaggacgccaacgataccctgctgctccagctgaccaacaccagcgcctactacatgtacttgttgctgctgctgaagtccgtggtgtacttcgccatcatcacatgctgcctgctgcggagaaccgccttctgctgcaacggcgagaagtctagggccaagcgatctggatctggagcaacaaacttctcactactcaaacaagcaggtgacgtggaggagaatcccgggcctactagtatggactggatttggcgcatccttttccttgtcggcgctgctaccggcgcgcattccgggccccagctccagctgcaagagtctggacctggcctggtcaagcctagcgagacactgagcctgacctgtaccgtgtccggcgatagcatcagcagcggcgattactactggggctggatcagacagcctcctggcaaaggactggaatggatcggccacatctactacagcggcgtgacctactacaaccccagcctgaagtccagagtgaccatcagcgtggacaccagccggaaccagttctccctgaagctgtctagcgtgacagccgccgataccgccgtgtactactgcaccagagaggacagcagcaactggcggagtagaggccagggaacactggtcacagttagctctggatccggcggaggcggaagtggaggcggaggatctggcggcggaggctctttcgaagaagtgcaactccagcagagcggccctgagcttgtgaagcctggcgcttccgtgaagatgagctgcaaggccagcggctacaccttcaccagctacgtgatgcactgggtcaagcagaaacctggacagggcctggaatggatcggctacatcaacccctacaacgacggcaccaagtacaacgagaagttcaagggcaaggccaccctgacaagcgacaccagcagcagcaccgcctacatggaactgaacagcctgaccagcgaggacagcgccgtgtacttctgcgccagacccatctacttcgacaacgactacttcgattactggggccagggcaccaccctgaaggtgtcctctacgcgtatccagaaccctgatcctgccgtgtaccagctgcgggatagcaagagcagcgacaagagcgtgtgtctgttcaccgacttcgacagccagaccaacgtgtcccagagcaaggactccgacgtgtacatcaccgataagtgcgtgctggacatgcggagcatggacttcaagagcaactccgccgtggcctggtccaacaagtccgatttcgcctgcgccaacgccttcaacaacagcattatccccgaggacacattcttcccaagccccgagagcagcgactccaccgaccacgtgaagcccaaagagacagagaacaccaagcagcccagcaagagctgccacaagcccaaggccatcgtgcacaccgagaaagtgaacatgatgagcctgaccgtgctgggcctgcggatgctgttcgccaaaaccgtggccgtgaacttcctgctgaccgccaagctgttcttcctc

SEQ ID NO: 7741 - DNA, 2982 bp, synthetic construct
  source 1..2982: mol_type = other DNA
atggccttaccagtgaccgccttgctcctgccgctggccttgctgctccacgccgccaggccggaagtgcagctggttgaatctggcggaggactggttcagcctggcggatctctgagactgtcttgtgccgccagcggcttcagcttcagcgacttttggatgagctgggtccgacaggcccctggcaaaggacttgaatgggtcgccacaatcagccaggccggcagcgagaaggactacgtggactctgtgaagggcagattcaccatcagccgggacaacgccaagaagtccctgtacctccagatgaacagcctgagagccgaggacaccgccgtgtactattgtgcctctggcgtgtacagcttcgactacagaggccagggcaccctggtcacagtctcttctggtaccggcggaggcggatctggcggcggaggtagcggtggcggaggatctgaattcgacatccagatgacccagagccccagcagcctgtctgccagcgtgggcgacagagtgaccatcacatgcaaggccagccaggacgtgggaatcgccgtggcctggtatcagcagaaacccggcaaggtgcccaagctgctgatctactgggccagcaccagacacaccggcgtgcccgatagattttccggcagcggctccggcaccgacttcaccctgacaatcagctccctccagcccgaggacgtggcaacctactactgccagcagtacagcagctacccctacaccttcggccagggcaccaaggtggaaatcaagagactcgaggacctgaagaacgtgttcccacctgaggtggccgtgttcgagcctagcgaggccgagatcagccacacccagaaagccaccctcgtgtgcctggctaccggcttctaccccgaccatgtggaactgtcttggtgggtcaacggcaaagaggtgcacagcggcgtgtgtaccgacccccagccactgaaagaacagcccgccctgaacgacagccggtactgcctgagcagcagactgagagtgtccgccaccttctggcagaacccccggaaccacttcagatgccaggtgcagttctacggcctgagcgagaacgacgagtggacccaggacagagccaagcccgtgacccagatcgtgtctgccgaagcctggggcagagccgatgatgtgattaagatccactggcaggaaaagaagtccaacaccatcctgggcagccaggaaggcaacaccatgaagaccaacgacacctacatgaagttcagctggctgaccgtgcccgagaagtccctggacaaagaacacagatgcatcgtgcggcacgaaaacaacaagaacggcgtggaccaggaaatcatcttcccacccatcaagaccgatgtgattacaatggaccccaaggacaactgctccaaggacgccaacgataccctgctgctccagctgaccaacaccagcgcctactacatgtacttgttgctgctgctgaagtccgtggtgtacttcgccatcatcacatgctgcctgctgcggagaaccgccttctgctgcaacggcgagaagtctagggccaagcgatctggatctggagcaacaaacttctcactactcaaacaagcaggtgacgtggaggagaatcccgggcctactagtatggactggatttggcgcatccttttccttgtcggcgctgctaccggcgcgcattccgggccccagctccagctgcaagagtctggacctggcctggtcaagcctagcgagacactgagcctgacctgtaccgtgtccggcgatagcatcagcagcggcgattactactggggctggatcagacagcctcctggcaaaggactggaatggatcggccacatctactacagcggcgtgacctactacaaccccagcctgaagtccagagtgaccatcagcgtggacaccagccggaaccagttctccctgaagctgtctagcgtgacagccgccgataccgccgtgtactactgcaccagagaggacagcagcaactggcggagtagaggccagggaacactggtcacagttagctctggatccggcggaggcggaagtggaggcggaggatctggcggcggaggctctttcgaagaagtgcaactggtggaatcaggcggcggactggtgcagcctggcggatctctgagactgagctgtgccgccagcggcttcgacttcagccggtactggatgagctgggtgcgccaggcccctggcaaaggactggaatggatcggcgagatcaaccccgacagcagcaccatcaactacgcccccagcctgaaggacaagttcatcatcagccgggacaacgccaagaacagcctgtacctccagatgaactccctgcgggccgaggacaccgccgtgtactattgcgccagacccgacggcaactactggtacttcgacgtgtggggccagggaaccctcgtgaccgtgtcatctacgcgtatccagaaccctgatcctgccgtgtaccagctgcgggatagcaagagcagcgacaagagcgtgtgtctgttcaccgacttcgacagccagaccaacgtgtcccagagcaaggactccgacgtgtacatcaccgataagtgcgtgctggacatgcggagcatggacttcaagagcaactccgccgtggcctggtccaacaagtccgatttcgcctgcgccaacgccttcaacaacagcattatccccgaggacacattcttcccaagccccgagagcagcgactccaccgaccacgtgaagcccaaagagacagagaacaccaagcagcccagcaagagctgccacaagcccaaggccatcgtgcacaccgagaaagtgaacatgatgagcctgaccgtgctgggcctgcggatgctgttcgccaaaaccgtggccgtgaacttcctgctgaccgccaagctgttcttcctc

SEQ ID NO: 7742 - DNA, 2982 bp, synthetic construct
  source 1..2982: mol_type = other DNA
atggccttaccagtgaccgccttgctcctgccgctggccttgctgctccacgccgccaggccggaagtgcagctggttgaatctggcggaggactggttcagcctggcggatctctgagactgtcttgtgccgccagcggcttcagcttcagcgacttttggatgagctgggtccgacaggcccctggcaaaggacttgaatgggtcgccacaatcagccaggccggcagcgagaaggactacgtggactctgtgaagggcagattcaccatcagccgggacaacgccaagaagtccctgtacctccagatgaacagcctgagagccgaggacaccgccgtgtactattgtgcctctggcgtgtacagcttcgactacagaggccagggcaccctggtcacagtctcttctggtaccggcggaggcggatctggcggcggaggtagcggtggcggaggatctgaattcgacatcgtgatgacccagagccagaagagcatgagcaccagcgtgggcgacagagtgagcatcacctgcaaggccagccaggacgtgatcaccggcgtggcctggtaccagcagaagcccggccagagccccaagctgctgatctacagcgccagctacagatacaccggcgtgcccgacagattcaccggcagcggcagcggcaccgacttcaccttcaccatcagcaacgtgcaggccgaggacctggccgtgtactactgccagcagcactacagcacccccctgaccttcggcgccggcaccaagctggagctgaagctcgaggacctgaagaacgtgttcccacctgaggtggccgtgttcgagcctagcgaggccgagatcagccacacccagaaagccaccctcgtgtgcctggctaccggcttctaccccgaccatgtggaactgtcttggtgggtcaacggcaaagaggtgcacagcggcgtgtgtaccgacccccagccactgaaagaacagcccgccctgaacgacagccggtactgcctgagcagcagactgagagtgtccgccaccttctggcagaacccccggaaccacttcagatgccaggtgcagttctacggcctgagcgagaacgacgagtggacccaggacagagccaagcccgtgacccagatcgtgtctgccgaagcctggggcagagccgatgatgtgattaagatccactggcaggaaaagaagtccaacaccatcctgggcagccaggaaggcaacaccatgaagaccaacgacacctacatgaagttcagctggctgaccgtgcccgagaagtccctggacaaagaacacagatgcatcgtgcggcacgaaaacaacaagaacggcgtggaccaggaaatcatcttcccacccatcaagaccgatgtgattacaatggaccccaaggacaactgctccaaggacgccaacgataccctgctgctccagctgaccaacaccagcgcctactacatgtacttgttgctgctgctgaagtccgtggtgtacttcgccatcatcacatgctgcctgctgcggagaaccgccttctgctgcaacggcgagaagtctagggccaagcgatctggatctggagcaacaaacttctcactactcaaacaagcaggtgacgtggaggagaatcccgggcctactagtatggactggatttggcgcatccttttccttgtcggcgctgctaccggcgcgcattccgggccccagctccagctgcaagagtctggacctggcctggtcaagcctagcgagacactgagcctgacctgtaccgtgtccggcgatagcatcagcagcggcgattactactggggctggatcagacagcctcctggcaaaggactggaatggatcggccacatctactacagcggcgtgacctactacaaccccagcctgaagtccagagtgaccatcagcgtggacaccagccggaaccagttctccctgaagctgtctagcgtgacagccgccgataccgccgtgtactactgcaccagagaggacagcagcaactggcggagtagaggccagggaacactggtcacagttagctctggatccggcggaggcggaagtggaggcggaggatctggcggcggaggctctttcgaacaggtgcagctgcagcagcccggcgccgagctggtgagacccggcgccagcgtgaagctgagctgcaaggccagcggctacagcttcaccacctactggatgaactgggtgaagcagagacccggccagggcctggagtggatcggcatgatccaccccagcgacagcgagaccagactgaaccagaagttcaaggacaaggccaccctgaccgtggacaagagcagcagcaccgcctacatgcagctgagcagccccaccagcgaggacagcgccgtgtactactgcgccagaagcaccatgatcgccaccagagccatggactactggggccagggcaccagcgtgaccgtgagcagcacgcgtatccagaaccctgatcctgccgtgtaccagctgcgggatagcaagagcagcgacaagagcgtgtgtctgttcaccgacttcgacagccagaccaacgtgtcccagagcaaggactccgacgtgtacatcaccgataagtgcgtgctggacatgcggagcatggacttcaagagcaactccgccgtggcctggtccaacaagtccgatttcgcctgcgccaacgccttcaacaacagcattatccccgaggacacattcttcccaagccccgagagcagcgactccaccgaccacgtgaagcccaaagagacagagaacaccaagcagcccagcaagagctgccacaagcccaaggccatcgtgcacaccgagaaagtgaacatgatgagcctgaccgtgctgggcctgcggatgctgttcgccaaaaccgtggccgtgaacttcctgctgaccgccaagctgttcttcctc

SEQ ID NO: 7743 - DNA, 3000 bp, synthetic construct
  source 1..3000: mol_type = other DNA
atggccttaccagtgaccgccttgctcctgccgctggccttgctgctccacgccgccaggccggaagtgcagctggttgaatctggcggaggactggttcagcctggcggatctctgagactgtcttgtgccgccagcggcttcagcttcagcgacttttggatgagctgggtccgacaggcccctggcaaaggacttgaatgggtcgccacaatcagccaggccggcagcgagaaggactacgtggactctgtgaagggcagattcaccatcagccgggacaacgccaagaagtccctgtacctccagatgaacagcctgagagccgaggacaccgccgtgtactattgtgcctctggcgtgtacagcttcgactacagaggccagggcaccctggtcacagtctcttctggtaccggcggaggcggatctggcggcggaggtagcggtggcggaggatctgaattccagagcgtgctgacacagcctccatccgtgtctggcgctccaggccagagagtgaccatctcctgtaccggcagcggcagcaacatcggagccccctacgacgtgtcctggtatcagcaactgcctggcaccgcccccaagctgctgatctaccacaacaacaagcggcccagcggcgtgcccgatagattcagcggctctaagagcggcaccagcgccagcctggctatcactggactccaggccgaggacgaggccgactactactgtgccacagtggaagccggcctgagcggctctgtgtttggcggcggaacaaagctgaccgtgctgggagctctcgaggacctgaagaacgtgttcccacctgaggtggccgtgttcgagcctagcgaggccgagatcagccacacccagaaagccaccctcgtgtgcctggctaccggcttctaccccgaccatgtggaactgtcttggtgggtcaacggcaaagaggtgcacagcggcgtgtgtaccgacccccagccactgaaagaacagcccgccctgaacgacagccggtactgcctgagcagcagactgagagtgtccgccaccttctggcagaacccccggaaccacttcagatgccaggtgcagttctacggcctgagcgagaacgacgagtggacccaggacagagccaagcccgtgacccagatcgtgtctgccgaagcctggggcagagccgatgatgtgattaagatccactggcaggaaaagaagtccaacaccatcctgggcagccaggaaggcaacaccatgaagaccaacgacacctacatgaagttcagctggctgaccgtgcccgagaagtccctggacaaagaacacagatgcatcgtgcggcacgaaaacaacaagaacggcgtggaccaggaaatcatcttcccacccatcaagaccgatgtgattacaatggaccccaaggacaactgctccaaggacgccaacgataccctgctgctccagctgaccaacaccagcgcctactacatgtacttgttgctgctgctgaagtccgtggtgtacttcgccatcatcacatgctgcctgctgcggagaaccgccttctgctgcaacggcgagaagtctagggccaagcgatctggatctggagcaacaaacttctcactactcaaacaagcaggtgacgtggaggagaatcccgggcctactagtatggactggatttggcgcatccttttccttgtcggcgctgctaccggcgcgcattccgggccccagctccagctgcaagagtctggacctggcctggtcaagcctagcgagacactgagcctgacctgtaccgtgtccggcgatagcatcagcagcggcgattactactggggctggatcagacagcctcctggcaaaggactggaatggatcggccacatctactacagcggcgtgacctactacaaccccagcctgaagtccagagtgaccatcagcgtggacaccagccggaaccagttctccctgaagctgtctagcgtgacagccgccgataccgccgtgtactactgcaccagagaggacagcagcaactggcggagtagaggccagggaacactggtcacagttagctctggatccggcggaggcggaagtggaggcggaggatctggcggcggaggctctttcgaacaggtgcaactggtgcagagcggagccgaagtgaagaaacctggggccagcgtgaaggtgtcctgcaaggtgtccggctacaccctgaccgagctgagcattcactgggtgcgccaggcccctggcaagggactggaatggatgggcggcttcgaccccgaagagaacgagatcgtgtacgcccagcggttccagggcagagtgacaatgaccgaggacaccagcaccgacaccgcctacatggaactgagcagcctgcggagcgaggataccgccgtgtactactgcgccatcgtgggcagcttcagccctctgacactgggcctgtggggccagggaactatggtcaccgtgtccagcacgcgtatccagaaccctgatcctgccgtgtaccagctgcgggatagcaagagcagcgacaagagcgtgtgtctgttcaccgacttcgacagccagaccaacgtgtcccagagcaaggactccgacgtgtacatcaccgataagtgcgtgctggacatgcggagcatggacttcaagagcaactccgccgtggcctggtccaacaagtccgatttcgcctgcgccaacgccttcaacaacagcattatccccgaggacacattcttcccaagccccgagagcagcgactccaccgaccacgtgaagcccaaagagacagagaacaccaagcagcccagcaagagctgccacaagcccaaggccatcgtgcacaccgagaaagtgaacatgatgagcctgaccgtgctgggcctgcggatgctgttcgccaaaaccgtggccgtgaacttcctgctgaccgccaagctgttcttcctc

SEQ ID NO: 7744 - DNA, 3000 bp, synthetic construct
  source 1..3000: mol_type = other DNA
atggccttaccagtgaccgccttgctcctgccgctggccttgctgctccacgccgccaggccggaagtgcagctggttgaatctggcggaggactggttcagcctggcggatctctgagactgtcttgtgccgccagcggcttcagcttcagcgacttttggatgagctgggtccgacaggcccctggcaaaggacttgaatgggtcgccacaatcagccaggccggcagcgagaaggactacgtggactctgtgaagggcagattcaccatcagccgggacaacgccaagaagtccctgtacctccagatgaacagcctgagagccgaggacaccgccgtgtactattgtgcctctggcgtgtacagcttcgactacagaggccagggcaccctggtcacagtctcttctggtaccggcggaggcggatctggcggcggaggtagcggtggcggaggatctgaattccagagcgtgctgacacagcctccatccgtgtctggcgctccaggccagagagtgaccatctcctgtaccggcagcggcagcaacatcggagccccctacgacgtgtcctggtatcagcaactgcctggcaccgcccccaagctgctgatctaccacaacaacaagcggcccagcggcgtgcccgatagattcagcggctctaagagcggcaccagcgccagcctggctatcactggactccaggccgaggacgaggccgactactactgccagagctacgacagcagcagcatcagcaccatcttcggcggaggcaccaagctgacagtgctgggagctctcgaggacctgaagaacgtgttcccacctgaggtggccgtgttcgagcctagcgaggccgagatcagccacacccagaaagccaccctcgtgtgcctggctaccggcttctaccccgaccatgtggaactgtcttggtgggtcaacggcaaagaggtgcacagcggcgtgtgtaccgacccccagccactgaaagaacagcccgccctgaacgacagccggtactgcctgagcagcagactgagagtgtccgccaccttctggcagaacccccggaaccacttcagatgccaggtgcagttctacggcctgagcgagaacgacgagtggacccaggacagagccaagcccgtgacccagatcgtgtctgccgaagcctggggcagagccgatgatgtgattaagatccactggcaggaaaagaagtccaacaccatcctgggcagccaggaaggcaacaccatgaagaccaacgacacctacatgaagttcagctggctgaccgtgcccgagaagtccctggacaaagaacacagatgcatcgtgcggcacgaaaacaacaagaacggcgtggaccaggaaatcatcttcccacccatcaagaccgatgtgattacaatggaccccaaggacaactgctccaaggacgccaacgataccctgctgctccagctgaccaacaccagcgcctactacatgtacttgttgctgctgctgaagtccgtggtgtacttcgccatcatcacatgctgcctgctgcggagaaccgccttctgctgcaacggcgagaagtctagggccaagcgatctggatctggagcaacaaacttctcactactcaaacaagcaggtgacgtggaggagaatcccgggcctactagtatggactggatttggcgcatccttttccttgtcggcgctgctaccggcgcgcattccgggccccagctccagctgcaagagtctggacctggcctggtcaagcctagcgagacactgagcctgacctgtaccgtgtccggcgatagcatcagcagcggcgattactactggggctggatcagacagcctcctggcaaaggactggaatggatcggccacatctactacagcggcgtgacctactacaaccccagcctgaagtccagagtgaccatcagcgtggacaccagccggaaccagttctccctgaagctgtctagcgtgacagccgccgataccgccgtgtactactgcaccagagaggacagcagcaactggcggagtagaggccagggaacactggtcacagttagctctggatccggcggaggcggaagtggaggcggaggatctggcggcggaggctctttcgaacaggtgcaactggtgcagagcggagccgaagtgaagaaacctggggccagcgtgaaggtgtcctgcaaggtgtccggctacaccctgaccgagctgagcattcactgggtgcgccaggcccctggcaagggactggaatggatgggcggcttcgaccccgaagagaacgagatcgtgtacgcccagcggttccagggcagagtgacaatgaccgaggacaccagcaccgacaccgcctacatggaactgagcagcctgcggagcgaggataccgccgtgtactactgtgccatcgtgggcagcttcagcggaatcgcctacagaccttggggccagggcacaatggtcaccgtgtctagcacgcgtatccagaaccctgatcctgccgtgtaccagctgcgggatagcaagagcagcgacaagagcgtgtgtctgttcaccgacttcgacagccagaccaacgtgtcccagagcaaggactccgacgtgtacatcaccgataagtgcgtgctggacatgcggagcatggacttcaagagcaactccgccgtggcctggtccaacaagtccgatttcgcctgcgccaacgccttcaacaacagcattatccccgaggacacattcttcccaagccccgagagcagcgactccaccgaccacgtgaagcccaaagagacagagaacaccaagcagcccagcaagagctgccacaagcccaaggccatcgtgcacaccgagaaagtgaacatgatgagcctgaccgtgctgggcctgcggatgctgttcgccaaaaccgtggccgtgaacttcctgctgaccgccaagctgttcttcctc

SEQ ID NO: 7745 - DNA, 2964 bp, synthetic construct
  source 1..2964: mol_type = other DNA
atggccttaccagtgaccgccttgctcctgccgctggccttgctgctccacgccgccaggccggaagtgcagctggttgaatctggcggaggactggttcagcctggcggatctctgagactgtcttgtgccgccagcggcttcagcttcagcgacttttggatgagctgggtccgacaggcccctggcaaaggacttgaatgggtcgccacaatcagccaggccggcagcgagaaggactacgtggactctgtgaagggcagattcaccatcagccgggacaacgccaagaagtccctgtacctccagatgaacagcctgagagccgaggacaccgccgtgtactattgtgcctctggcgtgtacagcttcgactacagaggccagggcaccctggtcacagtctcttctggtaccggcggaggcggatctggcggcggaggtagcggtggcggaggatctgaattcgacatccagatgacccagagccccagcagcctgtctgccagcgtgggcgacagagtgaccatcacctgtagagccagccagggcatcagaaacaacctggcctggtatcagcagaagcccggcaaggcccccaagcggctgatctacgccgccagcaatctccagagcggcgtgcccagcagattcacaggctctggcagcggcaccgagttcaccctgatcgtgtctagcctccagcccgaggacttcgccacctactactgcctccagcaccacagctaccccctgacatctggcggaggcaccaaggtggaactcgaggacctgaagaacgtgttcccacctgaggtggccgtgttcgagcctagcgaggccgagatcagccacacccagaaagccaccctcgtgtgcctggctaccggcttctaccccgaccatgtggaactgtcttggtgggtcaacggcaaagaggtgcacagcggcgtgtgtaccgacccccagccactgaaagaacagcccgccctgaacgacagccggtactgcctgagcagcagactgagagtgtccgccaccttctggcagaacccccggaaccacttcagatgccaggtgcagttctacggcctgagcgagaacgacgagtggacccaggacagagccaagcccgtgacccagatcgtgtctgccgaagcctggggcagagccgatgatgtgattaagatccactggcaggaaaagaagtccaacaccatcctgggcagccaggaaggcaacaccatgaagaccaacgacacctacatgaagttcagctggctgaccgtgcccgagaagtccctggacaaagaacacagatgcatcgtgcggcacgaaaacaacaagaacggcgtggaccaggaaatcatcttcccacccatcaagaccgatgtgattacaatggaccccaaggacaactgctccaaggacgccaacgataccctgctgctccagctgaccaacaccagcgcctactacatgtacttgttgctgctgctgaagtccgtggtgtacttcgccatcatcacatgctgcctgctgcggagaaccgccttctgctgcaacggcgagaagtctagggccaagcgatctggatctggagcaacaaacttctcactactcaaacaagcaggtgacgtggaggagaatcccgggcctactagtatggactggatttggcgcatccttttccttgtcggcgctgctaccggcgcgcattccgggccccagctccagctgcaagagtctggacctggcctggtcaagcctagcgagacactgagcctgacctgtaccgtgtccggcgatagcatcagcagcggcgattactactggggctggatcagacagcctcctggcaaaggactggaatggatcggccacatctactacagcggcgtgacctactacaaccccagcctgaagtccagagtgaccatcagcgtggacaccagccggaaccagttctccctgaagctgtctagcgtgacagccgccgataccgccgtgtactactgcaccagagaggacagcagcaactggcggagtagaggccagggaacactggtcacagttagctctggatccggcggaggcggaagtggaggcggaggatctggcggcggaggctctttcgaagaggtgcaggtgctggaaagtggcggaggactggtgcagcctggcggctctctgagactgtcttgtgccgccagcggcttcaccttcagcagctacgccatgagctgggtgcgccaggcccctggaaaaggactggaatgggtgtccgccatcagcggctctggcgggtctaccaactacgccgatagcgtgaagggccggttcaccatcagccgggacaacagcaagaacaccctgtacctccagatgaacagcctgcgggccgaggacaccgccgtgtattattgtgccggcagcagcgggtggagcgagtattggggacagggcaccctcgtgaccgtgtcctctacgcgtatccagaaccctgatcctgccgtgtaccagctgcgggatagcaagagcagcgacaagagcgtgtgtctgttcaccgacttcgacagccagaccaacgtgtcccagagcaaggactccgacgtgtacatcaccgataagtgcgtgctggacatgcggagcatggacttcaagagcaactccgccgtggcctggtccaacaagtccgatttcgcctgcgccaacgccttcaacaacagcattatccccgaggacacattcttcccaagccccgagagcagcgactccaccgaccacgtgaagcccaaagagacagagaacaccaagcagcccagcaagagctgccacaagcccaaggccatcgtgcacaccgagaaagtgaacatgatgagcctgaccgtgctgggcctgcggatgctgttcgccaaaaccgtggccgtgaacttcctgctgaccgccaagctgttcttcctc

SEQ ID NO: 7746 - DNA, 2982 bp, synthetic construct
  source 1..2982: mol_type = other DNA
atggccttaccagtgaccgccttgctcctgccgctggccttgctgctccacgccgccaggccggaagtgcagctggttgaatctggcggaggactggttcagcctggcggatctctgagactgtcttgtgccgccagcggcttcagcttcagcgacttttggatgagctgggtccgacaggcccctggcaaaggacttgaatgggtcgccacaatcagccaggccggcagcgagaaggactacgtggactctgtgaagggcagattcaccatcagccgggacaacgccaagaagtccctgtacctccagatgaacagcctgagagccgaggacaccgccgtgtactattgtgcctctggcgtgtacagcttcgactacagaggccagggcaccctggtcacagtctcttctggtaccggcggaggcggatctggcggcggaggtagcggtggcggaggatctgaattcgacgagatccagctggtgcagagcggagccgaagtgaagaagcctggcgagagcctgcggatcagctgcaagggcagcggcttcaacatcgaggactactacatccactgggtgcgccagatgcccggcaagggcctggaatggatgggcagaatcgaccccgagaacgacgagactaagtacggccccatcttccagggccacgtgaccatcagcgccgacaccagcatcaacaccgtgtacctccagtggtccagcctgaaggccagcgacaccgccatgtactactgcgcctttagaggcggcgtgtactggggccagggcaccacagtgacagtgtctagcctcgaggacctgaagaacgtgttcccacctgaggtggccgtgttcgagcctagcgaggccgagatcagccacacccagaaagccaccctcgtgtgcctggctaccggcttctaccccgaccatgtggaactgtcttggtgggtcaacggcaaagaggtgcacagcggcgtgtgtaccgacccccagccactgaaagaacagcccgccctgaacgacagccggtactgcctgagcagcagactgagagtgtccgccaccttctggcagaacccccggaaccacttcagatgccaggtgcagttctacggcctgagcgagaacgacgagtggacccaggacagagccaagcccgtgacccagatcgtgtctgccgaagcctggggcagagccgatgatgtgattaagatccactggcaggaaaagaagtccaacaccatcctgggcagccaggaaggcaacaccatgaagaccaacgacacctacatgaagttcagctggctgaccgtgcccgagaagtccctggacaaagaacacagatgcatcgtgcggcacgaaaacaacaagaacggcgtggaccaggaaatcatcttcccacccatcaagaccgatgtgattacaatggaccccaaggacaactgctccaaggacgccaacgataccctgctgctccagctgaccaacaccagcgcctactacatgtacttgttgctgctgctgaagtccgtggtgtacttcgccatcatcacatgctgcctgctgcggagaaccgccttctgctgcaacggcgagaagtctagggccaagcgatctggatctggagcaacaaacttctcactactcaaacaagcaggtgacgtggaggagaatcccgggcctactagtatggactggatttggcgcatccttttccttgtcggcgctgctaccggcgcgcattccgggccccagctccagctgcaagagtctggacctggcctggtcaagcctagcgagacactgagcctgacctgtaccgtgtccggcgatagcatcagcagcggcgattactactggggctggatcagacagcctcctggcaaaggactggaatggatcggccacatctactacagcggcgtgacctactacaaccccagcctgaagtccagagtgaccatcagcgtggacaccagccggaaccagttctccctgaagctgtctagcgtgacagccgccgataccgccgtgtactactgcaccagagaggacagcagcaactggcggagtagaggccagggaacactggtcacagttagctctggatccggcggaggcggaagtggaggcggaggatctggcggcggaggctctttcgaagatgtcgtgatgacccagagccccgacagcctggctgtgtctctgggagagagagccaccatcaactgcaagtccagccagtccctgctggacagcgacggcaagacctacctgaactggctccagcagaagcccggccagccccccaagagactgatctccctggtgtccaagctggactccggcgtgcccgatagattttccggctctggcagcggcaccgacttcaccctgacaatcagctcccttcaggccgaggacgtggccgtgtactattgctggcagggcacacacttccccggcacctttggcggaggcaccaaggtggaaatcaagacgcgtatccagaaccctgatcctgccgtgtaccagctgcgggatagcaagagcagcgacaagagcgtgtgtctgttcaccgacttcgacagccagaccaacgtgtcccagagcaaggactccgacgtgtacatcaccgataagtgcgtgctggacatgcggagcatggacttcaagagcaactccgccgtggcctggtccaacaagtccgatttcgcctgcgccaacgccttcaacaacagcattatccccgaggacacattcttcccaagccccgagagcagcgactccaccgaccacgtgaagcccaaagagacagagaacaccaagcagcccagcaagagctgccacaagcccaaggccatcgtgcacaccgagaaagtgaacatgatgagcctgaccgtgctgggcctgcggatgctgttcgccaaaaccgtggccgtgaacttcctgctgaccgccaagctgttcttcctc

SEQ ID NO: 7747 - DNA, 3003 bp, synthetic construct
  source 1..3003: mol_type = other DNA
atggccttaccagtgaccgccttgctcctgccgctggccttgctgctccacgccgccaggccggaagtgcagctggttgaatctggcggaggactggttcagcctggcggatctctgagactgtcttgtgccgccagcggcttcagcttcagcgacttttggatgagctgggtccgacaggcccctggcaaaggacttgaatgggtcgccacaatcagccaggccggcagcgagaaggactacgtggactctgtgaagggcagattcaccatcagccgggacaacgccaagaagtccctgtacctccagatgaacagcctgagagccgaggacaccgccgtgtactattgtgcctctggcgtgtacagcttcgactacagaggccagggcaccctggtcacagtctcttctggtaccggcggaggcggatctggcggcggaggtagcggtggcggaggatctgaattcgacgagcttgtgatgacccagagccccagcagcctgacagtgacagccggcgagaaagtgaccatgagctgcaagagcagccagagcctgctgaacagcggcaaccagaagaactacctgacctggtatcagcagaagcccggccagccccccaagctgctgatctactgggccagcaccagagaaagcggcgtgcccgatagattcaccggctctggcagcggcaccgacttcaccctgacaatcagcagcgtgcaggccgaggacctggccgtgtactactgccagaacgactacagctaccccctgaccttcggagccggcaccaagctggaaatcaagctcgaggacctgaagaacgtgttcccacctgaggtggccgtgttcgagcctagcgaggccgagatcagccacacccagaaagccaccctcgtgtgcctggctaccggcttctaccccgaccatgtggaactgtcttggtgggtcaacggcaaagaggtgcacagcggcgtgtgtaccgacccccagccactgaaagaacagcccgccctgaacgacagccggtactgcctgagcagcagactgagagtgtccgccaccttctggcagaacccccggaaccacttcagatgccaggtgcagttctacggcctgagcgagaacgacgagtggacccaggacagagccaagcccgtgacccagatcgtgtctgccgaagcctggggcagagccgatgatgtgattaagatccactggcaggaaaagaagtccaacaccatcctgggcagccaggaaggcaacaccatgaagaccaacgacacctacatgaagttcagctggctgaccgtgcccgagaagtccctggacaaagaacacagatgcatcgtgcggcacgaaaacaacaagaacggcgtggaccaggaaatcatcttcccacccatcaagaccgatgtgattacaatggaccccaaggacaactgctccaaggacgccaacgataccctgctgctccagctgaccaacaccagcgcctactacatgtacttgttgctgctgctgaagtccgtggtgtacttcgccatcatcacatgctgcctgctgcggagaaccgccttctgctgcaacggcgagaagtctagggccaagcgatctggatctggagcaacaaacttctcactactcaaacaagcaggtgacgtggaggagaatcccgggcctactagtatggactggatttggcgcatccttttccttgtcggcgctgctaccggcgcgcattccgggccccagctccagctgcaagagtctggacctggcctggtcaagcctagcgagacactgagcctgacctgtaccgtgtccggcgatagcatcagcagcggcgattactactggggctggatcagacagcctcctggcaaaggactggaatggatcggccacatctactacagcggcgtgacctactacaaccccagcctgaagtccagagtgaccatcagcgtggacaccagccggaaccagttctccctgaagctgtctagcgtgacagccgccgataccgccgtgtactactgcaccagagaggacagcagcaactggcggagtagaggccagggaacactggtcacagttagctctggatccggcggaggcggaagtggaggcggaggatctggcggcggaggctctttcgaagaagtgcagctgctggaacagtctggcgccgaacttgtgcggcctggcaccagcgtgaagatcagctgtaaagccagcggctacgccttcaccaactactggctgggctgggtcaagcagaggcctggacacggcctggaatggatcggcgacatctttcccggctccggcaacatccactacaacgagaagttcaagggcaaggccaccctgaccgccgacaagtctagcagcaccgcctacatgcagctgtccagcctgacctttgaggacagcgccgtgtatttctgtgcccggctgcggaactgggacgagcccatggattattggggccagggcaccaccgtgaccgtgtctagtacgcgtatccagaaccctgatcctgccgtgtaccagctgcgggatagcaagagcagcgacaagagcgtgtgtctgttcaccgacttcgacagccagaccaacgtgtcccagagcaaggactccgacgtgtacatcaccgataagtgcgtgctggacatgcggagcatggacttcaagagcaactccgccgtggcctggtccaacaagtccgatttcgcctgcgccaacgccttcaacaacagcattatccccgaggacacattcttcccaagccccgagagcagcgactccaccgaccacgtgaagcccaaagagacagagaacaccaagcagcccagcaagagctgccacaagcccaaggccatcgtgcacaccgagaaagtgaacatgatgagcctgaccgtgctgggcctgcggatgctgttcgccaaaaccgtggccgtgaacttcctgctgaccgccaagctgttcttcctc

SEQ ID NO: 7748 - DNA, 3006 bp, synthetic construct
  source 1..3006: mol_type = other DNA
atggccttaccagtgaccgccttgctcctgccgctggccttgctgctccacgccgccaggccggaagtgcagctggttgaatctggcggaggactggttcagcctggcggatctctgagactgtcttgtgccgccagcggcttcagcttcagcgacttttggatgagctgggtccgacaggcccctggcaaaggacttgaatgggtcgccacaatcagccaggccggcagcgagaaggactacgtggactctgtgaagggcagattcaccatcagccgggacaacgccaagaagtccctgtacctccagatgaacagcctgagagccgaggacaccgccgtgtactattgtgcctctggcgtgtacagcttcgactacagaggccagggcaccctggtcacagtctcttctggtaccggcggaggcggatctggcggcggaggtagcggtggcggaggatctgaattcgacgagctgcagatgacccagagccctagcagcctgtctgccagcgtgggcgacagagtgaccatcacctgtagagccagccagagcatcagcagctacctgaactggtatcagcagaagcccggccagccccccaaactgctgatctactgggccagcaccagagaaagcggcgtgcccgatagattcagcggcagcgagagcggcaccaactacaccctgaccatcagctccctgcagcccgaggacttcgccacctacttttgccagcagagcgacagcctgcccatcacctttggacagggcacccggctggacattcagctcgaggacctgaagaacgtgttcccacctgaggtggccgtgttcgagcctagcgaggccgagatcagccacacccagaaagccaccctcgtgtgcctggctaccggcttctaccccgaccatgtggaactgtcttggtgggtcaacggcaaagaggtgcacagcggcgtgtgtaccgacccccagccactgaaagaacagcccgccctgaacgacagccggtactgcctgagcagcagactgagagtgtccgccaccttctggcagaacccccggaaccacttcagatgccaggtgcagttctacggcctgagcgagaacgacgagtggacccaggacagagccaagcccgtgacccagatcgtgtctgccgaagcctggggcagagccgatgatgtgattaagatccactggcaggaaaagaagtccaacaccatcctgggcagccaggaaggcaacaccatgaagaccaacgacacctacatgaagttcagctggctgaccgtgcccgagaagtccctggacaaagaacacagatgcatcgtgcggcacgaaaacaacaagaacggcgtggaccaggaaatcatcttcccacccatcaagaccgatgtgattacaatggaccccaaggacaactgctccaaggacgccaacgataccctgctgctccagctgaccaacaccagcgcctactacatgtacttgttgctgctgctgaagtccgtggtgtacttcgccatcatcacatgctgcctgctgcggagaaccgccttctgctgcaacggcgagaagtctagggccaagcgatctggatctggagcaacaaacttctcactactcaaacaagcaggtgacgtggaggagaatcccgggcctactagtatggactggatttggcgcatccttttccttgtcggcgctgctaccggcgcgcattccgggccccagctccagctgcaagagtctggacctggcctggtcaagcctagcgagacactgagcctgacctgtaccgtgtccggcgatagcatcagcagcggcgattactactggggctggatcagacagcctcctggcaaaggactggaatggatcggccacatctactacagcggcgtgacctactacaaccccagcctgaagtccagagtgaccatcagcgtggacaccagccggaaccagttctccctgaagctgtctagcgtgacagccgccgataccgccgtgtactactgcaccagagaggacagcagcaactggcggagtagaggccagggaacactggtcacagttagctctggatccggcggaggcggaagtggaggcggaggatctggcggcggaggctctttcgaagaggtgcaactgctggaatctgggggcggagtggtgcagcctggcagaagcctgagactgagctgtgccgccagcggcttcaccttcagctcctacggaatgcactgggtgcgccaggcccctggcaaaggactggaatgggtggccgtgatctcctacgacggcagcaacaagtactacgccgacagcgtgaagggccggttcaccatcagccgggacaacagcaagaacaccctgtacctgcagatgaacagcctgcgggccgaggacaccgccgtgtactactgcgccaaggatatgggctggggcagcggctggcggccttactactactacggcatggacgtgtggggccagggcaccaccgtgacagtgtcatctacgcgtatccagaaccctgatcctgccgtgtaccagctgcgggatagcaagagcagcgacaagagcgtgtgtctgttcaccgacttcgacagccagaccaacgtgtcccagagcaaggactccgacgtgtacatcaccgataagtgcgtgctggacatgcggagcatggacttcaagagcaactccgccgtggcctggtccaacaagtccgatttcgcctgcgccaacgccttcaacaacagcattatccccgaggacacattcttcccaagccccgagagcagcgactccaccgaccacgtgaagcccaaagagacagagaacaccaagcagcccagcaagagctgccacaagcccaaggccatcgtgcacaccgagaaagtgaacatgatgagcctgaccgtgctgggcctgcggatgctgttcgccaaaaccgtggccgtgaacttcctgctgaccgccaagctgttcttcctc

SEQ ID NO: 7749 - DNA, 2997 bp, synthetic construct
  source 1..2997: mol_type = other DNA
atggccttaccagtgaccgccttgctcctgccgctggccttgctgctccacgccgccaggccggaagtgcagctggttgaatctggcggaggactggttcagcctggcggatctctgagactgtcttgtgccgccagcggcttcagcttcagcgacttttggatgagctgggtccgacaggcccctggcaaaggacttgaatgggtcgccacaatcagccaggccggcagcgagaaggactacgtggactctgtgaagggcagattcaccatcagccgggacaacgccaagaagtccctgtacctccagatgaacagcctgagagccgaggacaccgccgtgtactattgtgcctctggcgtgtacagcttcgactacagaggccagggcaccctggtcacagtctcttctggtaccggcggaggcggatctggcggcggaggtagcggtggcggaggatctgaattcgacgacatccaaatgacacagagtccttctagtttgagtgcgagcgtgggggacagggtgaccattacctgcagggccagccagagcataagctcataccttaattggtaccagcaaaaaccaggtaaggcccctaagctcctgatctacgcggcctcttcacttcaatctggggtcccttcccgcttcagtggctccggcagcggcaccgacttcacgctcactatatcaagtctgcagcctgaggatctcgccacctattactgtcaacaaagttattccacccctttcacctttggaccgggcacgaaagtggatattaagctcgaggacctgaagaacgtgttcccacctgaggtggccgtgttcgagcctagcgaggccgagatcagccacacccagaaagccaccctcgtgtgcctggctaccggcttctaccccgaccatgtggaactgtcttggtgggtcaacggcaaagaggtgcacagcggcgtgtgtaccgacccccagccactgaaagaacagcccgccctgaacgacagccggtactgcctgagcagcagactgagagtgtccgccaccttctggcagaacccccggaaccacttcagatgccaggtgcagttctacggcctgagcgagaacgacgagtggacccaggacagagccaagcccgtgacccagatcgtgtctgccgaagcctggggcagagccgatgatgtgattaagatccactggcaggaaaagaagtccaacaccatcctgggcagccaggaaggcaacaccatgaagaccaacgacacctacatgaagttcagctggctgaccgtgcccgagaagtccctggacaaagaacacagatgcatcgtgcggcacgaaaacaacaagaacggcgtggaccaggaaatcatcttcccacccatcaagaccgatgtgattacaatggaccccaaggacaactgctccaaggacgccaacgataccctgctgctccagctgaccaacaccagcgcctactacatgtacttgttgctgctgctgaagtccgtggtgtacttcgccatcatcacatgctgcctgctgcggagaaccgccttctgctgcaacggcgagaagtctagggccaagcgatctggatctggagcaacaaacttctcactactcaaacaagcaggtgacgtggaggagaatcccgggcctactagtatggactggatttggcgcatccttttccttgtcggcgctgctaccggcgcgcattccgggccccagctccagctgcaagagtctggacctggcctggtcaagcctagcgagacactgagcctgacctgtaccgtgtccggcgatagcatcagcagcggcgattactactggggctggatcagacagcctcctggcaaaggactggaatggatcggccacatctactacagcggcgtgacctactacaaccccagcctgaagtccagagtgaccatcagcgtggacaccagccggaaccagttctccctgaagctgtctagcgtgacagccgccgataccgccgtgtactactgcaccagagaggacagcagcaactggcggagtagaggccagggaacactggtcacagttagctctggatccggcggaggcggaagtggaggcggaggatctggcggcggaggctctttcgaagtgcacgaggtccagcttgtgcagtccggggcagaggtcaagaagcctggttctagcgtaaaagtgagttgcaaagcctcaggtgggacattttcatcctacgcgatcagttgggttagacaggctcctggtcaagggctggaatggatgggcggaattattccaatcttcggaacagcgaattacgcgcagaagttccagggtagagtaaccatcactgctgacaagtccacctccaccgcatacatggaattgtctagtctccggagcgaggatacggcggtgtattattgtgctacgttcgccctgtttggcttccgcgaacaggctttcgacatctgggggcagggcacgacagtcacggttagtagtacgcgtatccagaaccctgatcctgccgtgtaccagctgcgggatagcaagagcagcgacaagagcgtgtgtctgttcaccgacttcgacagccagaccaacgtgtcccagagcaaggactccgacgtgtacatcaccgataagtgcgtgctggacatgcggagcatggacttcaagagcaactccgccgtggcctggtccaacaagtccgatttcgcctgcgccaacgccttcaacaacagcattatccccgaggacacattcttcccaagccccgagagcagcgactccaccgaccacgtgaagcccaaagagacagagaacaccaagcagcccagcaagagctgccacaagcccaaggccatcgtgcacaccgagaaagtgaacatgatgagcctgaccgtgctgggcctgcggatgctgttcgccaaaaccgtggccgtgaacttcctgctgaccgccaagctgttcttcctc

SEQ ID NO: 7750 - DNA, 2991 bp, synthetic construct
  source 1..2991: mol_type = other DNA
atggccttaccagtgaccgccttgctcctgccgctggccttgctgctccacgccgccaggccggaagtgcagctggttgaatctggcggaggactggttcagcctggcggatctctgagactgtcttgtgccgccagcggcttcagcttcagcgacttttggatgagctgggtccgacaggcccctggcaaaggacttgaatgggtcgccacaatcagccaggccggcagcgagaaggactacgtggactctgtgaagggcagattcaccatcagccgggacaacgccaagaagtccctgtacctccagatgaacagcctgagagccgaggacaccgccgtgtactattgtgcctctggcgtgtacagcttcgactacagaggccagggcaccctggtcacagtctcttctggtaccggcggaggcggatctggcggcggaggtagcggtggcggaggatctgaattcgacatcgtgctgacccagagccctctgagcctggccgtgtctctgggacagcctgccatcatcagctgcaaggccagccagagcgtgtcctttgccggcacctctctgatgcactggtatcaccagaagcccggccagcagcccagactgctgatctacagagccagcaacctggaagccggcgtgcccgatagattttccggcagcggcagcaagaccgacttcaccctgaccatcagccccgtggaagccgaagatgccgccacctactactgccagcagagcagagagtacccctacaccttcggcggaggcaccaagctggaaatcaagaggctcgaggacctgaagaacgtgttcccacctgaggtggccgtgttcgagcctagcgaggccgagatcagccacacccagaaagccaccctcgtgtgcctggctaccggcttctaccccgaccatgtggaactgtcttggtgggtcaacggcaaagaggtgcacagcggcgtgtgtaccgacccccagccactgaaagaacagcccgccctgaacgacagccggtactgcctgagcagcagactgagagtgtccgccaccttctggcagaacccccggaaccacttcagatgccaggtgcagttctacggcctgagcgagaacgacgagtggacccaggacagagccaagcccgtgacccagatcgtgtctgccgaagcctggggcagagccgatgatgtgattaagatccactggcaggaaaagaagtccaacaccatcctgggcagccaggaaggcaacaccatgaagaccaacgacacctacatgaagttcagctggctgaccgtgcccgagaagtccctggacaaagaacacagatgcatcgtgcggcacgaaaacaacaagaacggcgtggaccaggaaatcatcttcccacccatcaagaccgatgtgattacaatggaccccaaggacaactgctccaaggacgccaacgataccctgctgctccagctgaccaacaccagcgcctactacatgtacttgttgctgctgctgaagtccgtggtgtacttcgccatcatcacatgctgcctgctgcggagaaccgccttctgctgcaacggcgagaagtctagggccaagcgatctggatctggagcaacaaacttctcactactcaaacaagcaggtgacgtggaggagaatcccgggcctactagtatggactggatttggcgcatccttttccttgtcggcgctgctaccggcgcgcattccgggccccagctccagctgcaagagtctggacctggcctggtcaagcctagcgagacactgagcctgacctgtaccgtgtccggcgatagcatcagcagcggcgattactactggggctggatcagacagcctcctggcaaaggactggaatggatcggccacatctactacagcggcgtgacctactacaaccccagcctgaagtccagagtgaccatcagcgtggacaccagccggaaccagttctccctgaagctgtctagcgtgacagccgccgataccgccgtgtactactgcaccagagaggacagcagcaactggcggagtagaggccagggaacactggtcacagttagctctggatccggcggaggcggaagtggaggcggaggatctggcggcggaggctctttcgaacaggtccaactggtgcagagcggagccgaggtcgtgaagcctggcgcttccgtgaagattagctgcaaagccagcggctacacctttaccggctactttatgaactgggtcaagcagagccctggccagagcctggaatggatcggcagaatccacccctacgacggcgacaccttctacaaccagaagttccagggcaaggccaccctgacagtggacaagagcagcaacaccgcccacatggaactgctgagcctgaccagcgaggacttcgccgtgtactactgcaccagatacgacggcagccgggctatggactattggggccagggcaccaccgtgaccgtgtctagtacgcgtatccagaaccctgatcctgccgtgtaccagctgcgggatagcaagagcagcgacaagagcgtgtgtctgttcaccgacttcgacagccagaccaacgtgtcccagagcaaggactccgacgtgtacatcaccgataagtgcgtgctggacatgcggagcatggacttcaagagcaactccgccgtggcctggtccaacaagtccgatttcgcctgcgccaacgccttcaacaacagcattatccccgaggacacattcttcccaagccccgagagcagcgactccaccgaccacgtgaagcccaaagagacagagaacaccaagcagcccagcaagagctgccacaagcccaaggccatcgtgcacaccgagaaagtgaacatgatgagcctgaccgtgctgggcctgcggatgctgttcgccaaaaccgtggccgtgaacttcctgctgaccgccaagctgttcttcctc

SEQ ID NO: 7751 - DNA, 2982 bp, synthetic construct
  source 1..2982: mol_type = other DNA
atggccttaccagtgaccgccttgctcctgccgctggccttgctgctccacgccgccaggccggaagtgcagctggttgaatctggcggaggactggttcagcctggcggatctctgagactgtcttgtgccgccagcggcttcagcttcagcgacttttggatgagctgggtccgacaggcccctggcaaaggacttgaatgggtcgccacaatcagccaggccggcagcgagaaggactacgtggactctgtgaagggcagattcaccatcagccgggacaacgccaagaagtccctgtacctccagatgaacagcctgagagccgaggacaccgccgtgtactattgtgcctctggcgtgtacagcttcgactacagaggccagggcaccctggtcacagtctcttctggtaccggcggaggcggatctggcggcggaggtagcggtggcggaggatctgaattcgacgacgttgtgatgacccagacccccctgagcctgcctgtgacacctggcgaacctgccagcatcagctgtcggagcagccagagcctggtgcacagaaacggcaacacctacctgcactggtatctccagaagcccggccagagccccaagctgctgatccacaaggtgtccaacagattcagcggcgtgcccgacagattctccggcagcggctctggcaccgacttcaccctgaagatcagccgggtggaagccgaggacctgggcgtgtacttctgtagccagagcacccatgtgccccccctgacatttggagccggcaccaagctggaactgaagctcgaggacctgaagaacgtgttcccacctgaggtggccgtgttcgagcctagcgaggccgagatcagccacacccagaaagccaccctcgtgtgcctggctaccggcttctaccccgaccatgtggaactgtcttggtgggtcaacggcaaagaggtgcacagcggcgtgtgtaccgacccccagccactgaaagaacagcccgccctgaacgacagccggtactgcctgagcagcagactgagagtgtccgccaccttctggcagaacccccggaaccacttcagatgccaggtgcagttctacggcctgagcgagaacgacgagtggacccaggacagagccaagcccgtgacccagatcgtgtctgccgaagcctggggcagagccgatgatgtgattaagatccactggcaggaaaagaagtccaacaccatcctgggcagccaggaaggcaacaccatgaagaccaacgacacctacatgaagttcagctggctgaccgtgcccgagaagtccctggacaaagaacacagatgcatcgtgcggcacgaaaacaacaagaacggcgtggaccaggaaatcatcttcccacccatcaagaccgatgtgattacaatggaccccaaggacaactgctccaaggacgccaacgataccctgctgctccagctgaccaacaccagcgcctactacatgtacttgttgctgctgctgaagtccgtggtgtacttcgccatcatcacatgctgcctgctgcggagaaccgccttctgctgcaacggcgagaagtctagggccaagcgatctggatctggagcaacaaacttctcactactcaaacaagcaggtgacgtggaggagaatcccgggcctactagtatggactggatttggcgcatccttttccttgtcggcgctgctaccggcgcgcattccgggccccagctccagctgcaagagtctggacctggcctggtcaagcctagcgagacactgagcctgacctgtaccgtgtccggcgatagcatcagcagcggcgattactactggggctggatcagacagcctcctggcaaaggactggaatggatcggccacatctactacagcggcgtgacctactacaaccccagcctgaagtccagagtgaccatcagcgtggacaccagccggaaccagttctccctgaagctgtctagcgtgacagccgccgataccgccgtgtactactgcaccagagaggacagcagcaactggcggagtagaggccagggaacactggtcacagttagctctggatccggcggaggcggaagtggaggcggaggatctggcggcggaggctctttcgaagaagtgcagctggtgcagtctggcgctgaggtggaaaagcctggggccagcgtgaagattagctgcaaggccagcggcagcagcttcaccggctacaacatgaactgggtgcgccagaacatcggcaagagcctggaatggatcggagccatcgacccctactacggcggcaccagctacaaccagaagttcaagggcagagccaccctgaccgtggacaagagcaccagcaccgcctacatgcacctgaagtccctgcggagcgaggacaccgccgtgtactactgtgtgtccggcatggaatattggggccagggcaccagcgtgaccgtgtctagtacgcgtatccagaaccctgatcctgccgtgtaccagctgcgggatagcaagagcagcgacaagagcgtgtgtctgttcaccgacttcgacagccagaccaacgtgtcccagagcaaggactccgacgtgtacatcaccgataagtgcgtgctggacatgcggagcatggacttcaagagcaactccgccgtggcctggtccaacaagtccgatttcgcctgcgccaacgccttcaacaacagcattatccccgaggacacattcttcccaagccccgagagcagcgactccaccgaccacgtgaagcccaaagagacagagaacaccaagcagcccagcaagagctgccacaagcccaaggccatcgtgcacaccgagaaagtgaacatgatgagcctgaccgtgctgggcctgcggatgctgttcgccaaaaccgtggccgtgaacttcctgctgaccgccaagctgttcttcctc

SEQ ID NO: 7752 - DNA, 2976 bp, synthetic construct
  source 1..2976: mol_type = other DNA
atggccttaccagtgaccgccttgctcctgccgctggccttgctgctccacgccgccaggccggaagtgcagctggttgaatctggcggaggactggttcagcctggcggatctctgagactgtcttgtgccgccagcggcttcagcttcagcgacttttggatgagctgggtccgacaggcccctggcaaaggacttgaatgggtcgccacaatcagccaggccggcagcgagaaggactacgtggactctgtgaagggcagattcaccatcagccgggacaacgccaagaagtccctgtacctccagatgaacagcctgagagccgaggacaccgccgtgtactattgtgcctctggcgtgtacagcttcgactacagaggccagggcaccctggtcacagtctcttctggtaccggcggaggcggatctggcggcggaggtagcggtggcggaggatctgaattcgacgagatcgtgatgacccagacccctgccaccctgtctgtgtctgccggcgagagagtgaccattacctgcaaggccagccagagcgtgtccaacgacgtgacctggtatcagcagaagcccggccaggcccccagactgctgatctacagcgccagcaacagatacagcggcgtgcccgccagattttccggcagcggctacggcaccgagttcaccttcaccatcagcagcgtgcagagcgaggacttcgccgtgtacttctgtcagcaagactacagcagcttcggccagggcaccaagctggaaatcaagaggctcgaggacctgaagaacgtgttcccacctgaggtggccgtgttcgagcctagcgaggccgagatcagccacacccagaaagccaccctcgtgtgcctggctaccggcttctaccccgaccatgtggaactgtcttggtgggtcaacggcaaagaggtgcacagcggcgtgtgtaccgacccccagccactgaaagaacagcccgccctgaacgacagccggtactgcctgagcagcagactgagagtgtccgccaccttctggcagaacccccggaaccacttcagatgccaggtgcagttctacggcctgagcgagaacgacgagtggacccaggacagagccaagcccgtgacccagatcgtgtctgccgaagcctggggcagagccgatgatgtgattaagatccactggcaggaaaagaagtccaacaccatcctgggcagccaggaaggcaacaccatgaagaccaacgacacctacatgaagttcagctggctgaccgtgcccgagaagtccctggacaaagaacacagatgcatcgtgcggcacgaaaacaacaagaacggcgtggaccaggaaatcatcttcccacccatcaagaccgatgtgattacaatggaccccaaggacaactgctccaaggacgccaacgataccctgctgctccagctgaccaacaccagcgcctactacatgtacttgttgctgctgctgaagtccgtggtgtacttcgccatcatcacatgctgcctgctgcggagaaccgccttctgctgcaacggcgagaagtctagggccaagcgatctggatctggagcaacaaacttctcactactcaaacaagcaggtgacgtggaggagaatcccgggcctactagtatggactggatttggcgcatccttttccttgtcggcgctgctaccggcgcgcattccgggccccagctccagctgcaagagtctggacctggcctggtcaagcctagcgagacactgagcctgacctgtaccgtgtccggcgatagcatcagcagcggcgattactactggggctggatcagacagcctcctggcaaaggactggaatggatcggccacatctactacagcggcgtgacctactacaaccccagcctgaagtccagagtgaccatcagcgtggacaccagccggaaccagttctccctgaagctgtctagcgtgacagccgccgataccgccgtgtactactgcaccagagaggacagcagcaactggcggagtagaggccagggaacactggtcacagttagctctggatccggcggaggcggaagtggaggcggaggatctggcggcggaggctctttcgaacaggtgcagctggtggaatctggacctggcgtggtgcagcctggcagaagcctgagaatcagctgtgccgtgtccggcttcagcgtgaccaactacggcgtgcactgggtgcgccagccacctggaaaaggactggaatggctgggcgtgatctgggctggcggcatcaccaactacaacagcgccttcatgtcccggctgaccatctccaaggacaacagcaagaacaccgtgtacctccagatgaacagcctgcgggccgaggacaccgccatgtactactgtgcttccagaggcggccactacggctacgccctggattattggggccagggaaccctcgtgaccgtgtcctctacgcgtatccagaaccctgatcctgccgtgtaccagctgcgggatagcaagagcagcgacaagagcgtgtgtctgttcaccgacttcgacagccagaccaacgtgtcccagagcaaggactccgacgtgtacatcaccgataagtgcgtgctggacatgcggagcatggacttcaagagcaactccgccgtggcctggtccaacaagtccgatttcgcctgcgccaacgccttcaacaacagcattatccccgaggacacattcttcccaagccccgagagcagcgactccaccgaccacgtgaagcccaaagagacagagaacaccaagcagcccagcaagagctgccacaagcccaaggccatcgtgcacaccgagaaagtgaacatgatgagcctgaccgtgctgggcctgcggatgctgttcgccaaaaccgtggccgtgaacttcctgctgaccgccaagctgttcttcctc

SEQ ID NO: 7753 - DNA, 2982 bp, synthetic construct
  source 1..2982: mol_type = other DNA
atggccttaccagtgaccgccttgctcctgccgctggccttgctgctccacgccgccaggccggaagtgcagctggttgaatctggcggaggactggttcagcctggcggatctctgagactgtcttgtgccgccagcggcttcagcttcagcgacttttggatgagctgggtccgacaggcccctggcaaaggacttgaatgggtcgccacaatcagccaggccggcagcgagaaggactacgtggactctgtgaagggcagattcaccatcagccgggacaacgccaagaagtccctgtacctccagatgaacagcctgagagccgaggacaccgccgtgtactattgtgcctctggcgtgtacagcttcgactacagaggccagggcaccctggtcacagtctcttctggtaccggcggaggcggatctggcggcggaggtagcggtggcggaggatctgaattcgacatccagatgacccagaccgccagcagcctgcctgcctctctgggcgacagagtgaccatctcctgtagcgccagccaggacatcagcaactacctgaactggtatcagcagaaacccgacggcaccgtgaagctgctgatcttctacagcagcaacctgcacagcggcgtgcccagcagattttctggcggcggaagcggcaccgactacagcctgaccatcagcaatctggaacccgaggacattgccacctacttttgccaccagtacagcaagctgccctggacctttggcggaggcaccaagctggaaatcaagagactcgaggacctgaagaacgtgttcccacctgaggtggccgtgttcgagcctagcgaggccgagatcagccacacccagaaagccaccctcgtgtgcctggctaccggcttctaccccgaccatgtggaactgtcttggtgggtcaacggcaaagaggtgcacagcggcgtgtgtaccgacccccagccactgaaagaacagcccgccctgaacgacagccggtactgcctgagcagcagactgagagtgtccgccaccttctggcagaacccccggaaccacttcagatgccaggtgcagttctacggcctgagcgagaacgacgagtggacccaggacagagccaagcccgtgacccagatcgtgtctgccgaagcctggggcagagccgatgatgtgattaagatccactggcaggaaaagaagtccaacaccatcctgggcagccaggaaggcaacaccatgaagaccaacgacacctacatgaagttcagctggctgaccgtgcccgagaagtccctggacaaagaacacagatgcatcgtgcggcacgaaaacaacaagaacggcgtggaccaggaaatcatcttcccacccatcaagaccgatgtgattacaatggaccccaaggacaactgctccaaggacgccaacgataccctgctgctccagctgaccaacaccagcgcctactacatgtacttgttgctgctgctgaagtccgtggtgtacttcgccatcatcacatgctgcctgctgcggagaaccgccttctgctgcaacggcgagaagtctagggccaagcgatctggatctggagcaacaaacttctcactactcaaacaagcaggtgacgtggaggagaatcccgggcctactagtatggactggatttggcgcatccttttccttgtcggcgctgctaccggcgcgcattccgggccccagctccagctgcaagagtctggacctggcctggtcaagcctagcgagacactgagcctgacctgtaccgtgtccggcgatagcatcagcagcggcgattactactggggctggatcagacagcctcctggcaaaggactggaatggatcggccacatctactacagcggcgtgacctactacaaccccagcctgaagtccagagtgaccatcagcgtggacaccagccggaaccagttctccctgaagctgtctagcgtgacagccgccgataccgccgtgtactactgcaccagagaggacagcagcaactggcggagtagaggccagggaacactggtcacagttagctctggatccggcggaggcggaagtggaggcggaggatctggcggcggaggctctttcgaagaagtgaccctggtggaaagcggcggagacttcgtgaagcctggcggctctctgaaggtgtcctgtgccgccagcggcttcgcctttagccactacgccatgagctgggtgcgccagacccctgccaagagactggaatgggtggcctacatcagcagcggcggctccggcacctactactccgatagcgtgaagggccggttcaccatcagccgggacaacgccaagaacaccctgtacctccagatgcggagcctgcggagcgaggacagcgccatgtatttctgcaccagagtgaagctgggcacctattacttcgactcttggggccagggcaccaccctgaccgtgtcatctacgcgtatccagaaccctgatcctgccgtgtaccagctgcgggatagcaagagcagcgacaagagcgtgtgtctgttcaccgacttcgacagccagaccaacgtgtcccagagcaaggactccgacgtgtacatcaccgataagtgcgtgctggacatgcggagcatggacttcaagagcaactccgccgtggcctggtccaacaagtccgatttcgcctgcgccaacgccttcaacaacagcattatccccgaggacacattcttcccaagccccgagagcagcgactccaccgaccacgtgaagcccaaagagacagagaacaccaagcagcccagcaagagctgccacaagcccaaggccatcgtgcacaccgagaaagtgaacatgatgagcctgaccgtgctgggcctgcggatgctgttcgccaaaaccgtggccgtgaacttcctgctgaccgccaagctgttcttcctc

SEQ ID NO: 7754 - DNA, 2988 bp, synthetic construct
  source 1..2988: mol_type = other DNA
atggccttaccagtgaccgccttgctcctgccgctggccttgctgctccacgccgccaggccggaagtgcagctggttgaatctggcggaggactggttcagcctggcggatctctgagactgtcttgtgccgccagcggcttcagcttcagcgacttttggatgagctgggtccgacaggcccctggcaaaggacttgaatgggtcgccacaatcagccaggccggcagcgagaaggactacgtggactctgtgaagggcagattcaccatcagccgggacaacgccaagaagtccctgtacctccagatgaacagcctgagagccgaggacaccgccgtgtactattgtgcctctggcgtgtacagcttcgactacagaggccagggcaccctggtcacagtctcttctggtaccggcggaggcggatctggcggcggaggtagcggtggcggaggatctgaattccagttcgtgctgacccagagcccttctgcctctgctgccctgggagcctctgccaagctgacctgtacactgagcagcgcccacaagacctacaccatcgactggtatcagcagcagaagggaaaggcccccagatacctgatccaagtgaagtccgacggcacctacacaaaggccaccggcgtgcccgatagattcagcggcagtagcagcggagccgatagatacctgattatccccagcgtgcaggccgacgacgaggccgattactactgcggcaccgattacaccggcggctacgtgttcggcggaggcacacaactgaccgtgacactcgaggacctgaagaacgtgttcccacctgaggtggccgtgttcgagcctagcgaggccgagatcagccacacccagaaagccaccctcgtgtgcctggctaccggcttctaccccgaccatgtggaactgtcttggtgggtcaacggcaaagaggtgcacagcggcgtgtgtaccgacccccagccactgaaagaacagcccgccctgaacgacagccggtactgcctgagcagcagactgagagtgtccgccaccttctggcagaacccccggaaccacttcagatgccaggtgcagttctacggcctgagcgagaacgacgagtggacccaggacagagccaagcccgtgacccagatcgtgtctgccgaagcctggggcagagccgatgatgtgattaagatccactggcaggaaaagaagtccaacaccatcctgggcagccaggaaggcaacaccatgaagaccaacgacacctacatgaagttcagctggctgaccgtgcccgagaagtccctggacaaagaacacagatgcatcgtgcggcacgaaaacaacaagaacggcgtggaccaggaaatcatcttcccacccatcaagaccgatgtgattacaatggaccccaaggacaactgctccaaggacgccaacgataccctgctgctccagctgaccaacaccagcgcctactacatgtacttgttgctgctgctgaagtccgtggtgtacttcgccatcatcacatgctgcctgctgcggagaaccgccttctgctgcaacggcgagaagtctagggccaagcgatctggatctggagcaacaaacttctcactactcaaacaagcaggtgacgtggaggagaatcccgggcctactagtatggactggatttggcgcatccttttccttgtcggcgctgctaccggcgcgcattccgggccccagctccagctgcaagagtctggacctggcctggtcaagcctagcgagacactgagcctgacctgtaccgtgtccggcgatagcatcagcagcggcgattactactggggctggatcagacagcctcctggcaaaggactggaatggatcggccacatctactacagcggcgtgacctactacaaccccagcctgaagtccagagtgaccatcagcgtggacaccagccggaaccagttctccctgaagctgtctagcgtgacagccgccgataccgccgtgtactactgcaccagagaggacagcagcaactggcggagtagaggccagggaacactggtcacagttagctctggatccggcggaggcggaagtggaggcggaggatctggcggcggaggctctttcgaagagcaactgaaagagtctggcggcggactgttcaagcccaccgataccctgaccctgacctgcaccgtgtccggcttcagcctgagctactacggcgtgaactgggtgcgccaggcccctggcaatggcctggaatggatcggcacaatcggcggcagcggcgacacctactatgcctcttgggccaagtccagaagcaccatcatcagaaacaccaacgagaacaccgtgaccctgaagatgaccagcctgacagccgccgacaccgccacctacttttgcgtcagatacgccaacatcggctacgagtatttcaacgtgtggggacccggcaccctcgtgaccgtgtcatctacgcgtatccagaaccctgatcctgccgtgtaccagctgcgggatagcaagagcagcgacaagagcgtgtgtctgttcaccgacttcgacagccagaccaacgtgtcccagagcaaggactccgacgtgtacatcaccgataagtgcgtgctggacatgcggagcatggacttcaagagcaactccgccgtggcctggtccaacaagtccgatttcgcctgcgccaacgccttcaacaacagcattatccccgaggacacattcttcccaagccccgagagcagcgactccaccgaccacgtgaagcccaaagagacagagaacaccaagcagcccagcaagagctgccacaagcccaaggccatcgtgcacaccgagaaagtgaacatgatgagcctgaccgtgctgggcctgcggatgctgttcgccaaaaccgtggccgtgaacttcctgctgaccgccaagctgttcttcctc

SEQ ID NO: 7755 - DNA, 3003 bp, synthetic construct
  source 1..3003: mol_type = other DNA
atggccttaccagtgaccgccttgctcctgccgctggccttgctgctccacgccgccaggccggaagtgcagctggttgaatctggcggaggactggttcagcctggcggatctctgagactgtcttgtgccgccagcggcttcagcttcagcgacttttggatgagctgggtccgacaggcccctggcaaaggacttgaatgggtcgccacaatcagccaggccggcagcgagaaggactacgtggactctgtgaagggcagattcaccatcagccgggacaacgccaagaagtccctgtacctccagatgaacagcctgagagccgaggacaccgccgtgtactattgtgcctctggcgtgtacagcttcgactacagaggccagggcaccctggtcacagtctcttctggtaccggcggaggcggatctggcggcggaggtagcggtggcggaggatctgaattccagttcgtgctgacccagagcccttctgtgtctgccgccctgggagcctctgccaagctgacctgtacactgagcagcgcccacaagacctacaccatcgactggtatcagcagcagcagggcgaggcccccagatacctgatgcaagtgaagtccgacggcagctacaccaagggcaccggcgtgcccgatagattcagcggcagtagcagcggagccgatagatacctgattatccccagcgtgcaggccgacgacgaggccggatatgtgtgcggcgctgacgacaatggcggctacgtgttcggcggaggcacccaactgacagtgacactcgaggacctgaagaacgtgttcccacctgaggtggccgtgttcgagcctagcgaggccgagatcagccacacccagaaagccaccctcgtgtgcctggctaccggcttctaccccgaccatgtggaactgtcttggtgggtcaacggcaaagaggtgcacagcggcgtgtgtaccgacccccagccactgaaagaacagcccgccctgaacgacagccggtactgcctgagcagcagactgagagtgtccgccaccttctggcagaacccccggaaccacttcagatgccaggtgcagttctacggcctgagcgagaacgacgagtggacccaggacagagccaagcccgtgacccagatcgtgtctgccgaagcctggggcagagccgatgatgtgattaagatccactggcaggaaaagaagtccaacaccatcctgggcagccaggaaggcaacaccatgaagaccaacgacacctacatgaagttcagctggctgaccgtgcccgagaagtccctggacaaagaacacagatgcatcgtgcggcacgaaaacaacaagaacggcgtggaccaggaaatcatcttcccacccatcaagaccgatgtgattacaatggaccccaaggacaactgctccaaggacgccaacgataccctgctgctccagctgaccaacaccagcgcctactacatgtacttgttgctgctgctgaagtccgtggtgtacttcgccatcatcacatgctgcctgctgcggagaaccgccttctgctgcaacggcgagaagtctagggccaagcgatctggatctggagcaacaaacttctcactactcaaacaagcaggtgacgtggaggagaatcccgggcctactagtatggactggatttggcgcatccttttccttgtcggcgctgctaccggcgcgcattccgggccccagctccagctgcaagagtctggacctggcctggtcaagcctagcgagacactgagcctgacctgtaccgtgtccggcgatagcatcagcagcggcgattactactggggctggatcagacagcctcctggcaaaggactggaatggatcggccacatctactacagcggcgtgacctactacaaccccagcctgaagtccagagtgaccatcagcgtggacaccagccggaaccagttctccctgaagctgtctagcgtgacagccgccgataccgccgtgtactactgcaccagagaggacagcagcaactggcggagtagaggccagggaacactggtcacagttagctctggatccggcggaggcggaagtggaggcggaggatctggcggcggaggctctttcgaacagagcgtgaaagagtctgagggcggcctgttcaagcccaccgataccctgaccctgacctgcaccgtgtccggcttcagcctgagcagacacgccctgacatgggtgcgccaggcccctggaaatggcctggaatggatcggagccatcgacaacgccggcaccacctactatgcctcttgggccaagtccagaagcaccatcacccggaacaccgacctgcacaccgtgaccctgaagatgaccagcctgaccgccagcgacaccgccacctacttttgcgccagagtgttctacgacatcaacagcggctactacctggacggcatggacctgtggggacctggcacacttgtgaccgtgtccagcacgcgtatccagaaccctgatcctgccgtgtaccagctgcgggatagcaagagcagcgacaagagcgtgtgtctgttcaccgacttcgacagccagaccaacgtgtcccagagcaaggactccgacgtgtacatcaccgataagtgcgtgctggacatgcggagcatggacttcaagagcaactccgccgtggcctggtccaacaagtccgatttcgcctgcgccaacgccttcaacaacagcattatccccgaggacacattcttcccaagccccgagagcagcgactccaccgaccacgtgaagcccaaagagacagagaacaccaagcagcccagcaagagctgccacaagcccaaggccatcgtgcacaccgagaaagtgaacatgatgagcctgaccgtgctgggcctgcggatgctgttcgccaaaaccgtggccgtgaacttcctgctgaccgccaagctgttcttcctc

SEQ ID NO: 7756 - DNA, 2985 bp, synthetic construct
  source 1..2985: mol_type = other DNA
atggccttaccagtgaccgccttgctcctgccgctggccttgctgctccacgccgccaggccggaagtgcagctggttgaatctggcggaggactggttcagcctggcggatctctgagactgtcttgtgccgccagcggcttcagcttcagcgacttttggatgagctgggtccgacaggcccctggcaaaggacttgaatgggtcgccacaatcagccaggccggcagcgagaaggactacgtggactctgtgaagggcagattcaccatcagccgggacaacgccaagaagtccctgtacctccagatgaacagcctgagagccgaggacaccgccgtgtactattgtgcctctggcgtgtacagcttcgactacagaggccagggcaccctggtcacagtctcttctggtaccggcggaggcggatctggcggcggaggtagcggtggcggaggatctgaattcgacatccagatgacccagagccccagcagcctgtctgccagcgtgggcgacagagtgaccatcacctgtagagccagccagggcatcagctcttggctggcctggtatcagcagaagcccgagaaggcccccaagagcctgatctacgccgcctctagtctccagagcggcgtgcccagcagattttctggcagcggctccggcaccgacttcaccctgacaatcagctccctccagcccgaggacttcgccacctactactgccagcagtacaacagctacccccccacctttggcggaggcaccaaggtggaaatcaagctcgaggacctgaagaacgtgttcccacctgaggtggccgtgttcgagcctagcgaggccgagatcagccacacccagaaagccaccctcgtgtgcctggctaccggcttctaccccgaccatgtggaactgtcttggtgggtcaacggcaaagaggtgcacagcggcgtgtgtaccgacccccagccactgaaagaacagcccgccctgaacgacagccggtactgcctgagcagcagactgagagtgtccgccaccttctggcagaacccccggaaccacttcagatgccaggtgcagttctacggcctgagcgagaacgacgagtggacccaggacagagccaagcccgtgacccagatcgtgtctgccgaagcctggggcagagccgatgatgtgattaagatccactggcaggaaaagaagtccaacaccatcctgggcagccaggaaggcaacaccatgaagaccaacgacacctacatgaagttcagctggctgaccgtgcccgagaagtccctggacaaagaacacagatgcatcgtgcggcacgaaaacaacaagaacggcgtggaccaggaaatcatcttcccacccatcaagaccgatgtgattacaatggaccccaaggacaactgctccaaggacgccaacgataccctgctgctccagctgaccaacaccagcgcctactacatgtacttgttgctgctgctgaagtccgtggtgtacttcgccatcatcacatgctgcctgctgcggagaaccgccttctgctgcaacggcgagaagtctagggccaagcgatctggatctggagcaacaaacttctcactactcaaacaagcaggtgacgtggaggagaatcccgggcctactagtatggactggatttggcgcatccttttccttgtcggcgctgctaccggcgcgcattccgggccccagctccagctgcaagagtctggacctggcctggtcaagcctagcgagacactgagcctgacctgtaccgtgtccggcgatagcatcagcagcggcgattactactggggctggatcagacagcctcctggcaaaggactggaatggatcggccacatctactacagcggcgtgacctactacaaccccagcctgaagtccagagtgaccatcagcgtggacaccagccggaaccagttctccctgaagctgtctagcgtgacagccgccgataccgccgtgtactactgcaccagagaggacagcagcaactggcggagtagaggccagggaacactggtcacagttagctctggatccggcggaggcggaagtggaggcggaggatctggcggcggaggctctttcgaagaagtgcaactggtggaatcaggcggcggactggtgcagcctggcgagtctctgagactgagctgtgtggcctccggcttcaccttcagccggtacaagatgaactgggtgcgccaggcccctggcaagggactggaatgggtgtcctacatcagccgcagcggcagagacatctactacgccgacagcgtgaagggccggttcaccatcagcagagacaacgccaagaacagcctgtacctccagatgaactccctgcgggacgaggacaccgccgtgtactactgtgccggaaccgtgaccacctattactacttcggcatggacgtgtggggccacggcaccaccgtgacagtgtcatctacgcgtatccagaaccctgatcctgccgtgtaccagctgcgggatagcaagagcagcgacaagagcgtgtgtctgttcaccgacttcgacagccagaccaacgtgtcccagagcaaggactccgacgtgtacatcaccgataagtgcgtgctggacatgcggagcatggacttcaagagcaactccgccgtggcctggtccaacaagtccgatttcgcctgcgccaacgccttcaacaacagcattatccccgaggacacattcttcccaagccccgagagcagcgactccaccgaccacgtgaagcccaaagagacagagaacaccaagcagcccagcaagagctgccacaagcccaaggccatcgtgcacaccgagaaagtgaacatgatgagcctgaccgtgctgggcctgcggatgctgttcgccaaaaccgtggccgtgaacttcctgctgaccgccaagctgttcttcctc

SEQ ID NO: 7757 - DNA, 2988 bp, synthetic construct
  source 1..2988: mol_type = other DNA
atggccttaccagtgaccgccttgctcctgccgctggccttgctgctccacgccgccaggccggaagtgcagctggttgaatctggcggaggactggttcagcctggcggatctctgagactgtcttgtgccgccagcggcttcagcttcagcgacttttggatgagctgggtccgacaggcccctggcaaaggacttgaatgggtcgccacaatcagccaggccggcagcgagaaggactacgtggactctgtgaagggcagattcaccatcagccgggacaacgccaagaagtccctgtacctccagatgaacagcctgagagccgaggacaccgccgtgtactattgtgcctctggcgtgtacagcttcgactacagaggccagggcaccctggtcacagtctcttctggtaccggcggaggcggatctggcggcggaggtagcggtggcggaggatctgaattcgacatccagatgacccagagccccagcagcctgtctgccagcgtgggcgacagagtgaccatcacctgtagagccagccagggcatcagctcttggctggcctggtatcagcagaagcccgagaaggcccccaagagcctgatctacgccgcctctagtctccagagcggcgtgcccagcagattttctggcagcggctccggcaccgacttcaccctgacaatcagctccctccagcccgaggacttcgccacctactactgccagcagtacaacagctaccctcccacctttggcggaggcaccaaggtggaaatcaagctcgaggacctgaagaacgtgttcccacctgaggtggccgtgttcgagcctagcgaggccgagatcagccacacccagaaagccaccctcgtgtgcctggctaccggcttctaccccgaccatgtggaactgtcttggtgggtcaacggcaaagaggtgcacagcggcgtgtgtaccgacccccagccactgaaagaacagcccgccctgaacgacagccggtactgcctgagcagcagactgagagtgtccgccaccttctggcagaacccccggaaccacttcagatgccaggtgcagttctacggcctgagcgagaacgacgagtggacccaggacagagccaagcccgtgacccagatcgtgtctgccgaagcctggggcagagccgatgatgtgattaagatccactggcaggaaaagaagtccaacaccatcctgggcagccaggaaggcaacaccatgaagaccaacgacacctacatgaagttcagctggctgaccgtgcccgagaagtccctggacaaagaacacagatgcatcgtgcggcacgaaaacaacaagaacggcgtggaccaggaaatcatcttcccacccatcaagaccgatgtgattacaatggaccccaaggacaactgctccaaggacgccaacgataccctgctgctccagctgaccaacaccagcgcctactacatgtacttgttgctgctgctgaagtccgtggtgtacttcgccatcatcacatgctgcctgctgcggagaaccgccttctgctgcaacggcgagaagtctagggccaagcgatctggatctggagcaacaaacttctcactactcaaacaagcaggtgacgtggaggagaatcccgggcctactagtatggactggatttggcgcatccttttccttgtcggcgctgctaccggcgcgcattccgggccccagctccagctgcaagagtctggacctggcctggtcaagcctagcgagacactgagcctgacctgtaccgtgtccggcgatagcatcagcagcggcgattactactggggctggatcagacagcctcctggcaaaggactggaatggatcggccacatctactacagcggcgtgacctactacaaccccagcctgaagtccagagtgaccatcagcgtggacaccagccggaaccagttctccctgaagctgtctagcgtgacagccgccgataccgccgtgtactactgcaccagagaggacagcagcaactggcggagtagaggccagggaacactggtcacagttagctctggatccggcggaggcggaagtggaggcggaggatctggcggcggaggctctttcgaagaagtgcaactggtggaatccgggggaggctctgtgcagcctggcgagtctctgagactgagctgtgtggcctccggcttcaccttcagccggtacaagatgaactgggtgcgccaggcccctggcaagggactggaatgggtgtcctacatcagccgcagcggcagagacatctactacgccgacagcgtgaagggccggttcaccatcagcagagacaacgccaagaacagcctgtacctccagatgaactccctgcgggacgaggacaccgccgtgtactactgtgccggaaccgtgaccacctattactacgacttcggcatggacgtgtggggccagggcacaaccgtgacagtgtctagcacgcgtatccagaaccctgatcctgccgtgtaccagctgcgggatagcaagagcagcgacaagagcgtgtgtctgttcaccgacttcgacagccagaccaacgtgtcccagagcaaggactccgacgtgtacatcaccgataagtgcgtgctggacatgcggagcatggacttcaagagcaactccgccgtggcctggtccaacaagtccgatttcgcctgcgccaacgccttcaacaacagcattatccccgaggacacattcttcccaagccccgagagcagcgactccaccgaccacgtgaagcccaaagagacagagaacaccaagcagcccagcaagagctgccacaagcccaaggccatcgtgcacaccgagaaagtgaacatgatgagcctgaccgtgctgggcctgcggatgctgttcgccaaaaccgtggccgtgaacttcctgctgaccgccaagctgttcttcctc

SEQ ID NO: 7758 - DNA, 2982 bp, synthetic construct
  source 1..2982: mol_type = other DNA
atggccttaccagtgaccgccttgctcctgccgctggccttgctgctccacgccgccaggccggaagtgcagctggttgaatctggcggaggactggttcagcctggcggatctctgagactgtcttgtgccgccagcggcttcagcttcagcgacttttggatgagctgggtccgacaggcccctggcaaaggacttgaatgggtcgccacaatcagccaggccggcagcgagaaggactacgtggactctgtgaagggcagattcaccatcagccgggacaacgccaagaagtccctgtacctccagatgaacagcctgagagccgaggacaccgccgtgtactattgtgcctctggcgtgtacagcttcgactacagaggccagggcaccctggtcacagtctcttctggtaccggcggaggcggatctggcggcggaggtagcggtggcggaggatctgaattccagtctgtgctgacacagcctccatctgcctctggcacacctggacagagagtgaccatcagctgtagcggcagcagaagcaacgtcggcggcaactacgtgttctggtatcagcaggtcccaggcgctacccctaagctgctgatctacagaagcaatcagcggcctagcggcgtgcccgatagatttgccggaagcaagagcggcagctctgccagccttgccatctctggactgagaagcgaggacgaggccgactactactgtgccacctgggatgatagcctgagcggcttcgtgtttggcaccggcaccaaagtgacagtgcttggtctcgaggacctgaagaacgtgttcccacctgaggtggccgtgttcgagcctagcgaggccgagatcagccacacccagaaagccaccctcgtgtgcctggctaccggcttctaccccgaccatgtggaactgtcttggtgggtcaacggcaaagaggtgcacagcggcgtgtgtaccgacccccagccactgaaagaacagcccgccctgaacgacagccggtactgcctgagcagcagactgagagtgtccgccaccttctggcagaacccccggaaccacttcagatgccaggtgcagttctacggcctgagcgagaacgacgagtggacccaggacagagccaagcccgtgacccagatcgtgtctgccgaagcctggggcagagccgatgatgtgattaagatccactggcaggaaaagaagtccaacaccatcctgggcagccaggaaggcaacaccatgaagaccaacgacacctacatgaagttcagctggctgaccgtgcccgagaagtccctggacaaagaacacagatgcatcgtgcggcacgaaaacaacaagaacggcgtggaccaggaaatcatcttcccacccatcaagaccgatgtgattacaatggaccccaaggacaactgctccaaggacgccaacgataccctgctgctccagctgaccaacaccagcgcctactacatgtacttgttgctgctgctgaagtccgtggtgtacttcgccatcatcacatgctgcctgctgcggagaaccgccttctgctgcaacggcgagaagtctagggccaagcgatctggatctggagcaacaaacttctcactactcaaacaagcaggtgacgtggaggagaatcccgggcctactagtatggactggatttggcgcatccttttccttgtcggcgctgctaccggcgcgcattccgggccccagctccagctgcaagagtctggacctggcctggtcaagcctagcgagacactgagcctgacctgtaccgtgtccggcgatagcatcagcagcggcgattactactggggctggatcagacagcctcctggcaaaggactggaatggatcggccacatctactacagcggcgtgacctactacaaccccagcctgaagtccagagtgaccatcagcgtggacaccagccggaaccagttctccctgaagctgtctagcgtgacagccgccgataccgccgtgtactactgcaccagagaggacagcagcaactggcggagtagaggccagggaacactggtcacagttagctctggatccggcggaggcggaagtggaggcggaggatctggcggcggaggctctttcgaagttcagctggttgaatctggcggcggactggttaagcctggcggatctctgagactgtcttgtgccgccagcggcttcaccttcagcgattactacatgagctggatcagacaggcccctggcaaaggactggaatgggtgtcctacatcagcagcagcggctccaccatctactacgccgatagcgtgaagggcagattcaccatcagccgggacaacgccaagaacagcctgtacctccagatgaactccctgagagccgaggacaccgccgtgtactattgcgccagaggctacggcaaagcctacgatcaatggggccagggcacactggtcaccgtttcttctacgcgtatccagaaccctgatcctgccgtgtaccagctgcgggatagcaagagcagcgacaagagcgtgtgtctgttcaccgacttcgacagccagaccaacgtgtcccagagcaaggactccgacgtgtacatcaccgataagtgcgtgctggacatgcggagcatggacttcaagagcaactccgccgtggcctggtccaacaagtccgatttcgcctgcgccaacgccttcaacaacagcattatccccgaggacacattcttcccaagccccgagagcagcgactccaccgaccacgtgaagcccaaagagacagagaacaccaagcagcccagcaagagctgccacaagcccaaggccatcgtgcacaccgagaaagtgaacatgatgagcctgaccgtgctgggcctgcggatgctgttcgccaaaaccgtggccgtgaacttcctgctgaccgccaagctgttcttcctc

SEQ ID NO: 7759 - DNA, 2979 bp, synthetic construct
  source 1..2979: mol_type = other DNA
atggccttaccagtgaccgccttgctcctgccgctggccttgctgctccacgccgccaggccggaagtgcagctggttgaatctggcggaggactggttcagcctggcggatctctgagactgtcttgtgccgccagcggcttcagcttcagcgacttttggatgagctgggtccgacaggcccctggcaaaggacttgaatgggtcgccacaatcagccaggccggcagcgagaaggactacgtggactctgtgaagggcagattcaccatcagccgggacaacgccaagaagtccctgtacctccagatgaacagcctgagagccgaggacaccgccgtgtactattgtgcctctggcgtgtacagcttcgactacagaggccagggcaccctggtcacagtctcttctggtaccggcggaggcggatctggcggcggaggtagcggtggcggaggatctgaattccagtctgtggtcacacagccacctagcatgtctgccgctccaggccagcaagtgaccatctcttgtagcggcggcaacagcaacatcgagcggaactacgtgtcctggtatctgcaactgcctggcacagcccctaagctggtcatcttcgacaacgacagacggcccagcggcatccccgatagattttctggcagcaagagcggcaccagcgccacactgggaattaccggacttcagacaggcgacgaggccgactactactgtggcacatgggactctagcctgagaggctgggttttcggcggaggcacaaagctgacagtgcttggtctcgaggacctgaagaacgtgttcccacctgaggtggccgtgttcgagcctagcgaggccgagatcagccacacccagaaagccaccctcgtgtgcctggctaccggcttctaccccgaccatgtggaactgtcttggtgggtcaacggcaaagaggtgcacagcggcgtgtgtaccgacccccagccactgaaagaacagcccgccctgaacgacagccggtactgcctgagcagcagactgagagtgtccgccaccttctggcagaacccccggaaccacttcagatgccaggtgcagttctacggcctgagcgagaacgacgagtggacccaggacagagccaagcccgtgacccagatcgtgtctgccgaagcctggggcagagccgatgatgtgattaagatccactggcaggaaaagaagtccaacaccatcctgggcagccaggaaggcaacaccatgaagaccaacgacacctacatgaagttcagctggctgaccgtgcccgagaagtccctggacaaagaacacagatgcatcgtgcggcacgaaaacaacaagaacggcgtggaccaggaaatcatcttcccacccatcaagaccgatgtgattacaatggaccccaaggacaactgctccaaggacgccaacgataccctgctgctccagctgaccaacaccagcgcctactacatgtacttgttgctgctgctgaagtccgtggtgtacttcgccatcatcacatgctgcctgctgcggagaaccgccttctgctgcaacggcgagaagtctagggccaagcgatctggatctggagcaacaaacttctcactactcaaacaagcaggtgacgtggaggagaatcccgggcctactagtatggactggatttggcgcatccttttccttgtcggcgctgctaccggcgcgcattccgggccccagctccagctgcaagagtctggacctggcctggtcaagcctagcgagacactgagcctgacctgtaccgtgtccggcgatagcatcagcagcggcgattactactggggctggatcagacagcctcctggcaaaggactggaatggatcggccacatctactacagcggcgtgacctactacaaccccagcctgaagtccagagtgaccatcagcgtggacaccagccggaaccagttctccctgaagctgtctagcgtgacagccgccgataccgccgtgtactactgcaccagagaggacagcagcaactggcggagtagaggccagggaacactggtcacagttagctctggatccggcggaggcggaagtggaggcggaggatctggcggcggaggctctttcgaagtgcagctcgttgagtctggcggcggactgattcaacctggcggaagcctgagactgagctgtgccgcttccggcttcaccttcagcaactacgccatgaactgggttcgacaggcccctggcaaaggactggaatgggtgtccaccatcaacggcagaggcagcagcaccatctacgccgattctgtgaagggcagattcaccatcagccgggacaacagcaagaacaccctgtacctccagatgaactccctgagagccgaggacaccgccacctattactgtgcccggtacatcagcagaggactgggcgattcttggggccagggcacactggttacagtgacgcgtatccagaaccctgatcctgccgtgtaccagctgcgggatagcaagagcagcgacaagagcgtgtgtctgttcaccgacttcgacagccagaccaacgtgtcccagagcaaggactccgacgtgtacatcaccgataagtgcgtgctggacatgcggagcatggacttcaagagcaactccgccgtggcctggtccaacaagtccgatttcgcctgcgccaacgccttcaacaacagcattatccccgaggacacattcttcccaagccccgagagcagcgactccaccgaccacgtgaagcccaaagagacagagaacaccaagcagcccagcaagagctgccacaagcccaaggccatcgtgcacaccgagaaagtgaacatgatgagcctgaccgtgctgggcctgcggatgctgttcgccaaaaccgtggccgtgaacttcctgctgaccgccaagctgttcttcctc

SEQ ID NO: 7760 - DNA, 2982 bp, synthetic construct
  source 1..2982: mol_type = other DNA
atggccttaccagtgaccgccttgctcctgccgctggccttgctgctccacgccgccaggccggaagtgcagctggttgaatctggcggaggactggttcagcctggcggatctctgagactgtcttgtgccgccagcggcttcagcttcagcgacttttggatgagctgggtccgacaggcccctggcaaaggacttgaatgggtcgccacaatcagccaggccggcagcgagaaggactacgtggactctgtgaagggcagattcaccatcagccgggacaacgccaagaagtccctgtacctccagatgaacagcctgagagccgaggacaccgccgtgtactattgtgcctctggcgtgtacagcttcgactacagaggccagggcaccctggtcacagtctcttctggtaccggcggaggcggatctggcggcggaggtagcggtggcggaggatctgaattcgacgtcgtgatgacccagacccctctgagcctgcctgtgtccctgggcgatcaggccagcatcagctgtagaagcagccagagcctggtgcacagcaacggcaacacctacctgcactggtatctccagaagcccggccagagccccaagctgctgatctacaaggtgtccaacagattcagcggcgtgcccgacagattctccggcagcggctctggcaccgacttcaccctgaagatcagccgggtggaagccgaggacctgggcgtgtacttctgtagccagaacacccccgtgccccccaagtttggcagcggcaccaagctggaaatcaagctcgaggacctgaagaacgtgttcccacctgaggtggccgtgttcgagcctagcgaggccgagatcagccacacccagaaagccaccctcgtgtgcctggctaccggcttctaccccgaccatgtggaactgtcttggtgggtcaacggcaaagaggtgcacagcggcgtgtgtaccgacccccagccactgaaagaacagcccgccctgaacgacagccggtactgcctgagcagcagactgagagtgtccgccaccttctggcagaacccccggaaccacttcagatgccaggtgcagttctacggcctgagcgagaacgacgagtggacccaggacagagccaagcccgtgacccagatcgtgtctgccgaagcctggggcagagccgatgatgtgattaagatccactggcaggaaaagaagtccaacaccatcctgggcagccaggaaggcaacaccatgaagaccaacgacacctacatgaagttcagctggctgaccgtgcccgagaagtccctggacaaagaacacagatgcatcgtgcggcacgaaaacaacaagaacggcgtggaccaggaaatcatcttcccacccatcaagaccgatgtgattacaatggaccccaaggacaactgctccaaggacgccaacgataccctgctgctccagctgaccaacaccagcgcctactacatgtacttgttgctgctgctgaagtccgtggtgtacttcgccatcatcacatgctgcctgctgcggagaaccgccttctgctgcaacggcgagaagtctagggccaagcgatctggatctggagcaacaaacttctcactactcaaacaagcaggtgacgtggaggagaatcccgggcctactagtatggactggatttggcgcatccttttccttgtcggcgctgctaccggcgcgcattccgggccccagctccagctgcaagagtctggacctggcctggtcaagcctagcgagacactgagcctgacctgtaccgtgtccggcgatagcatcagcagcggcgattactactggggctggatcagacagcctcctggcaaaggactggaatggatcggccacatctactacagcggcgtgacctactacaaccccagcctgaagtccagagtgaccatcagcgtggacaccagccggaaccagttctccctgaagctgtctagcgtgacagccgccgataccgccgtgtactactgcaccagagaggacagcagcaactggcggagtagaggccagggaacactggtcacagttagctctggatccggcggaggcggaagtggaggcggaggatctggcggcggaggctctttcgaacaggtgcagctccagcagtctggcgctgaactcgtgcggcctggcgcttctgtgaagctgtcttgcaaggccagcggctacaccttcaacgactacgagatgcactgggtcaagcagacccctgtgcacggcctgaagtggatcggagccctggaacccaagaccggcgataccgcctacagccagaagttcaagggcaaggccaccctgaccgccgacaagagcagcagcacagcctacatggaactgcggagcctgaccagcgaggacagcgccgtgtactactgcaccagctgctactactacacctacagcggccagggcaccctcgtgacagtgtctgctacgcgtatccagaaccctgatcctgccgtgtaccagctgcgggatagcaagagcagcgacaagagcgtgtgtctgttcaccgacttcgacagccagaccaacgtgtcccagagcaaggactccgacgtgtacatcaccgataagtgcgtgctggacatgcggagcatggacttcaagagcaactccgccgtggcctggtccaacaagtccgatttcgcctgcgccaacgccttcaacaacagcattatccccgaggacacattcttcccaagccccgagagcagcgactccaccgaccacgtgaagcccaaagagacagagaacaccaagcagcccagcaagagctgccacaagcccaaggccatcgtgcacaccgagaaagtgaacatgatgagcctgaccgtgctgggcctgcggatgctgttcgccaaaaccgtggccgtgaacttcctgctgaccgccaagctgttcttcctc

SEQ ID NO: 7761 - DNA, 2979 bp, synthetic construct
  source 1..2979: mol_type = other DNA
atggccttaccagtgaccgccttgctcctgccgctggccttgctgctccacgccgccaggccggaagtgcagctggttgaatctggcggaggactggttcagcctggcggatctctgagactgtcttgtgccgccagcggcttcagcttcagcgacttttggatgagctgggtccgacaggcccctggcaaaggacttgaatgggtcgccacaatcagccaggccggcagcgagaaggactacgtggactctgtgaagggcagattcaccatcagccgggacaacgccaagaagtccctgtacctccagatgaacagcctgagagccgaggacaccgccgtgtactattgtgcctctggcgtgtacagcttcgactacagaggccagggcaccctggtcacagtctcttctggtaccggcggaggcggatctggcggcggaggtagcggtggcggaggatctgaattcgacatccaactgacccagagccccagcagcctgtctgcctctgtgggcgacagagtgaccatcacctgtagagccagccagggcatcagaaacgacctgggctggtatcagcagaagcccggcaaggcccccaagcggctgatctatgctgccagctccctccagaatggcgtgcccagcagattttccggcagcggctctggcaccgagttcaccctgaccatcagctccctccagcccgaggacttcgccacctactactgcctccagcacaacacctaccccgccttcggccagggcaccaaggtggaaatcaagagactcgaggacctgaagaacgtgttcccacctgaggtggccgtgttcgagcctagcgaggccgagatcagccacacccagaaagccaccctcgtgtgcctggctaccggcttctaccccgaccatgtggaactgtcttggtgggtcaacggcaaagaggtgcacagcggcgtgtgtaccgacccccagccactgaaagaacagcccgccctgaacgacagccggtactgcctgagcagcagactgagagtgtccgccaccttctggcagaacccccggaaccacttcagatgccaggtgcagttctacggcctgagcgagaacgacgagtggacccaggacagagccaagcccgtgacccagatcgtgtctgccgaagcctggggcagagccgatgatgtgattaagatccactggcaggaaaagaagtccaacaccatcctgggcagccaggaaggcaacaccatgaagaccaacgacacctacatgaagttcagctggctgaccgtgcccgagaagtccctggacaaagaacacagatgcatcgtgcggcacgaaaacaacaagaacggcgtggaccaggaaatcatcttcccacccatcaagaccgatgtgattacaatggaccccaaggacaactgctccaaggacgccaacgataccctgctgctccagctgaccaacaccagcgcctactacatgtacttgttgctgctgctgaagtccgtggtgtacttcgccatcatcacatgctgcctgctgcggagaaccgccttctgctgcaacggcgagaagtctagggccaagcgatctggatctggagcaacaaacttctcactactcaaacaagcaggtgacgtggaggagaatcccgggcctactagtatggactggatttggcgcatccttttccttgtcggcgctgctaccggcgcgcattccgggccccagctccagctgcaagagtctggacctggcctggtcaagcctagcgagacactgagcctgacctgtaccgtgtccggcgatagcatcagcagcggcgattactactggggctggatcagacagcctcctggcaaaggactggaatggatcggccacatctactacagcggcgtgacctactacaaccccagcctgaagtccagagtgaccatcagcgtggacaccagccggaaccagttctccctgaagctgtctagcgtgacagccgccgataccgccgtgtactactgcaccagagaggacagcagcaactggcggagtagaggccagggaacactggtcacagttagctctggatccggcggaggcggaagtggaggcggaggatctggcggcggaggctctttcgaacaggtgcaactccaggaatctggccctggcctcgtgaagcctagccagaccctgagcctgacctgtaccgtgtctggcggcagcatcagcagcttcaactactactggtcctggatcagacaccaccctggcaagggcctggaatggatcggctacatctactacagcggcagcacctacagcaaccccagcctgaagtcccgcgtgaccatctccgtggacaccagcaagaaccagtttagcctgaccctgtccagcgtgacagccgccgataccgccgtgtactactgcgccagaggctacaactggaactacttcgactactggggccagggaaccctcgtgaccgtgtctagtacgcgtatccagaaccctgatcctgccgtgtaccagctgcgggatagcaagagcagcgacaagagcgtgtgtctgttcaccgacttcgacagccagaccaacgtgtcccagagcaaggactccgacgtgtacatcaccgataagtgcgtgctggacatgcggagcatggacttcaagagcaactccgccgtggcctggtccaacaagtccgatttcgcctgcgccaacgccttcaacaacagcattatccccgaggacacattcttcccaagccccgagagcagcgactccaccgaccacgtgaagcccaaagagacagagaacaccaagcagcccagcaagagctgccacaagcccaaggccatcgtgcacaccgagaaagtgaacatgatgagcctgaccgtgctgggcctgcggatgctgttcgccaaaaccgtggccgtgaacttcctgctgaccgccaagctgttcttcctc

SEQ ID NO: 7762 - DNA, 2985 bp, synthetic construct
  source 1..2985: mol_type = other DNA
atggccttaccagtgaccgccttgctcctgccgctggccttgctgctccacgccgccaggccggaagtgcagctggttgaatctggcggaggactggttcagcctggcggatctctgagactgtcttgtgccgccagcggcttcagcttcagcgacttttggatgagctgggtccgacaggcccctggcaaaggacttgaatgggtcgccacaatcagccaggccggcagcgagaaggactacgtggactctgtgaagggcagattcaccatcagccgggacaacgccaagaagtccctgtacctccagatgaacagcctgagagccgaggacaccgccgtgtactattgtgcctctggcgtgtacagcttcgactacagaggccagggcaccctggtcacagtctcttctggtaccggcggaggcggatctggcggcggaggtagcggtggcggaggatctgaattcgacgacatcgtgctgacccagagccccgccagcctggccgtgagcctgggccagagcgtgaccatcagctgcagagccagcgagagcgtggagtactacggcaccagcctgatgcagtggtaccagcagaagcccggccagccccccaagctgctgatctacgccaccagcaacgtggagagcggcgtgcccgccagattcagcggcagcggcagcggcaccgacttcagcctgaacatccaccccgtggaggaggacgacatcgccatgtacttctgccagcagagcagaaagctgcccagcaccttcggcggcggcaccaagctggagatcaagctcgaggacctgaagaacgtgttcccacctgaggtggccgtgttcgagcctagcgaggccgagatcagccacacccagaaagccaccctcgtgtgcctggctaccggcttctaccccgaccatgtggaactgtcttggtgggtcaacggcaaagaggtgcacagcggcgtgtgtaccgacccccagccactgaaagaacagcccgccctgaacgacagccggtactgcctgagcagcagactgagagtgtccgccaccttctggcagaacccccggaaccacttcagatgccaggtgcagttctacggcctgagcgagaacgacgagtggacccaggacagagccaagcccgtgacccagatcgtgtctgccgaagcctggggcagagccgatgatgtgattaagatccactggcaggaaaagaagtccaacaccatcctgggcagccaggaaggcaacaccatgaagaccaacgacacctacatgaagttcagctggctgaccgtgcccgagaagtccctggacaaagaacacagatgcatcgtgcggcacgaaaacaacaagaacggcgtggaccaggaaatcatcttcccacccatcaagaccgatgtgattacaatggaccccaaggacaactgctccaaggacgccaacgataccctgctgctccagctgaccaacaccagcgcctactacatgtacttgttgctgctgctgaagtccgtggtgtacttcgccatcatcacatgctgcctgctgcggagaaccgccttctgctgcaacggcgagaagtctagggccaagcgatctggatctggagcaacaaacttctcactactcaaacaagcaggtgacgtggaggagaatcccgggcctactagtatggactggatttggcgcatccttttccttgtcggcgctgctaccggcgcgcattccgggccccagctccagctgcaagagtctggacctggcctggtcaagcctagcgagacactgagcctgacctgtaccgtgtccggcgatagcatcagcagcggcgattactactggggctggatcagacagcctcctggcaaaggactggaatggatcggccacatctactacagcggcgtgacctactacaaccccagcctgaagtccagagtgaccatcagcgtggacaccagccggaaccagttctccctgaagctgtctagcgtgacagccgccgataccgccgtgtactactgcaccagagaggacagcagcaactggcggagtagaggccagggaacactggtcacagttagctctggatccggcggaggcggaagtggaggcggaggatctggcggcggaggctctttcgaagacgtgagactgcaggagagcggccccggccaggtgaagcccagccagaccgtgagcctgacctgcagcgtgaccggctacagcatcaccaacggcaaccactggtggaactggatcagacaggtgagcggcagcaagctggagtggatcggctacatcagcagcagcggcagcaccgacagcaaccccagcctgaagagcagaatcagcatcaccagagacaccagcaagaaccagctgttcctgcagctgaacagcgtgaccaccgaggacatcgccacctactactgcgccagaggctactacttcgactactggggccagggcaccaccctgaccgtgagcagcacgcgtatccagaaccctgatcctgccgtgtaccagctgcgggatagcaagagcagcgacaagagcgtgtgtctgttcaccgacttcgacagccagaccaacgtgtcccagagcaaggactccgacgtgtacatcaccgataagtgcgtgctggacatgcggagcatggacttcaagagcaactccgccgtggcctggtccaacaagtccgatttcgcctgcgccaacgccttcaacaacagcattatccccgaggacacattcttcccaagccccgagagcagcgactccaccgaccacgtgaagcccaaagagacagagaacaccaagcagcccagcaagagctgccacaagcccaaggccatcgtgcacaccgagaaagtgaacatgatgagcctgaccgtgctgggcctgcggatgctgttcgccaaaaccgtggccgtgaacttcctgctgaccgccaagctgttcttcctc

SEQ ID NO: 7763 - DNA, 2982 bp, synthetic construct
  source 1..2982: mol_type = other DNA
atggccttaccagtgaccgccttgctcctgccgctggccttgctgctccacgccgccaggccggaagtgcagctggttgaatctggcggaggactggttcagcctggcggatctctgagactgtcttgtgccgccagcggcttcagcttcagcgacttttggatgagctgggtccgacaggcccctggcaaaggacttgaatgggtcgccacaatcagccaggccggcagcgagaaggactacgtggactctgtgaagggcagattcaccatcagccgggacaacgccaagaagtccctgtacctccagatgaacagcctgagagccgaggacaccgccgtgtactattgtgcctctggcgtgtacagcttcgactacagaggccagggcaccctggtcacagtctcttctggtaccggcggaggcggatctggcggcggaggtagcggtggcggaggatctgaattcgacatccagatgacccagagccccagcagcctgtctgccagcgtgggcgacagagtgaccatcacctgtagagccagccaggacgtgaacaccgccgtggcctggtatcagcagaagcctggcaaggcccccaagctgctgatctacagcgccagcttcctggaaagcggcgtgcccagcagattcagcggaagcagaagcggcaccgacttcaccctgaccatcagctccctccagcccgaggacttcgccacctactactgccagcagcactacaccacccctcccaccttcggccagaccaaggtggaaatcaagagactcgaggacctgaagaacgtgttcccacctgaggtggccgtgttcgagcctagcgaggccgagatcagccacacccagaaagccaccctcgtgtgcctggctaccggcttctaccccgaccatgtggaactgtcttggtgggtcaacggcaaagaggtgcacagcggcgtgtgtaccgacccccagccactgaaagaacagcccgccctgaacgacagccggtactgcctgagcagcagactgagagtgtccgccaccttctggcagaacccccggaaccacttcagatgccaggtgcagttctacggcctgagcgagaacgacgagtggacccaggacagagccaagcccgtgacccagatcgtgtctgccgaagcctggggcagagccgatgatgtgattaagatccactggcaggaaaagaagtccaacaccatcctgggcagccaggaaggcaacaccatgaagaccaacgacacctacatgaagttcagctggctgaccgtgcccgagaagtccctggacaaagaacacagatgcatcgtgcggcacgaaaacaacaagaacggcgtggaccaggaaatcatcttcccacccatcaagaccgatgtgattacaatggaccccaaggacaactgctccaaggacgccaacgataccctgctgctccagctgaccaacaccagcgcctactacatgtacttgttgctgctgctgaagtccgtggtgtacttcgccatcatcacatgctgcctgctgcggagaaccgccttctgctgcaacggcgagaagtctagggccaagcgatctggatctggagcaacaaacttctcactactcaaacaagcaggtgacgtggaggagaatcccgggcctactagtatggactggatttggcgcatccttttccttgtcggcgctgctaccggcgcgcattccgggccccagctccagctgcaagagtctggacctggcctggtcaagcctagcgagacactgagcctgacctgtaccgtgtccggcgatagcatcagcagcggcgattactactggggctggatcagacagcctcctggcaaaggactggaatggatcggccacatctactacagcggcgtgacctactacaaccccagcctgaagtccagagtgaccatcagcgtggacaccagccggaaccagttctccctgaagctgtctagcgtgacagccgccgataccgccgtgtactactgcaccagagaggacagcagcaactggcggagtagaggccagggaacactggtcacagttagctctggatccggcggaggcggaagtggaggcggaggatctggcggcggaggctctttcgaagaagtgcaactggtggaatctggcggcggactggtgcagcctggcggatctctgagactgagctgtgccgccagcggcttcaacatcaaggacacctacatccactgggtgcgccaggcccctggaaagggactggaatgggtggcccggatctaccccaccaacggctacaccagatacgccgacagcgtgaagggccggttcaccatcagcgccgacaccagcaagaataccgcctacctccagatgaacagcctgcgggccgaggataccgccgtgtactactgctcaagatggggaggcgacggcttctacgctatggacgtgtggggccagggcacccttgtgaccgtgtcatctacgcgtatccagaaccctgatcctgccgtgtaccagctgcgggatagcaagagcagcgacaagagcgtgtgtctgttcaccgacttcgacagccagaccaacgtgtcccagagcaaggactccgacgtgtacatcaccgataagtgcgtgctggacatgcggagcatggacttcaagagcaactccgccgtggcctggtccaacaagtccgatttcgcctgcgccaacgccttcaacaacagcattatccccgaggacacattcttcccaagccccgagagcagcgactccaccgaccacgtgaagcccaaagagacagagaacaccaagcagcccagcaagagctgccacaagcccaaggccatcgtgcacaccgagaaagtgaacatgatgagcctgaccgtgctgggcctgcggatgctgttcgccaaaaccgtggccgtgaacttcctgctgaccgccaagctgttcttcctc

SEQ ID NO: 7764 - DNA, 2979 bp, synthetic construct
  source 1..2979: mol_type = other DNA
atggccttaccagtgaccgccttgctcctgccgctggccttgctgctccacgccgccaggccggaagtgcagctggttgaatctggcggaggactggttcagcctggcggatctctgagactgtcttgtgccgccagcggcttcagcttcagcgacttttggatgagctgggtccgacaggcccctggcaaaggacttgaatgggtcgccacaatcagccaggccggcagcgagaaggactacgtggactctgtgaagggcagattcaccatcagccgggacaacgccaagaagtccctgtacctccagatgaacagcctgagagccgaggacaccgccgtgtactattgtgcctctggcgtgtacagcttcgactacagaggccagggcaccctggtcacagtctcttctggtaccggcggaggcggatctggcggcggaggtagcggtggcggaggatctgaattcgaccagagcgtgctgacacagcctcctagcgtgtcagtggcccctggcaagaccgccagaatcccctgcgagggcaactacatcggcagcagcaacgtgcactggtatcagcagaagcccggccaggctcccgtgctcgtgatccacttcgacagcgacagacccagcggcatccccgacagattcagcggcagcaacagcggcaacatggctaccctgaccatcagcagagtggaagccggggacgaggccgactactactgtcaagtgtgggagaaccacggctgggtgttcggcggaggcaccaagctgacagtgctgtctctcgaggacctgaagaacgtgttcccacctgaggtggccgtgttcgagcctagcgaggccgagatcagccacacccagaaagccaccctcgtgtgcctggctaccggcttctaccccgaccatgtggaactgtcttggtgggtcaacggcaaagaggtgcacagcggcgtgtgtaccgacccccagccactgaaagaacagcccgccctgaacgacagccggtactgcctgagcagcagactgagagtgtccgccaccttctggcagaacccccggaaccacttcagatgccaggtgcagttctacggcctgagcgagaacgacgagtggacccaggacagagccaagcccgtgacccagatcgtgtctgccgaagcctggggcagagccgatgatgtgattaagatccactggcaggaaaagaagtccaacaccatcctgggcagccaggaaggcaacaccatgaagaccaacgacacctacatgaagttcagctggctgaccgtgcccgagaagtccctggacaaagaacacagatgcatcgtgcggcacgaaaacaacaagaacggcgtggaccaggaaatcatcttcccacccatcaagaccgatgtgattacaatggaccccaaggacaactgctccaaggacgccaacgataccctgctgctccagctgaccaacaccagcgcctactacatgtacttgttgctgctgctgaagtccgtggtgtacttcgccatcatcacatgctgcctgctgcggagaaccgccttctgctgcaacggcgagaagtctagggccaagcgatctggatctggagcaacaaacttctcactactcaaacaagcaggtgacgtggaggagaatcccgggcctactagtatggactggatttggcgcatccttttccttgtcggcgctgctaccggcgcgcattccgggccccagctccagctgcaagagtctggacctggcctggtcaagcctagcgagacactgagcctgacctgtaccgtgtccggcgatagcatcagcagcggcgattactactggggctggatcagacagcctcctggcaaaggactggaatggatcggccacatctactacagcggcgtgacctactacaaccccagcctgaagtccagagtgaccatcagcgtggacaccagccggaaccagttctccctgaagctgtctagcgtgacagccgccgataccgccgtgtactactgcaccagagaggacagcagcaactggcggagtagaggccagggaacactggtcacagttagctctggatccggcggaggcggaagtggaggcggaggatctggcggcggaggctctttcgaagaggtgcaactggtggaaacaggcggcggactggtgcagcctggcgagtctctgagactgagctgtgccgccagcggcttcaccttcagcgactacgagatgaactgggtgcgccaggcccctggaaagggcctggaatgggtgtcctacatcagcagctccggcagcaccatctactacgccgacagcgtgaagggccggtttaccatctaccgggacaacgccaagaacagcctgtacctccagatgaactccctgcgggccgaggacaccgccctgtactattgtgccagagcctggggcgtgggaccccctgattattggggacagggcaccctcgtgaccgtgtcctctacgcgtatccagaaccctgatcctgccgtgtaccagctgcgggatagcaagagcagcgacaagagcgtgtgtctgttcaccgacttcgacagccagaccaacgtgtcccagagcaaggactccgacgtgtacatcaccgataagtgcgtgctggacatgcggagcatggacttcaagagcaactccgccgtggcctggtccaacaagtccgatttcgcctgcgccaacgccttcaacaacagcattatccccgaggacacattcttcccaagccccgagagcagcgactccaccgaccacgtgaagcccaaagagacagagaacaccaagcagcccagcaagagctgccacaagcccaaggccatcgtgcacaccgagaaagtgaacatgatgagcctgaccgtgctgggcctgcggatgctgttcgccaaaaccgtggccgtgaacttcctgctgaccgccaagctgttcttcctc

SEQ ID NO: 7765 - DNA, 3003 bp, synthetic construct
  source 1..3003: mol_type = other DNA
atggccttaccagtgaccgccttgctcctgccgctggccttgctgctccacgccgccaggccggaagtgcagctggttgaatctggcggaggactggttcagcctggcggatctctgagactgtcttgtgccgccagcggcttcagcttcagcgacttttggatgagctgggtccgacaggcccctggcaaaggacttgaatgggtcgccacaatcagccaggccggcagcgagaaggactacgtggactctgtgaagggcagattcaccatcagccgggacaacgccaagaagtccctgtacctccagatgaacagcctgagagccgaggacaccgccgtgtactattgtgcctctggcgtgtacagcttcgactacagaggccagggcaccctggtcacagtctcttctggtaccggcggaggcggatctggcggcggaggtagcggtggcggaggatctgaattcgacatccagatgacccagagccccagcagcctgtctgccagcgtgggcgataccgtgaccatcacctgtcaggccaacggctacctgaactggtatcagcagcggagaggcaaggcccccaagctgctgatctacgacggcagcaagctggaaagaggcgtgcccagcagattcagcggcagaagatggggccaggagtacaacctgaccatcaacaacctccagcccgaggatattgccacatacttttgccaggtgtacgagttcgtggtgcccggcacacggctggacctgaagagaacagtggctgctcctctcgaggacctgaagaacgtgttcccacctgaggtggccgtgttcgagcctagcgaggccgagatcagccacacccagaaagccaccctcgtgtgcctggctaccggcttctaccccgaccatgtggaactgtcttggtgggtcaacggcaaagaggtgcacagcggcgtgtgtaccgacccccagccactgaaagaacagcccgccctgaacgacagccggtactgcctgagcagcagactgagagtgtccgccaccttctggcagaacccccggaaccacttcagatgccaggtgcagttctacggcctgagcgagaacgacgagtggacccaggacagagccaagcccgtgacccagatcgtgtctgccgaagcctggggcagagccgatgatgtgattaagatccactggcaggaaaagaagtccaacaccatcctgggcagccaggaaggcaacaccatgaagaccaacgacacctacatgaagttcagctggctgaccgtgcccgagaagtccctggacaaagaacacagatgcatcgtgcggcacgaaaacaacaagaacggcgtggaccaggaaatcatcttcccacccatcaagaccgatgtgattacaatggaccccaaggacaactgctccaaggacgccaacgataccctgctgctccagctgaccaacaccagcgcctactacatgtacttgttgctgctgctgaagtccgtggtgtacttcgccatcatcacatgctgcctgctgcggagaaccgccttctgctgcaacggcgagaagtctagggccaagcgatctggatctggagcaacaaacttctcactactcaaacaagcaggtgacgtggaggagaatcccgggcctactagtatggactggatttggcgcatccttttccttgtcggcgctgctaccggcgcgcattccgggccccagctccagctgcaagagtctggacctggcctggtcaagcctagcgagacactgagcctgacctgtaccgtgtccggcgatagcatcagcagcggcgattactactggggctggatcagacagcctcctggcaaaggactggaatggatcggccacatctactacagcggcgtgacctactacaaccccagcctgaagtccagagtgaccatcagcgtggacaccagccggaaccagttctccctgaagctgtctagcgtgacagccgccgataccgccgtgtactactgcaccagagaggacagcagcaactggcggagtagaggccagggaacactggtcacagttagctctggatccggcggaggcggaagtggaggcggaggatctggcggcggaggctctttcgaacaggtgcagctgctccagtctggcgctgccgtgacaaagcctggcgcttctgtgcgggtgtcctgtgaagccagcggctacaacatccgggactacttcatccactggtggcggcaggctccaggccagggactccagtgggtgggatggatcaaccccaagaccggccagcccaacaaccccagacagttccagggcagagtgtccctgaccagacacgccagctgggacttcgacaccttcagcttctacatggatctgaaggccctgcggagcgacgataccgccgtgtacttctgcgccagacagagaagcgactactgggatttcgacgtgtggggcagcggcacccaagtgacagtgtctagcgccagcaccaagggacccacgcgtatccagaaccctgatcctgccgtgtaccagctgcgggatagcaagagcagcgacaagagcgtgtgtctgttcaccgacttcgacagccagaccaacgtgtcccagagcaaggactccgacgtgtacatcaccgataagtgcgtgctggacatgcggagcatggacttcaagagcaactccgccgtggcctggtccaacaagtccgatttcgcctgcgccaacgccttcaacaacagcattatccccgaggacacattcttcccaagccccgagagcagcgactccaccgaccacgtgaagcccaaagagacagagaacaccaagcagcccagcaagagctgccacaagcccaaggccatcgtgcacaccgagaaagtgaacatgatgagcctgaccgtgctgggcctgcggatgctgttcgccaaaaccgtggccgtgaacttcctgctgaccgccaagctgttcttcctc

SEQ ID NO: 7766 - DNA, 3021 bp, synthetic construct
  source 1..3021: mol_type = other DNA
atggccttaccagtgaccgccttgctcctgccgctggccttgctgctccacgccgccaggccggaagtgcagctggttgaatctggcggaggactggttcagcctggcggatctctgagactgtcttgtgccgccagcggcttcagcttcagcgacttttggatgagctgggtccgacaggcccctggcaaaggacttgaatgggtcgccacaatcagccaggccggcagcgagaaggactacgtggactctgtgaagggcagattcaccatcagccgggacaacgccaagaagtccctgtacctccagatgaacagcctgagagccgaggacaccgccgtgtactattgtgcctctggcgtgtacagcttcgactacagaggccagggcaccctggtcacagtctcttctggtaccggcggaggcggatctggcggcggaggtagcggtggcggaggatctgaattccagtctgccctgacacagcctcctagcgcctctggctctcccggccagagcatcaccatcagctgtaccggcaccagcaacaacttcgtgtcctggtatcagcagcacgccggcaaggcccccaagctcgtgatctacgacgtgaacaagcggcccagcggcgtgcccgatagattcagcggcagcaagagcggcaacaccgccagcctgacagtgtctggcctccagaccgatgacgaggccgtgtactactgcggcagcctcgtgggcaactgggacgtgatctttggcggaggcaccaagctgaccgtgctgctcgaggacctgaagaacgtgttcccacctgaggtggccgtgttcgagcctagcgaggccgagatcagccacacccagaaagccaccctcgtgtgcctggctaccggcttctaccccgaccatgtggaactgtcttggtgggtcaacggcaaagaggtgcacagcggcgtgtgtaccgacccccagccactgaaagaacagcccgccctgaacgacagccggtactgcctgagcagcagactgagagtgtccgccaccttctggcagaacccccggaaccacttcagatgccaggtgcagttctacggcctgagcgagaacgacgagtggacccaggacagagccaagcccgtgacccagatcgtgtctgccgaagcctggggcagagccgatgatgtgattaagatccactggcaggaaaagaagtccaacaccatcctgggcagccaggaaggcaacaccatgaagaccaacgacacctacatgaagttcagctggctgaccgtgcccgagaagtccctggacaaagaacacagatgcatcgtgcggcacgaaaacaacaagaacggcgtggaccaggaaatcatcttcccacccatcaagaccgatgtgattacaatggaccccaaggacaactgctccaaggacgccaacgataccctgctgctccagctgaccaacaccagcgcctactacatgtacttgttgctgctgctgaagtccgtggtgtacttcgccatcatcacatgctgcctgctgcggagaaccgccttctgctgcaacggcgagaagtctagggccaagcgatctggatctggagcaacaaacttctcactactcaaacaagcaggtgacgtggaggagaatcccgggcctactagtatggactggatttggcgcatccttttccttgtcggcgctgctaccggcgcgcattccgggccccagctccagctgcaagagtctggacctggcctggtcaagcctagcgagacactgagcctgacctgtaccgtgtccggcgatagcatcagcagcggcgattactactggggctggatcagacagcctcctggcaaaggactggaatggatcggccacatctactacagcggcgtgacctactacaaccccagcctgaagtccagagtgaccatcagcgtggacaccagccggaaccagttctccctgaagctgtctagcgtgacagccgccgataccgccgtgtactactgcaccagagaggacagcagcaactggcggagtagaggccagggaacactggtcacagttagctctggatccggcggaggcggaagtggaggcggaggatctggcggcggaggctctttcgaacagccccagctccaggaatctggccccacactggtggaagccagcgagacactgagcctgacctgtgccgtgtccggcgattctaccgccgcctgcaatagcttctggggctgggtgcgccagcctcctggaaagggactggaatgggtgggaagcctgagccactgcgccagctattggaaccggggctggacctaccacaaccccagcctgaagtccagactgaccctggccctggacacccccaagaacctggtgttcctgaagctgaacagcgtgacagccgccgacaccgccacctactactgtgccagatttggcggcgaggtgctgcggtacaccgactggcctaaacctgcctgggtggacctgtggggcagaggaacactcgtgaccgtgtccagcacgcgtatccagaaccctgatcctgccgtgtaccagctgcgggatagcaagagcagcgacaagagcgtgtgtctgttcaccgacttcgacagccagaccaacgtgtcccagagcaaggactccgacgtgtacatcaccgataagtgcgtgctggacatgcggagcatggacttcaagagcaactccgccgtggcctggtccaacaagtccgatttcgcctgcgccaacgccttcaacaacagcattatccccgaggacacattcttcccaagccccgagagcagcgactccaccgaccacgtgaagcccaaagagacagagaacaccaagcagcccagcaagagctgccacaagcccaaggccatcgtgcacaccgagaaagtgaacatgatgagcctgaccgtgctgggcctgcggatgctgttcgccaaaaccgtggccgtgaacttcctgctgaccgccaagctgttcttcctc

SEQ ID NO: 7767 - DNA, 2976 bp, synthetic construct
  source 1..2976: mol_type = other DNA
atggccttaccagtgaccgccttgctcctgccgctggccttgctgctccacgccgccaggccggaagtgcagctggttgaatctggcggaggactggttcagcctggcggatctctgagactgtcttgtgccgccagcggcttcagcttcagcgacttttggatgagctgggtccgacaggcccctggcaaaggacttgaatgggtcgccacaatcagccaggccggcagcgagaaggactacgtggactctgtgaagggcagattcaccatcagccgggacaacgccaagaagtccctgtacctccagatgaacagcctgagagccgaggacaccgccgtgtactattgtgcctctggcgtgtacagcttcgactacagaggccagggcaccctggtcacagtctcttctggtaccggcggaggcggatctggcggcggaggtagcggtggcggaggatctgaattcgagatcgtgctgacacagagccctggcaccctgagcctgtctccaggcgagacagccatcatcagctgccggacaagccagtacggcagcctggcctggtatcagcagaggccaggacaggcccccagactcgtgatctacagcggcagcacaagagccgccggaatccccgatagattcagcggctccagatggggacccgactacaacctgaccatcagcaacctggaaagcggcgacttcggcgtgtactactgccagcagtacgagttcttcggccagggcaccaaggtgcaggtggacatcaaaagactcgaggacctgaagaacgtgttcccacctgaggtggccgtgttcgagcctagcgaggccgagatcagccacacccagaaagccaccctcgtgtgcctggctaccggcttctaccccgaccatgtggaactgtcttggtgggtcaacggcaaagaggtgcacagcggcgtgtgtaccgacccccagccactgaaagaacagcccgccctgaacgacagccggtactgcctgagcagcagactgagagtgtccgccaccttctggcagaacccccggaaccacttcagatgccaggtgcagttctacggcctgagcgagaacgacgagtggacccaggacagagccaagcccgtgacccagatcgtgtctgccgaagcctggggcagagccgatgatgtgattaagatccactggcaggaaaagaagtccaacaccatcctgggcagccaggaaggcaacaccatgaagaccaacgacacctacatgaagttcagctggctgaccgtgcccgagaagtccctggacaaagaacacagatgcatcgtgcggcacgaaaacaacaagaacggcgtggaccaggaaatcatcttcccacccatcaagaccgatgtgattacaatggaccccaaggacaactgctccaaggacgccaacgataccctgctgctccagctgaccaacaccagcgcctactacatgtacttgttgctgctgctgaagtccgtggtgtacttcgccatcatcacatgctgcctgctgcggagaaccgccttctgctgcaacggcgagaagtctagggccaagcgatctggatctggagcaacaaacttctcactactcaaacaagcaggtgacgtggaggagaatcccgggcctactagtatggactggatttggcgcatccttttccttgtcggcgctgctaccggcgcgcattccgggccccagctccagctgcaagagtctggacctggcctggtcaagcctagcgagacactgagcctgacctgtaccgtgtccggcgatagcatcagcagcggcgattactactggggctggatcagacagcctcctggcaaaggactggaatggatcggccacatctactacagcggcgtgacctactacaaccccagcctgaagtccagagtgaccatcagcgtggacaccagccggaaccagttctccctgaagctgtctagcgtgacagccgccgataccgccgtgtactactgcaccagagaggacagcagcaactggcggagtagaggccagggaacactggtcacagttagctctggatccggcggaggcggaagtggaggcggaggatctggcggcggaggctctttcgaacaggtgcagctggtgcagtctggcggccagatgaagaaacccggcgagagcatgagaatcagctgtcgggcctccggctacgagttcatcgactgcaccctgaactggatcagactggcccctggcaagcggcctgagtggatgggatggctgaagcctagaggcggagccgtgaactacgccagacctctccagggcagagtgaccatgaccagggacgtgtacagcgataccgccttcctggaactgcggagcctgaccgtggatgataccgccgtgtacttctgcaccagaggcaagaactgcgattacaactgggacttcgagcactggggcagaggcacccctgtgatcgtgtctagcacgcgtatccagaaccctgatcctgccgtgtaccagctgcgggatagcaagagcagcgacaagagcgtgtgtctgttcaccgacttcgacagccagaccaacgtgtcccagagcaaggactccgacgtgtacatcaccgataagtgcgtgctggacatgcggagcatggacttcaagagcaactccgccgtggcctggtccaacaagtccgatttcgcctgcgccaacgccttcaacaacagcattatccccgaggacacattcttcccaagccccgagagcagcgactccaccgaccacgtgaagcccaaagagacagagaacaccaagcagcccagcaagagctgccacaagcccaaggccatcgtgcacaccgagaaagtgaacatgatgagcctgaccgtgctgggcctgcggatgctgttcgccaaaaccgtggccgtgaacttcctgctgaccgccaagctgttcttcctc

SEQ ID NO: 7768 - DNA, 3006 bp, synthetic construct
  source 1..3006: mol_type = other DNA
atggccttaccagtgaccgccttgctcctgccgctggccttgctgctccacgccgccaggccggaagtgcagctggttgaatctggcggaggactggttcagcctggcggatctctgagactgtcttgtgccgccagcggcttcagcttcagcgacttttggatgagctgggtccgacaggcccctggcaaaggacttgaatgggtcgccacaatcagccaggccggcagcgagaaggactacgtggactctgtgaagggcagattcaccatcagccgggacaacgccaagaagtccctgtacctccagatgaacagcctgagagccgaggacaccgccgtgtactattgtgcctctggcgtgtacagcttcgactacagaggccagggcaccctggtcacagtctcttctggtaccggcggaggcggatctggcggcggaggtagcggtggcggaggatctgaattcgagctggtgctgacacagagccctggcaccctgtctctgtctgccggcgaaagagccaccctgagctgtagagccagccagagcgtgtcctctggcagcctggcttggtatcagcagaagccaggccaggcccccagactgctgatctacggcgcttctaccagagccaccggcatccccgatagattcagcggctctggctccggcaccgacttcaccctgacaatcggcagactggaacccgaggacctggccgtgtactactgccagcagtacggcaccagcccctacacattcggccagggcaccaagctggaaatcctcgaggacctgaagaacgtgttcccacctgaggtggccgtgttcgagcctagcgaggccgagatcagccacacccagaaagccaccctcgtgtgcctggctaccggcttctaccccgaccatgtggaactgtcttggtgggtcaacggcaaagaggtgcacagcggcgtgtgtaccgacccccagccactgaaagaacagcccgccctgaacgacagccggtactgcctgagcagcagactgagagtgtccgccaccttctggcagaacccccggaaccacttcagatgccaggtgcagttctacggcctgagcgagaacgacgagtggacccaggacagagccaagcccgtgacccagatcgtgtctgccgaagcctggggcagagccgatgatgtgattaagatccactggcaggaaaagaagtccaacaccatcctgggcagccaggaaggcaacaccatgaagaccaacgacacctacatgaagttcagctggctgaccgtgcccgagaagtccctggacaaagaacacagatgcatcgtgcggcacgaaaacaacaagaacggcgtggaccaggaaatcatcttcccacccatcaagaccgatgtgattacaatggaccccaaggacaactgctccaaggacgccaacgataccctgctgctccagctgaccaacaccagcgcctactacatgtacttgttgctgctgctgaagtccgtggtgtacttcgccatcatcacatgctgcctgctgcggagaaccgccttctgctgcaacggcgagaagtctagggccaagcgatctggatctggagcaacaaacttctcactactcaaacaagcaggtgacgtggaggagaatcccgggcctactagtatggactggatttggcgcatccttttccttgtcggcgctgctaccggcgcgcattccgggccccagctccagctgcaagagtctggacctggcctggtcaagcctagcgagacactgagcctgacctgtaccgtgtccggcgatagcatcagcagcggcgattactactggggctggatcagacagcctcctggcaaaggactggaatggatcggccacatctactacagcggcgtgacctactacaaccccagcctgaagtccagagtgaccatcagcgtggacaccagccggaaccagttctccctgaagctgtctagcgtgacagccgccgataccgccgtgtactactgcaccagagaggacagcagcaactggcggagtagaggccagggaacactggtcacagttagctctggatccggcggaggcggaagtggaggcggaggatctggcggcggaggctctttcgaactggaacagagcggagccgaagtgaagaaacccggcagcagcgtgcaggtgtcctgcaaagcaagcggcggcaccttctctatgtacggcttcaactgggtgcgccaggctcctggacacggcctggaatggatgggcggcatcatccccatcttcggcacctccaactacgcccagaaattccggggcagagtgaccttcaccgccgaccaggccacaagcaccgcctacatggaactgaccaacctgcggagcgacgacaccgccgtgtattattgcgccagagacttcggccccgactgggaggatggcgacagctacgatggcagcggcagaggcttcttcgacttctggggccagggaacccttgtgaccgtgtcctcaacgcgtatccagaaccctgatcctgccgtgtaccagctgcgggatagcaagagcagcgacaagagcgtgtgtctgttcaccgacttcgacagccagaccaacgtgtcccagagcaaggactccgacgtgtacatcaccgataagtgcgtgctggacatgcggagcatggacttcaagagcaactccgccgtggcctggtccaacaagtccgatttcgcctgcgccaacgccttcaacaacagcattatccccgaggacacattcttcccaagccccgagagcagcgactccaccgaccacgtgaagcccaaagagacagagaacaccaagcagcccagcaagagctgccacaagcccaaggccatcgtgcacaccgagaaagtgaacatgatgagcctgaccgtgctgggcctgcggatgctgttcgccaaaaccgtggccgtgaacttcctgctgaccgccaagctgttcttcctc

SEQ ID NO: 7769 - DNA, 2946 bp, synthetic construct
  source 1..2946: mol_type = other DNA
atggccttaccagtgaccgccttgctcctgccgctggccttgctgctccacgccgccaggccggaagtgcagctggttgaatctggcggaggactggttcagcctggcggatctctgagactgtcttgtgccgccagcggcttcagcttcagcgacttttggatgagctgggtccgacaggcccctggcaaaggacttgaatgggtcgccacaatcagccaggccggcagcgagaaggactacgtggactctgtgaagggcagattcaccatcagccgggacaacgccaagaagtccctgtacctccagatgaacagcctgagagccgaggacaccgccgtgtactattgtgcctctggcgtgtacagcttcgactacagaggccagggcaccctggtcacagtctcttctggtaccggcggaggcggatctggcggcggaggtagcggtggcggaggatctgaattcgacatccagatgacccagagccccagcagcctgtctgccagcgtgggcgacagagtgaccatcacctgtcaggccagccaggacatcaacaactacctgaactggtatcagcagaagcccggcaaggcccccaagctgctgatctacgacgccagcaatctgcagaccggcgtgcccagcagattttccggctctggcagcggcaccgacttcaccttcaccatcgaggacattgccacctactactgccagcagtacaccttcggccctggcaccaaggtggacatcaaactcgaggacctgaagaacgtgttcccacctgaggtggccgtgttcgagcctagcgaggccgagatcagccacacccagaaagccaccctcgtgtgcctggctaccggcttctaccccgaccatgtggaactgtcttggtgggtcaacggcaaagaggtgcacagcggcgtgtgtaccgacccccagccactgaaagaacagcccgccctgaacgacagccggtactgcctgagcagcagactgagagtgtccgccaccttctggcagaacccccggaaccacttcagatgccaggtgcagttctacggcctgagcgagaacgacgagtggacccaggacagagccaagcccgtgacccagatcgtgtctgccgaagcctggggcagagccgatgatgtgattaagatccactggcaggaaaagaagtccaacaccatcctgggcagccaggaaggcaacaccatgaagaccaacgacacctacatgaagttcagctggctgaccgtgcccgagaagtccctggacaaagaacacagatgcatcgtgcggcacgaaaacaacaagaacggcgtggaccaggaaatcatcttcccacccatcaagaccgatgtgattacaatggaccccaaggacaactgctccaaggacgccaacgataccctgctgctccagctgaccaacaccagcgcctactacatgtacttgttgctgctgctgaagtccgtggtgtacttcgccatcatcacatgctgcctgctgcggagaaccgccttctgctgcaacggcgagaagtctagggccaagcgatctggatctggagcaacaaacttctcactactcaaacaagcaggtgacgtggaggagaatcccgggcctactagtatggactggatttggcgcatccttttccttgtcggcgctgctaccggcgcgcattccgggccccagctccagctgcaagagtctggacctggcctggtcaagcctagcgagacactgagcctgacctgtaccgtgtccggcgatagcatcagcagcggcgattactactggggctggatcagacagcctcctggcaaaggactggaatggatcggccacatctactacagcggcgtgacctactacaaccccagcctgaagtccagagtgaccatcagcgtggacaccagccggaaccagttctccctgaagctgtctagcgtgacagccgccgataccgccgtgtactactgcaccagagaggacagcagcaactggcggagtagaggccagggaacactggtcacagttagctctggatccggcggaggcggaagtggaggcggaggatctggcggcggaggctctttcgaagaagtgcaactgctggaatctggcggcggactggtgcagcctggcggatctctgagactgagctgtgccgccagcggcttcacctttagctggtacagcatgacctgggtgcgccaggcccctggcaaaggactggaatgggtgtccagcatcgtgccctggggcgatttcacccagtacgccgatagcgtgaagggccggttcaccatcagccgggacaacagcaagaacaccctgtacctgcagatgaacagcctgcgggccgaggacaccgccgtgtactattgtgccaagggacctggctggggcagcttcgatctgtggggcagaggaacccttgtgaccgtgtccagcacgcgtatccagaaccctgatcctgccgtgtaccagctgcgggatagcaagagcagcgacaagagcgtgtgtctgttcaccgacttcgacagccagaccaacgtgtcccagagcaaggactccgacgtgtacatcaccgataagtgcgtgctggacatgcggagcatggacttcaagagcaactccgccgtggcctggtccaacaagtccgatttcgcctgcgccaacgccttcaacaacagcattatccccgaggacacattcttcccaagccccgagagcagcgactccaccgaccacgtgaagcccaaagagacagagaacaccaagcagcccagcaagagctgccacaagcccaaggccatcgtgcacaccgagaaagtgaacatgatgagcctgaccgtgctgggcctgcggatgctgttcgccaaaaccgtggccgtgaacttcctgctgaccgccaagctgttcttcctc

SEQ ID NO: 7770 - DNA, 2976 bp, synthetic construct
  source 1..2976: mol_type = other DNA
atggccttaccagtgaccgccttgctcctgccgctggccttgctgctccacgccgccaggccggaagtgcagctggttgaatctggcggaggactggttcagcctggcggatctctgagactgtcttgtgccgccagcggcttcagcttcagcgacttttggatgagctgggtccgacaggcccctggcaaaggacttgaatgggtcgccacaatcagccaggccggcagcgagaaggactacgtggactctgtgaagggcagattcaccatcagccgggacaacgccaagaagtccctgtacctccagatgaacagcctgagagccgaggacaccgccgtgtactattgtgcctctggcgtgtacagcttcgactacagaggccagggcaccctggtcacagtctcttctggtaccggcggaggcggatctggcggcggaggtagcggtggcggaggatctgaattcgacatccagatgacccagagccccagcagcctgtctgccagcgtgggcgacagagtgaccatcacctgtaccgccagcctgagcgtgtccagcacctacctgcactggtatcagcagaagcccggcagcagccccaagctgtggatctacagcaccagcaacctggcctccggcgtgcccagcagattttctggcagcggctctggcaccagctacaccctgaccatcagctccctccagcccgaggacttcgccacctactactgccaccagtaccacagaagccccctgacctttggcggaggcaccaaggtggaaatcaagagactcgaggacctgaagaacgtgttcccacctgaggtggccgtgttcgagcctagcgaggccgagatcagccacacccagaaagccaccctcgtgtgcctggctaccggcttctaccccgaccatgtggaactgtcttggtgggtcaacggcaaagaggtgcacagcggcgtgtgtaccgacccccagccactgaaagaacagcccgccctgaacgacagccggtactgcctgagcagcagactgagagtgtccgccaccttctggcagaacccccggaaccacttcagatgccaggtgcagttctacggcctgagcgagaacgacgagtggacccaggacagagccaagcccgtgacccagatcgtgtctgccgaagcctggggcagagccgatgatgtgattaagatccactggcaggaaaagaagtccaacaccatcctgggcagccaggaaggcaacaccatgaagaccaacgacacctacatgaagttcagctggctgaccgtgcccgagaagtccctggacaaagaacacagatgcatcgtgcggcacgaaaacaacaagaacggcgtggaccaggaaatcatcttcccacccatcaagaccgatgtgattacaatggaccccaaggacaactgctccaaggacgccaacgataccctgctgctccagctgaccaacaccagcgcctactacatgtacttgttgctgctgctgaagtccgtggtgtacttcgccatcatcacatgctgcctgctgcggagaaccgccttctgctgcaacggcgagaagtctagggccaagcgatctggatctggagcaacaaacttctcactactcaaacaagcaggtgacgtggaggagaatcccgggcctactagtatggactggatttggcgcatccttttccttgtcggcgctgctaccggcgcgcattccgggccccagctccagctgcaagagtctggacctggcctggtcaagcctagcgagacactgagcctgacctgtaccgtgtccggcgatagcatcagcagcggcgattactactggggctggatcagacagcctcctggcaaaggactggaatggatcggccacatctactacagcggcgtgacctactacaaccccagcctgaagtccagagtgaccatcagcgtggacaccagccggaaccagttctccctgaagctgtctagcgtgacagccgccgataccgccgtgtactactgcaccagagaggacagcagcaactggcggagtagaggccagggaacactggtcacagttagctctggatccggcggaggcggaagtggaggcggaggatctggcggcggaggctctttcgaagaagtgcaactggtggaatctggcggcggactggtgcagcctggcggatctctgagactgagctgtgccgccagcggcttcagcctgaccaaatacggcgtgcactgggtgcgccaggcccctggaaaaggactggaatgggtgggagtgaagtgggctggcggctccaccgactacaacagcgccctgatgagccggttcaccatcagcaaggacaacgccaagaacagcctgtacctccagatgaactccctgcgggccgaggacaccgccgtgtactactgtgccagagatcaccgggacgctatggactactggggccagggaacactcgtgaccgtgtcctctacgcgtatccagaaccctgatcctgccgtgtaccagctgcgggatagcaagagcagcgacaagagcgtgtgtctgttcaccgacttcgacagccagaccaacgtgtcccagagcaaggactccgacgtgtacatcaccgataagtgcgtgctggacatgcggagcatggacttcaagagcaactccgccgtggcctggtccaacaagtccgatttcgcctgcgccaacgccttcaacaacagcattatccccgaggacacattcttcccaagccccgagagcagcgactccaccgaccacgtgaagcccaaagagacagagaacaccaagcagcccagcaagagctgccacaagcccaaggccatcgtgcacaccgagaaagtgaacatgatgagcctgaccgtgctgggcctgcggatgctgttcgccaaaaccgtggccgtgaacttcctgctgaccgccaagctgttcttcctc

SEQ ID NO: 7771 - DNA, 2988 bp, synthetic construct
  source 1..2988: mol_type = other DNA
atggccttaccagtgaccgccttgctcctgccgctggccttgctgctccacgccgccaggccggaagtgcagctggttgaatctggcggaggactggttcagcctggcggatctctgagactgtcttgtgccgccagcggcttcagcttcagcgacttttggatgagctgggtccgacaggcccctggcaaaggacttgaatgggtcgccacaatcagccaggccggcagcgagaaggactacgtggactctgtgaagggcagattcaccatcagccgggacaacgccaagaagtccctgtacctccagatgaacagcctgagagccgaggacaccgccgtgtactattgtgcctctggcgtgtacagcttcgactacagaggccagggcaccctggtcacagtctcttctggtaccggcggaggcggatctggcggcggaggtagcggtggcggaggatctgaattcgacatccagatgacccagagccccagcagcctgtctgccagcgtgggcgacagagtgaccatcacatgcaaggccagccaggacgtgggaacagccgtggcctggtatcagcagaagcctggcaaggcccccaagctgctgatctacagcgccagctacagatccaccggcgtgcccagcagattttccggctctggcagcggcaccgacttcaccctgaccatctctagcctccagcccgaggacttcgccacctactactgccagcaccactactccgccccctggacatttggcggaggcaccaaggtggaaatcaagctcgaggacctgaagaacgtgttcccacctgaggtggccgtgttcgagcctagcgaggccgagatcagccacacccagaaagccaccctcgtgtgcctggctaccggcttctaccccgaccatgtggaactgtcttggtgggtcaacggcaaagaggtgcacagcggcgtgtgtaccgacccccagccactgaaagaacagcccgccctgaacgacagccggtactgcctgagcagcagactgagagtgtccgccaccttctggcagaacccccggaaccacttcagatgccaggtgcagttctacggcctgagcgagaacgacgagtggacccaggacagagccaagcccgtgacccagatcgtgtctgccgaagcctggggcagagccgatgatgtgattaagatccactggcaggaaaagaagtccaacaccatcctgggcagccaggaaggcaacaccatgaagaccaacgacacctacatgaagttcagctggctgaccgtgcccgagaagtccctggacaaagaacacagatgcatcgtgcggcacgaaaacaacaagaacggcgtggaccaggaaatcatcttcccacccatcaagaccgatgtgattacaatggaccccaaggacaactgctccaaggacgccaacgataccctgctgctccagctgaccaacaccagcgcctactacatgtacttgttgctgctgctgaagtccgtggtgtacttcgccatcatcacatgctgcctgctgcggagaaccgccttctgctgcaacggcgagaagtctagggccaagcgatctggatctggagcaacaaacttctcactactcaaacaagcaggtgacgtggaggagaatcccgggcctactagtatggactggatttggcgcatccttttccttgtcggcgctgctaccggcgcgcattccgggccccagctccagctgcaagagtctggacctggcctggtcaagcctagcgagacactgagcctgacctgtaccgtgtccggcgatagcatcagcagcggcgattactactggggctggatcagacagcctcctggcaaaggactggaatggatcggccacatctactacagcggcgtgacctactacaaccccagcctgaagtccagagtgaccatcagcgtggacaccagccggaaccagttctccctgaagctgtctagcgtgacagccgccgataccgccgtgtactactgcaccagagaggacagcagcaactggcggagtagaggccagggaacactggtcacagttagctctggatccggcggaggcggaagtggaggcggaggatctggcggcggaggctctttcgaagaagtgcaactggtggaatcaggcggcggactggtgcagcctggcggatctctgagactgagctgtgccgccagcggcttcaccttcagcagaaacggcatgagctgggtgcgccaggcccctggaaaaggactggaatgggtggcaaccgtgtccagcggcggcagctacatctactacgccgacagcgtgaagggccggttcaccatctccagagacaacgccaagaacagcctgtacctccagatgaactccctgcgggccgaggacaccgccgtgtactattgtgccagacagggcaccaccgccctggctaccagattcttcgatgtgtggggccagggcaccctcgtgaccgtgtcatctacgcgtatccagaaccctgatcctgccgtgtaccagctgcgggatagcaagagcagcgacaagagcgtgtgtctgttcaccgacttcgacagccagaccaacgtgtcccagagcaaggactccgacgtgtacatcaccgataagtgcgtgctggacatgcggagcatggacttcaagagcaactccgccgtggcctggtccaacaagtccgatttcgcctgcgccaacgccttcaacaacagcattatccccgaggacacattcttcccaagccccgagagcagcgactccaccgaccacgtgaagcccaaagagacagagaacaccaagcagcccagcaagagctgccacaagcccaaggccatcgtgcacaccgagaaagtgaacatgatgagcctgaccgtgctgggcctgcggatgctgttcgccaaaaccgtggccgtgaacttcctgctgaccgccaagctgttcttcctc

SEQ ID NO: 7772 - DNA, 2976 bp, synthetic construct
  source 1..2976: mol_type = other DNA
atggccttaccagtgaccgccttgctcctgccgctggccttgctgctccacgccgccaggccggaagtgcagctggttgaatctggcggaggactggttcagcctggcggatctctgagactgtcttgtgccgccagcggcttcagcttcagcgacttttggatgagctgggtccgacaggcccctggcaaaggacttgaatgggtcgccacaatcagccaggccggcagcgagaaggactacgtggactctgtgaagggcagattcaccatcagccgggacaacgccaagaagtccctgtacctccagatgaacagcctgagagccgaggacaccgccgtgtactattgtgcctctggcgtgtacagcttcgactacagaggccagggcaccctggtcacagtctcttctggtaccggcggaggcggatctggcggcggaggtagcggtggcggaggatctgaattcgacatccagatgacccagagcccccctagcctgtctgcctctgtgggcggcaaagtgaccatcacatgcaaggccagccaggacatcgaccgctacatggcctggtatcaggacaagcccggcaagggacccaagctgctgatccacgataccagcaccctccagcccggcatccccagcagattttctggcagcggctccggcagagactacagcttcagcatcagcaacctggaacccgaggacattgccacctactactgcctccagtacgacaacctgtggaccttcggcggaggcaccaagctggaaatcaagagactcgaggacctgaagaacgtgttcccacctgaggtggccgtgttcgagcctagcgaggccgagatcagccacacccagaaagccaccctcgtgtgcctggctaccggcttctaccccgaccatgtggaactgtcttggtgggtcaacggcaaagaggtgcacagcggcgtgtgtaccgacccccagccactgaaagaacagcccgccctgaacgacagccggtactgcctgagcagcagactgagagtgtccgccaccttctggcagaacccccggaaccacttcagatgccaggtgcagttctacggcctgagcgagaacgacgagtggacccaggacagagccaagcccgtgacccagatcgtgtctgccgaagcctggggcagagccgatgatgtgattaagatccactggcaggaaaagaagtccaacaccatcctgggcagccaggaaggcaacaccatgaagaccaacgacacctacatgaagttcagctggctgaccgtgcccgagaagtccctggacaaagaacacagatgcatcgtgcggcacgaaaacaacaagaacggcgtggaccaggaaatcatcttcccacccatcaagaccgatgtgattacaatggaccccaaggacaactgctccaaggacgccaacgataccctgctgctccagctgaccaacaccagcgcctactacatgtacttgttgctgctgctgaagtccgtggtgtacttcgccatcatcacatgctgcctgctgcggagaaccgccttctgctgcaacggcgagaagtctagggccaagcgatctggatctggagcaacaaacttctcactactcaaacaagcaggtgacgtggaggagaatcccgggcctactagtatggactggatttggcgcatccttttccttgtcggcgctgctaccggcgcgcattccgggccccagctccagctgcaagagtctggacctggcctggtcaagcctagcgagacactgagcctgacctgtaccgtgtccggcgatagcatcagcagcggcgattactactggggctggatcagacagcctcctggcaaaggactggaatggatcggccacatctactacagcggcgtgacctactacaaccccagcctgaagtccagagtgaccatcagcgtggacaccagccggaaccagttctccctgaagctgtctagcgtgacagccgccgataccgccgtgtactactgcaccagagaggacagcagcaactggcggagtagaggccagggaacactggtcacagttagctctggatccggcggaggcggaagtggaggcggaggatctggcggcggaggctctttcgaacaggtgcaactggtgcagagcggagccgagcttgtgaagcctggcgcttccgtgaagatgagctgcaaagccagcggctacatcttcaccaactacaacatccactgggtcaagaagtccccaggccagggcctggaatggatcggagccatctaccccggaaacggcgacgccccttacagccagaagttccaggacagagccaccctgaccgccgacaccagcagcagcaccacctacatggaactgagcagcctgaccagcgaggacagcgccgtgtactattgcgtgcgggccaactgggatgtggccttcgcctattggggccagggcacactggtgtccgtgtcctctacgcgtatccagaaccctgatcctgccgtgtaccagctgcgggatagcaagagcagcgacaagagcgtgtgtctgttcaccgacttcgacagccagaccaacgtgtcccagagcaaggactccgacgtgtacatcaccgataagtgcgtgctggacatgcggagcatggacttcaagagcaactccgccgtggcctggtccaacaagtccgatttcgcctgcgccaacgccttcaacaacagcattatccccgaggacacattcttcccaagccccgagagcagcgactccaccgaccacgtgaagcccaaagagacagagaacaccaagcagcccagcaagagctgccacaagcccaaggccatcgtgcacaccgagaaagtgaacatgatgagcctgaccgtgctgggcctgcggatgctgttcgccaaaaccgtggccgtgaacttcctgctgaccgccaagctgttcttcctc

SEQ ID NO: 7773 - DNA, 2979 bp, synthetic construct
  source 1..2979: mol_type = other DNA
atggccttaccagtgaccgccttgctcctgccgctggccttgctgctccacgccgccaggccggaagtgcagctggttgaatctggcggaggactggttcagcctggcggatctctgagactgtcttgtgccgccagcggcttcagcttcagcgacttttggatgagctgggtccgacaggcccctggcaaaggacttgaatgggtcgccacaatcagccaggccggcagcgagaaggactacgtggactctgtgaagggcagattcaccatcagccgggacaacgccaagaagtccctgtacctccagatgaacagcctgagagccgaggacaccgccgtgtactattgtgcctctggcgtgtacagcttcgactacagaggccagggcaccctggtcacagtctcttctggtaccggcggaggcggatctggcggcggaggtagcggtggcggaggatctgaattcgacatccagatgacccagagccctgccagcctgtctgcctctgtgggcgagacagtgaccatcacctgtcgggtgtccggcaacatccacaactacctggcctggtatcagcagaagcagggcaagagcccccaactgctggtgtacaacgccaagaccctggccgatggcgtgcccagcagattttctggctctggcagcggcacccagtacagcctgaagatcaacagcctccagcccgaggacttcggcagctactactgccagcacttctggtccaacccctacaccttcggcggaggcaccaagctggaaatcaagctcgaggacctgaagaacgtgttcccacctgaggtggccgtgttcgagcctagcgaggccgagatcagccacacccagaaagccaccctcgtgtgcctggctaccggcttctaccccgaccatgtggaactgtcttggtgggtcaacggcaaagaggtgcacagcggcgtgtgtaccgacccccagccactgaaagaacagcccgccctgaacgacagccggtactgcctgagcagcagactgagagtgtccgccaccttctggcagaacccccggaaccacttcagatgccaggtgcagttctacggcctgagcgagaacgacgagtggacccaggacagagccaagcccgtgacccagatcgtgtctgccgaagcctggggcagagccgatgatgtgattaagatccactggcaggaaaagaagtccaacaccatcctgggcagccaggaaggcaacaccatgaagaccaacgacacctacatgaagttcagctggctgaccgtgcccgagaagtccctggacaaagaacacagatgcatcgtgcggcacgaaaacaacaagaacggcgtggaccaggaaatcatcttcccacccatcaagaccgatgtgattacaatggaccccaaggacaactgctccaaggacgccaacgataccctgctgctccagctgaccaacaccagcgcctactacatgtacttgttgctgctgctgaagtccgtggtgtacttcgccatcatcacatgctgcctgctgcggagaaccgccttctgctgcaacggcgagaagtctagggccaagcgatctggatctggagcaacaaacttctcactactcaaacaagcaggtgacgtggaggagaatcccgggcctactagtatggactggatttggcgcatccttttccttgtcggcgctgctaccggcgcgcattccgggccccagctccagctgcaagagtctggacctggcctggtcaagcctagcgagacactgagcctgacctgtaccgtgtccggcgatagcatcagcagcggcgattactactggggctggatcagacagcctcctggcaaaggactggaatggatcggccacatctactacagcggcgtgacctactacaaccccagcctgaagtccagagtgaccatcagcgtggacaccagccggaaccagttctccctgaagctgtctagcgtgacagccgccgataccgccgtgtactactgcaccagagaggacagcagcaactggcggagtagaggccagggaacactggtcacagttagctctggatccggcggaggcggaagtggaggcggaggatctggcggcggaggctctttcgaacaggtgcaactccagcagtctggcgcttccgtgaaggtgtcctgcaaggccagcgaactcgtgcggcctggcacaggctacgccttcaccaattacctgatcgagtgggtcaagcagaggcccggacagggcctggaatggatcggagtgattaacccaggcagcggcggcaccaactacaacgagaagttcaagggcaaggccaccctgaccgccgacaagagcagcagcacagcctacatgcaactgagcagcctgaccagcgacgacagcgccgtgtacttctgcgcccggtacagaagctacgactggtacttcgacgtgtggggagccggcaccaccgtgacagtgtcatctacgcgtatccagaaccctgatcctgccgtgtaccagctgcgggatagcaagagcagcgacaagagcgtgtgtctgttcaccgacttcgacagccagaccaacgtgtcccagagcaaggactccgacgtgtacatcaccgataagtgcgtgctggacatgcggagcatggacttcaagagcaactccgccgtggcctggtccaacaagtccgatttcgcctgcgccaacgccttcaacaacagcattatccccgaggacacattcttcccaagccccgagagcagcgactccaccgaccacgtgaagcccaaagagacagagaacaccaagcagcccagcaagagctgccacaagcccaaggccatcgtgcacaccgagaaagtgaacatgatgagcctgaccgtgctgggcctgcggatgctgttcgccaaaaccgtggccgtgaacttcctgctgaccgccaagctgttcttcctc

SEQ ID NO: 7774 - DNA, 2976 bp, synthetic construct
  source 1..2976: mol_type = other DNA
atggccttaccagtgaccgccttgctcctgccgctggccttgctgctccacgccgccaggccggaagtgcagctggttgaatctggcggaggactggttcagcctggcggatctctgagactgtcttgtgccgccagcggcttcagcttcagcgacttttggatgagctgggtccgacaggcccctggcaaaggacttgaatgggtcgccacaatcagccaggccggcagcgagaaggactacgtggactctgtgaagggcagattcaccatcagccgggacaacgccaagaagtccctgtacctccagatgaacagcctgagagccgaggacaccgccgtgtactattgtgcctctggcgtgtacagcttcgactacagaggccagggcaccctggtcacagtctcttctggtaccggcggaggcggatctggcggcggaggtagcggtggcggaggatctgaattcgacatccagatgacccagagcttcagcagcctgagcgccagcgtgggcgacagagtgaccatcacctgtagagccagccaggacatcagcaactacctgaactggtatcagcagaagcccggcaaggcccccaagctgctgatctactacaccagcagactgcacagcggcgtgcccagcagattttctggcagcggctccggcaccgactacaccctgacaatcagctccctgcagcccgaggacttcgctacctacttctgtcagcaaggcaacaccctgccctggacctttggcggaggcaccaagctggaaatcaagagactcgaggacctgaagaacgtgttcccacctgaggtggccgtgttcgagcctagcgaggccgagatcagccacacccagaaagccaccctcgtgtgcctggctaccggcttctaccccgaccatgtggaactgtcttggtgggtcaacggcaaagaggtgcacagcggcgtgtgtaccgacccccagccactgaaagaacagcccgccctgaacgacagccggtactgcctgagcagcagactgagagtgtccgccaccttctggcagaacccccggaaccacttcagatgccaggtgcagttctacggcctgagcgagaacgacgagtggacccaggacagagccaagcccgtgacccagatcgtgtctgccgaagcctggggcagagccgatgatgtgattaagatccactggcaggaaaagaagtccaacaccatcctgggcagccaggaaggcaacaccatgaagaccaacgacacctacatgaagttcagctggctgaccgtgcccgagaagtccctggacaaagaacacagatgcatcgtgcggcacgaaaacaacaagaacggcgtggaccaggaaatcatcttcccacccatcaagaccgatgtgattacaatggaccccaaggacaactgctccaaggacgccaacgataccctgctgctccagctgaccaacaccagcgcctactacatgtacttgttgctgctgctgaagtccgtggtgtacttcgccatcatcacatgctgcctgctgcggagaaccgccttctgctgcaacggcgagaagtctagggccaagcgatctggatctggagcaacaaacttctcactactcaaacaagcaggtgacgtggaggagaatcccgggcctactagtatggactggatttggcgcatccttttccttgtcggcgctgctaccggcgcgcattccgggccccagctccagctgcaagagtctggacctggcctggtcaagcctagcgagacactgagcctgacctgtaccgtgtccggcgatagcatcagcagcggcgattactactggggctggatcagacagcctcctggcaaaggactggaatggatcggccacatctactacagcggcgtgacctactacaaccccagcctgaagtccagagtgaccatcagcgtggacaccagccggaaccagttctccctgaagctgtctagcgtgacagccgccgataccgccgtgtactactgcaccagagaggacagcagcaactggcggagtagaggccagggaacactggtcacagttagctctggatccggcggaggcggaagtggaggcggaggatctggcggcggaggctctttcgaagaagtgcaactggtgcagtccggcggagggctggtgcagagcggaggatctctgagactgagctgcagagccagcggctacaccttcacccggtactggatgctgtgggtgcgccagaggccaggcaagggactggaatgggtggccgagatcaacccccggaacgaccggaccaactacaacgagaagttcaagacccggttcaccatcagcgtggacagaagcaagaacaccctgtacctgcagatggacagcctgcgggccgaggataccgccgtgtacttttgtgctctgggaggcggctacgctatggactactggggccagggaacccttgtgaccgtgtcctctacgcgtatccagaaccctgatcctgccgtgtaccagctgcgggatagcaagagcagcgacaagagcgtgtgtctgttcaccgacttcgacagccagaccaacgtgtcccagagcaaggactccgacgtgtacatcaccgataagtgcgtgctggacatgcggagcatggacttcaagagcaactccgccgtggcctggtccaacaagtccgatttcgcctgcgccaacgccttcaacaacagcattatccccgaggacacattcttcccaagccccgagagcagcgactccaccgaccacgtgaagcccaaagagacagagaacaccaagcagcccagcaagagctgccacaagcccaaggccatcgtgcacaccgagaaagtgaacatgatgagcctgaccgtgctgggcctgcggatgctgttcgccaaaaccgtggccgtgaacttcctgctgaccgccaagctgttcttcctc

SEQ ID NO: 7775 - DNA, 2979 bp, synthetic construct
  source 1..2979: mol_type = other DNA
atggccttaccagtgaccgccttgctcctgccgctggccttgctgctccacgccgccaggccggaagtgcagctggttgaatctggcggaggactggttcagcctggcggatctctgagactgtcttgtgccgccagcggcttcagcttcagcgacttttggatgagctgggtccgacaggcccctggcaaaggacttgaatgggtcgccacaatcagccaggccggcagcgagaaggactacgtggactctgtgaagggcagattcaccatcagccgggacaacgccaagaagtccctgtacctccagatgaacagcctgagagccgaggacaccgccgtgtactattgtgcctctggcgtgtacagcttcgactacagaggccagggcaccctggtcacagtctcttctggtaccggcggaggcggatctggcggcggaggtagcggtggcggaggatctgaattcgacatccagatgacacagtctccggcgtcactgtccgcctccgtgggggagactgtgactattatttgtagggcatcagttaacatctactcttatttggcctggtaccagcagaagcaaggcaagagtcctcagctgctggtgtataatgcgaagatcctggcagagggcgtgccgagccggttctccggcagcggctcaggtacccaattttccctcaagatcaattcactgcagccagaggactttggcagttactattgtcaacaccactacggcacattcactttcgggtccggtacaaaattggagattaagcgactcgaggacctgaagaacgtgttcccacctgaggtggccgtgttcgagcctagcgaggccgagatcagccacacccagaaagccaccctcgtgtgcctggctaccggcttctaccccgaccatgtggaactgtcttggtgggtcaacggcaaagaggtgcacagcggcgtgtgtaccgacccccagccactgaaagaacagcccgccctgaacgacagccggtactgcctgagcagcagactgagagtgtccgccaccttctggcagaacccccggaaccacttcagatgccaggtgcagttctacggcctgagcgagaacgacgagtggacccaggacagagccaagcccgtgacccagatcgtgtctgccgaagcctggggcagagccgatgatgtgattaagatccactggcaggaaaagaagtccaacaccatcctgggcagccaggaaggcaacaccatgaagaccaacgacacctacatgaagttcagctggctgaccgtgcccgagaagtccctggacaaagaacacagatgcatcgtgcggcacgaaaacaacaagaacggcgtggaccaggaaatcatcttcccacccatcaagaccgatgtgattacaatggaccccaaggacaactgctccaaggacgccaacgataccctgctgctccagctgaccaacaccagcgcctactacatgtacttgttgctgctgctgaagtccgtggtgtacttcgccatcatcacatgctgcctgctgcggagaaccgccttctgctgcaacggcgagaagtctagggccaagcgatctggatctggagcaacaaacttctcactactcaaacaagcaggtgacgtggaggagaatcccgggcctactagtatggactggatttggcgcatccttttccttgtcggcgctgctaccggcgcgcattccgggccccagctccagctgcaagagtctggacctggcctggtcaagcctagcgagacactgagcctgacctgtaccgtgtccggcgatagcatcagcagcggcgattactactggggctggatcagacagcctcctggcaaaggactggaatggatcggccacatctactacagcggcgtgacctactacaaccccagcctgaagtccagagtgaccatcagcgtggacaccagccggaaccagttctccctgaagctgtctagcgtgacagccgccgataccgccgtgtactactgcaccagagaggacagcagcaactggcggagtagaggccagggaacactggtcacagttagctctggatccggcggaggcggaagtggaggcggaggatctggcggcggaggctctttcgaacaggtacagttgaaagaaagcgggcctggactggtagcgccttcccaatctctctccatcacgtgcaccatctctggcttctccctgacttcctatggagttcactgggtgaggcagccccccggcaagggactggaatggctggtcgtcatctggtccgacgggtccacaacctacaactccgctctgaaaagtcggctctctatttctaaagataatagcaagagccaggtgtttctgaaaatgaactctctgcagaccgatgatacggccatttactactgcgcttcacactatggctcaaccttggcattcgcttcctggggccacggaacactggtgaccgtttccgcagccacgcgtatccagaaccctgatcctgccgtgtaccagctgcgggatagcaagagcagcgacaagagcgtgtgtctgttcaccgacttcgacagccagaccaacgtgtcccagagcaaggactccgacgtgtacatcaccgataagtgcgtgctggacatgcggagcatggacttcaagagcaactccgccgtggcctggtccaacaagtccgatttcgcctgcgccaacgccttcaacaacagcattatccccgaggacacattcttcccaagccccgagagcagcgactccaccgaccacgtgaagcccaaagagacagagaacaccaagcagcccagcaagagctgccacaagcccaaggccatcgtgcacaccgagaaagtgaacatgatgagcctgaccgtgctgggcctgcggatgctgttcgccaaaaccgtggccgtgaacttcctgctgaccgccaagctgttcttcctc

SEQ ID NO: 7776 - DNA, 3003 bp, synthetic construct
  source 1..3003: mol_type = other DNA
atggccttaccagtgaccgccttgctcctgccgctggccttgctgctccacgccgccaggccggaagtgcagctggttgaatctggcggaggactggttcagcctggcggatctctgagactgtcttgtgccgccagcggcttcagcttcagcgacttttggatgagctgggtccgacaggcccctggcaaaggacttgaatgggtcgccacaatcagccaggccggcagcgagaaggactacgtggactctgtgaagggcagattcaccatcagccgggacaacgccaagaagtccctgtacctccagatgaacagcctgagagccgaggacaccgccgtgtactattgtgcctctggcgtgtacagcttcgactacagaggccagggcaccctggtcacagtctcttctggtaccggcggaggcggatctggcggcggaggtagcggtggcggaggatctgaattcgacattgtgatgacccagtctcacaaattcatgtccacatcagtaggagacagggtcagcgtcacctgcaaggccagtcagaatgtgggtaataatgtagcctggtatcaacagaaaccagggcaatctcctaaagtactgatttactcggcatcctaccggtacagtggagtccctgatcgcttcacaggcagtggatctgggacagatttcactctcaccatcagtaatgtgcagtctgaagacttggcagagtatttctgtcagcaatataacacctatccattcacgttcggctcggggacaaagttggaaataaaactcgaggacctgaagaacgtgttcccacctgaggtggccgtgttcgagcctagcgaggccgagatcagccacacccagaaagccaccctcgtgtgcctggctaccggcttctaccccgaccatgtggaactgtcttggtgggtcaacggcaaagaggtgcacagcggcgtgtgtaccgacccccagccactgaaagaacagcccgccctgaacgacagccggtactgcctgagcagcagactgagagtgtccgccaccttctggcagaacccccggaaccacttcagatgccaggtgcagttctacggcctgagcgagaacgacgagtggacccaggacagagccaagcccgtgacccagatcgtgtctgccgaagcctggggcagagccgatgatgtgattaagatccactggcaggaaaagaagtccaacaccatcctgggcagccaggaaggcaacaccatgaagaccaacgacacctacatgaagttcagctggctgaccgtgcccgagaagtccctggacaaagaacacagatgcatcgtgcggcacgaaaacaacaagaacggcgtggaccaggaaatcatcttcccacccatcaagaccgatgtgattacaatggaccccaaggacaactgctccaaggacgccaacgataccctgctgctccagctgaccaacaccagcgcctactacatgtacttgttgctgctgctgaagtccgtggtgtacttcgccatcatcacatgctgcctgctgcggagaaccgccttctgctgcaacggcgagaagtctagggccaagcgatctggatctggagcaacaaacttctcactactcaaacaagcaggtgacgtggaggagaatcccgggcctactagtatggactggatttggcgcatccttttccttgtcggcgctgctaccggcgcgcattccgggccccagctccagctgcaagagtctggacctggcctggtcaagcctagcgagacactgagcctgacctgtaccgtgtccggcgatagcatcagcagcggcgattactactggggctggatcagacagcctcctggcaaaggactggaatggatcggccacatctactacagcggcgtgacctactacaaccccagcctgaagtccagagtgaccatcagcgtggacaccagccggaaccagttctccctgaagctgtctagcgtgacagccgccgataccgccgtgtactactgcaccagagaggacagcagcaactggcggagtagaggccagggaacactggtcacagttagctctggatccggcggaggcggaagtggaggcggaggatctggcggcggaggctctttcgaagaggtacagctggaggaaagcggtggaggactggtgcaacctggagggtctatgaagctctcttgcgtagcttctgggttcacgttctccaattactggatgaactgggtgcggcagtcccccgagaaaggcctggaatgggtagcagaaattcggttcaagtcccataactatgctacacactttgccgagtctgtcaaaggccggttcactattagtcgagacgacagcaagtcttcagtctacctgcagatgaataacttgcgggcagaggacacaggtatctactactgcaccaggagaatcggcaactccgactatgactggtggtactttgacgtctggggagcaggcaccagcgtgacggtgagttcagcctcaacgcgtatccagaaccctgatcctgccgtgtaccagctgcgggatagcaagagcagcgacaagagcgtgtgtctgttcaccgacttcgacagccagaccaacgtgtcccagagcaaggactccgacgtgtacatcaccgataagtgcgtgctggacatgcggagcatggacttcaagagcaactccgccgtggcctggtccaacaagtccgatttcgcctgcgccaacgccttcaacaacagcattatccccgaggacacattcttcccaagccccgagagcagcgactccaccgaccacgtgaagcccaaagagacagagaacaccaagcagcccagcaagagctgccacaagcccaaggccatcgtgcacaccgagaaagtgaacatgatgagcctgaccgtgctgggcctgcggatgctgttcgccaaaaccgtggccgtgaacttcctgctgaccgccaagctgttcttcctc

SEQ ID NO: 7777 - DNA, 2982 bp, synthetic construct
  source 1..2982: mol_type = other DNA
atggccttaccagtgaccgccttgctcctgccgctggccttgctgctccacgccgccaggccggaagtgcagctggttgaatctggcggaggactggttcagcctggcggatctctgagactgtcttgtgccgccagcggcttcagcttcagcgacttttggatgagctgggtccgacaggcccctggcaaaggacttgaatgggtcgccacaatcagccaggccggcagcgagaaggactacgtggactctgtgaagggcagattcaccatcagccgggacaacgccaagaagtccctgtacctccagatgaacagcctgagagccgaggacaccgccgtgtactattgtgcctctggcgtgtacagcttcgactacagaggccagggcaccctggtcacagtctcttctggtaccggcggaggcggatctggcggcggaggtagcggtggcggaggatctgaattcgaccagatcgtgctgacccagtcccccgctattatgtccgcatcaccgggcgaaaaagtgacgatctcctgtagcgcttcatctagcgtctcctacatgtattggtatcaacagaaacctgggtctagcccaaagccgtggatctacagaaccagtaaccttgccagtggggtgccagcccgcttcagcggtagtggcagtggaacttcctatagcctcacaataagcaacatggaggctgaagatgccgctgcctattactgccagcagtaccacagttacccaaccacgttcggcgggggaactaagctcgaagtaaaactcgaggacctgaagaacgtgttcccacctgaggtggccgtgttcgagcctagcgaggccgagatcagccacacccagaaagccaccctcgtgtgcctggctaccggcttctaccccgaccatgtggaactgtcttggtgggtcaacggcaaagaggtgcacagcggcgtgtgtaccgacccccagccactgaaagaacagcccgccctgaacgacagccggtactgcctgagcagcagactgagagtgtccgccaccttctggcagaacccccggaaccacttcagatgccaggtgcagttctacggcctgagcgagaacgacgagtggacccaggacagagccaagcccgtgacccagatcgtgtctgccgaagcctggggcagagccgatgatgtgattaagatccactggcaggaaaagaagtccaacaccatcctgggcagccaggaaggcaacaccatgaagaccaacgacacctacatgaagttcagctggctgaccgtgcccgagaagtccctggacaaagaacacagatgcatcgtgcggcacgaaaacaacaagaacggcgtggaccaggaaatcatcttcccacccatcaagaccgatgtgattacaatggaccccaaggacaactgctccaaggacgccaacgataccctgctgctccagctgaccaacaccagcgcctactacatgtacttgttgctgctgctgaagtccgtggtgtacttcgccatcatcacatgctgcctgctgcggagaaccgccttctgctgcaacggcgagaagtctagggccaagcgatctggatctggagcaacaaacttctcactactcaaacaagcaggtgacgtggaggagaatcccgggcctactagtatggactggatttggcgcatccttttccttgtcggcgctgctaccggcgcgcattccgggccccagctccagctgcaagagtctggacctggcctggtcaagcctagcgagacactgagcctgacctgtaccgtgtccggcgatagcatcagcagcggcgattactactggggctggatcagacagcctcctggcaaaggactggaatggatcggccacatctactacagcggcgtgacctactacaaccccagcctgaagtccagagtgaccatcagcgtggacaccagccggaaccagttctccctgaagctgtctagcgtgacagccgccgataccgccgtgtactactgcaccagagaggacagcagcaactggcggagtagaggccagggaacactggtcacagttagctctggatccggcggaggcggaagtggaggcggaggatctggcggcggaggctctttcgaagaggtgcagctggtggaatctgggggcggcctggtccaacctaagggatcactcaagctctcttgtgcggccagcggattctctttcaatacctatgctatgaattgggtgagacaggcgcccggaaagggcctcgaatggatagcccatatccggtcaaaatcaaacaatttcgcaacctactatgcggactccgtgaaggaccgattttccatctcccgagatgcctccgagaatattctgttcctgcagatgaataacctcaagacagaggacaccgccatgtactactgtgtgcgccagggcggtgactttcccatggattactgggggcaggggaccagcgtgaccgtgagctctacgcgtatccagaaccctgatcctgccgtgtaccagctgcgggatagcaagagcagcgacaagagcgtgtgtctgttcaccgacttcgacagccagaccaacgtgtcccagagcaaggactccgacgtgtacatcaccgataagtgcgtgctggacatgcggagcatggacttcaagagcaactccgccgtggcctggtccaacaagtccgatttcgcctgcgccaacgccttcaacaacagcattatccccgaggacacattcttcccaagccccgagagcagcgactccaccgaccacgtgaagcccaaagagacagagaacaccaagcagcccagcaagagctgccacaagcccaaggccatcgtgcacaccgagaaagtgaacatgatgagcctgaccgtgctgggcctgcggatgctgttcgccaaaaccgtggccgtgaacttcctgctgaccgccaagctgttcttcctc

SEQ ID NO: 7778 - DNA, 2979 bp, synthetic construct
  source 1..2979: mol_type = other DNA
atggccttaccagtgaccgccttgctcctgccgctggccttgctgctccacgccgccaggccggaagtgcagctggttgaatctggcggaggactggttcagcctggcggatctctgagactgtcttgtgccgccagcggcttcagcttcagcgacttttggatgagctgggtccgacaggcccctggcaaaggacttgaatgggtcgccacaatcagccaggccggcagcgagaaggactacgtggactctgtgaagggcagattcaccatcagccgggacaacgccaagaagtccctgtacctccagatgaacagcctgagagccgaggacaccgccgtgtactattgtgcctctggcgtgtacagcttcgactacagaggccagggcaccctggtcacagtctcttctggtaccggcggaggcggatctggcggcggaggtagcggtggcggaggatctgaattcgacgacatccagatgacccagagcagcagcagcttcagcgtgagcctgggcgacagagtgaccatcacctgcatggccagcgaggacatctacatcagactggcctggtaccagcagaagcccggcaacgcccccagactgctgatcagcgccgccaccagcctggagaccggcgtgcccagcagattcagcggcagcggcagcggcaaggactacaccctgagcatcaccagcctgcagaccgaggacgtgggcacctactactgccagcagtactggagcagcccctggaccttcggcggcggcaccaagctggagatcaacctcgaggacctgaagaacgtgttcccacctgaggtggccgtgttcgagcctagcgaggccgagatcagccacacccagaaagccaccctcgtgtgcctggctaccggcttctaccccgaccatgtggaactgtcttggtgggtcaacggcaaagaggtgcacagcggcgtgtgtaccgacccccagccactgaaagaacagcccgccctgaacgacagccggtactgcctgagcagcagactgagagtgtccgccaccttctggcagaacccccggaaccacttcagatgccaggtgcagttctacggcctgagcgagaacgacgagtggacccaggacagagccaagcccgtgacccagatcgtgtctgccgaagcctggggcagagccgatgatgtgattaagatccactggcaggaaaagaagtccaacaccatcctgggcagccaggaaggcaacaccatgaagaccaacgacacctacatgaagttcagctggctgaccgtgcccgagaagtccctggacaaagaacacagatgcatcgtgcggcacgaaaacaacaagaacggcgtggaccaggaaatcatcttcccacccatcaagaccgatgtgattacaatggaccccaaggacaactgctccaaggacgccaacgataccctgctgctccagctgaccaacaccagcgcctactacatgtacttgttgctgctgctgaagtccgtggtgtacttcgccatcatcacatgctgcctgctgcggagaaccgccttctgctgcaacggcgagaagtctagggccaagcgatctggatctggagcaacaaacttctcactactcaaacaagcaggtgacgtggaggagaatcccgggcctactagtatggactggatttggcgcatccttttccttgtcggcgctgctaccggcgcgcattccgggccccagctccagctgcaagagtctggacctggcctggtcaagcctagcgagacactgagcctgacctgtaccgtgtccggcgatagcatcagcagcggcgattactactggggctggatcagacagcctcctggcaaaggactggaatggatcggccacatctactacagcggcgtgacctactacaaccccagcctgaagtccagagtgaccatcagcgtggacaccagccggaaccagttctccctgaagctgtctagcgtgacagccgccgataccgccgtgtactactgcaccagagaggacagcagcaactggcggagtagaggccagggaacactggtcacagttagctctggatccggcggaggcggaagtggaggcggaggatctggcggcggaggctctttcgaagacgtgcagctgcaggagagcggccccggcctggtgaagcccagccagagcctgagcctgacctgcaccgtgaccggctacagcatcaccagcgactacacctggaactggatcagacagttccccggcaacaagctggagtggatgggctacatcacctacagcggcagcaccagctacaaccccagcctgaagagcagaaacagcatcaccagagacaccagcaagaaccagttcttcctgcagctgaacagcgtgaccaccgaggacaccgccacctactactgcgccagactgggcagaagatacacaatggactactggggccagggcaccagcgtgaccgtgagcagcacgcgtatccagaaccctgatcctgccgtgtaccagctgcgggatagcaagagcagcgacaagagcgtgtgtctgttcaccgacttcgacagccagaccaacgtgtcccagagcaaggactccgacgtgtacatcaccgataagtgcgtgctggacatgcggagcatggacttcaagagcaactccgccgtggcctggtccaacaagtccgatttcgcctgcgccaacgccttcaacaacagcattatccccgaggacacattcttcccaagccccgagagcagcgactccaccgaccacgtgaagcccaaagagacagagaacaccaagcagcccagcaagagctgccacaagcccaaggccatcgtgcacaccgagaaagtgaacatgatgagcctgaccgtgctgggcctgcggatgctgttcgccaaaaccgtggccgtgaacttcctgctgaccgccaagctgttcttcctc

SEQ ID NO: 7779 - DNA, 2988 bp, synthetic construct
  source 1..2988: mol_type = other DNA
atggccttaccagtgaccgccttgctcctgccgctggccttgctgctccacgccgccaggccggaagtgcagctggttgaatctggcggaggactggttcagcctggcggatctctgagactgtcttgtgccgccagcggcttcagcttcagcgacttttggatgagctgggtccgacaggcccctggcaaaggacttgaatgggtcgccacaatcagccaggccggcagcgagaaggactacgtggactctgtgaagggcagattcaccatcagccgggacaacgccaagaagtccctgtacctccagatgaacagcctgagagccgaggacaccgccgtgtactattgtgcctctggcgtgtacagcttcgactacagaggccagggcaccctggtcacagtctcttctggtaccggcggaggcggatctggcggcggaggtagcggtggcggaggatctgaattcgacgacatccagatgacccagagccccagcagcctgtctgccagcgtgggcgacagagtgaccatcacctgtagagccagccagagcatcagcagctacctgaactggtatcagcagaagcccggcaaggcccccaaactgctgatctacgacgccagcaacctggaaaccggcgtgcccagcagattttccggcagcggctctggcaccgacttcaccttcaccatcagctccctccagcccgaggacattgccacctactactgccagcagtacgacaacctgcccctgacctttggcggaggcaccaaggtggacatcaagagactcgaggacctgaagaacgtgttcccacctgaggtggccgtgttcgagcctagcgaggccgagatcagccacacccagaaagccaccctcgtgtgcctggctaccggcttctaccccgaccatgtggaactgtcttggtgggtcaacggcaaagaggtgcacagcggcgtgtgtaccgacccccagccactgaaagaacagcccgccctgaacgacagccggtactgcctgagcagcagactgagagtgtccgccaccttctggcagaacccccggaaccacttcagatgccaggtgcagttctacggcctgagcgagaacgacgagtggacccaggacagagccaagcccgtgacccagatcgtgtctgccgaagcctggggcagagccgatgatgtgattaagatccactggcaggaaaagaagtccaacaccatcctgggcagccaggaaggcaacaccatgaagaccaacgacacctacatgaagttcagctggctgaccgtgcccgagaagtccctggacaaagaacacagatgcatcgtgcggcacgaaaacaacaagaacggcgtggaccaggaaatcatcttcccacccatcaagaccgatgtgattacaatggaccccaaggacaactgctccaaggacgccaacgataccctgctgctccagctgaccaacaccagcgcctactacatgtacttgttgctgctgctgaagtccgtggtgtacttcgccatcatcacatgctgcctgctgcggagaaccgccttctgctgcaacggcgagaagtctagggccaagcgatctggatctggagcaacaaacttctcactactcaaacaagcaggtgacgtggaggagaatcccgggcctactagtatggactggatttggcgcatccttttccttgtcggcgctgctaccggcgcgcattccgggccccagctccagctgcaagagtctggacctggcctggtcaagcctagcgagacactgagcctgacctgtaccgtgtccggcgatagcatcagcagcggcgattactactggggctggatcagacagcctcctggcaaaggactggaatggatcggccacatctactacagcggcgtgacctactacaaccccagcctgaagtccagagtgaccatcagcgtggacaccagccggaaccagttctccctgaagctgtctagcgtgacagccgccgataccgccgtgtactactgcaccagagaggacagcagcaactggcggagtagaggccagggaacactggtcacagttagctctggatccggcggaggcggaagtggaggcggaggatctggcggcggaggctctttcgaacaggtgcaactggtggaatctggcggcggagtggtgcagcctggcagaagcctgagactgagctgtgccgccagcggcttcacctttagcagctacgccatgcactgggtgcgccaggcccctggaaaaggcctggaatgggtggccgtgatctcctacgacggctccaacaagtattacgccgacagcgtgaagggccggttcaccatctccagagacaacagcaagaacaccctgtacctccagatgaacagcctgcgggccgaggacaccgccgtgtactattgtgccagggctcacaacagcagctcttggagcttcgactactggggccagggcaccctcgtgaccgtgtcatctacgcgtatccagaaccctgatcctgccgtgtaccagctgcgggatagcaagagcagcgacaagagcgtgtgtctgttcaccgacttcgacagccagaccaacgtgtcccagagcaaggactccgacgtgtacatcaccgataagtgcgtgctggacatgcggagcatggacttcaagagcaactccgccgtggcctggtccaacaagtccgatttcgcctgcgccaacgccttcaacaacagcattatccccgaggacacattcttcccaagccccgagagcagcgactccaccgaccacgtgaagcccaaagagacagagaacaccaagcagcccagcaagagctgccacaagcccaaggccatcgtgcacaccgagaaagtgaacatgatgagcctgaccgtgctgggcctgcggatgctgttcgccaaaaccgtggccgtgaacttcctgctgaccgccaagctgttcttcctc

SEQ ID NO: 7780 - DNA, 3015 bp, synthetic construct
  source 1..3015: mol_type = other DNA
atggccttaccagtgaccgccttgctcctgccgctggccttgctgctccacgccgccaggccggaagtgcagctggttgaatctggcggaggactggttcagcctggcggatctctgagactgtcttgtgccgccagcggcttcagcttcagcgacttttggatgagctgggtccgacaggcccctggcaaaggacttgaatgggtcgccacaatcagccaggccggcagcgagaaggactacgtggactctgtgaagggcagattcaccatcagccgggacaacgccaagaagtccctgtacctccagatgaacagcctgagagccgaggacaccgccgtgtactattgtgcctctggcgtgtacagcttcgactacagaggccagggcaccctggtcacagtctcttctggtaccggcggaggcggatctggcggcggaggtagcggtggcggaggatctgaattcgacgacgtcgtgatgacccagagccctctgagcctgcctgtgtccctgggcgatcaggccagcatctcctgcagatccagccagagactggtgcacagcaacggcaacacctacctgcactggtatctgcagaagcccggccagagccccaagctgctgatctaccgggtgtccaacagattccccggcgtgcccgatagattcagcggctctggcagcggcaccgacttcaccctgaagatcagccgggtggaagccgaggacctgggcatctatttctgcagccagagcacccacgtgccctacacctttggcggaggcaccaagctggaaatcaagcggctcgaggacctgaagaacgtgttcccacctgaggtggccgtgttcgagcctagcgaggccgagatcagccacacccagaaagccaccctcgtgtgcctggctaccggcttctaccccgaccatgtggaactgtcttggtgggtcaacggcaaagaggtgcacagcggcgtgtgtaccgacccccagccactgaaagaacagcccgccctgaacgacagccggtactgcctgagcagcagactgagagtgtccgccaccttctggcagaacccccggaaccacttcagatgccaggtgcagttctacggcctgagcgagaacgacgagtggacccaggacagagccaagcccgtgacccagatcgtgtctgccgaagcctggggcagagccgatgatgtgattaagatccactggcaggaaaagaagtccaacaccatcctgggcagccaggaaggcaacaccatgaagaccaacgacacctacatgaagttcagctggctgaccgtgcccgagaagtccctggacaaagaacacagatgcatcgtgcggcacgaaaacaacaagaacggcgtggaccaggaaatcatcttcccacccatcaagaccgatgtgattacaatggaccccaaggacaactgctccaaggacgccaacgataccctgctgctccagctgaccaacaccagcgcctactacatgtacttgttgctgctgctgaagtccgtggtgtacttcgccatcatcacatgctgcctgctgcggagaaccgccttctgctgcaacggcgagaagtctagggccaagcgatctggatctggagcaacaaacttctcactactcaaacaagcaggtgacgtggaggagaatcccgggcctactagtatggactggatttggcgcatccttttccttgtcggcgctgctaccggcgcgcattccgggccccagctccagctgcaagagtctggacctggcctggtcaagcctagcgagacactgagcctgacctgtaccgtgtccggcgatagcatcagcagcggcgattactactggggctggatcagacagcctcctggcaaaggactggaatggatcggccacatctactacagcggcgtgacctactacaaccccagcctgaagtccagagtgaccatcagcgtggacaccagccggaaccagttctccctgaagctgtctagcgtgacagccgccgataccgccgtgtactactgcaccagagaggacagcagcaactggcggagtagaggccagggaacactggtcacagttagctctggatccggcggaggcggaagtggaggcggaggatctggcggcggaggctctttcgaagaagtgcggctgcagcagtctggccccgacctgattaagcctggggccagcgtgaagatgagctgcaaggccagcggctacaccttcaccggctacgtgatgcactgggtcaagcagaggccaggccagggcctggaatggatcggcttcatcaacccctacaacgacgacatccagagcaacgagcggttccggggcaaggccaccctgaccagcgataagagcagcaccaccgcctacatggaactgagcagcctgacctccgaggacagcgccgtgtactactgtgctaggggagccggctacaacttcgacggggcctacagattcttcgacttttggggccagggcaccacactgaccgtgtcctctacgcgtatccagaaccctgatcctgccgtgtaccagctgcgggatagcaagagcagcgacaagagcgtgtgtctgttcaccgacttcgacagccagaccaacgtgtcccagagcaaggactccgacgtgtacatcaccgataagtgcgtgctggacatgcggagcatggacttcaagagcaactccgccgtggcctggtccaacaagtccgatttcgcctgcgccaacgccttcaacaacagcattatccccgaggacacattcttcccaagccccgagagcagcgactccaccgaccacgtgaagcccaaagagacagagaacaccaagcagcccagcaagagctgccacaagcccaaggccatcgtgcacaccgagaaagtgaacatgatgagcctgaccgtgctgggcctgcggatgctgttcgccaaaaccgtggccgtgaacttcctgctgaccgccaagctgttcttcctc

SEQ ID NO: 7781 - DNA, 2988 bp, synthetic construct
  source 1..2988: mol_type = other DNA
atggccttaccagtgaccgccttgctcctgccgctggccttgctgctccacgccgccaggccggaagtgcagctggttgaatctggcggaggactggttcagcctggcggatctctgagactgtcttgtgccgccagcggcttcagcttcagcgacttttggatgagctgggtccgacaggcccctggcaaaggacttgaatgggtcgccacaatcagccaggccggcagcgagaaggactacgtggactctgtgaagggcagattcaccatcagccgggacaacgccaagaagtccctgtacctccagatgaacagcctgagagccgaggacaccgccgtgtactattgtgcctctggcgtgtacagcttcgactacagaggccagggcaccctggtcacagtctcttctggtaccggcggaggcggatctggcggcggaggtagcggtggcggaggatctgaattcgacagctacgagctgacccagcctcctagcgtgtccgtgtctcctggacagaccgccaccatctcttgcagcggcgatcaactgggcgggaagtacggccactggtatcagaagaagcccggccagagccccgtgctggtgctgtaccaggacagaaaacggcctgccggcatccccgagagattcagcggaagcagcagcggcaacaccatcaccctgaccatcagcggcacccaggccgtggatgaggccgactactactgccaggcttgggacaccaatctgggcggcgtgttcggcggaggcaccaaagtgacagtgctgggacagctcgaggacctgaagaacgtgttcccacctgaggtggccgtgttcgagcctagcgaggccgagatcagccacacccagaaagccaccctcgtgtgcctggctaccggcttctaccccgaccatgtggaactgtcttggtgggtcaacggcaaagaggtgcacagcggcgtgtgtaccgacccccagccactgaaagaacagcccgccctgaacgacagccggtactgcctgagcagcagactgagagtgtccgccaccttctggcagaacccccggaaccacttcagatgccaggtgcagttctacggcctgagcgagaacgacgagtggacccaggacagagccaagcccgtgacccagatcgtgtctgccgaagcctggggcagagccgatgatgtgattaagatccactggcaggaaaagaagtccaacaccatcctgggcagccaggaaggcaacaccatgaagaccaacgacacctacatgaagttcagctggctgaccgtgcccgagaagtccctggacaaagaacacagatgcatcgtgcggcacgaaaacaacaagaacggcgtggaccaggaaatcatcttcccacccatcaagaccgatgtgattacaatggaccccaaggacaactgctccaaggacgccaacgataccctgctgctccagctgaccaacaccagcgcctactacatgtacttgttgctgctgctgaagtccgtggtgtacttcgccatcatcacatgctgcctgctgcggagaaccgccttctgctgcaacggcgagaagtctagggccaagcgatctggatctggagcaacaaacttctcactactcaaacaagcaggtgacgtggaggagaatcccgggcctactagtatggactggatttggcgcatccttttccttgtcggcgctgctaccggcgcgcattccgggccccagctccagctgcaagagtctggacctggcctggtcaagcctagcgagacactgagcctgacctgtaccgtgtccggcgatagcatcagcagcggcgattactactggggctggatcagacagcctcctggcaaaggactggaatggatcggccacatctactacagcggcgtgacctactacaaccccagcctgaagtccagagtgaccatcagcgtggacaccagccggaaccagttctccctgaagctgtctagcgtgacagccgccgataccgccgtgtactactgcaccagagaggacagcagcaactggcggagtagaggccagggaacactggtcacagttagctctggatccggcggaggcggaagtggaggcggaggatctggcggcggaggctctttcgaacaggtgcaactggtggaaagcggagccgaagtgaagaaacctggggccagcgtgaaggtgtcctgcaaggccagcggctacacctttaccggctactacatgcactgggtgcgccaggctccaggccagggactggaatggatgggccggatcaaccccaatagcggcggcaccaactacgcccagaaattccagggcagagtgaccatgaccagagacaccagcatcagcaccgcctacatggaactgagccggctgagaagcgacgacaccgccgtgtactactgcgccagccctagaggcagaggcagcgccttcgatatttggggccagggcacactcgtgaccgtgtcctctacgcgtatccagaaccctgatcctgccgtgtaccagctgcgggatagcaagagcagcgacaagagcgtgtgtctgttcaccgacttcgacagccagaccaacgtgtcccagagcaaggactccgacgtgtacatcaccgataagtgcgtgctggacatgcggagcatggacttcaagagcaactccgccgtggcctggtccaacaagtccgatttcgcctgcgccaacgccttcaacaacagcattatccccgaggacacattcttcccaagccccgagagcagcgactccaccgaccacgtgaagcccaaagagacagagaacaccaagcagcccagcaagagctgccacaagcccaaggccatcgtgcacaccgagaaagtgaacatgatgagcctgaccgtgctgggcctgcggatgctgttcgccaaaaccgtggccgtgaacttcctgctgaccgccaagctgttcttcctc

SEQ ID NO: 7782 - DNA, 2997 bp, synthetic construct
  source 1..2997: mol_type = other DNA
atggccttaccagtgaccgccttgctcctgccgctggccttgctgctccacgccgccaggccggaagtgcagctggttgaatctggcggaggactggttcagcctggcggatctctgagactgtcttgtgccgccagcggcttcagcttcagcgacttttggatgagctgggtccgacaggcccctggcaaaggacttgaatgggtcgccacaatcagccaggccggcagcgagaaggactacgtggactctgtgaagggcagattcaccatcagccgggacaacgccaagaagtccctgtacctccagatgaacagcctgagagccgaggacaccgccgtgtactattgtgcctctggcgtgtacagcttcgactacagaggccagggcaccctggtcacagtctcttctggtaccggcggaggcggatctggcggcggaggtagcggtggcggaggatctgaattcgacaacttcatgctgacccagccccacagcgtgtccgagagccctggcaagaccgtgaccatctcctgcaccagaagcagcggctctatcgccagcaaatacgtgcagtggtatcagcagaggcccggcagcagccctaccaccgtgatctacgaggacaaccagaggcctagcggcgtgcccgatagattcagcggcagcatcgacaccagcagcaacagcgccagcctgaccatcagcggcctgagaacagaggacgaggccgactactactgccacagctacgacagcaacaaccactccgtgttcggcggaggcaccaaagtgacagtgctgggacagctcgaggacctgaagaacgtgttcccacctgaggtggccgtgttcgagcctagcgaggccgagatcagccacacccagaaagccaccctcgtgtgcctggctaccggcttctaccccgaccatgtggaactgtcttggtgggtcaacggcaaagaggtgcacagcggcgtgtgtaccgacccccagccactgaaagaacagcccgccctgaacgacagccggtactgcctgagcagcagactgagagtgtccgccaccttctggcagaacccccggaaccacttcagatgccaggtgcagttctacggcctgagcgagaacgacgagtggacccaggacagagccaagcccgtgacccagatcgtgtctgccgaagcctggggcagagccgatgatgtgattaagatccactggcaggaaaagaagtccaacaccatcctgggcagccaggaaggcaacaccatgaagaccaacgacacctacatgaagttcagctggctgaccgtgcccgagaagtccctggacaaagaacacagatgcatcgtgcggcacgaaaacaacaagaacggcgtggaccaggaaatcatcttcccacccatcaagaccgatgtgattacaatggaccccaaggacaactgctccaaggacgccaacgataccctgctgctccagctgaccaacaccagcgcctactacatgtacttgttgctgctgctgaagtccgtggtgtacttcgccatcatcacatgctgcctgctgcggagaaccgccttctgctgcaacggcgagaagtctagggccaagcgatctggatctggagcaacaaacttctcactactcaaacaagcaggtgacgtggaggagaatcccgggcctactagtatggactggatttggcgcatccttttccttgtcggcgctgctaccggcgcgcattccgggccccagctccagctgcaagagtctggacctggcctggtcaagcctagcgagacactgagcctgacctgtaccgtgtccggcgatagcatcagcagcggcgattactactggggctggatcagacagcctcctggcaaaggactggaatggatcggccacatctactacagcggcgtgacctactacaaccccagcctgaagtccagagtgaccatcagcgtggacaccagccggaaccagttctccctgaagctgtctagcgtgacagccgccgataccgccgtgtactactgcaccagagaggacagcagcaactggcggagtagaggccagggaacactggtcacagttagctctggatccggcggaggcggaagtggaggcggaggatctggcggcggaggctctttcgaagaagtgcaactggtggaaagcgggggaggcgtggtgcagccaggcggatctctgagactgagctgtgccgccagcggcttcaccttcagcagctacgccatgagctgggtgcgccaggcccctggaaaaggcctggaatgggtgtccgccatctctggctctggcggcagcacctactacgccgatagcgtgaagggccggttcagcatcagccgggacaacagcaagaacaccctgtacctccagatgaacagcctgcgggccgaggacaccgccgtgtactactgtgccagaaccagaagctccggggccttcgacatctggggccagggaacactcgtgaccgtgtcctctacgcgtatccagaaccctgatcctgccgtgtaccagctgcgggatagcaagagcagcgacaagagcgtgtgtctgttcaccgacttcgacagccagaccaacgtgtcccagagcaaggactccgacgtgtacatcaccgataagtgcgtgctggacatgcggagcatggacttcaagagcaactccgccgtggcctggtccaacaagtccgatttcgcctgcgccaacgccttcaacaacagcattatccccgaggacacattcttcccaagccccgagagcagcgactccaccgaccacgtgaagcccaaagagacagagaacaccaagcagcccagcaagagctgccacaagcccaaggccatcgtgcacaccgagaaagtgaacatgatgagcctgaccgtgctgggcctgcggatgctgttcgccaaaaccgtggccgtgaacttcctgctgaccgccaagctgttcttcctc

SEQ ID NO: 7783 - DNA, 2982 bp, synthetic construct
  source 1..2982: mol_type = other DNA
atggccttaccagtgaccgccttgctcctgccgctggccttgctgctccacgccgccaggccggaagtgcagctggttgaatctggcggaggactggttcagcctggcggatctctgagactgtcttgtgccgccagcggcttcagcttcagcgacttttggatgagctgggtccgacaggcccctggcaaaggacttgaatgggtcgccacaatcagccaggccggcagcgagaaggactacgtggactctgtgaagggcagattcaccatcagccgggacaacgccaagaagtccctgtacctccagatgaacagcctgagagccgaggacaccgccgtgtactattgtgcctctggcgtgtacagcttcgactacagaggccagggcaccctggtcacagtctcttctggtaccggcggaggcggatctggcggcggaggtagcggtggcggaggatctgaattcgacatccagatgaaccagagccccagcagcctgagcgccagcctgggcgataccatcaccatcacctgtcacgccagccagaacatcaacgtgtggctgagctggtatcagcagaagcccggcaacatccccaagctgctgatctacaaggccagcaacctgcacaccggcgtgcccagcagattttctggcagcggctctggcaccggcttcaccattaccatcagctccctccagcccgaggacattgccacctactactgccagcagggccagagctacccctggacatttggcggaggcaccaagctggaaatcaagagactcgaggacctgaagaacgtgttcccacctgaggtggccgtgttcgagcctagcgaggccgagatcagccacacccagaaagccaccctcgtgtgcctggctaccggcttctaccccgaccatgtggaactgtcttggtgggtcaacggcaaagaggtgcacagcggcgtgtgtaccgacccccagccactgaaagaacagcccgccctgaacgacagccggtactgcctgagcagcagactgagagtgtccgccaccttctggcagaacccccggaaccacttcagatgccaggtgcagttctacggcctgagcgagaacgacgagtggacccaggacagagccaagcccgtgacccagatcgtgtctgccgaagcctggggcagagccgatgatgtgattaagatccactggcaggaaaagaagtccaacaccatcctgggcagccaggaaggcaacaccatgaagaccaacgacacctacatgaagttcagctggctgaccgtgcccgagaagtccctggacaaagaacacagatgcatcgtgcggcacgaaaacaacaagaacggcgtggaccaggaaatcatcttcccacccatcaagaccgatgtgattacaatggaccccaaggacaactgctccaaggacgccaacgataccctgctgctccagctgaccaacaccagcgcctactacatgtacttgttgctgctgctgaagtccgtggtgtacttcgccatcatcacatgctgcctgctgcggagaaccgccttctgctgcaacggcgagaagtctagggccaagcgatctggatctggagcaacaaacttctcactactcaaacaagcaggtgacgtggaggagaatcccgggcctactagtatggactggatttggcgcatccttttccttgtcggcgctgctaccggcgcgcattccgggccccagctccagctgcaagagtctggacctggcctggtcaagcctagcgagacactgagcctgacctgtaccgtgtccggcgatagcatcagcagcggcgattactactggggctggatcagacagcctcctggcaaaggactggaatggatcggccacatctactacagcggcgtgacctactacaaccccagcctgaagtccagagtgaccatcagcgtggacaccagccggaaccagttctccctgaagctgtctagcgtgacagccgccgataccgccgtgtactactgcaccagagaggacagcagcaactggcggagtagaggccagggaacactggtcacagttagctctggatccggcggaggcggaagtggaggcggaggatctggcggcggaggctctttcgaagaagtgcaactccagcagagcggcccagagcttgtgaagcctggcgcttccgtgaagattagctgcaaagccagcggctacagcttcaccggctacttcatgaactgggtcaagcagagccacggcaagagcctggagtacatcggcagattcaacccctacaacggcgagacactgtacaaccagaagttcaagggcaaggccaccctgaccgtggacaagagcagcagcaccgtgcacatggaactgctgagcgtgaccagcgaggacagcgccgtgtactactgtggcagaagcggcaacgacgacgctatggactattggggccagggcaccagcgtgaccgtgtctagtgctacgcgtatccagaaccctgatcctgccgtgtaccagctgcgggatagcaagagcagcgacaagagcgtgtgtctgttcaccgacttcgacagccagaccaacgtgtcccagagcaaggactccgacgtgtacatcaccgataagtgcgtgctggacatgcggagcatggacttcaagagcaactccgccgtggcctggtccaacaagtccgatttcgcctgcgccaacgccttcaacaacagcattatccccgaggacacattcttcccaagccccgagagcagcgactccaccgaccacgtgaagcccaaagagacagagaacaccaagcagcccagcaagagctgccacaagcccaaggccatcgtgcacaccgagaaagtgaacatgatgagcctgaccgtgctgggcctgcggatgctgttcgccaaaaccgtggccgtgaacttcctgctgaccgccaagctgttcttcctc

SEQ ID NO: 7784 - DNA, 2985 bp, synthetic construct
  source 1..2985: mol_type = other DNA
atggccttaccagtgaccgccttgctcctgccgctggccttgctgctccacgccgccaggccggaagtgcagctggttgaatctggcggaggactggttcagcctggcggatctctgagactgtcttgtgccgccagcggcttcagcttcagcgacttttggatgagctgggtccgacaggcccctggcaaaggacttgaatgggtcgccacaatcagccaggccggcagcgagaaggactacgtggactctgtgaagggcagattcaccatcagccgggacaacgccaagaagtccctgtacctccagatgaacagcctgagagccgaggacaccgccgtgtactattgtgcctctggcgtgtacagcttcgactacagaggccagggcaccctggtcacagtctcttctggtaccggcggaggcggatctggcggcggaggtagcggtggcggaggatctgaattcgagatcgtgctgacacagagccctgccaccctgtctctgagccctggcgaaagagccaccctgagctgtagagccagccagagcgtgcggagctacctggcctggtatcagcagaagcctggacaggcccccagactgctgatctacgacgccagcaatcgggccacaggcatccccgccagattttctggctctggcagcggcaccgacttcaccctgacaatcagcagcctggaacccgaggacttcgccgtgtactactgccagcagcggagcaactggccccctacctttggacagggcaccaaggtggaaatcaagctcgaggacctgaagaacgtgttcccacctgaggtggccgtgttcgagcctagcgaggccgagatcagccacacccagaaagccaccctcgtgtgcctggctaccggcttctaccccgaccatgtggaactgtcttggtgggtcaacggcaaagaggtgcacagcggcgtgtgtaccgacccccagccactgaaagaacagcccgccctgaacgacagccggtactgcctgagcagcagactgagagtgtccgccaccttctggcagaacccccggaaccacttcagatgccaggtgcagttctacggcctgagcgagaacgacgagtggacccaggacagagccaagcccgtgacccagatcgtgtctgccgaagcctggggcagagccgatgatgtgattaagatccactggcaggaaaagaagtccaacaccatcctgggcagccaggaaggcaacaccatgaagaccaacgacacctacatgaagttcagctggctgaccgtgcccgagaagtccctggacaaagaacacagatgcatcgtgcggcacgaaaacaacaagaacggcgtggaccaggaaatcatcttcccacccatcaagaccgatgtgattacaatggaccccaaggacaactgctccaaggacgccaacgataccctgctgctccagctgaccaacaccagcgcctactacatgtacttgttgctgctgctgaagtccgtggtgtacttcgccatcatcacatgctgcctgctgcggagaaccgccttctgctgcaacggcgagaagtctagggccaagcgatctggatctggagcaacaaacttctcactactcaaacaagcaggtgacgtggaggagaatcccgggcctactagtatggactggatttggcgcatccttttccttgtcggcgctgctaccggcgcgcattccgggccccagctccagctgcaagagtctggacctggcctggtcaagcctagcgagacactgagcctgacctgtaccgtgtccggcgatagcatcagcagcggcgattactactggggctggatcagacagcctcctggcaaaggactggaatggatcggccacatctactacagcggcgtgacctactacaaccccagcctgaagtccagagtgaccatcagcgtggacaccagccggaaccagttctccctgaagctgtctagcgtgacagccgccgataccgccgtgtactactgcaccagagaggacagcagcaactggcggagtagaggccagggaacactggtcacagttagctctggatccggcggaggcggaagtggaggcggaggatctggcggcggaggctctttcgaacaactccaggtgcaggaatctggccccggactcgtgaagcccagcgagacactgagcctgacctgtaccgtgtccggcggcagcatcagcaacagctacttctcctggggctggatcagacagccccctggcaagggcctggaatggatcggcagcttctactacggcgagaaaacctactacaaccccagcctgaagtccagagccaccatcagcatcgacaccagcaagagccagttctccctgaagctgagcagcgtgacagccgccgacaccgccgtgtattattgccccagaggccccaccatgatccggggcgtgatcgactcttggggccagggaacactcgtgaccgtgtcctctacgcgtatccagaaccctgatcctgccgtgtaccagctgcgggatagcaagagcagcgacaagagcgtgtgtctgttcaccgacttcgacagccagaccaacgtgtcccagagcaaggactccgacgtgtacatcaccgataagtgcgtgctggacatgcggagcatggacttcaagagcaactccgccgtggcctggtccaacaagtccgatttcgcctgcgccaacgccttcaacaacagcattatccccgaggacacattcttcccaagccccgagagcagcgactccaccgaccacgtgaagcccaaagagacagagaacaccaagcagcccagcaagagctgccacaagcccaaggccatcgtgcacaccgagaaagtgaacatgatgagcctgaccgtgctgggcctgcggatgctgttcgccaaaaccgtggccgtgaacttcctgctgaccgccaagctgttcttcctc

SEQ ID NO: 7785 - DNA, 3012 bp, synthetic construct
  source 1..3012: mol_type = other DNA
atggccttaccagtgaccgccttgctcctgccgctggccttgctgctccacgccgccaggccggaagtgcagctggttgaatctggcggaggactggttcagcctggcggatctctgagactgtcttgtgccgccagcggcttcagcttcagcgacttttggatgagctgggtccgacaggcccctggcaaaggacttgaatgggtcgccacaatcagccaggccggcagcgagaaggactacgtggactctgtgaagggcagattcaccatcagccgggacaacgccaagaagtccctgtacctccagatgaacagcctgagagccgaggacaccgccgtgtactattgtgcctctggcgtgtacagcttcgactacagaggccagggcaccctggtcacagtctcttctggtaccggcggaggcggatctggcggcggaggtagcggtggcggaggatctgaattcgacatcgtgatgacccagacccccctgagcctgcctgtgacacctggcgagcctgccagcatctcctgcagaagcagcagaagcctgctggacagcgacgacggcaacacctacctggactggtatctgcagaaacccggccagagcccccaactgctgatctacaccctgagctacagagccagcggcgtgcccgatagattttccggctctggcagcggcaccgacttcaccctgaagatcagccgggtggaagccgaggacgtgggcgtgtactactgtatgcagcgggtggaatttcccatcaccttcggccagggcaccagactggaaatcaagagactcgaggacctgaagaacgtgttcccacctgaggtggccgtgttcgagcctagcgaggccgagatcagccacacccagaaagccaccctcgtgtgcctggctaccggcttctaccccgaccatgtggaactgtcttggtgggtcaacggcaaagaggtgcacagcggcgtgtgtaccgacccccagccactgaaagaacagcccgccctgaacgacagccggtactgcctgagcagcagactgagagtgtccgccaccttctggcagaacccccggaaccacttcagatgccaggtgcagttctacggcctgagcgagaacgacgagtggacccaggacagagccaagcccgtgacccagatcgtgtctgccgaagcctggggcagagccgatgatgtgattaagatccactggcaggaaaagaagtccaacaccatcctgggcagccaggaaggcaacaccatgaagaccaacgacacctacatgaagttcagctggctgaccgtgcccgagaagtccctggacaaagaacacagatgcatcgtgcggcacgaaaacaacaagaacggcgtggaccaggaaatcatcttcccacccatcaagaccgatgtgattacaatggaccccaaggacaactgctccaaggacgccaacgataccctgctgctccagctgaccaacaccagcgcctactacatgtacttgttgctgctgctgaagtccgtggtgtacttcgccatcatcacatgctgcctgctgcggagaaccgccttctgctgcaacggcgagaagtctagggccaagcgatctggatctggagcaacaaacttctcactactcaaacaagcaggtgacgtggaggagaatcccgggcctactagtatggactggatttggcgcatccttttccttgtcggcgctgctaccggcgcgcattccgggccccagctccagctgcaagagtctggacctggcctggtcaagcctagcgagacactgagcctgacctgtaccgtgtccggcgatagcatcagcagcggcgattactactggggctggatcagacagcctcctggcaaaggactggaatggatcggccacatctactacagcggcgtgacctactacaaccccagcctgaagtccagagtgaccatcagcgtggacaccagccggaaccagttctccctgaagctgtctagcgtgacagccgccgataccgccgtgtactactgcaccagagaggacagcagcaactggcggagtagaggccagggaacactggtcacagttagctctggatccggcggaggcggaagtggaggcggaggatctggcggcggaggctctttcgaacaggtgcaactggtggaatctggcgggggagtggtgcagcctggcagatccctgagactgagctgtgccgccagcggcttcatcttcagcagatacggaatgcactgggtgcgccaggcccctggcaagggactgaaatgggtggccgtgatttggtacgacggcagcaacaagctgtacgccgacagcgtgaagggccggttcaccatcagcagagacaacagcaagaacaccctgtacctgcagatgaacagcctgcgggccgaggacaccgccgtgtactattgcgccagagactactacgacaacagccggcaccactggggcttcgactattggggccagggaacccttgtgaccgtgtcctctacgcgtatccagaaccctgatcctgccgtgtaccagctgcgggatagcaagagcagcgacaagagcgtgtgtctgttcaccgacttcgacagccagaccaacgtgtcccagagcaaggactccgacgtgtacatcaccgataagtgcgtgctggacatgcggagcatggacttcaagagcaactccgccgtggcctggtccaacaagtccgatttcgcctgcgccaacgccttcaacaacagcattatccccgaggacacattcttcccaagccccgagagcagcgactccaccgaccacgtgaagcccaaagagacagagaacaccaagcagcccagcaagagctgccacaagcccaaggccatcgtgcacaccgagaaagtgaacatgatgagcctgaccgtgctgggcctgcggatgctgttcgccaaaaccgtggccgtgaacttcctgctgaccgccaagctgttcttcctc

SEQ ID NO: 7786 - DNA, 2982 bp, synthetic construct
  source 1..2982: mol_type = other DNA
atggccttaccagtgaccgccttgctcctgccgctggccttgctgctccacgccgccaggccggaagtgcagctggttgaatctggcggaggactggttcagcctggcggatctctgagactgtcttgtgccgccagcggcttcagcttcagcgacttttggatgagctgggtccgacaggcccctggcaaaggacttgaatgggtcgccacaatcagccaggccggcagcgagaaggactacgtggactctgtgaagggcagattcaccatcagccgggacaacgccaagaagtccctgtacctccagatgaacagcctgagagccgaggacaccgccgtgtactattgtgcctctggcgtgtacagcttcgactacagaggccagggcaccctggtcacagtctcttctggtaccggcggaggcggatctggcggcggaggtagcggtggcggaggatctgaattcgagatccagatgacccagagccccagcagcatgtctgccagcctgggcgacaccatcaccatcacatgccaggccacccaggacatcttcaagaacctgaactggtatcagcagaagcccggcaagccccccagcctgctgatctactatgccaccgaactggccgagggcgtgcccagcagattttctggcagcggcagcggctccgactacagcctgaccatcagcaacctggaaagcgaggacttcgccgcctactactgcctccagttcttcgagttcccattcaccttcggctccggcaccaagctggaaatgaagctcgaggacctgaagaacgtgttcccacctgaggtggccgtgttcgagcctagcgaggccgagatcagccacacccagaaagccaccctcgtgtgcctggctaccggcttctaccccgaccatgtggaactgtcttggtgggtcaacggcaaagaggtgcacagcggcgtgtgtaccgacccccagccactgaaagaacagcccgccctgaacgacagccggtactgcctgagcagcagactgagagtgtccgccaccttctggcagaacccccggaaccacttcagatgccaggtgcagttctacggcctgagcgagaacgacgagtggacccaggacagagccaagcccgtgacccagatcgtgtctgccgaagcctggggcagagccgatgatgtgattaagatccactggcaggaaaagaagtccaacaccatcctgggcagccaggaaggcaacaccatgaagaccaacgacacctacatgaagttcagctggctgaccgtgcccgagaagtccctggacaaagaacacagatgcatcgtgcggcacgaaaacaacaagaacggcgtggaccaggaaatcatcttcccacccatcaagaccgatgtgattacaatggaccccaaggacaactgctccaaggacgccaacgataccctgctgctccagctgaccaacaccagcgcctactacatgtacttgttgctgctgctgaagtccgtggtgtacttcgccatcatcacatgctgcctgctgcggagaaccgccttctgctgcaacggcgagaagtctagggccaagcgatctggatctggagcaacaaacttctcactactcaaacaagcaggtgacgtggaggagaatcccgggcctactagtatggactggatttggcgcatccttttccttgtcggcgctgctaccggcgcgcattccgggccccagctccagctgcaagagtctggacctggcctggtcaagcctagcgagacactgagcctgacctgtaccgtgtccggcgatagcatcagcagcggcgattactactggggctggatcagacagcctcctggcaaaggactggaatggatcggccacatctactacagcggcgtgacctactacaaccccagcctgaagtccagagtgaccatcagcgtggacaccagccggaaccagttctccctgaagctgtctagcgtgacagccgccgataccgccgtgtactactgcaccagagaggacagcagcaactggcggagtagaggccagggaacactggtcacagttagctctggatccggcggaggcggaagtggaggcggaggatctggcggcggaggctctttcgaacaggtgcaactccagcagtctggcgctgagcttgtgcggcctggcacctctgtgaaggtgtcctgtaaagccagcggctacgtgttcaccaactactggatcgagtggatcaagcagcggccaggccagggcctggaatggatcggcgtgatgaatccaggcagcggcgagacaacctacaacgagaagttcaagggcaaggccaccctgaccgccgacaagagcagcagcacagcctacatgcaactgtcctccctgaccagcgtggacagcgccgtgtacttctgcgccagggaccacgaccgggactactacgctatggactactggggccagggcaccagcgtgaccgtgtcatctacgcgtatccagaaccctgatcctgccgtgtaccagctgcgggatagcaagagcagcgacaagagcgtgtgtctgttcaccgacttcgacagccagaccaacgtgtcccagagcaaggactccgacgtgtacatcaccgataagtgcgtgctggacatgcggagcatggacttcaagagcaactccgccgtggcctggtccaacaagtccgatttcgcctgcgccaacgccttcaacaacagcattatccccgaggacacattcttcccaagccccgagagcagcgactccaccgaccacgtgaagcccaaagagacagagaacaccaagcagcccagcaagagctgccacaagcccaaggccatcgtgcacaccgagaaagtgaacatgatgagcctgaccgtgctgggcctgcggatgctgttcgccaaaaccgtggccgtgaacttcctgctgaccgccaagctgttcttcctc

SEQ ID NO: 7787 - DNA, 2973 bp, synthetic construct
  source 1..2973: mol_type = other DNA
atggccttaccagtgaccgccttgctcctgccgctggccttgctgctccacgccgccaggccggaagtgcagctggttgaatctggcggaggactggttcagcctggcggatctctgagactgtcttgtgccgccagcggcttcagcttcagcgacttttggatgagctgggtccgacaggcccctggcaaaggacttgaatgggtcgccacaatcagccaggccggcagcgagaaggactacgtggactctgtgaagggcagattcaccatcagccgggacaacgccaagaagtccctgtacctccagatgaacagcctgagagccgaggacaccgccgtgtactattgtgcctctggcgtgtacagcttcgactacagaggccagggcaccctggtcacagtctcttctggtaccggcggaggcggatctggcggcggaggtagcggtggcggaggatctgaattcgacatcctgctgacacagagccccgccatcctgtccgtgtctccaggcgagagagtgtcctttagctgccgggccagccagaacatcggcaccagcatccactggtatcagcagcggaccaacggcagccccagactgctgattaagtacgccagcgagtccgtgtccggcatccccagcagattttctggcagcggctccggcaccgacttcaccctgagcatcaacagcgtggaaagcgaggacattgccgactactactgccagcacaccaatagctggcccaccacctttggcggaggcaccaagctggaaatcaagagactcgaggacctgaagaacgtgttcccacctgaggtggccgtgttcgagcctagcgaggccgagatcagccacacccagaaagccaccctcgtgtgcctggctaccggcttctaccccgaccatgtggaactgtcttggtgggtcaacggcaaagaggtgcacagcggcgtgtgtaccgacccccagccactgaaagaacagcccgccctgaacgacagccggtactgcctgagcagcagactgagagtgtccgccaccttctggcagaacccccggaaccacttcagatgccaggtgcagttctacggcctgagcgagaacgacgagtggacccaggacagagccaagcccgtgacccagatcgtgtctgccgaagcctggggcagagccgatgatgtgattaagatccactggcaggaaaagaagtccaacaccatcctgggcagccaggaaggcaacaccatgaagaccaacgacacctacatgaagttcagctggctgaccgtgcccgagaagtccctggacaaagaacacagatgcatcgtgcggcacgaaaacaacaagaacggcgtggaccaggaaatcatcttcccacccatcaagaccgatgtgattacaatggaccccaaggacaactgctccaaggacgccaacgataccctgctgctccagctgaccaacaccagcgcctactacatgtacttgttgctgctgctgaagtccgtggtgtacttcgccatcatcacatgctgcctgctgcggagaaccgccttctgctgcaacggcgagaagtctagggccaagcgatctggatctggagcaacaaacttctcactactcaaacaagcaggtgacgtggaggagaatcccgggcctactagtatggactggatttggcgcatccttttccttgtcggcgctgctaccggcgcgcattccgggccccagctccagctgcaagagtctggacctggcctggtcaagcctagcgagacactgagcctgacctgtaccgtgtccggcgatagcatcagcagcggcgattactactggggctggatcagacagcctcctggcaaaggactggaatggatcggccacatctactacagcggcgtgacctactacaaccccagcctgaagtccagagtgaccatcagcgtggacaccagccggaaccagttctccctgaagctgtctagcgtgacagccgccgataccgccgtgtactactgcaccagagaggacagcagcaactggcggagtagaggccagggaacactggtcacagttagctctggatccggcggaggcggaagtggaggcggaggatctggcggcggaggctctttcgaacaggtgcaactccagcagtccgacgccgagcttgtgaagcctggcgcttccgtgaagattagctgcaaggccagcggctacaccttcaccgaccacgccattcactgggtcaagcagaagcccgagcagggcctggaatggatcggctacttcagccccggcaacggcgacatcaagtacaacgagaagttcaagggcaaggccaccctgaccgccgacaagagcagcagcacagcctacatgcaactgaacagcctgaccagcgaggactccgccgtgtacttctgcaagcggagctacggcaactacgactactggggccagggcaccacactgaccgtgtctagtacgcgtatccagaaccctgatcctgccgtgtaccagctgcgggatagcaagagcagcgacaagagcgtgtgtctgttcaccgacttcgacagccagaccaacgtgtcccagagcaaggactccgacgtgtacatcaccgataagtgcgtgctggacatgcggagcatggacttcaagagcaactccgccgtggcctggtccaacaagtccgatttcgcctgcgccaacgccttcaacaacagcattatccccgaggacacattcttcccaagccccgagagcagcgactccaccgaccacgtgaagcccaaagagacagagaacaccaagcagcccagcaagagctgccacaagcccaaggccatcgtgcacaccgagaaagtgaacatgatgagcctgaccgtgctgggcctgcggatgctgttcgccaaaaccgtggccgtgaacttcctgctgaccgccaagctgttcttcctc

SEQ ID NO: 7788 - DNA, 2988 bp, synthetic construct
  source 1..2988: mol_type = other DNA
atggccttaccagtgaccgccttgctcctgccgctggccttgctgctccacgccgccaggccggaagtgcagctggttgaatctggcggaggactggttcagcctggcggatctctgagactgtcttgtgccgccagcggcttcagcttcagcgacttttggatgagctgggtccgacaggcccctggcaaaggacttgaatgggtcgccacaatcagccaggccggcagcgagaaggactacgtggactctgtgaagggcagattcaccatcagccgggacaacgccaagaagtccctgtacctccagatgaacagcctgagagccgaggacaccgccgtgtactattgtgcctctggcgtgtacagcttcgactacagaggccagggcaccctggtcacagtctcttctggtaccggcggaggcggatctggcggcggaggtagcggtggcggaggatctgaattcgacatcgtgatgacccagagccccgatagcctggccgtgtctctgggagagagagccaccatcaactgcaagagcagccagagcctgctgaacagcggcgaccagaagaactacctgacctggtatcagcagaagcccggccagccccccaagctgctgatctactgggccagcaccagagaaagcggcgtgcccgatagattcagcggcagcggaagtggcaccgacttcaccctgaccatcagttctcttcaggccgaggacgtggccgtgtactactgccagaacgactacagctaccccctgaccttcggccagggcaccaaggtggaaatcaagctcgaggacctgaagaacgtgttcccacctgaggtggccgtgttcgagcctagcgaggccgagatcagccacacccagaaagccaccctcgtgtgcctggctaccggcttctaccccgaccatgtggaactgtcttggtgggtcaacggcaaagaggtgcacagcggcgtgtgtaccgacccccagccactgaaagaacagcccgccctgaacgacagccggtactgcctgagcagcagactgagagtgtccgccaccttctggcagaacccccggaaccacttcagatgccaggtgcagttctacggcctgagcgagaacgacgagtggacccaggacagagccaagcccgtgacccagatcgtgtctgccgaagcctggggcagagccgatgatgtgattaagatccactggcaggaaaagaagtccaacaccatcctgggcagccaggaaggcaacaccatgaagaccaacgacacctacatgaagttcagctggctgaccgtgcccgagaagtccctggacaaagaacacagatgcatcgtgcggcacgaaaacaacaagaacggcgtggaccaggaaatcatcttcccacccatcaagaccgatgtgattacaatggaccccaaggacaactgctccaaggacgccaacgataccctgctgctccagctgaccaacaccagcgcctactacatgtacttgttgctgctgctgaagtccgtggtgtacttcgccatcatcacatgctgcctgctgcggagaaccgccttctgctgcaacggcgagaagtctagggccaagcgatctggatctggagcaacaaacttctcactactcaaacaagcaggtgacgtggaggagaatcccgggcctactagtatggactggatttggcgcatccttttccttgtcggcgctgctaccggcgcgcattccgggccccagctccagctgcaagagtctggacctggcctggtcaagcctagcgagacactgagcctgacctgtaccgtgtccggcgatagcatcagcagcggcgattactactggggctggatcagacagcctcctggcaaaggactggaatggatcggccacatctactacagcggcgtgacctactacaaccccagcctgaagtccagagtgaccatcagcgtggacaccagccggaaccagttctccctgaagctgtctagcgtgacagccgccgataccgccgtgtactactgcaccagagaggacagcagcaactggcggagtagaggccagggaacactggtcacagttagctctggatccggcggaggcggaagtggaggcggaggatctggcggcggaggctctttcgaacaggtgcagctggtgcagtctggggccgaagtgaagaaaaccggcagcagcgtgaaggtgtcctgcaaggccagcggctacacctttaccgaccacgccattcacgtgtggcggcaggctccaggacaggccctggaatggatgggccacttcagccccggcaacaccgacatcaagtacaacgacaagttcaagggcagagtgaccctgaccgtggaccgcagcatgagcaccgcctacatggaactgagcagcctgcggagcgaggacaccgccatgtactattgcaagaccagcaccttctttttcgactactggggccagggaacaatggtcaccgtgtccagcacgcgtatccagaaccctgatcctgccgtgtaccagctgcgggatagcaagagcagcgacaagagcgtgtgtctgttcaccgacttcgacagccagaccaacgtgtcccagagcaaggactccgacgtgtacatcaccgataagtgcgtgctggacatgcggagcatggacttcaagagcaactccgccgtggcctggtccaacaagtccgatttcgcctgcgccaacgccttcaacaacagcattatccccgaggacacattcttcccaagccccgagagcagcgactccaccgaccacgtgaagcccaaagagacagagaacaccaagcagcccagcaagagctgccacaagcccaaggccatcgtgcacaccgagaaagtgaacatgatgagcctgaccgtgctgggcctgcggatgctgttcgccaaaaccgtggccgtgaacttcctgctgaccgccaagctgttcttcctc

SEQ ID NO: 7789 - DNA, 2985 bp, synthetic construct
  source 1..2985: mol_type = other DNA
atggccttaccagtgaccgccttgctcctgccgctggccttgctgctccacgccgccaggccggaagtgcagctggttgaatctggcggaggactggttcagcctggcggatctctgagactgtcttgtgccgccagcggcttcagcttcagcgacttttggatgagctgggtccgacaggcccctggcaaaggacttgaatgggtcgccacaatcagccaggccggcagcgagaaggactacgtggactctgtgaagggcagattcaccatcagccgggacaacgccaagaagtccctgtacctccagatgaacagcctgagagccgaggacaccgccgtgtactattgtgcctctggcgtgtacagcttcgactacagaggccagggcaccctggtcacagtctcttctggtaccggcggaggcggatctggcggcggaggtagcggtggcggaggatctgaattcgacatccagatgacccagagccccagcagcctgtctgccagcgtgggcgacagagtgaccatcacatgcaaggccagccaggacgtgtccattgccgtggcctggtatcagcagaagcccggcaaggcccccaaggtgctgatctacagcgccagctacagatacaccggcgtgcccgacagattcagcggctctggcagcggcaccgacttcaccttcaccatcagctccctccagcccgaggatattgccgtgtactactgccagcagcactacatcacccccctgacctttggcggaggcaccaaggtggaaatcaagctcgaggacctgaagaacgtgttcccacctgaggtggccgtgttcgagcctagcgaggccgagatcagccacacccagaaagccaccctcgtgtgcctggctaccggcttctaccccgaccatgtggaactgtcttggtgggtcaacggcaaagaggtgcacagcggcgtgtgtaccgacccccagccactgaaagaacagcccgccctgaacgacagccggtactgcctgagcagcagactgagagtgtccgccaccttctggcagaacccccggaaccacttcagatgccaggtgcagttctacggcctgagcgagaacgacgagtggacccaggacagagccaagcccgtgacccagatcgtgtctgccgaagcctggggcagagccgatgatgtgattaagatccactggcaggaaaagaagtccaacaccatcctgggcagccaggaaggcaacaccatgaagaccaacgacacctacatgaagttcagctggctgaccgtgcccgagaagtccctggacaaagaacacagatgcatcgtgcggcacgaaaacaacaagaacggcgtggaccaggaaatcatcttcccacccatcaagaccgatgtgattacaatggaccccaaggacaactgctccaaggacgccaacgataccctgctgctccagctgaccaacaccagcgcctactacatgtacttgttgctgctgctgaagtccgtggtgtacttcgccatcatcacatgctgcctgctgcggagaaccgccttctgctgcaacggcgagaagtctagggccaagcgatctggatctggagcaacaaacttctcactactcaaacaagcaggtgacgtggaggagaatcccgggcctactagtatggactggatttggcgcatccttttccttgtcggcgctgctaccggcgcgcattccgggccccagctccagctgcaagagtctggacctggcctggtcaagcctagcgagacactgagcctgacctgtaccgtgtccggcgatagcatcagcagcggcgattactactggggctggatcagacagcctcctggcaaaggactggaatggatcggccacatctactacagcggcgtgacctactacaaccccagcctgaagtccagagtgaccatcagcgtggacaccagccggaaccagttctccctgaagctgtctagcgtgacagccgccgataccgccgtgtactactgcaccagagaggacagcagcaactggcggagtagaggccagggaacactggtcacagttagctctggatccggcggaggcggaagtggaggcggaggatctggcggcggaggctctttcgaacagatccaactggtgcagagcggccacgaagtgaagaaacctggggccagcgtgaaggtgtcctgcaaagccagcggctacacctttaccaactacggcatgaactgggtgcgccaggcccctggacagggcctggaatggatgggctggatcaacaccaagaccggcgagcccacctacgccgaagagttcaagggcagattcgtgttcagcctggaaaccagcgcctccaccgcctacctccagatcagctctctgaaggccgaggacaccgccatgtacttttgcggcagaggcggctacggcagcagctactggtacttcgatgtgtggggccagggcaccaccgtgaccgtgtcatctacgcgtatccagaaccctgatcctgccgtgtaccagctgcgggatagcaagagcagcgacaagagcgtgtgtctgttcaccgacttcgacagccagaccaacgtgtcccagagcaaggactccgacgtgtacatcaccgataagtgcgtgctggacatgcggagcatggacttcaagagcaactccgccgtggcctggtccaacaagtccgatttcgcctgcgccaacgccttcaacaacagcattatccccgaggacacattcttcccaagccccgagagcagcgactccaccgaccacgtgaagcccaaagagacagagaacaccaagcagcccagcaagagctgccacaagcccaaggccatcgtgcacaccgagaaagtgaacatgatgagcctgaccgtgctgggcctgcggatgctgttcgccaaaaccgtggccgtgaacttcctgctgaccgccaagctgttcttcctc

SEQ ID NO: 7790 - DNA, 2991 bp, synthetic construct
  source 1..2991: mol_type = other DNA
atggccttaccagtgaccgccttgctcctgccgctggccttgctgctccacgccgccaggccggaagtgcagctggttgaatctggcggaggactggttcagcctggcggatctctgagactgtcttgtgccgccagcggcttcagcttcagcgacttttggatgagctgggtccgacaggcccctggcaaaggacttgaatgggtcgccacaatcagccaggccggcagcgagaaggactacgtggactctgtgaagggcagattcaccatcagccgggacaacgccaagaagtccctgtacctccagatgaacagcctgagagccgaggacaccgccgtgtactattgtgcctctggcgtgtacagcttcgactacagaggccagggcaccctggtcacagtctcttctggtaccggcggaggcggatctggcggcggaggtagcggtggcggaggatctgaattcgacatcgtgatgacccagagccccgatagcctggccgtgtctctgggagagagagccaccatcaactgccgggccagcaagagcgtgtccaccagcggctacagctacatgcactggtatcagcagaagcccggccagccccccaagctgctgatctacctggcctccaacctggaaagcggcgtgcccgatagattcagcggcagcggctctggcaccgacttcaccctgaccatcagttctcttcaggccgaggacgtggccgtgtactactgccagcacagcagagagctgccctacaccttcggccagggcaccaagctggaaatcaagctcgaggacctgaagaacgtgttcccacctgaggtggccgtgttcgagcctagcgaggccgagatcagccacacccagaaagccaccctcgtgtgcctggctaccggcttctaccccgaccatgtggaactgtcttggtgggtcaacggcaaagaggtgcacagcggcgtgtgtaccgacccccagccactgaaagaacagcccgccctgaacgacagccggtactgcctgagcagcagactgagagtgtccgccaccttctggcagaacccccggaaccacttcagatgccaggtgcagttctacggcctgagcgagaacgacgagtggacccaggacagagccaagcccgtgacccagatcgtgtctgccgaagcctggggcagagccgatgatgtgattaagatccactggcaggaaaagaagtccaacaccatcctgggcagccaggaaggcaacaccatgaagaccaacgacacctacatgaagttcagctggctgaccgtgcccgagaagtccctggacaaagaacacagatgcatcgtgcggcacgaaaacaacaagaacggcgtggaccaggaaatcatcttcccacccatcaagaccgatgtgattacaatggaccccaaggacaactgctccaaggacgccaacgataccctgctgctccagctgaccaacaccagcgcctactacatgtacttgttgctgctgctgaagtccgtggtgtacttcgccatcatcacatgctgcctgctgcggagaaccgccttctgctgcaacggcgagaagtctagggccaagcgatctggatctggagcaacaaacttctcactactcaaacaagcaggtgacgtggaggagaatcccgggcctactagtatggactggatttggcgcatccttttccttgtcggcgctgctaccggcgcgcattccgggccccagctccagctgcaagagtctggacctggcctggtcaagcctagcgagacactgagcctgacctgtaccgtgtccggcgatagcatcagcagcggcgattactactggggctggatcagacagcctcctggcaaaggactggaatggatcggccacatctactacagcggcgtgacctactacaaccccagcctgaagtccagagtgaccatcagcgtggacaccagccggaaccagttctccctgaagctgtctagcgtgacagccgccgataccgccgtgtactactgcaccagagaggacagcagcaactggcggagtagaggccagggaacactggtcacagttagctctggatccggcggaggcggaagtggaggcggaggatctggcggcggaggctctttcgaacaggtgcaactccaggaatctggccctggccttgtgaagcccagcgagacactgagcctgacctgtaccgtgtccggcggcagcatcagctcttacggcgtgcactggattcggcagcctccaggcaagggcctggaatggatcggcgtgatctggacctccggcgtgaccgactacaacagcgccctgatgggcagagtgaccatctccgtggacaccagcaagaaccagttcagcctgaagctgagcagcgtgacagccgccgataccgccgtgtattattgcgccagagatggcgactacgaccgctacacaatggactactggggccagggaacccttgtgaccgtgtcctctacgcgtatccagaaccctgatcctgccgtgtaccagctgcgggatagcaagagcagcgacaagagcgtgtgtctgttcaccgacttcgacagccagaccaacgtgtcccagagcaaggactccgacgtgtacatcaccgataagtgcgtgctggacatgcggagcatggacttcaagagcaactccgccgtggcctggtccaacaagtccgatttcgcctgcgccaacgccttcaacaacagcattatccccgaggacacattcttcccaagccccgagagcagcgactccaccgaccacgtgaagcccaaagagacagagaacaccaagcagcccagcaagagctgccacaagcccaaggccatcgtgcacaccgagaaagtgaacatgatgagcctgaccgtgctgggcctgcggatgctgttcgccaaaaccgtggccgtgaacttcctgctgaccgccaagctgttcttcctc

SEQ ID NO: 7791 - DNA, 2991 bp, synthetic construct
  source 1..2991: mol_type = other DNA
atggccttaccagtgaccgccttgctcctgccgctggccttgctgctccacgccgccaggccggaagtgcagctggttgaatctggcggaggactggttcagcctggcggatctctgagactgtcttgtgccgccagcggcttcagcttcagcgacttttggatgagctgggtccgacaggcccctggcaaaggacttgaatgggtcgccacaatcagccaggccggcagcgagaaggactacgtggactctgtgaagggcagattcaccatcagccgggacaacgccaagaagtccctgtacctccagatgaacagcctgagagccgaggacaccgccgtgtactattgtgcctctggcgtgtacagcttcgactacagaggccagggcaccctggtcacagtctcttctggtaccggcggaggcggatctggcggcggaggtagcggtggcggaggatctgaattcgacatccagatgacccagagccccagcagcctgtctgccagcgtgggcgacagagtgaccatcacctgtagagccagccagagcatcggcaccagcctgcactggtatcagcagaagcctggcaaggcccccaagctgctgattaagttcgccagcagactgcagagcggcgtgcccagcagattttctggcagcggctccggcaccgacttcaccctgacaatcagctccctgcagcccgaggacttcgccacctactactgccagcagagccccggcttccctccaacctttggacagggcaccaagctggaaatcaagcggctcgaggacctgaagaacgtgttcccacctgaggtggccgtgttcgagcctagcgaggccgagatcagccacacccagaaagccaccctcgtgtgcctggctaccggcttctaccccgaccatgtggaactgtcttggtgggtcaacggcaaagaggtgcacagcggcgtgtgtaccgacccccagccactgaaagaacagcccgccctgaacgacagccggtactgcctgagcagcagactgagagtgtccgccaccttctggcagaacccccggaaccacttcagatgccaggtgcagttctacggcctgagcgagaacgacgagtggacccaggacagagccaagcccgtgacccagatcgtgtctgccgaagcctggggcagagccgatgatgtgattaagatccactggcaggaaaagaagtccaacaccatcctgggcagccaggaaggcaacaccatgaagaccaacgacacctacatgaagttcagctggctgaccgtgcccgagaagtccctggacaaagaacacagatgcatcgtgcggcacgaaaacaacaagaacggcgtggaccaggaaatcatcttcccacccatcaagaccgatgtgattacaatggaccccaaggacaactgctccaaggacgccaacgataccctgctgctccagctgaccaacaccagcgcctactacatgtacttgttgctgctgctgaagtccgtggtgtacttcgccatcatcacatgctgcctgctgcggagaaccgccttctgctgcaacggcgagaagtctagggccaagcgatctggatctggagcaacaaacttctcactactcaaacaagcaggtgacgtggaggagaatcccgggcctactagtatggactggatttggcgcatccttttccttgtcggcgctgctaccggcgcgcattccgggccccagctccagctgcaagagtctggacctggcctggtcaagcctagcgagacactgagcctgacctgtaccgtgtccggcgatagcatcagcagcggcgattactactggggctggatcagacagcctcctggcaaaggactggaatggatcggccacatctactacagcggcgtgacctactacaaccccagcctgaagtccagagtgaccatcagcgtggacaccagccggaaccagttctccctgaagctgtctagcgtgacagccgccgataccgccgtgtactactgcaccagagaggacagcagcaactggcggagtagaggccagggaacactggtcacagttagctctggatccggcggaggcggaagtggaggcggaggatctggcggcggaggctctttcgaacaggtgcaactggtggaatctggcggcggacttgtgaagccaggcggcagcctgagactgagctgtgccgccagcggcttcagcatcaccaccagcggctactactggacctggatcagacagttccccggcaagggcctggaatggatgggctacatcggctacaacagcaagacctactacaaccccgccctgaagtcccggatcaccatcagcagagacaacgccaagaacagcctgtacctgcagatgaactccctgagagccgaggataccgccgtgtactactgcgccagatccctgtacggcggctacaaggacgccttcgatagctggggccagggaacccttgtgaccgtgtctagcacgcgtatccagaaccctgatcctgccgtgtaccagctgcgggatagcaagagcagcgacaagagcgtgtgtctgttcaccgacttcgacagccagaccaacgtgtcccagagcaaggactccgacgtgtacatcaccgataagtgcgtgctggacatgcggagcatggacttcaagagcaactccgccgtggcctggtccaacaagtccgatttcgcctgcgccaacgccttcaacaacagcattatccccgaggacacattcttcccaagccccgagagcagcgactccaccgaccacgtgaagcccaaagagacagagaacaccaagcagcccagcaagagctgccacaagcccaaggccatcgtgcacaccgagaaagtgaacatgatgagcctgaccgtgctgggcctgcggatgctgttcgccaaaaccgtggccgtgaacttcctgctgaccgccaagctgttcttcctc

SEQ ID NO: 7792 - DNA, 3006 bp, synthetic construct
  source 1..3006: mol_type = other DNA
atggccttaccagtgaccgccttgctcctgccgctggccttgctgctccacgccgccaggccggaagtgcagctggttgaatctggcggaggactggttcagcctggcggatctctgagactgtcttgtgccgccagcggcttcagcttcagcgacttttggatgagctgggtccgacaggcccctggcaaaggacttgaatgggtcgccacaatcagccaggccggcagcgagaaggactacgtggactctgtgaagggcagattcaccatcagccgggacaacgccaagaagtccctgtacctccagatgaacagcctgagagccgaggacaccgccgtgtactattgtgcctctggcgtgtacagcttcgactacagaggccagggcaccctggtcacagtctcttctggtaccggcggaggcggatctggcggcggaggtagcggtggcggaggatctgaattcgacgagatcgtgctgacccagagccctctgagcctgcctgtgacacctggcgagcctgccagcatctcctgtagaagcagccagagcctgctgcacagcatcggctacaactacctggactggtatctccagaagcccggccagagcccccaactgctgatctacctgggcagcaacagagccagcggcgtgcccgatagattttccggcagcggctccggcaccgacttcaccctgaagatcagccgggtggaagccgaggacgtgggcgtgtactactgtatgcaggccctccagacccccctgacctttggcggaggcaccaaggtggaaatcaagcggctcgaggacctgaagaacgtgttcccacctgaggtggccgtgttcgagcctagcgaggccgagatcagccacacccagaaagccaccctcgtgtgcctggctaccggcttctaccccgaccatgtggaactgtcttggtgggtcaacggcaaagaggtgcacagcggcgtgtgtaccgacccccagccactgaaagaacagcccgccctgaacgacagccggtactgcctgagcagcagactgagagtgtccgccaccttctggcagaacccccggaaccacttcagatgccaggtgcagttctacggcctgagcgagaacgacgagtggacccaggacagagccaagcccgtgacccagatcgtgtctgccgaagcctggggcagagccgatgatgtgattaagatccactggcaggaaaagaagtccaacaccatcctgggcagccaggaaggcaacaccatgaagaccaacgacacctacatgaagttcagctggctgaccgtgcccgagaagtccctggacaaagaacacagatgcatcgtgcggcacgaaaacaacaagaacggcgtggaccaggaaatcatcttcccacccatcaagaccgatgtgattacaatggaccccaaggacaactgctccaaggacgccaacgataccctgctgctccagctgaccaacaccagcgcctactacatgtacttgttgctgctgctgaagtccgtggtgtacttcgccatcatcacatgctgcctgctgcggagaaccgccttctgctgcaacggcgagaagtctagggccaagcgatctggatctggagcaacaaacttctcactactcaaacaagcaggtgacgtggaggagaatcccgggcctactagtatggactggatttggcgcatccttttccttgtcggcgctgctaccggcgcgcattccgggccccagctccagctgcaagagtctggacctggcctggtcaagcctagcgagacactgagcctgacctgtaccgtgtccggcgatagcatcagcagcggcgattactactggggctggatcagacagcctcctggcaaaggactggaatggatcggccacatctactacagcggcgtgacctactacaaccccagcctgaagtccagagtgaccatcagcgtggacaccagccggaaccagttctccctgaagctgtctagcgtgacagccgccgataccgccgtgtactactgcaccagagaggacagcagcaactggcggagtagaggccagggaacactggtcacagttagctctggatccggcggaggcggaagtggaggcggaggatctggcggcggaggctctttcgaagaagtgcaactggtggaaagcggaggcggcgtggtgcagcctggaagaagcctgagactgagctgtgccgccagcggcttcaccttccggtcctacggaatgcactgggtgcgccaggcccctggcaaaggactggaatgggtggccgtgatctcctacgacggctccaacaagtactacaccgacagcgtgaacggcagattcaccatcagcagagacaacagcaagaacaccctgtacctccagatgaacagcctgcgggccgaggacaccgccgtgtactattgtgctagaggcggaggctactacgagacaagcggccctgattactggggccagggcacactcgtgaccgtgtctagtacgcgtatccagaaccctgatcctgccgtgtaccagctgcgggatagcaagagcagcgacaagagcgtgtgtctgttcaccgacttcgacagccagaccaacgtgtcccagagcaaggactccgacgtgtacatcaccgataagtgcgtgctggacatgcggagcatggacttcaagagcaactccgccgtggcctggtccaacaagtccgatttcgcctgcgccaacgccttcaacaacagcattatccccgaggacacattcttcccaagccccgagagcagcgactccaccgaccacgtgaagcccaaagagacagagaacaccaagcagcccagcaagagctgccacaagcccaaggccatcgtgcacaccgagaaagtgaacatgatgagcctgaccgtgctgggcctgcggatgctgttcgccaaaaccgtggccgtgaacttcctgctgaccgccaagctgttcttcctc

SEQ ID NO: 7793 - DNA, 3000 bp, synthetic construct
  source 1..3000: mol_type = other DNA
atggccttaccagtgaccgccttgctcctgccgctggccttgctgctccacgccgccaggccggaagtgcagctggttgaatctggcggaggactggttcagcctggcggatctctgagactgtcttgtgccgccagcggcttcagcttcagcgacttttggatgagctgggtccgacaggcccctggcaaaggacttgaatgggtcgccacaatcagccaggccggcagcgagaaggactacgtggactctgtgaagggcagattcaccatcagccgggacaacgccaagaagtccctgtacctccagatgaacagcctgagagccgaggacaccgccgtgtactattgtgcctctggcgtgtacagcttcgactacagaggccagggcaccctggtcacagtctcttctggtaccggcggaggcggatctggcggcggaggtagcggtggcggaggatctgaattcgacgacgtcgtgatgacccagagccctctgagcctgcctgtgacacctggcgagcctgccagcatctcctgtagaagcagccagagcctgctgcacagcatcggctacaactacctgcactggtttctccagaagcccggccagagcccccaactgctgatctacctgggcagcaacagagccagcggcgtgcccgatagattttccggcagcggctccggcaccgacttcaccctgaagatcagccgggtggaagccgaggacgtgggcgtgtactactgtatgcaggccctccagacccctcccacctttggacagggcaccagactggaaatcaagcggctcgaggacctgaagaacgtgttcccacctgaggtggccgtgttcgagcctagcgaggccgagatcagccacacccagaaagccaccctcgtgtgcctggctaccggcttctaccccgaccatgtggaactgtcttggtgggtcaacggcaaagaggtgcacagcggcgtgtgtaccgacccccagccactgaaagaacagcccgccctgaacgacagccggtactgcctgagcagcagactgagagtgtccgccaccttctggcagaacccccggaaccacttcagatgccaggtgcagttctacggcctgagcgagaacgacgagtggacccaggacagagccaagcccgtgacccagatcgtgtctgccgaagcctggggcagagccgatgatgtgattaagatccactggcaggaaaagaagtccaacaccatcctgggcagccaggaaggcaacaccatgaagaccaacgacacctacatgaagttcagctggctgaccgtgcccgagaagtccctggacaaagaacacagatgcatcgtgcggcacgaaaacaacaagaacggcgtggaccaggaaatcatcttcccacccatcaagaccgatgtgattacaatggaccccaaggacaactgctccaaggacgccaacgataccctgctgctccagctgaccaacaccagcgcctactacatgtacttgttgctgctgctgaagtccgtggtgtacttcgccatcatcacatgctgcctgctgcggagaaccgccttctgctgcaacggcgagaagtctagggccaagcgatctggatctggagcaacaaacttctcactactcaaacaagcaggtgacgtggaggagaatcccgggcctactagtatggactggatttggcgcatccttttccttgtcggcgctgctaccggcgcgcattccgggccccagctccagctgcaagagtctggacctggcctggtcaagcctagcgagacactgagcctgacctgtaccgtgtccggcgatagcatcagcagcggcgattactactggggctggatcagacagcctcctggcaaaggactggaatggatcggccacatctactacagcggcgtgacctactacaaccccagcctgaagtccagagtgaccatcagcgtggacaccagccggaaccagttctccctgaagctgtctagcgtgacagccgccgataccgccgtgtactactgcaccagagaggacagcagcaactggcggagtagaggccagggaacactggtcacagttagctctggatccggcggaggcggaagtggaggcggaggatctggcggcggaggctctttcgaacaactccaactccaggaaagcggccctggcctcgtgaagcctagcggcacactgagcctgacatgtgccgtgtctggcggcagcatcagcagcagcaactggtggtcttgggtgcgccagcctcctggcaagggcctggaatggatcggcgaaatctaccacagcggcagcaccaactacaaccccagcctgaagtccagagtgaccatcagcgtggacaagagcaagaaccagttctccctgaagctgagcagcgtgacagccgccgataccgccgtgtactattgcgtgggcagcccctacggcgactacgtgctggattattggggccagggcaccctcgtgaccgtgtctagtacgcgtatccagaaccctgatcctgccgtgtaccagctgcgggatagcaagagcagcgacaagagcgtgtgtctgttcaccgacttcgacagccagaccaacgtgtcccagagcaaggactccgacgtgtacatcaccgataagtgcgtgctggacatgcggagcatggacttcaagagcaactccgccgtggcctggtccaacaagtccgatttcgcctgcgccaacgccttcaacaacagcattatccccgaggacacattcttcccaagccccgagagcagcgactccaccgaccacgtgaagcccaaagagacagagaacaccaagcagcccagcaagagctgccacaagcccaaggccatcgtgcacaccgagaaagtgaacatgatgagcctgaccgtgctgggcctgcggatgctgttcgccaaaaccgtggccgtgaacttcctgctgaccgccaagctgttcttcctc

SEQ ID NO: 7794 - DNA, 2994 bp, synthetic construct
  source 1..2994: mol_type = other DNA
atggccttaccagtgaccgccttgctcctgccgctggccttgctgctccacgccgccaggccggaagtgcagctggttgaatctggcggaggactggttcagcctggcggatctctgagactgtcttgtgccgccagcggcttcagcttcagcgacttttggatgagctgggtccgacaggcccctggcaaaggacttgaatgggtcgccacaatcagccaggccggcagcgagaaggactacgtggactctgtgaagggcagattcaccatcagccgggacaacgccaagaagtccctgtacctccagatgaacagcctgagagccgaggacaccgccgtgtactattgtgcctctggcgtgtacagcttcgactacagaggccagggcaccctggtcacagtctcttctggtaccggcggaggcggatctggcggcggaggtagcggtggcggaggatctgaattcgacgagatcgtgctgacacagagccctggcaccctgagcctgtctctgggagagagagccacactgagctgtcgggccagccagtctatcagcagcagcttcctggcctggtatcagcagaagcccggccaggcccctaagctgctgatctacgccgccagcacaagagccaccggcatccccgatagattcagcggctctggcagcggcaccgacttcaccctgaccatcagcagactggaacccgaggacttcgccgtgtactactgccagcagtacggcagaagcctgagcttcggcggaggcaccaaggtggaagtgaagctcgaggacctgaagaacgtgttcccacctgaggtggccgtgttcgagcctagcgaggccgagatcagccacacccagaaagccaccctcgtgtgcctggctaccggcttctaccccgaccatgtggaactgtcttggtgggtcaacggcaaagaggtgcacagcggcgtgtgtaccgacccccagccactgaaagaacagcccgccctgaacgacagccggtactgcctgagcagcagactgagagtgtccgccaccttctggcagaacccccggaaccacttcagatgccaggtgcagttctacggcctgagcgagaacgacgagtggacccaggacagagccaagcccgtgacccagatcgtgtctgccgaagcctggggcagagccgatgatgtgattaagatccactggcaggaaaagaagtccaacaccatcctgggcagccaggaaggcaacaccatgaagaccaacgacacctacatgaagttcagctggctgaccgtgcccgagaagtccctggacaaagaacacagatgcatcgtgcggcacgaaaacaacaagaacggcgtggaccaggaaatcatcttcccacccatcaagaccgatgtgattacaatggaccccaaggacaactgctccaaggacgccaacgataccctgctgctccagctgaccaacaccagcgcctactacatgtacttgttgctgctgctgaagtccgtggtgtacttcgccatcatcacatgctgcctgctgcggagaaccgccttctgctgcaacggcgagaagtctagggccaagcgatctggatctggagcaacaaacttctcactactcaaacaagcaggtgacgtggaggagaatcccgggcctactagtatggactggatttggcgcatccttttccttgtcggcgctgctaccggcgcgcattccgggccccagctccagctgcaagagtctggacctggcctggtcaagcctagcgagacactgagcctgacctgtaccgtgtccggcgatagcatcagcagcggcgattactactggggctggatcagacagcctcctggcaaaggactggaatggatcggccacatctactacagcggcgtgacctactacaaccccagcctgaagtccagagtgaccatcagcgtggacaccagccggaaccagttctccctgaagctgtctagcgtgacagccgccgataccgccgtgtactactgcaccagagaggacagcagcaactggcggagtagaggccagggaacactggtcacagttagctctggatccggcggaggcggaagtggaggcggaggatctggcggcggaggctctttcgaacaggtgcaactccagcagtctggccccggactcgtgaagcctagccagacactgagcctgacctgcgccatcagcggcgatagcgtgtccggcaatagcgccacctggaactggatcagacagagcccatctcggggcctggaatggctgggccggacctactaccgcagcaagtggaaccacgactacgccgagagcgtgaagtcccggatcaccatcaaccccgacaccagcaagaaccagttctccttgcaactgaacagcgtgacccccgaggacacagccgtgtattattgcgccagaggcgacagcagctcttggtacgccttcgactattggggccagggcaccctcgtgaccgtgtctagtacgcgtatccagaaccctgatcctgccgtgtaccagctgcgggatagcaagagcagcgacaagagcgtgtgtctgttcaccgacttcgacagccagaccaacgtgtcccagagcaaggactccgacgtgtacatcaccgataagtgcgtgctggacatgcggagcatggacttcaagagcaactccgccgtggcctggtccaacaagtccgatttcgcctgcgccaacgccttcaacaacagcattatccccgaggacacattcttcccaagccccgagagcagcgactccaccgaccacgtgaagcccaaagagacagagaacaccaagcagcccagcaagagctgccacaagcccaaggccatcgtgcacaccgagaaagtgaacatgatgagcctgaccgtgctgggcctgcggatgctgttcgccaaaaccgtggccgtgaacttcctgctgaccgccaagctgttcttcctc

SEQ ID NO: 7795 - DNA, 2991 bp, synthetic construct
  source 1..2991: mol_type = other DNA
atggccttaccagtgaccgccttgctcctgccgctggccttgctgctccacgccgccaggccggaagtgcagctggttgaatctggcggaggactggttcagcctggcggatctctgagactgtcttgtgccgccagcggcttcagcttcagcgacttttggatgagctgggtccgacaggcccctggcaaaggacttgaatgggtcgccacaatcagccaggccggcagcgagaaggactacgtggactctgtgaagggcagattcaccatcagccgggacaacgccaagaagtccctgtacctccagatgaacagcctgagagccgaggacaccgccgtgtactattgtgcctctggcgtgtacagcttcgactacagaggccagggcaccctggtcacagtctcttctggtaccggcggaggcggatctggcggcggaggtagcggtggcggaggatctgaattcgaccagagcgtcgtgacacagcctcctagcgtgtcagtggcccctggcaagaccgccagaatcacctgtggccggaacaacatcggcagcaagagcgtgcactggtatcagcagaagcccggccaggctcctgtgctggtggtgtacgacgacagcgacagacccagcggcatccccgagagattcagcggcagcaactccggcaataccgccaccctgaccatcagcagagtggaagccggcgacgaggccgactactactgccaagtgtgggacagcagcagcgatcacgtggtgtttggcggaggcaccaagctgacagtgctgggtctcgaggacctgaagaacgtgttcccacctgaggtggccgtgttcgagcctagcgaggccgagatcagccacacccagaaagccaccctcgtgtgcctggctaccggcttctaccccgaccatgtggaactgtcttggtgggtcaacggcaaagaggtgcacagcggcgtgtgtaccgacccccagccactgaaagaacagcccgccctgaacgacagccggtactgcctgagcagcagactgagagtgtccgccaccttctggcagaacccccggaaccacttcagatgccaggtgcagttctacggcctgagcgagaacgacgagtggacccaggacagagccaagcccgtgacccagatcgtgtctgccgaagcctggggcagagccgatgatgtgattaagatccactggcaggaaaagaagtccaacaccatcctgggcagccaggaaggcaacaccatgaagaccaacgacacctacatgaagttcagctggctgaccgtgcccgagaagtccctggacaaagaacacagatgcatcgtgcggcacgaaaacaacaagaacggcgtggaccaggaaatcatcttcccacccatcaagaccgatgtgattacaatggaccccaaggacaactgctccaaggacgccaacgataccctgctgctccagctgaccaacaccagcgcctactacatgtacttgttgctgctgctgaagtccgtggtgtacttcgccatcatcacatgctgcctgctgcggagaaccgccttctgctgcaacggcgagaagtctagggccaagcgatctggatctggagcaacaaacttctcactactcaaacaagcaggtgacgtggaggagaatcccgggcctactagtatggactggatttggcgcatccttttccttgtcggcgctgctaccggcgcgcattccgggccccagctccagctgcaagagtctggacctggcctggtcaagcctagcgagacactgagcctgacctgtaccgtgtccggcgatagcatcagcagcggcgattactactggggctggatcagacagcctcctggcaaaggactggaatggatcggccacatctactacagcggcgtgacctactacaaccccagcctgaagtccagagtgaccatcagcgtggacaccagccggaaccagttctccctgaagctgtctagcgtgacagccgccgataccgccgtgtactactgcaccagagaggacagcagcaactggcggagtagaggccagggaacactggtcacagttagctctggatccggcggaggcggaagtggaggcggaggatctggcggcggaggctctttcgaagtgcaactggtgcagtctggcggaggggtcatgcggcctggcggatctctgagactgtcttgtgccgccagcggcttcaccttcgacgactacggcatgagctgggtgcgccaggcccctggaaaaggcctggaatgggtgtccggcatcaactggaatggcggcagcaccggctacgccgattctgtgcggggcagattcaccatcagccgggacaacgccaagaacagcctgtacctgcagatgaactccctgcgggccgaggacaccgccctgtactattgcgccagagagcggggctacggctaccacgaccctcacgattattggggccagggcacccttgttaccgtgtcctctacgcgtatccagaaccctgatcctgccgtgtaccagctgcgggatagcaagagcagcgacaagagcgtgtgtctgttcaccgacttcgacagccagaccaacgtgtcccagagcaaggactccgacgtgtacatcaccgataagtgcgtgctggacatgcggagcatggacttcaagagcaactccgccgtggcctggtccaacaagtccgatttcgcctgcgccaacgccttcaacaacagcattatccccgaggacacattcttcccaagccccgagagcagcgactccaccgaccacgtgaagcccaaagagacagagaacaccaagcagcccagcaagagctgccacaagcccaaggccatcgtgcacaccgagaaagtgaacatgatgagcctgaccgtgctgggcctgcggatgctgttcgccaaaaccgtggccgtgaacttcctgctgaccgccaagctgttcttcctc

SEQ ID NO: 7796 - DNA, 3030 bp, synthetic construct
  source 1..3030: mol_type = other DNA
atggccttaccagtgaccgccttgctcctgccgctggccttgctgctccacgccgccaggccggaagtgcagctggttgaatctggcggaggactggttcagcctggcggatctctgagactgtcttgtgccgccagcggcttcagcttcagcgacttttggatgagctgggtccgacaggcccctggcaaaggacttgaatgggtcgccacaatcagccaggccggcagcgagaaggactacgtggactctgtgaagggcagattcaccatcagccgggacaacgccaagaagtccctgtacctccagatgaacagcctgagagccgaggacaccgccgtgtactattgtgcctctggcgtgtacagcttcgactacagaggccagggcaccctggtcacagtctcttctggtaccggcggaggcggatctggcggcggaggtagcggtggcggaggatctgaattcgaacagaaactcatcagtgaagaagacctggaattccaggctgtcgtgacacagcctcctagcgcctctggcacaccaggccagagagtgaccatctcctgtagcggcagcagcagcaacatcggcagcaacaccgtgaactggtatcagcaggtgcccggcaccgctcccaagctgctgatctacagcaacaaccagcggcccagcggcgtgcccgatagattttctggcagcaagagcggcaccagcgccagcctggctatctctggactccagtccgaggacgaggccgactactattgcgccgcctgggacgatagcctgaacggctgggtgttcggcggaggcaccaagctgacagtgctgctcgaggacctgaagaacgtgttcccacctgaggtggccgtgttcgagcctagcgaggccgagatcagccacacccagaaagccaccctcgtgtgcctggctaccggcttctaccccgaccatgtggaactgtcttggtgggtcaacggcaaagaggtgcacagcggcgtgtgtaccgacccccagccactgaaagaacagcccgccctgaacgacagccggtactgcctgagcagcagactgagagtgtccgccaccttctggcagaacccccggaaccacttcagatgccaggtgcagttctacggcctgagcgagaacgacgagtggacccaggacagagccaagcccgtgacccagatcgtgtctgccgaagcctggggcagagccgatgatgtgattaagatccactggcaggaaaagaagtccaacaccatcctgggcagccaggaaggcaacaccatgaagaccaacgacacctacatgaagttcagctggctgaccgtgcccgagaagtccctggacaaagaacacagatgcatcgtgcggcacgaaaacaacaagaacggcgtggaccaggaaatcatcttcccacccatcaagaccgatgtgattacaatggaccccaaggacaactgctccaaggacgccaacgataccctgctgctccagctgaccaacaccagcgcctactacatgtacttgttgctgctgctgaagtccgtggtgtacttcgccatcatcacatgctgcctgctgcggagaaccgccttctgctgcaacggcgagaagtctagggccaagcgatctggatctggagcaacaaacttctcactactcaaacaagcaggtgacgtggaggagaatcccgggcctactagtatggactggatttggcgcatccttttccttgtcggcgctgctaccggcgcgcattccgggccccagctccagctgcaagagtctggacctggcctggtcaagcctagcgagacactgagcctgacctgtaccgtgtccggcgatagcatcagcagcggcgattactactggggctggatcagacagcctcctggcaaaggactggaatggatcggccacatctactacagcggcgtgacctactacaaccccagcctgaagtccagagtgaccatcagcgtggacaccagccggaaccagttctccctgaagctgtctagcgtgacagccgccgataccgccgtgtactactgcaccagagaggacagcagcaactggcggagtagaggccagggaacactggtcacagttagctctggatccggcggaggcggaagtggaggcggaggatctggcggcggaggctctttcgaacagatgcaactggtgcagagcggagccgaagtgaaagagcctggcgagagcctgcggatctcctgcaagggcagcggctacagcttcaccaatttctggatctcttgggtgcgccagatgcccggcaagggcctggaatggatgggcagagtggaccccggctactcctacagcacctacagccctagcttccagggccacgtgaccatcagcgccgacaagagcaccagcaccgcctacctccagtggaacagcctgaaggccagcgacaccgccatgtactactgcgccagagtgcagtacagcggctattacgattggttcgacccctggggccagggcacactcgtgacagtgtcaagcacgcgtatccagaaccctgatcctgccgtgtaccagctgcgggatagcaagagcagcgacaagagcgtgtgtctgttcaccgacttcgacagccagaccaacgtgtcccagagcaaggactccgacgtgtacatcaccgataagtgcgtgctggacatgcggagcatggacttcaagagcaactccgccgtggcctggtccaacaagtccgatttcgcctgcgccaacgccttcaacaacagcattatccccgaggacacattcttcccaagccccgagagcagcgactccaccgaccacgtgaagcccaaagagacagagaacaccaagcagcccagcaagagctgccacaagcccaaggccatcgtgcacaccgagaaagtgaacatgatgagcctgaccgtgctgggcctgcggatgctgttcgccaaaaccgtggccgtgaacttcctgctgaccgccaagctgttcttcctc

SEQ ID NO: 7797 - DNA, 3012 bp, synthetic construct
  source 1..3012: mol_type = other DNA
atggccttaccagtgaccgccttgctcctgccgctggccttgctgctccacgccgccaggccggaagtgcagctggttgaatctggcggaggactggttcagcctggcggatctctgagactgtcttgtgccgccagcggcttcagcttcagcgacttttggatgagctgggtccgacaggcccctggcaaaggacttgaatgggtcgccacaatcagccaggccggcagcgagaaggactacgtggactctgtgaagggcagattcaccatcagccgggacaacgccaagaagtccctgtacctccagatgaacagcctgagagccgaggacaccgccgtgtactattgtgcctctggcgtgtacagcttcgactacagaggccagggcaccctggtcacagtctcttctggtaccggcggaggcggatctggcggcggaggtagcggtggcggaggatctgaattcgaacagaaactcatcagtgaagaagacctggaattcgacatccagatgacccagagccccagcacactgagcgccagcgtgggcgacagagtgaccatcacctgtcgggccagccagaacatcaacaagtggctggcctggtatcagcagaggcccggaaaagccccccagctgctgatctacaaggccagcagcctggaaagcggcgtgcccagcagattttctggcagcggctctggcaccgagtacaccctgaccatcagctccctccagcccgacgacttcgccacctactactgccagcagtacaacagctacgccaccttcggccagggcaccaaggtggaaatcaagagactcgaggacctgaagaacgtgttcccacctgaggtggccgtgttcgagcctagcgaggccgagatcagccacacccagaaagccaccctcgtgtgcctggctaccggcttctaccccgaccatgtggaactgtcttggtgggtcaacggcaaagaggtgcacagcggcgtgtgtaccgacccccagccactgaaagaacagcccgccctgaacgacagccggtactgcctgagcagcagactgagagtgtccgccaccttctggcagaacccccggaaccacttcagatgccaggtgcagttctacggcctgagcgagaacgacgagtggacccaggacagagccaagcccgtgacccagatcgtgtctgccgaagcctggggcagagccgatgatgtgattaagatccactggcaggaaaagaagtccaacaccatcctgggcagccaggaaggcaacaccatgaagaccaacgacacctacatgaagttcagctggctgaccgtgcccgagaagtccctggacaaagaacacagatgcatcgtgcggcacgaaaacaacaagaacggcgtggaccaggaaatcatcttcccacccatcaagaccgatgtgattacaatggaccccaaggacaactgctccaaggacgccaacgataccctgctgctccagctgaccaacaccagcgcctactacatgtacttgttgctgctgctgaagtccgtggtgtacttcgccatcatcacatgctgcctgctgcggagaaccgccttctgctgcaacggcgagaagtctagggccaagcgatctggatctggagcaacaaacttctcactactcaaacaagcaggtgacgtggaggagaatcccgggcctactagtatggactggatttggcgcatccttttccttgtcggcgctgctaccggcgcgcattccgggccccagctccagctgcaagagtctggacctggcctggtcaagcctagcgagacactgagcctgacctgtaccgtgtccggcgatagcatcagcagcggcgattactactggggctggatcagacagcctcctggcaaaggactggaatggatcggccacatctactacagcggcgtgacctactacaaccccagcctgaagtccagagtgaccatcagcgtggacaccagccggaaccagttctccctgaagctgtctagcgtgacagccgccgataccgccgtgtactactgcaccagagaggacagcagcaactggcggagtagaggccagggaacactggtcacagttagctctggatccggcggaggcggaagtggaggcggaggatctggcggcggaggctctttcgaacaggtgcagctggtgcagtctggggccgaagtgaagaagcctggcgagagcctgaagatcagctgcaagggctccggctacaacttctctaacaagtggatcggctgggtgcgccagctgcctggcagaggactggaatggatcgccatcatctaccccggctacagcgacatcacctacagccccagcttccagggccgcgtgacaatcagcgccgacaccagcatcaacaccgcctacctgcactggcacagcctgaaggccagcgacaccgccatgtactactgcgtgcggcatacagccctggctggcttcgattattggggcctgggcaccctcgtgaccgtgtctagtacgcgtatccagaaccctgatcctgccgtgtaccagctgcgggatagcaagagcagcgacaagagcgtgtgtctgttcaccgacttcgacagccagaccaacgtgtcccagagcaaggactccgacgtgtacatcaccgataagtgcgtgctggacatgcggagcatggacttcaagagcaactccgccgtggcctggtccaacaagtccgatttcgcctgcgccaacgccttcaacaacagcattatccccgaggacacattcttcccaagccccgagagcagcgactccaccgaccacgtgaagcccaaagagacagagaacaccaagcagcccagcaagagctgccacaagcccaaggccatcgtgcacaccgagaaagtgaacatgatgagcctgaccgtgctgggcctgcggatgctgttcgccaaaaccgtggccgtgaacttcctgctgaccgccaagctgttcttcctc

SEQ ID NO: 7798 - DNA, 2985 bp, synthetic construct
  source 1..2985: mol_type = other DNA
atggccttaccagtgaccgccttgctcctgccgctggccttgctgctccacgccgccaggccggaagtgcagctggttgaatctggcggaggactggttcagcctggcggatctctgagactgtcttgtgccgccagcggcttcagcttcagcgacttttggatgagctgggtccgacaggcccctggcaaaggacttgaatgggtcgccacaatcagccaggccggcagcgagaaggactacgtggactctgtgaagggcagattcaccatcagccgggacaacgccaagaagtccctgtacctccagatgaacagcctgagagccgaggacaccgccgtgtactattgtgcctctggcgtgtacagcttcgactacagaggccagggcaccctggtcacagtctcttctggtaccggcggaggcggatctggcggcggaggtagcggtggcggaggatctgaattcatcgtgctgacacagagccctgcttctctggccgtgtctctgggacagagagccaccatcagctgtagagccagcgagagcgtggacaactacggcaacaccttcatgcactggtatcagcagaagcccggccagcctcctaagctgctgatctacagagccagcaacctggaaagcggcatccccgccagattttctggcagcggcagcagaaccgacttcaccctgaccatcaatcccgtggaagccgacgacgtggcaacctactactgccagcagagcaacgaggaccctcctacatttggagccggcaccaagctggaactgaaactcgaggacctgaagaacgtgttcccacctgaggtggccgtgttcgagcctagcgaggccgagatcagccacacccagaaagccaccctcgtgtgcctggctaccggcttctaccccgaccatgtggaactgtcttggtgggtcaacggcaaagaggtgcacagcggcgtgtgtaccgacccccagccactgaaagaacagcccgccctgaacgacagccggtactgcctgagcagcagactgagagtgtccgccaccttctggcagaacccccggaaccacttcagatgccaggtgcagttctacggcctgagcgagaacgacgagtggacccaggacagagccaagcccgtgacccagatcgtgtctgccgaagcctggggcagagccgatgatgtgattaagatccactggcaggaaaagaagtccaacaccatcctgggcagccaggaaggcaacaccatgaagaccaacgacacctacatgaagttcagctggctgaccgtgcccgagaagtccctggacaaagaacacagatgcatcgtgcggcacgaaaacaacaagaacggcgtggaccaggaaatcatcttcccacccatcaagaccgatgtgattacaatggaccccaaggacaactgctccaaggacgccaacgataccctgctgctccagctgaccaacaccagcgcctactacatgtacttgttgctgctgctgaagtccgtggtgtacttcgccatcatcacatgctgcctgctgcggagaaccgccttctgctgcaacggcgagaagtctagggccaagcgatctggatctggagcaacaaacttctcactactcaaacaagcaggtgacgtggaggagaatcccgggcctactagtatggactggatttggcgcatccttttccttgtcggcgctgctaccggcgcgcattccgggccccagctccagctgcaagagtctggacctggcctggtcaagcctagcgagacactgagcctgacctgtaccgtgtccggcgatagcatcagcagcggcgattactactggggctggatcagacagcctcctggcaaaggactggaatggatcggccacatctactacagcggcgtgacctactacaaccccagcctgaagtccagagtgaccatcagcgtggacaccagccggaaccagttctccctgaagctgtctagcgtgacagccgccgataccgccgtgtactactgcaccagagaggacagcagcaactggcggagtagaggccagggaacactggtcacagttagctctggatccggcggaggcggaagtggaggcggaggatctggcggcggaggctctttcgaacagattcagctggtgcagtctggccccgagctgaagaaacctggcgagacagtgaagatcagctgcaaggccagcggctacatcttcaccaattacggcatgaactgggtcaagcaggcccctggcaagagcttcaagtggatgggctggatcaacacctacaccggcgagagcacatacagcgccgacttcaagggcagattcgccttcagcctggaaaccagcgccagcacagcctacctgcacatcaacgacctgaagaacgaggacaccgccacctacttttgcgccagaagcggcggctacgaccctatggattattggggccagggcaccagcgtgaccgtttcttctacgcgtatccagaaccctgatcctgccgtgtaccagctgcgggatagcaagagcagcgacaagagcgtgtgtctgttcaccgacttcgacagccagaccaacgtgtcccagagcaaggactccgacgtgtacatcaccgataagtgcgtgctggacatgcggagcatggacttcaagagcaactccgccgtggcctggtccaacaagtccgatttcgcctgcgccaacgccttcaacaacagcattatccccgaggacacattcttcccaagccccgagagcagcgactccaccgaccacgtgaagcccaaagagacagagaacaccaagcagcccagcaagagctgccacaagcccaaggccatcgtgcacaccgagaaagtgaacatgatgagcctgaccgtgctgggcctgcggatgctgttcgccaaaaccgtggccgtgaacttcctgctgaccgccaagctgttcttcctc

SEQ ID NO: 7799 - DNA, 2982 bp, synthetic construct
  source 1..2982: mol_type = other DNA
atggccttaccagtgaccgccttgctcctgccgctggccttgctgctccacgccgccaggccggaagtgcagctggttgaatctggcggaggactggttcagcctggcggatctctgagactgtcttgtgccgccagcggcttcagcttcagcgacttttggatgagctgggtccgacaggcccctggcaaaggacttgaatgggtcgccacaatcagccaggccggcagcgagaaggactacgtggactctgtgaagggcagattcaccatcagccgggacaacgccaagaagtccctgtacctccagatgaacagcctgagagccgaggacaccgccgtgtactattgtgcctctggcgtgtacagcttcgactacagaggccagggcaccctggtcacagtctcttctggtaccggcggaggcggatctggcggcggaggtagcggtggcggaggatctgaattcgagatcgtgctgacacagagccctggcaccctgagcctgtctccaggcgaaagagccacactgagctgtcgggccagccagagcgtgtccaatacctacctggcctggtatcaccagaggcccggacaggctccccggctgctgatctatggcgcttctagcagagccaccggcatccccgatagattcagcggctctggcagcggcaccgacttcgccctgacaatcagctccctggaacccgaggacttcgccgtgtactactgccagcagtacagcaactcctggaccttcggccagggcaccaaggtggaaatcaagagactcgaggacctgaagaacgtgttcccacctgaggtggccgtgttcgagcctagcgaggccgagatcagccacacccagaaagccaccctcgtgtgcctggctaccggcttctaccccgaccatgtggaactgtcttggtgggtcaacggcaaagaggtgcacagcggcgtgtgtaccgacccccagccactgaaagaacagcccgccctgaacgacagccggtactgcctgagcagcagactgagagtgtccgccaccttctggcagaacccccggaaccacttcagatgccaggtgcagttctacggcctgagcgagaacgacgagtggacccaggacagagccaagcccgtgacccagatcgtgtctgccgaagcctggggcagagccgatgatgtgattaagatccactggcaggaaaagaagtccaacaccatcctgggcagccaggaaggcaacaccatgaagaccaacgacacctacatgaagttcagctggctgaccgtgcccgagaagtccctggacaaagaacacagatgcatcgtgcggcacgaaaacaacaagaacggcgtggaccaggaaatcatcttcccacccatcaagaccgatgtgattacaatggaccccaaggacaactgctccaaggacgccaacgataccctgctgctccagctgaccaacaccagcgcctactacatgtacttgttgctgctgctgaagtccgtggtgtacttcgccatcatcacatgctgcctgctgcggagaaccgccttctgctgcaacggcgagaagtctagggccaagcgatctggatctggagcaacaaacttctcactactcaaacaagcaggtgacgtggaggagaatcccgggcctactagtatggactggatttggcgcatccttttccttgtcggcgctgctaccggcgcgcattccgggccccagctccagctgcaagagtctggacctggcctggtcaagcctagcgagacactgagcctgacctgtaccgtgtccggcgatagcatcagcagcggcgattactactggggctggatcagacagcctcctggcaaaggactggaatggatcggccacatctactacagcggcgtgacctactacaaccccagcctgaagtccagagtgaccatcagcgtggacaccagccggaaccagttctccctgaagctgtctagcgtgacagccgccgataccgccgtgtactactgcaccagagaggacagcagcaactggcggagtagaggccagggaacactggtcacagttagctctggatccggcggaggcggaagtggaggcggaggatctggcggcggaggctctttcgaacaggtgcaactggtggaatctggcgggggagtggtgcagcctggcagaagcctgagactgtcttgtgccgccagcggcttcaccttcagcagctacgacatgcactgggtgcgccaggcccctggcaaaggactggaatgggtggccgtgatctcctacgacggcaccaacgagtattacgccgacagcgtgaagggccggttcaccatctccagagacaccagcaagaacaccctgtacctccagatgaacagcctgcgggccgaggacacagccgtgtattattgcgccagagagcggtacttcgactggtccttcgactactggggccagggaaccctggtgtccgtgtctagtacgcgtatccagaaccctgatcctgccgtgtaccagctgcgggatagcaagagcagcgacaagagcgtgtgtctgttcaccgacttcgacagccagaccaacgtgtcccagagcaaggactccgacgtgtacatcaccgataagtgcgtgctggacatgcggagcatggacttcaagagcaactccgccgtggcctggtccaacaagtccgatttcgcctgcgccaacgccttcaacaacagcattatccccgaggacacattcttcccaagccccgagagcagcgactccaccgaccacgtgaagcccaaagagacagagaacaccaagcagcccagcaagagctgccacaagcccaaggccatcgtgcacaccgagaaagtgaacatgatgagcctgaccgtgctgggcctgcggatgctgttcgccaaaaccgtggccgtgaacttcctgctgaccgccaagctgttcttcctc

SEQ ID NO: 7800 - DNA, 2979 bp, synthetic construct
  source 1..2979: mol_type = other DNA
atggccttaccagtgaccgccttgctcctgccgctggccttgctgctccacgccgccaggccggaagtgcagctggttgaatctggcggaggactggttcagcctggcggatctctgagactgtcttgtgccgccagcggcttcagcttcagcgacttttggatgagctgggtccgacaggcccctggcaaaggacttgaatgggtcgccacaatcagccaggccggcagcgagaaggactacgtggactctgtgaagggcagattcaccatcagccgggacaacgccaagaagtccctgtacctccagatgaacagcctgagagccgaggacaccgccgtgtactattgtgcctctggcgtgtacagcttcgactacagaggccagggcaccctggtcacagtctcttctggtaccggcggaggcggatctggcggcggaggtagcggtggcggaggatctgaattcgagctgacacaggaccctgctgtgtctgttgccctgggccagacagtgcggattacctgtcaaggcgacagcctgagaagcaactacgccaactggtatcagcagaagcccggacaggctcccgtgctggttatctacggccagaacaacagacccagcggcatccccgatagattcagcggctctagctctggcaataccgccagcctgacaatcactggcgctcaggctgccgatgaggccgactactactgcgatagcagagtgtccaccggcaatcacgtggtgtttggcggcggaacaaagctgacagtgctcggacaactcgaggacctgaagaacgtgttcccacctgaggtggccgtgttcgagcctagcgaggccgagatcagccacacccagaaagccaccctcgtgtgcctggctaccggcttctaccccgaccatgtggaactgtcttggtgggtcaacggcaaagaggtgcacagcggcgtgtgtaccgacccccagccactgaaagaacagcccgccctgaacgacagccggtactgcctgagcagcagactgagagtgtccgccaccttctggcagaacccccggaaccacttcagatgccaggtgcagttctacggcctgagcgagaacgacgagtggacccaggacagagccaagcccgtgacccagatcgtgtctgccgaagcctggggcagagccgatgatgtgattaagatccactggcaggaaaagaagtccaacaccatcctgggcagccaggaaggcaacaccatgaagaccaacgacacctacatgaagttcagctggctgaccgtgcccgagaagtccctggacaaagaacacagatgcatcgtgcggcacgaaaacaacaagaacggcgtggaccaggaaatcatcttcccacccatcaagaccgatgtgattacaatggaccccaaggacaactgctccaaggacgccaacgataccctgctgctccagctgaccaacaccagcgcctactacatgtacttgttgctgctgctgaagtccgtggtgtacttcgccatcatcacatgctgcctgctgcggagaaccgccttctgctgcaacggcgagaagtctagggccaagcgatctggatctggagcaacaaacttctcactactcaaacaagcaggtgacgtggaggagaatcccgggcctactagtatggactggatttggcgcatccttttccttgtcggcgctgctaccggcgcgcattccgggccccagctccagctgcaagagtctggacctggcctggtcaagcctagcgagacactgagcctgacctgtaccgtgtccggcgatagcatcagcagcggcgattactactggggctggatcagacagcctcctggcaaaggactggaatggatcggccacatctactacagcggcgtgacctactacaaccccagcctgaagtccagagtgaccatcagcgtggacaccagccggaaccagttctccctgaagctgtctagcgtgacagccgccgataccgccgtgtactactgcaccagagaggacagcagcaactggcggagtagaggccagggaacactggtcacagttagctctggatccggcggaggcggaagtggaggcggaggatctggcggcggaggctctttcgaagaagttcagctggtgcagagcggagccgaagtgaagaaacctggggcctctgtgaaggtgtcctgcaaggcttccggctacacctttaccagctacgccatgcactgggtccgacaggcacctggacaacggcttgaatggatgggctggatcaacgccggcaacggcaacaccaagtacagccagaaattccagggccgcgtgaccatcaccagagatacaagcgccagcaccgcctacatggaactgtctagcctgagatccgaggacaccgccgtgtactactgtgccagagacatcagctacggcagcttcgactattggggccagggcacactggtcaccgttagctctacgcgtatccagaaccctgatcctgccgtgtaccagctgcgggatagcaagagcagcgacaagagcgtgtgtctgttcaccgacttcgacagccagaccaacgtgtcccagagcaaggactccgacgtgtacatcaccgataagtgcgtgctggacatgcggagcatggacttcaagagcaactccgccgtggcctggtccaacaagtccgatttcgcctgcgccaacgccttcaacaacagcattatccccgaggacacattcttcccaagccccgagagcagcgactccaccgaccacgtgaagcccaaagagacagagaacaccaagcagcccagcaagagctgccacaagcccaaggccatcgtgcacaccgagaaagtgaacatgatgagcctgaccgtgctgggcctgcggatgctgttcgccaaaaccgtggccgtgaacttcctgctgaccgccaagctgttcttcctc

SEQ ID NO: 7801 - DNA, 2985 bp, synthetic construct
  source 1..2985: mol_type = other DNA
atggccttaccagtgaccgccttgctcctgccgctggccttgctgctccacgccgccaggccggaagtgcagctggttgaatctggcggaggactggttcagcctggcggatctctgagactgtcttgtgccgccagcggcttcagcttcagcgacttttggatgagctgggtccgacaggcccctggcaaaggacttgaatgggtcgccacaatcagccaggccggcagcgagaaggactacgtggactctgtgaagggcagattcaccatcagccgggacaacgccaagaagtccctgtacctccagatgaacagcctgagagccgaggacaccgccgtgtactattgtgcctctggcgtgtacagcttcgactacagaggccagggcaccctggtcacagtctcttctggtaccggcggaggcggatctggcggcggaggtagcggtggcggaggatctgaattcgacatcgtgctgacacagacaccagccacactgagcgtgacacctggcgattctgtgtccctgagctgtagagccagccagagcatcagcaacaacctgcactggtatcagcagaagtcccacgagagccccagactgctgattaagaacgccagccagtctatcagcggcatccccagcaagtttagcggctctggcagcggcaccgacttcaccctgagaatcaacagcgtggaaaccgaggacttcgggatgtacttctgccagcagagcaatagctggccctacacatttggctccggcaccaagctggaaatcaaactcgaggacctgaagaacgtgttcccacctgaggtggccgtgttcgagcctagcgaggccgagatcagccacacccagaaagccaccctcgtgtgcctggctaccggcttctaccccgaccatgtggaactgtcttggtgggtcaacggcaaagaggtgcacagcggcgtgtgtaccgacccccagccactgaaagaacagcccgccctgaacgacagccggtactgcctgagcagcagactgagagtgtccgccaccttctggcagaacccccggaaccacttcagatgccaggtgcagttctacggcctgagcgagaacgacgagtggacccaggacagagccaagcccgtgacccagatcgtgtctgccgaagcctggggcagagccgatgatgtgattaagatccactggcaggaaaagaagtccaacaccatcctgggcagccaggaaggcaacaccatgaagaccaacgacacctacatgaagttcagctggctgaccgtgcccgagaagtccctggacaaagaacacagatgcatcgtgcggcacgaaaacaacaagaacggcgtggaccaggaaatcatcttcccacccatcaagaccgatgtgattacaatggaccccaaggacaactgctccaaggacgccaacgataccctgctgctccagctgaccaacaccagcgcctactacatgtacttgttgctgctgctgaagtccgtggtgtacttcgccatcatcacatgctgcctgctgcggagaaccgccttctgctgcaacggcgagaagtctagggccaagcgatctggatctggagcaacaaacttctcactactcaaacaagcaggtgacgtggaggagaatcccgggcctactagtatggactggatttggcgcatccttttccttgtcggcgctgctaccggcgcgcattccgggccccagctccagctgcaagagtctggacctggcctggtcaagcctagcgagacactgagcctgacctgtaccgtgtccggcgatagcatcagcagcggcgattactactggggctggatcagacagcctcctggcaaaggactggaatggatcggccacatctactacagcggcgtgacctactacaaccccagcctgaagtccagagtgaccatcagcgtggacaccagccggaaccagttctccctgaagctgtctagcgtgacagccgccgataccgccgtgtactactgcaccagagaggacagcagcaactggcggagtagaggccagggaacactggtcacagttagctctggatccggcggaggcggaagtggaggcggaggatctggcggcggaggctctttcgaacaagtgaagctgcaacagagcggacccgagctggttaagccaggcgcttccgtgaagattagctgcaaggccagcggctacagcttcaccggctactacatgcactgggtcaagcagagccacggcaacatcctggactggatcggctacatctacccctacaacggcgtgtccagctacaaccagaagttcaagggcaaagccactctgaccgtggacaagagcagcagcaccgcctacatggaactgagaagcctgaccagcgaggacagcgccgtgtactattgtgccagagagcggggcctgtaccagctcagagcaatggattattggggccagggcaccagcgtgaccgtttcttctacgcgtatccagaaccctgatcctgccgtgtaccagctgcgggatagcaagagcagcgacaagagcgtgtgtctgttcaccgacttcgacagccagaccaacgtgtcccagagcaaggactccgacgtgtacatcaccgataagtgcgtgctggacatgcggagcatggacttcaagagcaactccgccgtggcctggtccaacaagtccgatttcgcctgcgccaacgccttcaacaacagcattatccccgaggacacattcttcccaagccccgagagcagcgactccaccgaccacgtgaagcccaaagagacagagaacaccaagcagcccagcaagagctgccacaagcccaaggccatcgtgcacaccgagaaagtgaacatgatgagcctgaccgtgctgggcctgcggatgctgttcgccaaaaccgtggccgtgaacttcctgctgaccgccaagctgttcttcctc

SEQ ID NO: 7802 - DNA, 2958 bp, synthetic construct
  source 1..2958: mol_type = other DNA
atggccttaccagtgaccgccttgctcctgccgctggccttgctgctccacgccgccaggccggaagtgcagctggttgaatctggcggaggactggttcagcctggcggatctctgagactgtcttgtgccgccagcggcttcagcttcagcgacttttggatgagctgggtccgacaggcccctggcaaaggacttgaatgggtcgccacaatcagccaggccggcagcgagaaggactacgtggactctgtgaagggcagattcaccatcagccgggacaacgccaagaagtccctgtacctccagatgaacagcctgagagccgaggacaccgccgtgtactattgtgcctctggcgtgtacagcttcgactacagaggccagggcaccctggtcacagtctcttctggtaccggcggaggcggatctggcggcggaggtagcggtggcggaggatctgaattcgacatcgtgatgacacagacccctgccatcatgagcgcctctccaggccagaaagtgaccatcacatgtagcgccagcagcagcgtgaactacatgcactggtatcagcagaagctgggcagcagccccaagctgtggatctacgataccagcaaactggcccctggcgtgccagccagattttctggttctggcagcggcaccagctacagcctgacaatcagcagcatggaagccgaggatgccgccagctacttctgccatcagtggtctagctacccctacacctttggctccggcaccaagctggaaatcaaactcgaggacctgaagaacgtgttcccacctgaggtggccgtgttcgagcctagcgaggccgagatcagccacacccagaaagccaccctcgtgtgcctggctaccggcttctaccccgaccatgtggaactgtcttggtgggtcaacggcaaagaggtgcacagcggcgtgtgtaccgacccccagccactgaaagaacagcccgccctgaacgacagccggtactgcctgagcagcagactgagagtgtccgccaccttctggcagaacccccggaaccacttcagatgccaggtgcagttctacggcctgagcgagaacgacgagtggacccaggacagagccaagcccgtgacccagatcgtgtctgccgaagcctggggcagagccgatgatgtgattaagatccactggcaggaaaagaagtccaacaccatcctgggcagccaggaaggcaacaccatgaagaccaacgacacctacatgaagttcagctggctgaccgtgcccgagaagtccctggacaaagaacacagatgcatcgtgcggcacgaaaacaacaagaacggcgtggaccaggaaatcatcttcccacccatcaagaccgatgtgattacaatggaccccaaggacaactgctccaaggacgccaacgataccctgctgctccagctgaccaacaccagcgcctactacatgtacttgttgctgctgctgaagtccgtggtgtacttcgccatcatcacatgctgcctgctgcggagaaccgccttctgctgcaacggcgagaagtctagggccaagcgatctggatctggagcaacaaacttctcactactcaaacaagcaggtgacgtggaggagaatcccgggcctactagtatggactggatttggcgcatccttttccttgtcggcgctgctaccggcgcgcattccgggccccagctccagctgcaagagtctggacctggcctggtcaagcctagcgagacactgagcctgacctgtaccgtgtccggcgatagcatcagcagcggcgattactactggggctggatcagacagcctcctggcaaaggactggaatggatcggccacatctactacagcggcgtgacctactacaaccccagcctgaagtccagagtgaccatcagcgtggacaccagccggaaccagttctccctgaagctgtctagcgtgacagccgccgataccgccgtgtactactgcaccagagaggacagcagcaactggcggagtagaggccagggaacactggtcacagttagctctggatccggcggaggcggaagtggaggcggaggatctggcggcggaggctctttcgaagaagttcagctccaagagtctggccccgacctggtcaagcctagccaaagcctgagcctgacctgtaccgtgaccggctacagcatcacaagcggctatggatggcactggatcagacagttccccggcaacaaactggaatggatgggctacatccactacagcggcagcaccacctacaatcccagcctgaagtcccggatcagcatcagcagagacaccagcaagaaccagttcttcctgcaactgaacagcgtgaccaccgaggacaccgccacctactattgtgctcggagcctgagatattggggccagggcacaaccctgaccgtgtcatctacgcgtatccagaaccctgatcctgccgtgtaccagctgcgggatagcaagagcagcgacaagagcgtgtgtctgttcaccgacttcgacagccagaccaacgtgtcccagagcaaggactccgacgtgtacatcaccgataagtgcgtgctggacatgcggagcatggacttcaagagcaactccgccgtggcctggtccaacaagtccgatttcgcctgcgccaacgccttcaacaacagcattatccccgaggacacattcttcccaagccccgagagcagcgactccaccgaccacgtgaagcccaaagagacagagaacaccaagcagcccagcaagagctgccacaagcccaaggccatcgtgcacaccgagaaagtgaacatgatgagcctgaccgtgctgggcctgcggatgctgttcgccaaaaccgtggccgtgaacttcctgctgaccgccaagctgttcttcctc

SEQ ID NO: 7803 - DNA, 2967 bp, synthetic construct
  source 1..2967: mol_type = other DNA
atggccttaccagtgaccgccttgctcctgccgctggccttgctgctccacgccgccaggccggaagtgcagctggttgaatctggcggaggactggttcagcctggcggatctctgagactgtcttgtgccgccagcggcttcagcttcagcgacttttggatgagctgggtccgacaggcccctggcaaaggacttgaatgggtcgccacaatcagccaggccggcagcgagaaggactacgtggactctgtgaagggcagattcaccatcagccgggacaacgccaagaagtccctgtacctccagatgaacagcctgagagccgaggacaccgccgtgtactattgtgcctctggcgtgtacagcttcgactacagaggccagggcaccctggtcacagtctcttctggtaccggcggaggcggatctggcggcggaggtagcggtggcggaggatctgaattcgacatccagatgacacagagccctagcagcctgtctgccagcgtgggagacagagtgaccatcacctgtagcgccaccagcagcatcagctacatgcactggtatcagcagaagcccggcaaggcccctaaaggctggatctacgataccagcaaactggcccacggcgtgcccagcagattttctggttctggcagcggcaccgacttcaccctgacaatatctagcctccagcctgaggacttcgccacctactactgccaccagagaagaagctaccccttcaccttcggccagggcaccaaggtggaaatcaaactcgaggacctgaagaacgtgttcccacctgaggtggccgtgttcgagcctagcgaggccgagatcagccacacccagaaagccaccctcgtgtgcctggctaccggcttctaccccgaccatgtggaactgtcttggtgggtcaacggcaaagaggtgcacagcggcgtgtgtaccgacccccagccactgaaagaacagcccgccctgaacgacagccggtactgcctgagcagcagactgagagtgtccgccaccttctggcagaacccccggaaccacttcagatgccaggtgcagttctacggcctgagcgagaacgacgagtggacccaggacagagccaagcccgtgacccagatcgtgtctgccgaagcctggggcagagccgatgatgtgattaagatccactggcaggaaaagaagtccaacaccatcctgggcagccaggaaggcaacaccatgaagaccaacgacacctacatgaagttcagctggctgaccgtgcccgagaagtccctggacaaagaacacagatgcatcgtgcggcacgaaaacaacaagaacggcgtggaccaggaaatcatcttcccacccatcaagaccgatgtgattacaatggaccccaaggacaactgctccaaggacgccaacgataccctgctgctccagctgaccaacaccagcgcctactacatgtacttgttgctgctgctgaagtccgtggtgtacttcgccatcatcacatgctgcctgctgcggagaaccgccttctgctgcaacggcgagaagtctagggccaagcgatctggatctggagcaacaaacttctcactactcaaacaagcaggtgacgtggaggagaatcccgggcctactagtatggactggatttggcgcatccttttccttgtcggcgctgctaccggcgcgcattccgggccccagctccagctgcaagagtctggacctggcctggtcaagcctagcgagacactgagcctgacctgtaccgtgtccggcgatagcatcagcagcggcgattactactggggctggatcagacagcctcctggcaaaggactggaatggatcggccacatctactacagcggcgtgacctactacaaccccagcctgaagtccagagtgaccatcagcgtggacaccagccggaaccagttctccctgaagctgtctagcgtgacagccgccgataccgccgtgtactactgcaccagagaggacagcagcaactggcggagtagaggccagggaacactggtcacagttagctctggatccggcggaggcggaagtggaggcggaggatctggcggcggaggctctttcgaagaagtgcaactggttcagagcggagccgaagtgaagaaacctggggcctctgtgaaggtgtcctgcaaggcttccggctacacctttaccaatttctggattcactgggtccgacaggctccaggccaaggactggaatggatcggagagatcgaccccagcgacagctacaccaactacaaccagaaattcaaaggccgggtcaccatcaccagagacaccagcacaagcaccgcctacctggaactgagcagcctgagaagcgaggacaccgccgtgtactactgcgccagggaaatcaccaccgtggattattggggccagggaaccctggtcaccgtgtcatctacgcgtatccagaaccctgatcctgccgtgtaccagctgcgggatagcaagagcagcgacaagagcgtgtgtctgttcaccgacttcgacagccagaccaacgtgtcccagagcaaggactccgacgtgtacatcaccgataagtgcgtgctggacatgcggagcatggacttcaagagcaactccgccgtggcctggtccaacaagtccgatttcgcctgcgccaacgccttcaacaacagcattatccccgaggacacattcttcccaagccccgagagcagcgactccaccgaccacgtgaagcccaaagagacagagaacaccaagcagcccagcaagagctgccacaagcccaaggccatcgtgcacaccgagaaagtgaacatgatgagcctgaccgtgctgggcctgcggatgctgttcgccaaaaccgtggccgtgaacttcctgctgaccgccaagctgttcttcctc

SEQ ID NO: 7804 - DNA, 2988 bp, synthetic construct
  source 1..2988: mol_type = other DNA
atggccttaccagtgaccgccttgctcctgccgctggccttgctgctccacgccgccaggccggaagtgcagctggttgaatctggcggaggactggttcagcctggcggatctctgagactgtcttgtgccgccagcggcttcagcttcagcgacttttggatgagctgggtccgacaggcccctggcaaaggacttgaatgggtcgccacaatcagccaggccggcagcgagaaggactacgtggactctgtgaagggcagattcaccatcagccgggacaacgccaagaagtccctgtacctccagatgaacagcctgagagccgaggacaccgccgtgtactattgtgcctctggcgtgtacagcttcgactacagaggccagggcaccctggtcacagtctcttctggtaccggcggaggcggatctggcggcggaggtagcggtggcggaggatctgaattcgacatccagatgacacagagccctagcagcctgtctgccagcgtgggagacagagtgaccatcacatgcaaggccagccagggcttcaacaaatacgtggcctggtatcagcagaagcccggcaaggctcctaagctgctgatctactacaccagcacactccagcctggcgtgcccagcagattttctggctctggcagcggcagagactacaccctgacaatatccagcctccagccagaggacttcgccacctactactgtctccagtacggcaacctgctgtacgcctttggacagggcaccaaggtggaaatcaagagactcgaggacctgaagaacgtgttcccacctgaggtggccgtgttcgagcctagcgaggccgagatcagccacacccagaaagccaccctcgtgtgcctggctaccggcttctaccccgaccatgtggaactgtcttggtgggtcaacggcaaagaggtgcacagcggcgtgtgtaccgacccccagccactgaaagaacagcccgccctgaacgacagccggtactgcctgagcagcagactgagagtgtccgccaccttctggcagaacccccggaaccacttcagatgccaggtgcagttctacggcctgagcgagaacgacgagtggacccaggacagagccaagcccgtgacccagatcgtgtctgccgaagcctggggcagagccgatgatgtgattaagatccactggcaggaaaagaagtccaacaccatcctgggcagccaggaaggcaacaccatgaagaccaacgacacctacatgaagttcagctggctgaccgtgcccgagaagtccctggacaaagaacacagatgcatcgtgcggcacgaaaacaacaagaacggcgtggaccaggaaatcatcttcccacccatcaagaccgatgtgattacaatggaccccaaggacaactgctccaaggacgccaacgataccctgctgctccagctgaccaacaccagcgcctactacatgtacttgttgctgctgctgaagtccgtggtgtacttcgccatcatcacatgctgcctgctgcggagaaccgccttctgctgcaacggcgagaagtctagggccaagcgatctggatctggagcaacaaacttctcactactcaaacaagcaggtgacgtggaggagaatcccgggcctactagtatggactggatttggcgcatccttttccttgtcggcgctgctaccggcgcgcattccgggccccagctccagctgcaagagtctggacctggcctggtcaagcctagcgagacactgagcctgacctgtaccgtgtccggcgatagcatcagcagcggcgattactactggggctggatcagacagcctcctggcaaaggactggaatggatcggccacatctactacagcggcgtgacctactacaaccccagcctgaagtccagagtgaccatcagcgtggacaccagccggaaccagttctccctgaagctgtctagcgtgacagccgccgataccgccgtgtactactgcaccagagaggacagcagcaactggcggagtagaggccagggaacactggtcacagttagctctggatccggcggaggcggaagtggaggcggaggatctggcggcggaggctctttcgaagaagttcagcttgtgcagagcggagccgaagtgaagaaacctggggcctctgtgaaggtgtcctgcaaagccagcggctacacctttaccagctactggatcggctgggtccgacaggctcctggacaaggactggaatggatcggcgacatctatcccggcggaggctacaccaactacaacgagaagttcaagggccgcgtgacaatcaccagagacacctctacaagcaccgcctacctggaactgagcagcctgagaagcgaggacaccgccgtgtactactgcgccagactggatggcagcagctacagaggcgctatggattcttggggccagggcacactggtcaccgtttcttctacgcgtatccagaaccctgatcctgccgtgtaccagctgcgggatagcaagagcagcgacaagagcgtgtgtctgttcaccgacttcgacagccagaccaacgtgtcccagagcaaggactccgacgtgtacatcaccgataagtgcgtgctggacatgcggagcatggacttcaagagcaactccgccgtggcctggtccaacaagtccgatttcgcctgcgccaacgccttcaacaacagcattatccccgaggacacattcttcccaagccccgagagcagcgactccaccgaccacgtgaagcccaaagagacagagaacaccaagcagcccagcaagagctgccacaagcccaaggccatcgtgcacaccgagaaagtgaacatgatgagcctgaccgtgctgggcctgcggatgctgttcgccaaaaccgtggccgtgaacttcctgctgaccgccaagctgttcttcctc

SEQ ID NO: 7805 - DNA, 2976 bp, synthetic construct
  source 1..2976: mol_type = other DNA
atggccttaccagtgaccgccttgctcctgccgctggccttgctgctccacgccgccaggccggaagtgcagctggttgaatctggcggaggactggttcagcctggcggatctctgagactgtcttgtgccgccagcggcttcagcttcagcgacttttggatgagctgggtccgacaggcccctggcaaaggacttgaatgggtcgccacaatcagccaggccggcagcgagaaggactacgtggactctgtgaagggcagattcaccatcagccgggacaacgccaagaagtccctgtacctccagatgaacagcctgagagccgaggacaccgccgtgtactattgtgcctctggcgtgtacagcttcgactacagaggccagggcaccctggtcacagtctcttctggtaccggcggaggcggatctggcggcggaggtagcggtggcggaggatctgaattcgacatccagatgacacagagccctagcagcctgtctgccagcgtgggagacagagtgaccatcacctgtagagccagccaggacatccggtactacctgaactggtatcagcagaagcccggcaaggcccctaagctgctgatctatgtggcctccagcctccagagcggagtgccttctagattttctggcagcggctccggcaccgagtttaccctgacagtgtctagcttgcagcccgaggacttcgccacctactactgcctgcaagtgtacagcacccctcggacctttggacagggcaccaaggtggaaatcaaactcgaggacctgaagaacgtgttcccacctgaggtggccgtgttcgagcctagcgaggccgagatcagccacacccagaaagccaccctcgtgtgcctggctaccggcttctaccccgaccatgtggaactgtcttggtgggtcaacggcaaagaggtgcacagcggcgtgtgtaccgacccccagccactgaaagaacagcccgccctgaacgacagccggtactgcctgagcagcagactgagagtgtccgccaccttctggcagaacccccggaaccacttcagatgccaggtgcagttctacggcctgagcgagaacgacgagtggacccaggacagagccaagcccgtgacccagatcgtgtctgccgaagcctggggcagagccgatgatgtgattaagatccactggcaggaaaagaagtccaacaccatcctgggcagccaggaaggcaacaccatgaagaccaacgacacctacatgaagttcagctggctgaccgtgcccgagaagtccctggacaaagaacacagatgcatcgtgcggcacgaaaacaacaagaacggcgtggaccaggaaatcatcttcccacccatcaagaccgatgtgattacaatggaccccaaggacaactgctccaaggacgccaacgataccctgctgctccagctgaccaacaccagcgcctactacatgtacttgttgctgctgctgaagtccgtggtgtacttcgccatcatcacatgctgcctgctgcggagaaccgccttctgctgcaacggcgagaagtctagggccaagcgatctggatctggagcaacaaacttctcactactcaaacaagcaggtgacgtggaggagaatcccgggcctactagtatggactggatttggcgcatccttttccttgtcggcgctgctaccggcgcgcattccgggccccagctccagctgcaagagtctggacctggcctggtcaagcctagcgagacactgagcctgacctgtaccgtgtccggcgatagcatcagcagcggcgattactactggggctggatcagacagcctcctggcaaaggactggaatggatcggccacatctactacagcggcgtgacctactacaaccccagcctgaagtccagagtgaccatcagcgtggacaccagccggaaccagttctccctgaagctgtctagcgtgacagccgccgataccgccgtgtactactgcaccagagaggacagcagcaactggcggagtagaggccagggaacactggtcacagttagctctggatccggcggaggcggaagtggaggcggaggatctggcggcggaggctctttcgaagaagtgcagcttgttgaatctggcggcggactggctaagcctggcggatctctgagactgtcttgtgccgccagcggcttccggttcaccttcaacaactactacatggactgggtccgacaggcccctggacaaggacttgaatgggtgtccagaatcagcagcagcggcgaccctacttggtacgccgattctgtgaagggcagattcaccatcagcagagagaacgccaagaacaccctgttcctccagatgaactccctgagagccgaggacaccgccgtgtactattgtgcctctctgaccaccggcagcgattcttggggacagggcgtgctggttaccgtgtcatctacgcgtatccagaaccctgatcctgccgtgtaccagctgcgggatagcaagagcagcgacaagagcgtgtgtctgttcaccgacttcgacagccagaccaacgtgtcccagagcaaggactccgacgtgtacatcaccgataagtgcgtgctggacatgcggagcatggacttcaagagcaactccgccgtggcctggtccaacaagtccgatttcgcctgcgccaacgccttcaacaacagcattatccccgaggacacattcttcccaagccccgagagcagcgactccaccgaccacgtgaagcccaaagagacagagaacaccaagcagcccagcaagagctgccacaagcccaaggccatcgtgcacaccgagaaagtgaacatgatgagcctgaccgtgctgggcctgcggatgctgttcgccaaaaccgtggccgtgaacttcctgctgaccgccaagctgttcttcctc

SEQ ID NO: 7806 - DNA, 2979 bp, synthetic construct
  source 1..2979: mol_type = other DNA
atggccttaccagtgaccgccttgctcctgccgctggccttgctgctccacgccgccaggccggaagtgcagctggttgaatctggcggaggactggttcagcctggcggatctctgagactgtcttgtgccgccagcggcttcagcttcagcgacttttggatgagctgggtccgacaggcccctggcaaaggacttgaatgggtcgccacaatcagccaggccggcagcgagaaggactacgtggactctgtgaagggcagattcaccatcagccgggacaacgccaagaagtccctgtacctccagatgaacagcctgagagccgaggacaccgccgtgtactattgtgcctctggcgtgtacagcttcgactacagaggccagggcaccctggtcacagtctcttctggtaccggcggaggcggatctggcggcggaggtagcggtggcggaggatctgaattcgagatcgtgatgacacagagccccgccacactgagtgtgtctccaggcgaaagagccacactgtcctgtagagccagccagagcgtgtccagaaacctggcctggtatcagcagaagcctggacaggctccccggctgttgatctacggcgcttctacaagagccaccggcattcccgccagattttctggctctggcagcggcaccgagttcaccctgacaatcggaagcctccagagcgaggacttcgccgtgtactactgccagcagtacaagacctggcctcggacctttggacagggcaccaacgtggaaatcaaactcgaggacctgaagaacgtgttcccacctgaggtggccgtgttcgagcctagcgaggccgagatcagccacacccagaaagccaccctcgtgtgcctggctaccggcttctaccccgaccatgtggaactgtcttggtgggtcaacggcaaagaggtgcacagcggcgtgtgtaccgacccccagccactgaaagaacagcccgccctgaacgacagccggtactgcctgagcagcagactgagagtgtccgccaccttctggcagaacccccggaaccacttcagatgccaggtgcagttctacggcctgagcgagaacgacgagtggacccaggacagagccaagcccgtgacccagatcgtgtctgccgaagcctggggcagagccgatgatgtgattaagatccactggcaggaaaagaagtccaacaccatcctgggcagccaggaaggcaacaccatgaagaccaacgacacctacatgaagttcagctggctgaccgtgcccgagaagtccctggacaaagaacacagatgcatcgtgcggcacgaaaacaacaagaacggcgtggaccaggaaatcatcttcccacccatcaagaccgatgtgattacaatggaccccaaggacaactgctccaaggacgccaacgataccctgctgctccagctgaccaacaccagcgcctactacatgtacttgttgctgctgctgaagtccgtggtgtacttcgccatcatcacatgctgcctgctgcggagaaccgccttctgctgcaacggcgagaagtctagggccaagcgatctggatctggagcaacaaacttctcactactcaaacaagcaggtgacgtggaggagaatcccgggcctactagtatggactggatttggcgcatccttttccttgtcggcgctgctaccggcgcgcattccgggccccagctccagctgcaagagtctggacctggcctggtcaagcctagcgagacactgagcctgacctgtaccgtgtccggcgatagcatcagcagcggcgattactactggggctggatcagacagcctcctggcaaaggactggaatggatcggccacatctactacagcggcgtgacctactacaaccccagcctgaagtccagagtgaccatcagcgtggacaccagccggaaccagttctccctgaagctgtctagcgtgacagccgccgataccgccgtgtactactgcaccagagaggacagcagcaactggcggagtagaggccagggaacactggtcacagttagctctggatccggcggaggcggaagtggaggcggaggatctggcggcggaggctctttcgaacaagttcagctgcaacaatggggagccggcctgctgaagcctagcgaaacactgtctctgacctgcgccgtgttcggcggctctttcagcggctactactggtcctggatcagacagcctcctggcaaaggactggaatggatcggcgagatcaaccaccggggcaacaccaacgacaaccccagcctgaaaagcagagtgaccatcagcgtggacaccagcaagaaccagttcgccctgaagctgagcagcgtgacagccgctgataccgccgtgtattattgcgccagagagcggggctacacctacggcaatttcgatcactggggccagggcaccctggtcacagtttcttctacgcgtatccagaaccctgatcctgccgtgtaccagctgcgggatagcaagagcagcgacaagagcgtgtgtctgttcaccgacttcgacagccagaccaacgtgtcccagagcaaggactccgacgtgtacatcaccgataagtgcgtgctggacatgcggagcatggacttcaagagcaactccgccgtggcctggtccaacaagtccgatttcgcctgcgccaacgccttcaacaacagcattatccccgaggacacattcttcccaagccccgagagcagcgactccaccgaccacgtgaagcccaaagagacagagaacaccaagcagcccagcaagagctgccacaagcccaaggccatcgtgcacaccgagaaagtgaacatgatgagcctgaccgtgctgggcctgcggatgctgttcgccaaaaccgtggccgtgaacttcctgctgaccgccaagctgttcttcctc

SEQ ID NO: 7807 - DNA, 2982 bp, synthetic construct
  source 1..2982: mol_type = other DNA
atggccttaccagtgaccgccttgctcctgccgctggccttgctgctccacgccgccaggccggaagtgcagctggttgaatctggcggaggactggttcagcctggcggatctctgagactgtcttgtgccgccagcggcttcagcttcagcgacttttggatgagctgggtccgacaggcccctggcaaaggacttgaatgggtcgccacaatcagccaggccggcagcgagaaggactacgtggactctgtgaagggcagattcaccatcagccgggacaacgccaagaagtccctgtacctccagatgaacagcctgagagccgaggacaccgccgtgtactattgtgcctctggcgtgtacagcttcgactacagaggccagggcaccctggtcacagtctcttctggtaccggcggaggcggatctggcggcggaggtagcggtggcggaggatctgaattcgagatcgtgatgacccctagcagcgccacactgagtgtgtctccaggcgaaagagccacactgtcctgtagagccagccagagcgtgtccagaaacctggcctggtatcagcagaagcctggacaggctccccggctgttgatctacggcgcttctacaagagccaccggcattcccgccagattttctggctctggcagcggcaccgagttcaccctgacaatctctagcctccagagcgaggacttcgccgtgtactactgccaccagtacagcaactggatgtgcagcttcggccagggcaccaagctggaaatcaaactcgaggacctgaagaacgtgttcccacctgaggtggccgtgttcgagcctagcgaggccgagatcagccacacccagaaagccaccctcgtgtgcctggctaccggcttctaccccgaccatgtggaactgtcttggtgggtcaacggcaaagaggtgcacagcggcgtgtgtaccgacccccagccactgaaagaacagcccgccctgaacgacagccggtactgcctgagcagcagactgagagtgtccgccaccttctggcagaacccccggaaccacttcagatgccaggtgcagttctacggcctgagcgagaacgacgagtggacccaggacagagccaagcccgtgacccagatcgtgtctgccgaagcctggggcagagccgatgatgtgattaagatccactggcaggaaaagaagtccaacaccatcctgggcagccaggaaggcaacaccatgaagaccaacgacacctacatgaagttcagctggctgaccgtgcccgagaagtccctggacaaagaacacagatgcatcgtgcggcacgaaaacaacaagaacggcgtggaccaggaaatcatcttcccacccatcaagaccgatgtgattacaatggaccccaaggacaactgctccaaggacgccaacgataccctgctgctccagctgaccaacaccagcgcctactacatgtacttgttgctgctgctgaagtccgtggtgtacttcgccatcatcacatgctgcctgctgcggagaaccgccttctgctgcaacggcgagaagtctagggccaagcgatctggatctggagcaacaaacttctcactactcaaacaagcaggtgacgtggaggagaatcccgggcctactagtatggactggatttggcgcatccttttccttgtcggcgctgctaccggcgcgcattccgggccccagctccagctgcaagagtctggacctggcctggtcaagcctagcgagacactgagcctgacctgtaccgtgtccggcgatagcatcagcagcggcgattactactggggctggatcagacagcctcctggcaaaggactggaatggatcggccacatctactacagcggcgtgacctactacaaccccagcctgaagtccagagtgaccatcagcgtggacaccagccggaaccagttctccctgaagctgtctagcgtgacagccgccgataccgccgtgtactactgcaccagagaggacagcagcaactggcggagtagaggccagggaacactggtcacagttagctctggatccggcggaggcggaagtggaggcggaggatctggcggcggaggctctttcgaagaagttcagctccttgagtcaggtggcggcctggttcaacctggcggatctctgagactgagctgtgccgccagcggcttcacctttagcagatacgccatgaactgggtccgacaggcccctggcaaaggactggaatgggtgtccggcatctctggaagcggcggcagaacctactacgccgattctgtgaagggcagattcaccatcagccgggacaacagcaagaacaccctgtacctccagatgaacagcctgagagccgaggacacagccgtgtattattgcgccaaggaccgggacttttggagcggcccttttgactattggggccagggaaccctggtcaccgttagctctacgcgtatccagaaccctgatcctgccgtgtaccagctgcgggatagcaagagcagcgacaagagcgtgtgtctgttcaccgacttcgacagccagaccaacgtgtcccagagcaaggactccgacgtgtacatcaccgataagtgcgtgctggacatgcggagcatggacttcaagagcaactccgccgtggcctggtccaacaagtccgatttcgcctgcgccaacgccttcaacaacagcattatccccgaggacacattcttcccaagccccgagagcagcgactccaccgaccacgtgaagcccaaagagacagagaacaccaagcagcccagcaagagctgccacaagcccaaggccatcgtgcacaccgagaaagtgaacatgatgagcctgaccgtgctgggcctgcggatgctgttcgccaaaaccgtggccgtgaacttcctgctgaccgccaagctgttcttcctc

SEQ ID NO: 7808 - DNA, 2997 bp, synthetic construct
  source 1..2997: mol_type = other DNA
atggccttaccagtgaccgccttgctcctgccgctggccttgctgctccacgccgccaggccggaagtgcagctggttgaatctggcggaggactggttcagcctggcggatctctgagactgtcttgtgccgccagcggcttcagcttcagcgacttttggatgagctgggtccgacaggcccctggcaaaggacttgaatgggtcgccacaatcagccaggccggcagcgagaaggactacgtggactctgtgaagggcagattcaccatcagccgggacaacgccaagaagtccctgtacctccagatgaacagcctgagagccgaggacaccgccgtgtactattgtgcctctggcgtgtacagcttcgactacagaggccagggcaccctggtcacagtctcttctggtaccggcggaggcggatctggcggcggaggtagcggtggcggaggatctgaattcgacatccagatgacccagagccccagcagcctgtctgccagcgtgggcgacagagtgaccatcacatgcaaggccagcaagaacatcagaagctacctggcctggtatcagcagaagcccggcaaggcccccaagctgctgatctacagcggcagcacactgcacagcggcgtgcccagcagattttccggctctggcagcggcaccgacttcaccctgaccatctctagcctccagcccgaggacttcgccacctactactgccagcagcaccacgagtaccccctgacattcggccagggcaccaaggtggaaatcaagagactcgaggacctgaagaacgtgttcccacctgaggtggccgtgttcgagcctagcgaggccgagatcagccacacccagaaagccaccctcgtgtgcctggctaccggcttctaccccgaccatgtggaactgtcttggtgggtcaacggcaaagaggtgcacagcggcgtgtgtaccgacccccagccactgaaagaacagcccgccctgaacgacagccggtactgcctgagcagcagactgagagtgtccgccaccttctggcagaacccccggaaccacttcagatgccaggtgcagttctacggcctgagcgagaacgacgagtggacccaggacagagccaagcccgtgacccagatcgtgtctgccgaagcctggggcagagccgatgatgtgattaagatccactggcaggaaaagaagtccaacaccatcctgggcagccaggaaggcaacaccatgaagaccaacgacacctacatgaagttcagctggctgaccgtgcccgagaagtccctggacaaagaacacagatgcatcgtgcggcacgaaaacaacaagaacggcgtggaccaggaaatcatcttcccacccatcaagaccgatgtgattacaatggaccccaaggacaactgctccaaggacgccaacgataccctgctgctccagctgaccaacaccagcgcctactacatgtacttgttgctgctgctgaagtccgtggtgtacttcgccatcatcacatgctgcctgctgcggagaaccgccttctgctgcaacggcgagaagtctagggccaagcgatctggatctggagcaacaaacttctcactactcaaacaagcaggtgacgtggaggagaatcccgggcctactagtatggactggatttggcgcatccttttccttgtcggcgctgctaccggcgcgcattccgggccccagctccagctgcaagagtctggacctggcctggtcaagcctagcgagacactgagcctgacctgtaccgtgtccggcgatagcatcagcagcggcgattactactggggctggatcagacagcctcctggcaaaggactggaatggatcggccacatctactacagcggcgtgacctactacaaccccagcctgaagtccagagtgaccatcagcgtggacaccagccggaaccagttctccctgaagctgtctagcgtgacagccgccgataccgccgtgtactactgcaccagagaggacagcagcaactggcggagtagaggccagggaacactggtcacagttagctctggatccggcggaggcggaagtggaggcggaggatctggcggcggaggctctttcgaacaggtgcaactccaggaatctggccccggactcgtgaagcccagcgagacactgagcctgacctgtaccgtgtccggctacaccatcaccagcggctacgactggtcctggatcagacagcctcctggcaagggcctggaatggatcggctacatcaactacggcggctccaccaactacaagcccagcctgggaagccgcgtgacaatcagcgtggacacctccaagaaccagttcagcctgaagctgagcagcgtgacagccgccgataccgccgtgtactactgcgcccggtacaacgagtacaagagctacatctacgattggtacttcgacttctggggccagggaaccctcgtgaccgtgtctagtacgcgtatccagaaccctgatcctgccgtgtaccagctgcgggatagcaagagcagcgacaagagcgtgtgtctgttcaccgacttcgacagccagaccaacgtgtcccagagcaaggactccgacgtgtacatcaccgataagtgcgtgctggacatgcggagcatggacttcaagagcaactccgccgtggcctggtccaacaagtccgatttcgcctgcgccaacgccttcaacaacagcattatccccgaggacacattcttcccaagccccgagagcagcgactccaccgaccacgtgaagcccaaagagacagagaacaccaagcagcccagcaagagctgccacaagcccaaggccatcgtgcacaccgagaaagtgaacatgatgagcctgaccgtgctgggcctgcggatgctgttcgccaaaaccgtggccgtgaacttcctgctgaccgccaagctgttcttcctc

SEQ ID NO: 7809 - DNA, 3003 bp, synthetic construct
  source 1..3003: mol_type = other DNA
atggccttaccagtgaccgccttgctcctgccgctggccttgctgctccacgccgccaggccggaagtgcagctggttgaatctggcggaggactggttcagcctggcggatctctgagactgtcttgtgccgccagcggcttcagcttcagcgacttttggatgagctgggtccgacaggcccctggcaaaggacttgaatgggtcgccacaatcagccaggccggcagcgagaaggactacgtggactctgtgaagggcagattcaccatcagccgggacaacgccaagaagtccctgtacctccagatgaacagcctgagagccgaggacaccgccgtgtactattgtgcctctggcgtgtacagcttcgactacagaggccagggcaccctggtcacagtctcttctggtaccggcggaggcggatctggcggcggaggtagcggtggcggaggatctgaattccagtctgtggtcacacagcctccatccgtgtctgctgcccctggacagaaagtgaccatctcctgtagcggcagcagcagcaacatcggcaacaactacgtgtcctggtatcagcagctccccggcacagctcccaaactgctgatctacgacaacaacaagcggcccagcggcatccccgatagattttctggcagcaagagcggcaccagcgccacactgggaattaccggacttcagacaggcgacgaggccgactactactgtggcacatgggatggcagcctgtacaccatgcttttcggcggaggcaccaagctgacagtgcttctcgaggacctgaagaacgtgttcccacctgaggtggccgtgttcgagcctagcgaggccgagatcagccacacccagaaagccaccctcgtgtgcctggctaccggcttctaccccgaccatgtggaactgtcttggtgggtcaacggcaaagaggtgcacagcggcgtgtgtaccgacccccagccactgaaagaacagcccgccctgaacgacagccggtactgcctgagcagcagactgagagtgtccgccaccttctggcagaacccccggaaccacttcagatgccaggtgcagttctacggcctgagcgagaacgacgagtggacccaggacagagccaagcccgtgacccagatcgtgtctgccgaagcctggggcagagccgatgatgtgattaagatccactggcaggaaaagaagtccaacaccatcctgggcagccaggaaggcaacaccatgaagaccaacgacacctacatgaagttcagctggctgaccgtgcccgagaagtccctggacaaagaacacagatgcatcgtgcggcacgaaaacaacaagaacggcgtggaccaggaaatcatcttcccacccatcaagaccgatgtgattacaatggaccccaaggacaactgctccaaggacgccaacgataccctgctgctccagctgaccaacaccagcgcctactacatgtacttgttgctgctgctgaagtccgtggtgtacttcgccatcatcacatgctgcctgctgcggagaaccgccttctgctgcaacggcgagaagtctagggccaagcgatctggatctggagcaacaaacttctcactactcaaacaagcaggtgacgtggaggagaatcccgggcctactagtatggactggatttggcgcatccttttccttgtcggcgctgctaccggcgcgcattccgggccccagctccagctgcaagagtctggacctggcctggtcaagcctagcgagacactgagcctgacctgtaccgtgtccggcgatagcatcagcagcggcgattactactggggctggatcagacagcctcctggcaaaggactggaatggatcggccacatctactacagcggcgtgacctactacaaccccagcctgaagtccagagtgaccatcagcgtggacaccagccggaaccagttctccctgaagctgtctagcgtgacagccgccgataccgccgtgtactactgcaccagagaggacagcagcaactggcggagtagaggccagggaacactggtcacagttagctctggatccggcggaggcggaagtggaggcggaggatctggcggcggaggctctttcgaagaagtgcaactggtggaatctggcggcggactggttaagcctggcggatctctgagactgtcttgtgccgccagcggcttcaccttcagcaatgcctggatgagctgggttcgacaggcccctggaaaaggactggaatgggtcggattcatccggtccaaagcctacggcggcaccacagaatatgccgcctctgtgaagggcagattcaccatcagccgggacgacagcaagtctatcgcctacctccagatgaacaacctgaaaaccgaggacaccgccgtgtactactgcgccagagatggcctgtacagcagctcttggtacgacagcgattactggggccagggcacactggtcacagtgtcatctacgcgtatccagaaccctgatcctgccgtgtaccagctgcgggatagcaagagcagcgacaagagcgtgtgtctgttcaccgacttcgacagccagaccaacgtgtcccagagcaaggactccgacgtgtacatcaccgataagtgcgtgctggacatgcggagcatggacttcaagagcaactccgccgtggcctggtccaacaagtccgatttcgcctgcgccaacgccttcaacaacagcattatccccgaggacacattcttcccaagccccgagagcagcgactccaccgaccacgtgaagcccaaagagacagagaacaccaagcagcccagcaagagctgccacaagcccaaggccatcgtgcacaccgagaaagtgaacatgatgagcctgaccgtgctgggcctgcggatgctgttcgccaaaaccgtggccgtgaacttcctgctgaccgccaagctgttcttcctc

SEQ ID NO: 7810 - DNA, 3018 bp, synthetic construct
  source 1..3018: mol_type = other DNA
atggccttaccagtgaccgccttgctcctgccgctggccttgctgctccacgccgccaggccggaagtgcagctggttgaatctggcggaggactggttcagcctggcggatctctgagactgtcttgtgccgccagcggcttcagcttcagcgacttttggatgagctgggtccgacaggcccctggcaaaggacttgaatgggtcgccacaatcagccaggccggcagcgagaaggactacgtggactctgtgaagggcagattcaccatcagccgggacaacgccaagaagtccctgtacctccagatgaacagcctgagagccgaggacaccgccgtgtactattgtgcctctggcgtgtacagcttcgactacagaggccagggcaccctggtcacagtctcttctggtaccggcggaggcggatctggcggcggaggtagcggtggcggaggatctgaattccagtctgtgctgacacagcctcctagtgtgtctggcgctcctggacagagagtgaccatctcttgtaccggcagcagcagcaatatcggagccggctatgacgtgcactggtatcagcagctccctggcacagcccctaaactgctgatcttcggcaacagcaacagacccagcggcgtgcccgatagattcagcggctttaagagcggcacaagcgccagcctggctatcactggactgcaagccgaggacgaggccgactacttctgccagagctacgatagcagcctgagcggcagcggagtgtttggcacaggcaccaaagtgacagtgcttggcctcgaggacctgaagaacgtgttcccacctgaggtggccgtgttcgagcctagcgaggccgagatcagccacacccagaaagccaccctcgtgtgcctggctaccggcttctaccccgaccatgtggaactgtcttggtgggtcaacggcaaagaggtgcacagcggcgtgtgtaccgacccccagccactgaaagaacagcccgccctgaacgacagccggtactgcctgagcagcagactgagagtgtccgccaccttctggcagaacccccggaaccacttcagatgccaggtgcagttctacggcctgagcgagaacgacgagtggacccaggacagagccaagcccgtgacccagatcgtgtctgccgaagcctggggcagagccgatgatgtgattaagatccactggcaggaaaagaagtccaacaccatcctgggcagccaggaaggcaacaccatgaagaccaacgacacctacatgaagttcagctggctgaccgtgcccgagaagtccctggacaaagaacacagatgcatcgtgcggcacgaaaacaacaagaacggcgtggaccaggaaatcatcttcccacccatcaagaccgatgtgattacaatggaccccaaggacaactgctccaaggacgccaacgataccctgctgctccagctgaccaacaccagcgcctactacatgtacttgttgctgctgctgaagtccgtggtgtacttcgccatcatcacatgctgcctgctgcggagaaccgccttctgctgcaacggcgagaagtctagggccaagcgatctggatctggagcaacaaacttctcactactcaaacaagcaggtgacgtggaggagaatcccgggcctactagtatggactggatttggcgcatccttttccttgtcggcgctgctaccggcgcgcattccgggccccagctccagctgcaagagtctggacctggcctggtcaagcctagcgagacactgagcctgacctgtaccgtgtccggcgatagcatcagcagcggcgattactactggggctggatcagacagcctcctggcaaaggactggaatggatcggccacatctactacagcggcgtgacctactacaaccccagcctgaagtccagagtgaccatcagcgtggacaccagccggaaccagttctccctgaagctgtctagcgtgacagccgccgataccgccgtgtactactgcaccagagaggacagcagcaactggcggagtagaggccagggaacactggtcacagttagctctggatccggcggaggcggaagtggaggcggaggatctggcggcggaggctctttcgaacaaatgcaactggttcaaagcggcggtggcctggtgcaacctggaagaagtctgagactgagctgtgccgccagcggcttcaccttcgatgattacgccatgcactgggtccgacaggcccctggaaaaggactggaatgggtgtccggcatctcctggaatagcggctctatcggctacgccgacagcgtgaagggcagattcaccatcagccgggacaacgccaagaacagcctgtacctccagatgaactccctgagagccgaggatacagccctgtactactgcgccaaggacatccacagcggcagctactacggcctgctgtactacgctatggacgtgtggggccagggcacaaccgtgacagtttcttctacgcgtatccagaaccctgatcctgccgtgtaccagctgcgggatagcaagagcagcgacaagagcgtgtgtctgttcaccgacttcgacagccagaccaacgtgtcccagagcaaggactccgacgtgtacatcaccgataagtgcgtgctggacatgcggagcatggacttcaagagcaactccgccgtggcctggtccaacaagtccgatttcgcctgcgccaacgccttcaacaacagcattatccccgaggacacattcttcccaagccccgagagcagcgactccaccgaccacgtgaagcccaaagagacagagaacaccaagcagcccagcaagagctgccacaagcccaaggccatcgtgcacaccgagaaagtgaacatgatgagcctgaccgtgctgggcctgcggatgctgttcgccaaaaccgtggccgtgaacttcctgctgaccgccaagctgttcttcctc

SEQ ID NO: 7811 - DNA, 3018 bp, synthetic construct
  source 1..3018: mol_type = other DNA
atggccttaccagtgaccgccttgctcctgccgctggccttgctgctccacgccgccaggccggaagtgcagctggttgaatctggcggaggactggttcagcctggcggatctctgagactgtcttgtgccgccagcggcttcagcttcagcgacttttggatgagctgggtccgacaggcccctggcaaaggacttgaatgggtcgccacaatcagccaggccggcagcgagaaggactacgtggactctgtgaagggcagattcaccatcagccgggacaacgccaagaagtccctgtacctccagatgaacagcctgagagccgaggacaccgccgtgtactattgtgcctctggcgtgtacagcttcgactacagaggccagggcaccctggtcacagtctcttctggtaccggcggaggcggatctggcggcggaggtagcggtggcggaggatctgaattcctgcctgttctgacacagcctccatctgcctctggcacacctggacagagagtgaccatcagctgtagcggcagaagcagcaacatcggcagcaacagcgtgaactggtacagacagcttcctggcgctgcccctaagctgctgatctacagcaacaaccagcggcctcctggcgtgccagtcagattttctggcagcaagagcggcacaagcgccagcctggctatttctggactccagtctgaggacgaggccacctactactgtgccacctgggacgacaacctgaacgtgcactacgtgttcggcaccggcaccaaagtgacagtgcttggaagtagactcgaggacctgaagaacgtgttcccacctgaggtggccgtgttcgagcctagcgaggccgagatcagccacacccagaaagccaccctcgtgtgcctggctaccggcttctaccccgaccatgtggaactgtcttggtgggtcaacggcaaagaggtgcacagcggcgtgtgtaccgacccccagccactgaaagaacagcccgccctgaacgacagccggtactgcctgagcagcagactgagagtgtccgccaccttctggcagaacccccggaaccacttcagatgccaggtgcagttctacggcctgagcgagaacgacgagtggacccaggacagagccaagcccgtgacccagatcgtgtctgccgaagcctggggcagagccgatgatgtgattaagatccactggcaggaaaagaagtccaacaccatcctgggcagccaggaaggcaacaccatgaagaccaacgacacctacatgaagttcagctggctgaccgtgcccgagaagtccctggacaaagaacacagatgcatcgtgcggcacgaaaacaacaagaacggcgtggaccaggaaatcatcttcccacccatcaagaccgatgtgattacaatggaccccaaggacaactgctccaaggacgccaacgataccctgctgctccagctgaccaacaccagcgcctactacatgtacttgttgctgctgctgaagtccgtggtgtacttcgccatcatcacatgctgcctgctgcggagaaccgccttctgctgcaacggcgagaagtctagggccaagcgatctggatctggagcaacaaacttctcactactcaaacaagcaggtgacgtggaggagaatcccgggcctactagtatggactggatttggcgcatccttttccttgtcggcgctgctaccggcgcgcattccgggccccagctccagctgcaagagtctggacctggcctggtcaagcctagcgagacactgagcctgacctgtaccgtgtccggcgatagcatcagcagcggcgattactactggggctggatcagacagcctcctggcaaaggactggaatggatcggccacatctactacagcggcgtgacctactacaaccccagcctgaagtccagagtgaccatcagcgtggacaccagccggaaccagttctccctgaagctgtctagcgtgacagccgccgataccgccgtgtactactgcaccagagaggacagcagcaactggcggagtagaggccagggaacactggtcacagttagctctggatccggcggaggcggaagtggaggcggaggatctggcggcggaggctctttcgaacttgaaatggctcaggtgcagctggtgcagagcggagccgaagtgaagaaacctggcagcagcgtgaaggtgtcctgcaaagcttctggcggcaccttcagcagctacgccatctcttgggttcgacaggcccctggacaaggactggaatggatgggcagaatcatccccatcctgggaatcgccaactacgcccagaaattccagggcagagtgacaatcaccgccgacaagagcaccagcaccgcctacatggaactgagcagcctgagaagcgaggacaccgccgtgtactattgtgcaagaggcggctactacagccacgacatgtggagcgaagattggggccagggcacactggtcacagtgtcatctacgcgtatccagaaccctgatcctgccgtgtaccagctgcgggatagcaagagcagcgacaagagcgtgtgtctgttcaccgacttcgacagccagaccaacgtgtcccagagcaaggactccgacgtgtacatcaccgataagtgcgtgctggacatgcggagcatggacttcaagagcaactccgccgtggcctggtccaacaagtccgatttcgcctgcgccaacgccttcaacaacagcattatccccgaggacacattcttcccaagccccgagagcagcgactccaccgaccacgtgaagcccaaagagacagagaacaccaagcagcccagcaagagctgccacaagcccaaggccatcgtgcacaccgagaaagtgaacatgatgagcctgaccgtgctgggcctgcggatgctgttcgccaaaaccgtggccgtgaacttcctgctgaccgccaagctgttcttcctc

SEQ ID NO: 7812 - DNA, 3000 bp, synthetic construct
  source 1..3000: mol_type = other DNA
atggccttaccagtgaccgccttgctcctgccgctggccttgctgctccacgccgccaggccggaagtgcagctggttgaatctggcggaggactggttcagcctggcggatctctgagactgtcttgtgccgccagcggcttcagcttcagcgacttttggatgagctgggtccgacaggcccctggcaaaggacttgaatgggtcgccacaatcagccaggccggcagcgagaaggactacgtggactctgtgaagggcagattcaccatcagccgggacaacgccaagaagtccctgtacctccagatgaacagcctgagagccgaggacaccgccgtgtactattgtgcctctggcgtgtacagcttcgactacagaggccagggcaccctggtcacagtctcttctggtaccggcggaggcggatctggcggcggaggtagcggtggcggaggatctgaattcgacttcgtgatgacacagagccctgatagcctggccgtgtctctcggcgagcgagtgaccatgagctgcaagtctagccagagcctgctgaacagcggcaaccagaagaactacctgacctggtatcagcagaagcccggccagcctcctaagctgctgatctactgggccagcaccagagaaagcggcgtgcccgatagattttctggctctggcagcggcaccgacttcaccctgacaatttctagcctgcaagccgaggacgtggccgtgtactactgccagaacgactacagctacccctacaccttcggccagggcaccaagctggaaatcaaactcgaggacctgaagaacgtgttcccacctgaggtggccgtgttcgagcctagcgaggccgagatcagccacacccagaaagccaccctcgtgtgcctggctaccggcttctaccccgaccatgtggaactgtcttggtgggtcaacggcaaagaggtgcacagcggcgtgtgtaccgacccccagccactgaaagaacagcccgccctgaacgacagccggtactgcctgagcagcagactgagagtgtccgccaccttctggcagaacccccggaaccacttcagatgccaggtgcagttctacggcctgagcgagaacgacgagtggacccaggacagagccaagcccgtgacccagatcgtgtctgccgaagcctggggcagagccgatgatgtgattaagatccactggcaggaaaagaagtccaacaccatcctgggcagccaggaaggcaacaccatgaagaccaacgacacctacatgaagttcagctggctgaccgtgcccgagaagtccctggacaaagaacacagatgcatcgtgcggcacgaaaacaacaagaacggcgtggaccaggaaatcatcttcccacccatcaagaccgatgtgattacaatggaccccaaggacaactgctccaaggacgccaacgataccctgctgctccagctgaccaacaccagcgcctactacatgtacttgttgctgctgctgaagtccgtggtgtacttcgccatcatcacatgctgcctgctgcggagaaccgccttctgctgcaacggcgagaagtctagggccaagcgatctggatctggagcaacaaacttctcactactcaaacaagcaggtgacgtggaggagaatcccgggcctactagtatggactggatttggcgcatccttttccttgtcggcgctgctaccggcgcgcattccgggccccagctccagctgcaagagtctggacctggcctggtcaagcctagcgagacactgagcctgacctgtaccgtgtccggcgatagcatcagcagcggcgattactactggggctggatcagacagcctcctggcaaaggactggaatggatcggccacatctactacagcggcgtgacctactacaaccccagcctgaagtccagagtgaccatcagcgtggacaccagccggaaccagttctccctgaagctgtctagcgtgacagccgccgataccgccgtgtactactgcaccagagaggacagcagcaactggcggagtagaggccagggaacactggtcacagttagctctggatccggcggaggcggaagtggaggcggaggatctggcggcggaggctctttcgaagaagtgcaactggttcagagcggagccgagctgaagaaacctggggccagcgtgaaggtgtcctgtaaagccagcggctacacctttaccgactactacatgaaatgggtccgacaggccccaggccagggactcgaatggatcggcgatattatccccagcaacggggccaccttctacaaccagaaattcaagggccgcgtgaccatcaccgtggacaagagcacaagcaccgcctacatggaactgagcagcctgagaagcgaggacaccgccgtgtattattgcgccagaagccatctgctgcgggccagttggttcgcctattggggacagggaaccctggtcaccgttagctctacgcgtatccagaaccctgatcctgccgtgtaccagctgcgggatagcaagagcagcgacaagagcgtgtgtctgttcaccgacttcgacagccagaccaacgtgtcccagagcaaggactccgacgtgtacatcaccgataagtgcgtgctggacatgcggagcatggacttcaagagcaactccgccgtggcctggtccaacaagtccgatttcgcctgcgccaacgccttcaacaacagcattatccccgaggacacattcttcccaagccccgagagcagcgactccaccgaccacgtgaagcccaaagagacagagaacaccaagcagcccagcaagagctgccacaagcccaaggccatcgtgcacaccgagaaagtgaacatgatgagcctgaccgtgctgggcctgcggatgctgttcgccaaaaccgtggccgtgaacttcctgctgaccgccaagctgttcttcctc

SEQ ID NO: 7813 - DNA, 3000 bp, synthetic construct
  source 1..3000: mol_type = other DNA
atggccttaccagtgaccgccttgctcctgccgctggccttgctgctccacgccgccaggccggaagtgcagctggttgaatctggcggaggactggttcagcctggcggatctctgagactgtcttgtgccgccagcggcttcagcttcagcgacttttggatgagctgggtccgacaggcccctggcaaaggacttgaatgggtcgccacaatcagccaggccggcagcgagaaggactacgtggactctgtgaagggcagattcaccatcagccgggacaacgccaagaagtccctgtacctccagatgaacagcctgagagccgaggacaccgccgtgtactattgtgcctctggcgtgtacagcttcgactacagaggccagggcaccctggtcacagtctcttctggtaccggcggaggcggatctggcggcggaggtagcggtggcggaggatctgaattcgacttcgtgatgacacagagccctgatagcctggccgtgtctctcggcgagcgagtgaccatgagctgcaagtctagccagagcctgctgaacagcggcaaccagaagaactacctgacctggtatcagcagaagcccggccagcctcctaagctgctgatctactgggccagcaccagagaaagcggcgtgcccgatagattttctggctctggcagcggcaccgacttcaccctgacaatttctagcctgcaagccgaggacgtggccgtgtactactgccagaacgactacagctacccctacaccttcggccagggcaccaagctggaaatcaaactcgaggacctgaagaacgtgttcccacctgaggtggccgtgttcgagcctagcgaggccgagatcagccacacccagaaagccaccctcgtgtgcctggctaccggcttctaccccgaccatgtggaactgtcttggtgggtcaacggcaaagaggtgcacagcggcgtgtgtaccgacccccagccactgaaagaacagcccgccctgaacgacagccggtactgcctgagcagcagactgagagtgtccgccaccttctggcagaacccccggaaccacttcagatgccaggtgcagttctacggcctgagcgagaacgacgagtggacccaggacagagccaagcccgtgacccagatcgtgtctgccgaagcctggggcagagccgatgatgtgattaagatccactggcaggaaaagaagtccaacaccatcctgggcagccaggaaggcaacaccatgaagaccaacgacacctacatgaagttcagctggctgaccgtgcccgagaagtccctggacaaagaacacagatgcatcgtgcggcacgaaaacaacaagaacggcgtggaccaggaaatcatcttcccacccatcaagaccgatgtgattacaatggaccccaaggacaactgctccaaggacgccaacgataccctgctgctccagctgaccaacaccagcgcctactacatgtacttgttgctgctgctgaagtccgtggtgtacttcgccatcatcacatgctgcctgctgcggagaaccgccttctgctgcaacggcgagaagtctagggccaagcgatctggatctggagcaacaaacttctcactactcaaacaagcaggtgacgtggaggagaatcccgggcctactagtatggactggatttggcgcatccttttccttgtcggcgctgctaccggcgcgcattccgggccccagctccagctgcaagagtctggacctggcctggtcaagcctagcgagacactgagcctgacctgtaccgtgtccggcgatagcatcagcagcggcgattactactggggctggatcagacagcctcctggcaaaggactggaatggatcggccacatctactacagcggcgtgacctactacaaccccagcctgaagtccagagtgaccatcagcgtggacaccagccggaaccagttctccctgaagctgtctagcgtgacagccgccgataccgccgtgtactactgcaccagagaggacagcagcaactggcggagtagaggccagggaacactggtcacagttagctctggatccggcggaggcggaagtggaggcggaggatctggcggcggaggctctttcgaacaagtgcaactggttcagagcggagccgagctgaagaaacctggggccagcgtgaaggtgtcctgtaaagccagcggctacacctttaccgactactacatgaaatgggtccgacaggccccaggccagggactcgaatggatcggcgatattatccccagcaacggggccaccttctacaaccagaaattcaagggccgcgtgaccatcaccgtggacaagagcacaagcaccgcctacatggaactgagcagcctgagaagcgaggacaccgccgtgtattattgcgccagaagccatctgctgcgggccagttggttcgcctattggggacagggaaccctggtcaccgttagctctacgcgtatccagaaccctgatcctgccgtgtaccagctgcgggatagcaagagcagcgacaagagcgtgtgtctgttcaccgacttcgacagccagaccaacgtgtcccagagcaaggactccgacgtgtacatcaccgataagtgcgtgctggacatgcggagcatggacttcaagagcaactccgccgtggcctggtccaacaagtccgatttcgcctgcgccaacgccttcaacaacagcattatccccgaggacacattcttcccaagccccgagagcagcgactccaccgaccacgtgaagcccaaagagacagagaacaccaagcagcccagcaagagctgccacaagcccaaggccatcgtgcacaccgagaaagtgaacatgatgagcctgaccgtgctgggcctgcggatgctgttcgccaaaaccgtggccgtgaacttcctgctgaccgccaagctgttcttcctc

SEQ ID NO: 7814 - DNA, 2970 bp, synthetic construct
  source 1..2970: mol_type = other DNA
atggccttaccagtgaccgccttgctcctgccgctggccttgctgctccacgccgccaggccggaagtgcagctggttgaatctggcggaggactggttcagcctggcggatctctgagactgtcttgtgccgccagcggcttcagcttcagcgacttttggatgagctgggtccgacaggcccctggcaaaggacttgaatgggtcgccacaatcagccaggccggcagcgagaaggactacgtggactctgtgaagggcagattcaccatcagccgggacaacgccaagaagtccctgtacctccagatgaacagcctgagagccgaggacaccgccgtgtactattgtgcctctggcgtgtacagcttcgactacagaggccagggcaccctggtcacagtctcttctggtaccggcggaggcggatctggcggcggaggtagcggtggcggaggatctgaattcgacgtgcagatcacacagagccctagctacctggctgcctctcctggcgagacaatcaccatcaactgtcgggccagcaagagcatcagcaaggacctggcctggtatcaagagaagcccggcaagaccaacaagctgctgatctacagcggcagcacactccagtctggcatccccagcagattttccggctctggcagcggcaccgatttcaccctgaccataagcagcctggaacctgaggacttcgccatgtactactgccagcagcacaacaagtacccctacacctttggcggaggcaccaagctggaaatcaagagactcgaggacctgaagaacgtgttcccacctgaggtggccgtgttcgagcctagcgaggccgagatcagccacacccagaaagccaccctcgtgtgcctggctaccggcttctaccccgaccatgtggaactgtcttggtgggtcaacggcaaagaggtgcacagcggcgtgtgtaccgacccccagccactgaaagaacagcccgccctgaacgacagccggtactgcctgagcagcagactgagagtgtccgccaccttctggcagaacccccggaaccacttcagatgccaggtgcagttctacggcctgagcgagaacgacgagtggacccaggacagagccaagcccgtgacccagatcgtgtctgccgaagcctggggcagagccgatgatgtgattaagatccactggcaggaaaagaagtccaacaccatcctgggcagccaggaaggcaacaccatgaagaccaacgacacctacatgaagttcagctggctgaccgtgcccgagaagtccctggacaaagaacacagatgcatcgtgcggcacgaaaacaacaagaacggcgtggaccaggaaatcatcttcccacccatcaagaccgatgtgattacaatggaccccaaggacaactgctccaaggacgccaacgataccctgctgctccagctgaccaacaccagcgcctactacatgtacttgttgctgctgctgaagtccgtggtgtacttcgccatcatcacatgctgcctgctgcggagaaccgccttctgctgcaacggcgagaagtctagggccaagcgatctggatctggagcaacaaacttctcactactcaaacaagcaggtgacgtggaggagaatcccgggcctactagtatggactggatttggcgcatccttttccttgtcggcgctgctaccggcgcgcattccgggccccagctccagctgcaagagtctggacctggcctggtcaagcctagcgagacactgagcctgacctgtaccgtgtccggcgatagcatcagcagcggcgattactactggggctggatcagacagcctcctggcaaaggactggaatggatcggccacatctactacagcggcgtgacctactacaaccccagcctgaagtccagagtgaccatcagcgtggacaccagccggaaccagttctccctgaagctgtctagcgtgacagccgccgataccgccgtgtactactgcaccagagaggacagcagcaactggcggagtagaggccagggaacactggtcacagttagctctggatccggcggaggcggaagtggaggcggaggatctggcggcggaggctctttcgaacaagttcaactgcaacagcctggggccgagcttgttagacctggcgcttctgtgaagctgagctgcaaggccagcggctacaccttcaccagctactggatgaactgggtcaagcagcggcctgaccagggcctcgaatggatcggcagaatcgacccctacgacagcgagacacactacaaccagaagttcaaggacaaggccatcctgaccgtggacaagagcagctccaccgcctacatgcaactgagcagcctgacctctgaggatagcgccgtgtactattgcgccagaggcaactgggacgactattggggccagggcacaaccctgacagtgtctagtacgcgtatccagaaccctgatcctgccgtgtaccagctgcgggatagcaagagcagcgacaagagcgtgtgtctgttcaccgacttcgacagccagaccaacgtgtcccagagcaaggactccgacgtgtacatcaccgataagtgcgtgctggacatgcggagcatggacttcaagagcaactccgccgtggcctggtccaacaagtccgatttcgcctgcgccaacgccttcaacaacagcattatccccgaggacacattcttcccaagccccgagagcagcgactccaccgaccacgtgaagcccaaagagacagagaacaccaagcagcccagcaagagctgccacaagcccaaggccatcgtgcacaccgagaaagtgaacatgatgagcctgaccgtgctgggcctgcggatgctgttcgccaaaaccgtggccgtgaacttcctgctgaccgccaagctgttcttcctc

SEQ ID NO: 7815 - DNA, 2976 bp, synthetic construct
  source 1..2976: mol_type = other DNA
atggccttaccagtgaccgccttgctcctgccgctggccttgctgctccacgccgccaggccggaagtgcagctggttgaatctggcggaggactggttcagcctggcggatctctgagactgtcttgtgccgccagcggcttcagcttcagcgacttttggatgagctgggtccgacaggcccctggcaaaggacttgaatgggtcgccacaatcagccaggccggcagcgagaaggactacgtggactctgtgaagggcagattcaccatcagccgggacaacgccaagaagtccctgtacctccagatgaacagcctgagagccgaggacaccgccgtgtactattgtgcctctggcgtgtacagcttcgactacagaggccagggcaccctggtcacagtctcttctggtaccggcggaggcggatctggcggcggaggtagcggtggcggaggatctgaattcgagatcgtgctgacacagagccctaccagcatgacagcctctccaggcgagcaagtgaccatcacctgtagagccagcagcagcatcaactacatgcactggtatcagcagaagcctggcgcaagccccagaccttggatctacgagacaagcaagctggcctccggcgtgcccgatagattttctggatctgccagcggcaccagctacagcctgaccatcaacaacatggaagccgaggacgccgccacctactactgccagcagtggaattacccctcctggacctttggcggaggcaccaagctggaacttaaactcgaggacctgaagaacgtgttcccacctgaggtggccgtgttcgagcctagcgaggccgagatcagccacacccagaaagccaccctcgtgtgcctggctaccggcttctaccccgaccatgtggaactgtcttggtgggtcaacggcaaagaggtgcacagcggcgtgtgtaccgacccccagccactgaaagaacagcccgccctgaacgacagccggtactgcctgagcagcagactgagagtgtccgccaccttctggcagaacccccggaaccacttcagatgccaggtgcagttctacggcctgagcgagaacgacgagtggacccaggacagagccaagcccgtgacccagatcgtgtctgccgaagcctggggcagagccgatgatgtgattaagatccactggcaggaaaagaagtccaacaccatcctgggcagccaggaaggcaacaccatgaagaccaacgacacctacatgaagttcagctggctgaccgtgcccgagaagtccctggacaaagaacacagatgcatcgtgcggcacgaaaacaacaagaacggcgtggaccaggaaatcatcttcccacccatcaagaccgatgtgattacaatggaccccaaggacaactgctccaaggacgccaacgataccctgctgctccagctgaccaacaccagcgcctactacatgtacttgttgctgctgctgaagtccgtggtgtacttcgccatcatcacatgctgcctgctgcggagaaccgccttctgctgcaacggcgagaagtctagggccaagcgatctggatctggagcaacaaacttctcactactcaaacaagcaggtgacgtggaggagaatcccgggcctactagtatggactggatttggcgcatccttttccttgtcggcgctgctaccggcgcgcattccgggccccagctccagctgcaagagtctggacctggcctggtcaagcctagcgagacactgagcctgacctgtaccgtgtccggcgatagcatcagcagcggcgattactactggggctggatcagacagcctcctggcaaaggactggaatggatcggccacatctactacagcggcgtgacctactacaaccccagcctgaagtccagagtgaccatcagcgtggacaccagccggaaccagttctccctgaagctgtctagcgtgacagccgccgataccgccgtgtactactgcaccagagaggacagcagcaactggcggagtagaggccagggaacactggtcacagttagctctggatccggcggaggcggaagtggaggcggaggatctggcggcggaggctctttcgaagaagtgcagctcgttgagtctggtggcggactggttcagcctggaagaagcctgaagctgagctgtgccgccagcggcttcaccttcagcgactacaatatggcctgggtccgacaggcccctaagaaaggactggaatgggtcgccaccatcctgtacgatggcggcagaacctactaccggggcagcgtgaagggcagattcaccatcagcagagacaacgccaagagcaccctgtacctgcggatggactctctgagaagcgaggataccgccacatattactgtgccacacacagccggggcaccgactactttgattattggggccagggcgtgatggttaccgtgtctagtacgcgtatccagaaccctgatcctgccgtgtaccagctgcgggatagcaagagcagcgacaagagcgtgtgtctgttcaccgacttcgacagccagaccaacgtgtcccagagcaaggactccgacgtgtacatcaccgataagtgcgtgctggacatgcggagcatggacttcaagagcaactccgccgtggcctggtccaacaagtccgatttcgcctgcgccaacgccttcaacaacagcattatccccgaggacacattcttcccaagccccgagagcagcgactccaccgaccacgtgaagcccaaagagacagagaacaccaagcagcccagcaagagctgccacaagcccaaggccatcgtgcacaccgagaaagtgaacatgatgagcctgaccgtgctgggcctgcggatgctgttcgccaaaaccgtggccgtgaacttcctgctgaccgccaagctgttcttcctc

SEQ ID NO: 7816 - DNA, 3003 bp, synthetic construct
  source 1..3003: mol_type = other DNA
atggccttaccagtgaccgccttgctcctgccgctggccttgctgctccacgccgccaggccggaagtgcagctggttgaatctggcggaggactggttcagcctggcggatctctgagactgtcttgtgccgccagcggcttcagcttcagcgacttttggatgagctgggtccgacaggcccctggcaaaggacttgaatgggtcgccacaatcagccaggccggcagcgagaaggactacgtggactctgtgaagggcagattcaccatcagccgggacaacgccaagaagtccctgtacctccagatgaacagcctgagagccgaggacaccgccgtgtactattgtgcctctggcgtgtacagcttcgactacagaggccagggcaccctggtcacagtctcttctggtaccggcggaggcggatctggcggcggaggtagcggtggcggaggatctgaattcgacatcgtgatgacacagagcccttctagcctggccgtgtctgagggcgagacagtgaccatcaactgcaagagcagccagagcttcctgtctagcggcgacggcaagaattacgtggcctggtatcagtacaagcccggacagagccccaagctgctgatctactgggccagcacaagacagagcggcgtgcccgatagattcatcggctctggcagcggcaccgacttcaccctgacaatctctacagtgcaggccgaggacctggctatctactactgccagcagtattacgacacccctctgacctttggctccggcaccaagctggaaatcaaactcgaggacctgaagaacgtgttcccacctgaggtggccgtgttcgagcctagcgaggccgagatcagccacacccagaaagccaccctcgtgtgcctggctaccggcttctaccccgaccatgtggaactgtcttggtgggtcaacggcaaagaggtgcacagcggcgtgtgtaccgacccccagccactgaaagaacagcccgccctgaacgacagccggtactgcctgagcagcagactgagagtgtccgccaccttctggcagaacccccggaaccacttcagatgccaggtgcagttctacggcctgagcgagaacgacgagtggacccaggacagagccaagcccgtgacccagatcgtgtctgccgaagcctggggcagagccgatgatgtgattaagatccactggcaggaaaagaagtccaacaccatcctgggcagccaggaaggcaacaccatgaagaccaacgacacctacatgaagttcagctggctgaccgtgcccgagaagtccctggacaaagaacacagatgcatcgtgcggcacgaaaacaacaagaacggcgtggaccaggaaatcatcttcccacccatcaagaccgatgtgattacaatggaccccaaggacaactgctccaaggacgccaacgataccctgctgctccagctgaccaacaccagcgcctactacatgtacttgttgctgctgctgaagtccgtggtgtacttcgccatcatcacatgctgcctgctgcggagaaccgccttctgctgcaacggcgagaagtctagggccaagcgatctggatctggagcaacaaacttctcactactcaaacaagcaggtgacgtggaggagaatcccgggcctactagtatggactggatttggcgcatccttttccttgtcggcgctgctaccggcgcgcattccgggccccagctccagctgcaagagtctggacctggcctggtcaagcctagcgagacactgagcctgacctgtaccgtgtccggcgatagcatcagcagcggcgattactactggggctggatcagacagcctcctggcaaaggactggaatggatcggccacatctactacagcggcgtgacctactacaaccccagcctgaagtccagagtgaccatcagcgtggacaccagccggaaccagttctccctgaagctgtctagcgtgacagccgccgataccgccgtgtactactgcaccagagaggacagcagcaactggcggagtagaggccagggaacactggtcacagttagctctggatccggcggaggcggaagtggaggcggaggatctggcggcggaggctctttcgaagaagtgaagctgcaagagtctggccccagcctggtgcagagtagccaaacactgagcctgacctgtaccgtgtccggctttagcctgaccagctaccacatccactgggtccgacagacccctggcaaaggactggaatggatgggcgtgatgtggagcgacggcgacaccagctataacagcgccctgaagtcccggctgagcatcagcagagatacaagccagagccaggtgttcctgaagatgaacagcctccagaccgaggacaccgccacctactattgtgccagaggctactacagcagctacctgtacctttggttcgcctattggggccagggcaccctggttacagtcagctctacgcgtatccagaaccctgatcctgccgtgtaccagctgcgggatagcaagagcagcgacaagagcgtgtgtctgttcaccgacttcgacagccagaccaacgtgtcccagagcaaggactccgacgtgtacatcaccgataagtgcgtgctggacatgcggagcatggacttcaagagcaactccgccgtggcctggtccaacaagtccgatttcgcctgcgccaacgccttcaacaacagcattatccccgaggacacattcttcccaagccccgagagcagcgactccaccgaccacgtgaagcccaaagagacagagaacaccaagcagcccagcaagagctgccacaagcccaaggccatcgtgcacaccgagaaagtgaacatgatgagcctgaccgtgctgggcctgcggatgctgttcgccaaaaccgtggccgtgaacttcctgctgaccgccaagctgttcttcctc

SEQ ID NO: 7817 - DNA, 3015 bp, synthetic construct
  source 1..3015: mol_type = other DNA
atggccttaccagtgaccgccttgctcctgccgctggccttgctgctccacgccgccaggccggaagtgcagctggttgaatctggcggaggactggttcagcctggcggatctctgagactgtcttgtgccgccagcggcttcagcttcagcgacttttggatgagctgggtccgacaggcccctggcaaaggacttgaatgggtcgccacaatcagccaggccggcagcgagaaggactacgtggactctgtgaagggcagattcaccatcagccgggacaacgccaagaagtccctgtacctccagatgaacagcctgagagccgaggacaccgccgtgtactattgtgcctctggcgtgtacagcttcgactacagaggccagggcaccctggtcacagtctcttctggtaccggcggaggcggatctggcggcggaggtagcggtggcggaggatctgaattcgacgtgctgatgacccagacacctgtgtctctgccagtgtctctcggaggccaggtgtccatctcctgtagaagcagccagagcctggtgcactccgacggcgatacctacctgcactggtatctccagaagcctggacagagccctcagctcctgatctaccgggtgtccaacagattcagcggcgtgcccgatagattttccggcagcggctctggcaccgacttcaccctgaagatcagcagagtggaacccgaggacctgggcctgtactactgtctccagaccacacacttcccaccttggacctttggcggaggcaccaagctggaaatgaaactcgaggacctgaagaacgtgttcccacctgaggtggccgtgttcgagcctagcgaggccgagatcagccacacccagaaagccaccctcgtgtgcctggctaccggcttctaccccgaccatgtggaactgtcttggtgggtcaacggcaaagaggtgcacagcggcgtgtgtaccgacccccagccactgaaagaacagcccgccctgaacgacagccggtactgcctgagcagcagactgagagtgtccgccaccttctggcagaacccccggaaccacttcagatgccaggtgcagttctacggcctgagcgagaacgacgagtggacccaggacagagccaagcccgtgacccagatcgtgtctgccgaagcctggggcagagccgatgatgtgattaagatccactggcaggaaaagaagtccaacaccatcctgggcagccaggaaggcaacaccatgaagaccaacgacacctacatgaagttcagctggctgaccgtgcccgagaagtccctggacaaagaacacagatgcatcgtgcggcacgaaaacaacaagaacggcgtggaccaggaaatcatcttcccacccatcaagaccgatgtgattacaatggaccccaaggacaactgctccaaggacgccaacgataccctgctgctccagctgaccaacaccagcgcctactacatgtacttgttgctgctgctgaagtccgtggtgtacttcgccatcatcacatgctgcctgctgcggagaaccgccttctgctgcaacggcgagaagtctagggccaagcgatctggatctggagcaacaaacttctcactactcaaacaagcaggtgacgtggaggagaatcccgggcctactagtatggactggatttggcgcatccttttccttgtcggcgctgctaccggcgcgcattccgggccccagctccagctgcaagagtctggacctggcctggtcaagcctagcgagacactgagcctgacctgtaccgtgtccggcgatagcatcagcagcggcgattactactggggctggatcagacagcctcctggcaaaggactggaatggatcggccacatctactacagcggcgtgacctactacaaccccagcctgaagtccagagtgaccatcagcgtggacaccagccggaaccagttctccctgaagctgtctagcgtgacagccgccgataccgccgtgtactactgcaccagagaggacagcagcaactggcggagtagaggccagggaacactggtcacagttagctctggatccggcggaggcggaagtggaggcggaggatctggcggcggaggctctttcgaacaggttcagctccagcagtctggacccgagcttagaaggccaggatctagcgtcagactgagctgcaaggccagcggctaccggatcaaggacttcctgatccactggattaagaacagacccgagcacggcctggaatggatcggatggattgaccctgaggacggcgagactaagtacgcccagaagttccagaccaaggccacactgaccgccgacacctctagcaacaccgcctacatgcaactgagcagcctgaccagcgaggacaccgccacctacttttgtgctagatggggcgacgtgtactacggcctgatgagaggccatgtgatggatgcctggggccagggaacaagcgtgacagtctcttctacgcgtatccagaaccctgatcctgccgtgtaccagctgcgggatagcaagagcagcgacaagagcgtgtgtctgttcaccgacttcgacagccagaccaacgtgtcccagagcaaggactccgacgtgtacatcaccgataagtgcgtgctggacatgcggagcatggacttcaagagcaactccgccgtggcctggtccaacaagtccgatttcgcctgcgccaacgccttcaacaacagcattatccccgaggacacattcttcccaagccccgagagcagcgactccaccgaccacgtgaagcccaaagagacagagaacaccaagcagcccagcaagagctgccacaagcccaaggccatcgtgcacaccgagaaagtgaacatgatgagcctgaccgtgctgggcctgcggatgctgttcgccaaaaccgtggccgtgaacttcctgctgaccgccaagctgttcttcctc

SEQ ID NO: 7818 - DNA, 3000 bp, synthetic construct
  source 1..3000: mol_type = other DNA
atggccttaccagtgaccgccttgctcctgccgctggccttgctgctccacgccgccaggccggaagtgcagctggttgaatctggcggaggactggttcagcctggcggatctctgagactgtcttgtgccgccagcggcttcagcttcagcgacttttggatgagctgggtccgacaggcccctggcaaaggacttgaatgggtcgccacaatcagccaggccggcagcgagaaggactacgtggactctgtgaagggcagattcaccatcagccgggacaacgccaagaagtccctgtacctccagatgaacagcctgagagccgaggacaccgccgtgtactattgtgcctctggcgtgtacagcttcgactacagaggccagggcaccctggtcacagtctcttctggtaccggcggaggcggatctggcggcggaggtagcggtggcggaggatctgaattcgacatcgtgatgacacagagccccgccacactgtcactgtctccaggcgaaagagccacactgagctgtcggagcagcaagagcctccagaacgtgaacggcaacacctacctgtactggttccagcagaagcccggccagtctcctcagctcctgatctacagaatgagcaacctgaacagcggcgtgcccgacagattttctggcagcggaagcggcaccgagttcaccctgaccataagcagcctggaacctgaggacttcgccgtgtactactgtatgcagcacctggaataccccatcaccttcggagccggcaccaagctggaaatcaaactcgaggacctgaagaacgtgttcccacctgaggtggccgtgttcgagcctagcgaggccgagatcagccacacccagaaagccaccctcgtgtgcctggctaccggcttctaccccgaccatgtggaactgtcttggtgggtcaacggcaaagaggtgcacagcggcgtgtgtaccgacccccagccactgaaagaacagcccgccctgaacgacagccggtactgcctgagcagcagactgagagtgtccgccaccttctggcagaacccccggaaccacttcagatgccaggtgcagttctacggcctgagcgagaacgacgagtggacccaggacagagccaagcccgtgacccagatcgtgtctgccgaagcctggggcagagccgatgatgtgattaagatccactggcaggaaaagaagtccaacaccatcctgggcagccaggaaggcaacaccatgaagaccaacgacacctacatgaagttcagctggctgaccgtgcccgagaagtccctggacaaagaacacagatgcatcgtgcggcacgaaaacaacaagaacggcgtggaccaggaaatcatcttcccacccatcaagaccgatgtgattacaatggaccccaaggacaactgctccaaggacgccaacgataccctgctgctccagctgaccaacaccagcgcctactacatgtacttgttgctgctgctgaagtccgtggtgtacttcgccatcatcacatgctgcctgctgcggagaaccgccttctgctgcaacggcgagaagtctagggccaagcgatctggatctggagcaacaaacttctcactactcaaacaagcaggtgacgtggaggagaatcccgggcctactagtatggactggatttggcgcatccttttccttgtcggcgctgctaccggcgcgcattccgggccccagctccagctgcaagagtctggacctggcctggtcaagcctagcgagacactgagcctgacctgtaccgtgtccggcgatagcatcagcagcggcgattactactggggctggatcagacagcctcctggcaaaggactggaatggatcggccacatctactacagcggcgtgacctactacaaccccagcctgaagtccagagtgaccatcagcgtggacaccagccggaaccagttctccctgaagctgtctagcgtgacagccgccgataccgccgtgtactactgcaccagagaggacagcagcaactggcggagtagaggccagggaacactggtcacagttagctctggatccggcggaggcggaagtggaggcggaggatctggcggcggaggctctttcgaagaagtgcaactggttgaatctggcggcggactggttaagcctggcggatctctgaagctgagctgtgccgccagcggctacacctttaccagctacgtgatgcactgggtccgacaggcccctggcaaaggacttgagtggatcggctacatcaacccctacaacgatggcaccaagtacaacgagaagttccagggcagagtgaccatcagctccgacaagagcatcagcaccgcctacatggaactgagcagcctgagaagcgaggataccgccatgtactattgcgccagaggcacctactactacggcaccagagtgttcgactactggggccagggaaccctggtcacagtctcttctacgcgtatccagaaccctgatcctgccgtgtaccagctgcgggatagcaagagcagcgacaagagcgtgtgtctgttcaccgacttcgacagccagaccaacgtgtcccagagcaaggactccgacgtgtacatcaccgataagtgcgtgctggacatgcggagcatggacttcaagagcaactccgccgtggcctggtccaacaagtccgatttcgcctgcgccaacgccttcaacaacagcattatccccgaggacacattcttcccaagccccgagagcagcgactccaccgaccacgtgaagcccaaagagacagagaacaccaagcagcccagcaagagctgccacaagcccaaggccatcgtgcacaccgagaaagtgaacatgatgagcctgaccgtgctgggcctgcggatgctgttcgccaaaaccgtggccgtgaacttcctgctgaccgccaagctgttcttcctc

SEQ ID NO: 7819 - DNA, 2988 bp, synthetic construct
  source 1..2988: mol_type = other DNA
atggccttaccagtgaccgccttgctcctgccgctggccttgctgctccacgccgccaggccggaagtgcagctggttgaatctggcggaggactggttcagcctggcggatctctgagactgtcttgtgccgccagcggcttcagcttcagcgacttttggatgagctgggtccgacaggcccctggcaaaggacttgaatgggtcgccacaatcagccaggccggcagcgagaaggactacgtggactctgtgaagggcagattcaccatcagccgggacaacgccaagaagtccctgtacctccagatgaacagcctgagagccgaggacaccgccgtgtactattgtgcctctggcgtgtacagcttcgactacagaggccagggcaccctggtcacagtctcttctggtaccggcggaggcggatctggcggcggaggtagcggtggcggaggatctgaattcgacatccagatgacacagagccctagcagcctgtctgccagcgtgggagacagagtgaccatcacatgcaaggccagcgaccacatcaacaactggctggcctggtatcagcagaagcctggacaggcccctaagctgctgatctacggcgctaccacactggaaacaggcgtgcccagcagattttctggcagcggctctggcaccgactacaccctgacaatatccagcctccagcctgaggacttcgccacctactactgtcagcagagctggaacaccccttggacattcggccagggcaccaagctggaaatcaagagactcgaggacctgaagaacgtgttcccacctgaggtggccgtgttcgagcctagcgaggccgagatcagccacacccagaaagccaccctcgtgtgcctggctaccggcttctaccccgaccatgtggaactgtcttggtgggtcaacggcaaagaggtgcacagcggcgtgtgtaccgacccccagccactgaaagaacagcccgccctgaacgacagccggtactgcctgagcagcagactgagagtgtccgccaccttctggcagaacccccggaaccacttcagatgccaggtgcagttctacggcctgagcgagaacgacgagtggacccaggacagagccaagcccgtgacccagatcgtgtctgccgaagcctggggcagagccgatgatgtgattaagatccactggcaggaaaagaagtccaacaccatcctgggcagccaggaaggcaacaccatgaagaccaacgacacctacatgaagttcagctggctgaccgtgcccgagaagtccctggacaaagaacacagatgcatcgtgcggcacgaaaacaacaagaacggcgtggaccaggaaatcatcttcccacccatcaagaccgatgtgattacaatggaccccaaggacaactgctccaaggacgccaacgataccctgctgctccagctgaccaacaccagcgcctactacatgtacttgttgctgctgctgaagtccgtggtgtacttcgccatcatcacatgctgcctgctgcggagaaccgccttctgctgcaacggcgagaagtctagggccaagcgatctggatctggagcaacaaacttctcactactcaaacaagcaggtgacgtggaggagaatcccgggcctactagtatggactggatttggcgcatccttttccttgtcggcgctgctaccggcgcgcattccgggccccagctccagctgcaagagtctggacctggcctggtcaagcctagcgagacactgagcctgacctgtaccgtgtccggcgatagcatcagcagcggcgattactactggggctggatcagacagcctcctggcaaaggactggaatggatcggccacatctactacagcggcgtgacctactacaaccccagcctgaagtccagagtgaccatcagcgtggacaccagccggaaccagttctccctgaagctgtctagcgtgacagccgccgataccgccgtgtactactgcaccagagaggacagcagcaactggcggagtagaggccagggaacactggtcacagttagctctggatccggcggaggcggaagtggaggcggaggatctggcggcggaggctctttcgaacaagttcagcttcaacagcctggcgctgagctggtcaaacctggcgcttctgtgaagatgagctgcaaagccagcggctacgccttcagcagctactggatcaactggatgaagcagaaacccggccagggactcgaatggatcggccaaatctatcccggcgacggcgacaccaactacaacggcaagttcaagggcagagccacactgaccgccgatacctctagcagcacagcctacatgcagctgagcagcctgaccagcgaagatagcgccgtgtacttctgtgcccggtccatcacaacagtcgtgggctgcgctatggactattggggccagggaacaagcgtgaccgtgtctagtacgcgtatccagaaccctgatcctgccgtgtaccagctgcgggatagcaagagcagcgacaagagcgtgtgtctgttcaccgacttcgacagccagaccaacgtgtcccagagcaaggactccgacgtgtacatcaccgataagtgcgtgctggacatgcggagcatggacttcaagagcaactccgccgtggcctggtccaacaagtccgatttcgcctgcgccaacgccttcaacaacagcattatccccgaggacacattcttcccaagccccgagagcagcgactccaccgaccacgtgaagcccaaagagacagagaacaccaagcagcccagcaagagctgccacaagcccaaggccatcgtgcacaccgagaaagtgaacatgatgagcctgaccgtgctgggcctgcggatgctgttcgccaaaaccgtggccgtgaacttcctgctgaccgccaagctgttcttcctc

SEQ ID NO: 7820 - DNA, 2994 bp, synthetic construct
  source 1..2994: mol_type = other DNA
atggccttaccagtgaccgccttgctcctgccgctggccttgctgctccacgccgccaggccggaagtgcagctggttgaatctggcggaggactggttcagcctggcggatctctgagactgtcttgtgccgccagcggcttcagcttcagcgacttttggatgagctgggtccgacaggcccctggcaaaggacttgaatgggtcgccacaatcagccaggccggcagcgagaaggactacgtggactctgtgaagggcagattcaccatcagccgggacaacgccaagaagtccctgtacctccagatgaacagcctgagagccgaggacaccgccgtgtactattgtgcctctggcgtgtacagcttcgactacagaggccagggcaccctggtcacagtctcttctggtaccggcggaggcggatctggcggcggaggtagcggtggcggaggatctgaattccagatcgtgctgtctcagtctcctgccatcctgagcgcttccccaggcgagaaagtgaccatgacctgtagagccagcagcagcgtgtcctacatgcactggtatcagcagaagcccggcagcagccctaagccttggatctacgccaccagcaatctggcctctggcgtgccagccagattttctggctctggcagcggcaccagctacagcttcacaatcagcagagtggaagccgaggacgccgccacctactattgtcagcagtggaccttcaatcctcctaccttcggcggaggcacccggctggaaatcaaaagaacagtggctgctctcgaggacctgaagaacgtgttcccacctgaggtggccgtgttcgagcctagcgaggccgagatcagccacacccagaaagccaccctcgtgtgcctggctaccggcttctaccccgaccatgtggaactgtcttggtgggtcaacggcaaagaggtgcacagcggcgtgtgtaccgacccccagccactgaaagaacagcccgccctgaacgacagccggtactgcctgagcagcagactgagagtgtccgccaccttctggcagaacccccggaaccacttcagatgccaggtgcagttctacggcctgagcgagaacgacgagtggacccaggacagagccaagcccgtgacccagatcgtgtctgccgaagcctggggcagagccgatgatgtgattaagatccactggcaggaaaagaagtccaacaccatcctgggcagccaggaaggcaacaccatgaagaccaacgacacctacatgaagttcagctggctgaccgtgcccgagaagtccctggacaaagaacacagatgcatcgtgcggcacgaaaacaacaagaacggcgtggaccaggaaatcatcttcccacccatcaagaccgatgtgattacaatggaccccaaggacaactgctccaaggacgccaacgataccctgctgctccagctgaccaacaccagcgcctactacatgtacttgttgctgctgctgaagtccgtggtgtacttcgccatcatcacatgctgcctgctgcggagaaccgccttctgctgcaacggcgagaagtctagggccaagcgatctggatctggagcaacaaacttctcactactcaaacaagcaggtgacgtggaggagaatcccgggcctactagtatggactggatttggcgcatccttttccttgtcggcgctgctaccggcgcgcattccgggccccagctccagctgcaagagtctggacctggcctggtcaagcctagcgagacactgagcctgacctgtaccgtgtccggcgatagcatcagcagcggcgattactactggggctggatcagacagcctcctggcaaaggactggaatggatcggccacatctactacagcggcgtgacctactacaaccccagcctgaagtccagagtgaccatcagcgtggacaccagccggaaccagttctccctgaagctgtctagcgtgacagccgccgataccgccgtgtactactgcaccagagaggacagcagcaactggcggagtagaggccagggaacactggtcacagttagctctggatccggcggaggcggaagtggaggcggaggatctggcggcggaggctctttcgaacaggcttatctgcaacagagcggagccgaactcgtcagacctggcgcttctgtgaagatgagctgcaaggccagcggctacaccttcaccagctataatatgcactgggtcaagcagacccctcggcagggactcgaatggatcggcggaatctatcccggcaacggcgacacctcctacaaccagaagttcaagggcaaagccacactgaccgtgggcaagagcagcagcaccgcctatatgcagctcagcagcctgaccagcgaggacagcgccgtgtacttctgcgccagatacgactacaactacgctatggactactggggccagggcaccagcgtgacagttagctctgccagcacgcgtatccagaaccctgatcctgccgtgtaccagctgcgggatagcaagagcagcgacaagagcgtgtgtctgttcaccgacttcgacagccagaccaacgtgtcccagagcaaggactccgacgtgtacatcaccgataagtgcgtgctggacatgcggagcatggacttcaagagcaactccgccgtggcctggtccaacaagtccgatttcgcctgcgccaacgccttcaacaacagcattatccccgaggacacattcttcccaagccccgagagcagcgactccaccgaccacgtgaagcccaaagagacagagaacaccaagcagcccagcaagagctgccacaagcccaaggccatcgtgcacaccgagaaagtgaacatgatgagcctgaccgtgctgggcctgcggatgctgttcgccaaaaccgtggccgtgaacttcctgctgaccgccaagctgttcttcctc

SEQ ID NO: 7821 - DNA, 2988 bp, synthetic construct
  source 1..2988: mol_type = other DNA
atggccttaccagtgaccgccttgctcctgccgctggccttgctgctccacgccgccaggccggaagtgcagctggttgaatctggcggaggactggttcagcctggcggatctctgagactgtcttgtgccgccagcggcttcagcttcagcgacttttggatgagctgggtccgacaggcccctggcaaaggacttgaatgggtcgccacaatcagccaggccggcagcgagaaggactacgtggactctgtgaagggcagattcaccatcagccgggacaacgccaagaagtccctgtacctccagatgaacagcctgagagccgaggacaccgccgtgtactattgtgcctctggcgtgtacagcttcgactacagaggccagggcaccctggtcacagtctcttctggtaccggcggaggcggatctggcggcggaggtagcggtggcggaggatctgaattcgagatcgtgctgacacagagccctgccaccctgtctctgagccctggcgaaagagccaccctgagctgtagagccagccagagcgtgtccagctacctggcctggtatcagcagaagcccggccaggctccccggctgctgatctacgatgccagcaatagagccaccggcatccccgccagattttccggctctggcagcggcaccgacttcaccctgaccatcagctccctggaacccgaggacttcgccgtgtactactgccagcagcggagcaactggcccatcacattcggccagggcacccggctggaaatcaaactcgaggacctgaagaacgtgttcccacctgaggtggccgtgttcgagcctagcgaggccgagatcagccacacccagaaagccaccctcgtgtgcctggctaccggcttctaccccgaccatgtggaactgtcttggtgggtcaacggcaaagaggtgcacagcggcgtgtgtaccgacccccagccactgaaagaacagcccgccctgaacgacagccggtactgcctgagcagcagactgagagtgtccgccaccttctggcagaacccccggaaccacttcagatgccaggtgcagttctacggcctgagcgagaacgacgagtggacccaggacagagccaagcccgtgacccagatcgtgtctgccgaagcctggggcagagccgatgatgtgattaagatccactggcaggaaaagaagtccaacaccatcctgggcagccaggaaggcaacaccatgaagaccaacgacacctacatgaagttcagctggctgaccgtgcccgagaagtccctggacaaagaacacagatgcatcgtgcggcacgaaaacaacaagaacggcgtggaccaggaaatcatcttcccacccatcaagaccgatgtgattacaatggaccccaaggacaactgctccaaggacgccaacgataccctgctgctccagctgaccaacaccagcgcctactacatgtacttgttgctgctgctgaagtccgtggtgtacttcgccatcatcacatgctgcctgctgcggagaaccgccttctgctgcaacggcgagaagtctagggccaagcgatctggatctggagcaacaaacttctcactactcaaacaagcaggtgacgtggaggagaatcccgggcctactagtatggactggatttggcgcatccttttccttgtcggcgctgctaccggcgcgcattccgggccccagctccagctgcaagagtctggacctggcctggtcaagcctagcgagacactgagcctgacctgtaccgtgtccggcgatagcatcagcagcggcgattactactggggctggatcagacagcctcctggcaaaggactggaatggatcggccacatctactacagcggcgtgacctactacaaccccagcctgaagtccagagtgaccatcagcgtggacaccagccggaaccagttctccctgaagctgtctagcgtgacagccgccgataccgccgtgtactactgcaccagagaggacagcagcaactggcggagtagaggccagggaacactggtcacagttagctctggatccggcggaggcggaagtggaggcggaggatctggcggcggaggctctttcgaagaggtgcagcttgttgagtctggcggaggactggtgcagcccgatagaagcctgagactgtcttgtgccgccagcggcttcaccttccacgattatgccatgcactgggtccgacaggcccctggcaaaggacttgaatgggtgtccaccatctcttggaacagcggcacaatcggctacgccgactctgtgaagggcagattcaccatcagccgggacaacgccaagaacagcctgtacctccagatgaactccctgagagccgaggacacagccctgtactactgcgccaaggacatccagtacggcaactactactacggcatggacgtgtggggccagggcacaacagtgacagtctcttctacgcgtatccagaaccctgatcctgccgtgtaccagctgcgggatagcaagagcagcgacaagagcgtgtgtctgttcaccgacttcgacagccagaccaacgtgtcccagagcaaggactccgacgtgtacatcaccgataagtgcgtgctggacatgcggagcatggacttcaagagcaactccgccgtggcctggtccaacaagtccgatttcgcctgcgccaacgccttcaacaacagcattatccccgaggacacattcttcccaagccccgagagcagcgactccaccgaccacgtgaagcccaaagagacagagaacaccaagcagcccagcaagagctgccacaagcccaaggccatcgtgcacaccgagaaagtgaacatgatgagcctgaccgtgctgggcctgcggatgctgttcgccaaaaccgtggccgtgaacttcctgctgaccgccaagctgttcttcctc

SEQ ID NO: 7822 - DNA, 2973 bp, synthetic construct
  source 1..2973: mol_type = other DNA
atggccttaccagtgaccgccttgctcctgccgctggccttgctgctccacgccgccaggccggaagtgcagctggttgaatctggcggaggactggttcagcctggcggatctctgagactgtcttgtgccgccagcggcttcagcttcagcgacttttggatgagctgggtccgacaggcccctggcaaaggacttgaatgggtcgccacaatcagccaggccggcagcgagaaggactacgtggactctgtgaagggcagattcaccatcagccgggacaacgccaagaagtccctgtacctccagatgaacagcctgagagccgaggacaccgccgtgtactattgtgcctctggcgtgtacagcttcgactacagaggccagggcaccctggtcacagtctcttctggtaccggcggaggcggatctggcggcggaggtagcggtggcggaggatctgaattcgacatccagatgacacagagccctagcagcctgtctgccagcgtgggagatagagtgaccatcaactgcaaggccagccaggacatcaacagctacctgagctggttccagcagaagcctggcaaggcccctaagacactgatctaccgggccaacagactggtggatggcgtgccaagcagattttctggcagcggcagcggccaggattacaccctgacaatatccagcctccagcctgaggacttcgccacctactactgcctccagtacgacgagttccctctgacctttggcggaggcaccaaggtggaaatcaaactcgaggacctgaagaacgtgttcccacctgaggtggccgtgttcgagcctagcgaggccgagatcagccacacccagaaagccaccctcgtgtgcctggctaccggcttctaccccgaccatgtggaactgtcttggtgggtcaacggcaaagaggtgcacagcggcgtgtgtaccgacccccagccactgaaagaacagcccgccctgaacgacagccggtactgcctgagcagcagactgagagtgtccgccaccttctggcagaacccccggaaccacttcagatgccaggtgcagttctacggcctgagcgagaacgacgagtggacccaggacagagccaagcccgtgacccagatcgtgtctgccgaagcctggggcagagccgatgatgtgattaagatccactggcaggaaaagaagtccaacaccatcctgggcagccaggaaggcaacaccatgaagaccaacgacacctacatgaagttcagctggctgaccgtgcccgagaagtccctggacaaagaacacagatgcatcgtgcggcacgaaaacaacaagaacggcgtggaccaggaaatcatcttcccacccatcaagaccgatgtgattacaatggaccccaaggacaactgctccaaggacgccaacgataccctgctgctccagctgaccaacaccagcgcctactacatgtacttgttgctgctgctgaagtccgtggtgtacttcgccatcatcacatgctgcctgctgcggagaaccgccttctgctgcaacggcgagaagtctagggccaagcgatctggatctggagcaacaaacttctcactactcaaacaagcaggtgacgtggaggagaatcccgggcctactagtatggactggatttggcgcatccttttccttgtcggcgctgctaccggcgcgcattccgggccccagctccagctgcaagagtctggacctggcctggtcaagcctagcgagacactgagcctgacctgtaccgtgtccggcgatagcatcagcagcggcgattactactggggctggatcagacagcctcctggcaaaggactggaatggatcggccacatctactacagcggcgtgacctactacaaccccagcctgaagtccagagtgaccatcagcgtggacaccagccggaaccagttctccctgaagctgtctagcgtgacagccgccgataccgccgtgtactactgcaccagagaggacagcagcaactggcggagtagaggccagggaacactggtcacagttagctctggatccggcggaggcggaagtggaggcggaggatctggcggcggaggctctttcgaacaggtgcaactggtgcagtctggggccgaagtgaagaaacctggggcctctgtgaaggtgtcctgcaaagccagcggctacacctttaccaactacgacatcaactgggtccgacaggctccaggccaaggactggaatggatcggctggatctatcctggcgacggcagcaccaagtacaacgagaagttcaaggccaaggccacactgaccgccgataccagcacaagcaccgcctacatggaactgcggagcctgagaagcgacgacaccgccgtgtactattgtgcctccggctacgaggacgctatggactattggggccagggcaccaccgtgacagtgtctagtacgcgtatccagaaccctgatcctgccgtgtaccagctgcgggatagcaagagcagcgacaagagcgtgtgtctgttcaccgacttcgacagccagaccaacgtgtcccagagcaaggactccgacgtgtacatcaccgataagtgcgtgctggacatgcggagcatggacttcaagagcaactccgccgtggcctggtccaacaagtccgatttcgcctgcgccaacgccttcaacaacagcattatccccgaggacacattcttcccaagccccgagagcagcgactccaccgaccacgtgaagcccaaagagacagagaacaccaagcagcccagcaagagctgccacaagcccaaggccatcgtgcacaccgagaaagtgaacatgatgagcctgaccgtgctgggcctgcggatgctgttcgccaaaaccgtggccgtgaacttcctgctgaccgccaagctgttcttcctc

SEQ ID NO: 7823 - DNA, 2979 bp, synthetic construct
  source 1..2979: mol_type = other DNA
atggccttaccagtgaccgccttgctcctgccgctggccttgctgctccacgccgccaggccggaagtgcagctggttgaatctggcggaggactggttcagcctggcggatctctgagactgtcttgtgccgccagcggcttcagcttcagcgacttttggatgagctgggtccgacaggcccctggcaaaggacttgaatgggtcgccacaatcagccaggccggcagcgagaaggactacgtggactctgtgaagggcagattcaccatcagccgggacaacgccaagaagtccctgtacctccagatgaacagcctgagagccgaggacaccgccgtgtactattgtgcctctggcgtgtacagcttcgactacagaggccagggcaccctggtcacagtctcttctggtaccggcggaggcggatctggcggcggaggtagcggtggcggaggatctgaattcgacatcgtgatgacccagacacctctgagcctgagcgtgacacctggacagcctgccagcattagctgcaagagcagccagtctctgctggacggcgacggcaagacctacctgaattggctgctccagaagcctggacagagccctcagcggctgatctacctggtgtccaagctggatagcggcgtgcccgatagattttctggcagcggctctggcaccgacttcaccctgaagatcagcagagtggaagccgaggacgtgggcgtgtactactgttggcagggcacacacttccccagaacattcggccagggcacaaagctggaaatcaaactcgaggacctgaagaacgtgttcccacctgaggtggccgtgttcgagcctagcgaggccgagatcagccacacccagaaagccaccctcgtgtgcctggctaccggcttctaccccgaccatgtggaactgtcttggtgggtcaacggcaaagaggtgcacagcggcgtgtgtaccgacccccagccactgaaagaacagcccgccctgaacgacagccggtactgcctgagcagcagactgagagtgtccgccaccttctggcagaacccccggaaccacttcagatgccaggtgcagttctacggcctgagcgagaacgacgagtggacccaggacagagccaagcccgtgacccagatcgtgtctgccgaagcctggggcagagccgatgatgtgattaagatccactggcaggaaaagaagtccaacaccatcctgggcagccaggaaggcaacaccatgaagaccaacgacacctacatgaagttcagctggctgaccgtgcccgagaagtccctggacaaagaacacagatgcatcgtgcggcacgaaaacaacaagaacggcgtggaccaggaaatcatcttcccacccatcaagaccgatgtgattacaatggaccccaaggacaactgctccaaggacgccaacgataccctgctgctccagctgaccaacaccagcgcctactacatgtacttgttgctgctgctgaagtccgtggtgtacttcgccatcatcacatgctgcctgctgcggagaaccgccttctgctgcaacggcgagaagtctagggccaagcgatctggatctggagcaacaaacttctcactactcaaacaagcaggtgacgtggaggagaatcccgggcctactagtatggactggatttggcgcatccttttccttgtcggcgctgctaccggcgcgcattccgggccccagctccagctgcaagagtctggacctggcctggtcaagcctagcgagacactgagcctgacctgtaccgtgtccggcgatagcatcagcagcggcgattactactggggctggatcagacagcctcctggcaaaggactggaatggatcggccacatctactacagcggcgtgacctactacaaccccagcctgaagtccagagtgaccatcagcgtggacaccagccggaaccagttctccctgaagctgtctagcgtgacagccgccgataccgccgtgtactactgcaccagagaggacagcagcaactggcggagtagaggccagggaacactggtcacagttagctctggatccggcggaggcggaagtggaggcggaggatctggcggcggaggctctttcgaacaagtgcaactggttcagagcggagccgaagtgaagaaacctggggcctctgtgaaggtgtcctgcaaggccagcggctacaccttcaaggacacctacatccactgggtccgacaggcccctggacaaggacttgagtggatgggcagaatcgaccccgccaacggcaacaccaaatacgaccccaagttccagggcagagtgaccatgaccagagacaccagcatcagcaccgcctacatggaactgagccggctgagatccgatgacaccgccgtgtactattgcgctagaagaggcggagtggattggggccagggaacactggttaccgtgtctagtacgcgtatccagaaccctgatcctgccgtgtaccagctgcgggatagcaagagcagcgacaagagcgtgtgtctgttcaccgacttcgacagccagaccaacgtgtcccagagcaaggactccgacgtgtacatcaccgataagtgcgtgctggacatgcggagcatggacttcaagagcaactccgccgtggcctggtccaacaagtccgatttcgcctgcgccaacgccttcaacaacagcattatccccgaggacacattcttcccaagccccgagagcagcgactccaccgaccacgtgaagcccaaagagacagagaacaccaagcagcccagcaagagctgccacaagcccaaggccatcgtgcacaccgagaaagtgaacatgatgagcctgaccgtgctgggcctgcggatgctgttcgccaaaaccgtggccgtgaacttcctgctgaccgccaagctgttcttcctc

SEQ ID NO: 7824 - DNA, 2982 bp, synthetic construct
  source 1..2982: mol_type = other DNA
atggccttaccagtgaccgccttgctcctgccgctggccttgctgctccacgccgccaggccggaagtgcagctggttgaatctggcggaggactggttcagcctggcggatctctgagactgtcttgtgccgccagcggcttcagcttcagcgacttttggatgagctgggtccgacaggcccctggcaaaggacttgaatgggtcgccacaatcagccaggccggcagcgagaaggactacgtggactctgtgaagggcagattcaccatcagccgggacaacgccaagaagtccctgtacctccagatgaacagcctgagagccgaggacaccgccgtgtactattgtgcctctggcgtgtacagcttcgactacagaggccagggcaccctggtcacagtctcttctggtaccggcggaggcggatctggcggcggaggtagcggtggcggaggatctgaattcgacatccagatgacacagagccctagcagcctgtctgccagcgtgggagacagagtgaccatcacatgcaaggccagccaggatgtgtctacagccgtggcctggttccagcagaagcctggaaaagcccctaagctgctgatctacagccccagctacagatacaccggcgtgcccagcagattttctggcagcggctctggcaccgacttcaccctgacaatatccagcctccagcctgaggacttcacctactactgccagcagctctacagcaccccttacacattcggccagggcaccaaggtggaaatcaaactcgaggacctgaagaacgtgttcccacctgaggtggccgtgttcgagcctagcgaggccgagatcagccacacccagaaagccaccctcgtgtgcctggctaccggcttctaccccgaccatgtggaactgtcttggtgggtcaacggcaaagaggtgcacagcggcgtgtgtaccgacccccagccactgaaagaacagcccgccctgaacgacagccggtactgcctgagcagcagactgagagtgtccgccaccttctggcagaacccccggaaccacttcagatgccaggtgcagttctacggcctgagcgagaacgacgagtggacccaggacagagccaagcccgtgacccagatcgtgtctgccgaagcctggggcagagccgatgatgtgattaagatccactggcaggaaaagaagtccaacaccatcctgggcagccaggaaggcaacaccatgaagaccaacgacacctacatgaagttcagctggctgaccgtgcccgagaagtccctggacaaagaacacagatgcatcgtgcggcacgaaaacaacaagaacggcgtggaccaggaaatcatcttcccacccatcaagaccgatgtgattacaatggaccccaaggacaactgctccaaggacgccaacgataccctgctgctccagctgaccaacaccagcgcctactacatgtacttgttgctgctgctgaagtccgtggtgtacttcgccatcatcacatgctgcctgctgcggagaaccgccttctgctgcaacggcgagaagtctagggccaagcgatctggatctggagcaacaaacttctcactactcaaacaagcaggtgacgtggaggagaatcccgggcctactagtatggactggatttggcgcatccttttccttgtcggcgctgctaccggcgcgcattccgggccccagctccagctgcaagagtctggacctggcctggtcaagcctagcgagacactgagcctgacctgtaccgtgtccggcgatagcatcagcagcggcgattactactggggctggatcagacagcctcctggcaaaggactggaatggatcggccacatctactacagcggcgtgacctactacaaccccagcctgaagtccagagtgaccatcagcgtggacaccagccggaaccagttctccctgaagctgtctagcgtgacagccgccgataccgccgtgtactactgcaccagagaggacagcagcaactggcggagtagaggccagggaacactggtcacagttagctctggatccggcggaggcggaagtggaggcggaggatctggcggcggaggctctttcgaagaagtgcaactggttcagagcggagccgaagtgaagaaacctggggcctctgtgaaggtgtcctgcaaagccagcggctacacctttaccgactactacctggacgtggtcgtgcggcaagctcctggacaaggactggaatggatcggcagagtgaacccctacaacggcggcaccatctacaaccagaaattcaagggaagagtgaccctgaccagagacaccagcacctccacagcctacctggaactgagcagcctgagaagcgaagataccgccgtgtactactgcgccagggaccactacagatatgaccctctgctggactactggggccagggaaccctggttacagtgtctagtacgcgtatccagaaccctgatcctgccgtgtaccagctgcgggatagcaagagcagcgacaagagcgtgtgtctgttcaccgacttcgacagccagaccaacgtgtcccagagcaaggactccgacgtgtacatcaccgataagtgcgtgctggacatgcggagcatggacttcaagagcaactccgccgtggcctggtccaacaagtccgatttcgcctgcgccaacgccttcaacaacagcattatccccgaggacacattcttcccaagccccgagagcagcgactccaccgaccacgtgaagcccaaagagacagagaacaccaagcagcccagcaagagctgccacaagcccaaggccatcgtgcacaccgagaaagtgaacatgatgagcctgaccgtgctgggcctgcggatgctgttcgccaaaaccgtggccgtgaacttcctgctgaccgccaagctgttcttcctc

SEQ ID NO: 7825 - DNA, 3000 bp, synthetic construct
  source 1..3000: mol_type = other DNA
atggccttaccagtgaccgccttgctcctgccgctggccttgctgctccacgccgccaggccggaagtgcagctggttgaatctggcggaggactggttcagcctggcggatctctgagactgtcttgtgccgccagcggcttcagcttcagcgacttttggatgagctgggtccgacaggcccctggcaaaggacttgaatgggtcgccacaatcagccaggccggcagcgagaaggactacgtggactctgtgaagggcagattcaccatcagccgggacaacgccaagaagtccctgtacctccagatgaacagcctgagagccgaggacaccgccgtgtactattgtgcctctggcgtgtacagcttcgactacagaggccagggcaccctggtcacagtctcttctggtaccggcggaggcggatctggcggcggaggtagcggtggcggaggatctgaattcgacatccagatgacacagagccctagcagcctgtctgccagcgtgggagacagagtgaccatcacctgtagagccagccagagcgtgtccaccagcagctacaactacatgcactggtatcagcagaagcccggcaagcctcctaagctgctgattaagtacgccagcaacctggaaagcggcgtgcccagcagattttctggcagcggctctggcaccgacttcaccctgacaatatccagcctccagcctgaggacttcgccacctactactgtcagcactcctgggagatccctctgacattcggccagggcaccaaggtggaaatcaaactcgaggacctgaagaacgtgttcccacctgaggtggccgtgttcgagcctagcgaggccgagatcagccacacccagaaagccaccctcgtgtgcctggctaccggcttctaccccgaccatgtggaactgtcttggtgggtcaacggcaaagaggtgcacagcggcgtgtgtaccgacccccagccactgaaagaacagcccgccctgaacgacagccggtactgcctgagcagcagactgagagtgtccgccaccttctggcagaacccccggaaccacttcagatgccaggtgcagttctacggcctgagcgagaacgacgagtggacccaggacagagccaagcccgtgacccagatcgtgtctgccgaagcctggggcagagccgatgatgtgattaagatccactggcaggaaaagaagtccaacaccatcctgggcagccaggaaggcaacaccatgaagaccaacgacacctacatgaagttcagctggctgaccgtgcccgagaagtccctggacaaagaacacagatgcatcgtgcggcacgaaaacaacaagaacggcgtggaccaggaaatcatcttcccacccatcaagaccgatgtgattacaatggaccccaaggacaactgctccaaggacgccaacgataccctgctgctccagctgaccaacaccagcgcctactacatgtacttgttgctgctgctgaagtccgtggtgtacttcgccatcatcacatgctgcctgctgcggagaaccgccttctgctgcaacggcgagaagtctagggccaagcgatctggatctggagcaacaaacttctcactactcaaacaagcaggtgacgtggaggagaatcccgggcctactagtatggactggatttggcgcatccttttccttgtcggcgctgctaccggcgcgcattccgggccccagctccagctgcaagagtctggacctggcctggtcaagcctagcgagacactgagcctgacctgtaccgtgtccggcgatagcatcagcagcggcgattactactggggctggatcagacagcctcctggcaaaggactggaatggatcggccacatctactacagcggcgtgacctactacaaccccagcctgaagtccagagtgaccatcagcgtggacaccagccggaaccagttctccctgaagctgtctagcgtgacagccgccgataccgccgtgtactactgcaccagagaggacagcagcaactggcggagtagaggccagggaacactggtcacagttagctctggatccggcggaggcggaagtggaggcggaggatctggcggcggaggctctttcgaagaagtgcaactggttcagagcggagccgaagtgaagaaacctggggcctctgtgaaggtgtcctgcaaggccagcggctacagcttcaccgactattatatgcactgggtccgacaggctccaggccagggacttgagtggatcggcagaatcaacccctacaacggcgctgccttctacagccagaacttcaaggatagagtgaccctgaccgtggacaccagcaccagcacagcctacctggaactgagcagcctgagaagcgaggacaccgccgtgtactactgcgccattgagagaggcgctgacctggaaggctacgctatggattattggggccagggaaccctggtcaccgtgtcatctacgcgtatccagaaccctgatcctgccgtgtaccagctgcgggatagcaagagcagcgacaagagcgtgtgtctgttcaccgacttcgacagccagaccaacgtgtcccagagcaaggactccgacgtgtacatcaccgataagtgcgtgctggacatgcggagcatggacttcaagagcaactccgccgtggcctggtccaacaagtccgatttcgcctgcgccaacgccttcaacaacagcattatccccgaggacacattcttcccaagccccgagagcagcgactccaccgaccacgtgaagcccaaagagacagagaacaccaagcagcccagcaagagctgccacaagcccaaggccatcgtgcacaccgagaaagtgaacatgatgagcctgaccgtgctgggcctgcggatgctgttcgccaaaaccgtggccgtgaacttcctgctgaccgccaagctgttcttcctc

SEQ ID NO: 7826 - DNA, 2994 bp, synthetic construct
  source 1..2994: mol_type = other DNA
atggccttaccagtgaccgccttgctcctgccgctggccttgctgctccacgccgccaggccggaagtgcagctggttgaatctggcggaggactggttcagcctggcggatctctgagactgtcttgtgccgccagcggcttcagcttcagcgacttttggatgagctgggtccgacaggcccctggcaaaggacttgaatgggtcgccacaatcagccaggccggcagcgagaaggactacgtggactctgtgaagggcagattcaccatcagccgggacaacgccaagaagtccctgtacctccagatgaacagcctgagagccgaggacaccgccgtgtactattgtgcctctggcgtgtacagcttcgactacagaggccagggcaccctggtcacagtctcttctggtaccggcggaggcggatctggcggcggaggtagcggtggcggaggatctgaattcgagatcgtgctgacacagtctccagccacactgagcgcttctccaggcgagagagtgaccctgacctgtagagccagcagcaacgtgatctccagctacgtgcactggtatcagcagaagcctggcagcagccccagactgtttctgtacagcaccagcaatctggcctccggcgtgccaagcagattttctggctctggcagcggcaccgacttcacctttaccatctctagcctggaagccgaggacgccgccacctactactgtcagcagtacagcggctaccctctgaccttcggccagggcacaagactggaaatcaaactcgaggacctgaagaacgtgttcccacctgaggtggccgtgttcgagcctagcgaggccgagatcagccacacccagaaagccaccctcgtgtgcctggctaccggcttctaccccgaccatgtggaactgtcttggtgggtcaacggcaaagaggtgcacagcggcgtgtgtaccgacccccagccactgaaagaacagcccgccctgaacgacagccggtactgcctgagcagcagactgagagtgtccgccaccttctggcagaacccccggaaccacttcagatgccaggtgcagttctacggcctgagcgagaacgacgagtggacccaggacagagccaagcccgtgacccagatcgtgtctgccgaagcctggggcagagccgatgatgtgattaagatccactggcaggaaaagaagtccaacaccatcctgggcagccaggaaggcaacaccatgaagaccaacgacacctacatgaagttcagctggctgaccgtgcccgagaagtccctggacaaagaacacagatgcatcgtgcggcacgaaaacaacaagaacggcgtggaccaggaaatcatcttcccacccatcaagaccgatgtgattacaatggaccccaaggacaactgctccaaggacgccaacgataccctgctgctccagctgaccaacaccagcgcctactacatgtacttgttgctgctgctgaagtccgtggtgtacttcgccatcatcacatgctgcctgctgcggagaaccgccttctgctgcaacggcgagaagtctagggccaagcgatctggatctggagcaacaaacttctcactactcaaacaagcaggtgacgtggaggagaatcccgggcctactagtatggactggatttggcgcatccttttccttgtcggcgctgctaccggcgcgcattccgggccccagctccagctgcaagagtctggacctggcctggtcaagcctagcgagacactgagcctgacctgtaccgtgtccggcgatagcatcagcagcggcgattactactggggctggatcagacagcctcctggcaaaggactggaatggatcggccacatctactacagcggcgtgacctactacaaccccagcctgaagtccagagtgaccatcagcgtggacaccagccggaaccagttctccctgaagctgtctagcgtgacagccgccgataccgccgtgtactactgcaccagagaggacagcagcaactggcggagtagaggccagggaacactggtcacagttagctctggatccggcggaggcggaagtggaggcggaggatctggcggcggaggctctttcgaacaagttcagctgcaagagtctggccctggcctggtcaagcctagcgaaacactgagcctgacctgcgccgtgtctggctactctatcaccagcgcctactattggaactggatcagacagcctcctggcaaaggactggaatggatcggctacatcagctacgacggcagaaacaactacaaccccagcctgaagaaccggatcaccatcaatcccgacaccagcaagaaccagttcagcctccagctgaacagcgtgacccctgaggataccgccgtgtactactgtgccagagaaggcgactacgacgtgggcaactactacgctatggactactggggccagggaaccctggtcacagtctcttctacgcgtatccagaaccctgatcctgccgtgtaccagctgcgggatagcaagagcagcgacaagagcgtgtgtctgttcaccgacttcgacagccagaccaacgtgtcccagagcaaggactccgacgtgtacatcaccgataagtgcgtgctggacatgcggagcatggacttcaagagcaactccgccgtggcctggtccaacaagtccgatttcgcctgcgccaacgccttcaacaacagcattatccccgaggacacattcttcccaagccccgagagcagcgactccaccgaccacgtgaagcccaaagagacagagaacaccaagcagcccagcaagagctgccacaagcccaaggccatcgtgcacaccgagaaagtgaacatgatgagcctgaccgtgctgggcctgcggatgctgttcgccaaaaccgtggccgtgaacttcctgctgaccgccaagctgttcttcctc

SEQ ID NO: 7827 - DNA, 2994 bp, synthetic construct
  source 1..2994: mol_type = other DNA
atggccttaccagtgaccgccttgctcctgccgctggccttgctgctccacgccgccaggccggaagtgcagctggttgaatctggcggaggactggttcagcctggcggatctctgagactgtcttgtgccgccagcggcttcagcttcagcgacttttggatgagctgggtccgacaggcccctggcaaaggacttgaatgggtcgccacaatcagccaggccggcagcgagaaggactacgtggactctgtgaagggcagattcaccatcagccgggacaacgccaagaagtccctgtacctccagatgaacagcctgagagccgaggacaccgccgtgtactattgtgcctctggcgtgtacagcttcgactacagaggccagggcaccctggtcacagtctcttctggtaccggcggaggcggatctggcggcggaggtagcggtggcggaggatctgaattcgagatcgtgctgacacagtctcccgccacactgtcactgtctccaggcgaaagagccacactgagctgtagagccagcagcaacgtgatctccagctacgtgcactggtatcagcagaagcctggacaggcccctcggctgctgatctacagcacaagcaatctggcctctggcatccccgccagattttctggctctggaagcggcaccgacttcaccctgaccataagcagcctggaacctgaggacttcgccgtgtactactgccagcagtatagcggctaccctctgaccttcggccagggcacaagactggaaatcaaactcgaggacctgaagaacgtgttcccacctgaggtggccgtgttcgagcctagcgaggccgagatcagccacacccagaaagccaccctcgtgtgcctggctaccggcttctaccccgaccatgtggaactgtcttggtgggtcaacggcaaagaggtgcacagcggcgtgtgtaccgacccccagccactgaaagaacagcccgccctgaacgacagccggtactgcctgagcagcagactgagagtgtccgccaccttctggcagaacccccggaaccacttcagatgccaggtgcagttctacggcctgagcgagaacgacgagtggacccaggacagagccaagcccgtgacccagatcgtgtctgccgaagcctggggcagagccgatgatgtgattaagatccactggcaggaaaagaagtccaacaccatcctgggcagccaggaaggcaacaccatgaagaccaacgacacctacatgaagttcagctggctgaccgtgcccgagaagtccctggacaaagaacacagatgcatcgtgcggcacgaaaacaacaagaacggcgtggaccaggaaatcatcttcccacccatcaagaccgatgtgattacaatggaccccaaggacaactgctccaaggacgccaacgataccctgctgctccagctgaccaacaccagcgcctactacatgtacttgttgctgctgctgaagtccgtggtgtacttcgccatcatcacatgctgcctgctgcggagaaccgccttctgctgcaacggcgagaagtctagggccaagcgatctggatctggagcaacaaacttctcactactcaaacaagcaggtgacgtggaggagaatcccgggcctactagtatggactggatttggcgcatccttttccttgtcggcgctgctaccggcgcgcattccgggccccagctccagctgcaagagtctggacctggcctggtcaagcctagcgagacactgagcctgacctgtaccgtgtccggcgatagcatcagcagcggcgattactactggggctggatcagacagcctcctggcaaaggactggaatggatcggccacatctactacagcggcgtgacctactacaaccccagcctgaagtccagagtgaccatcagcgtggacaccagccggaaccagttctccctgaagctgtctagcgtgacagccgccgataccgccgtgtactactgcaccagagaggacagcagcaactggcggagtagaggccagggaacactggtcacagttagctctggatccggcggaggcggaagtggaggcggaggatctggcggcggaggctctttcgaagaagtgcaactggtggaaagtggcggcggactggtgcaacctggaagaagcctgagactgtcctgtgccgccagcggctactctatcacaagcgcctactactggaactgggtccgacaggctcctggcaaaggactggaatgggtgtcctacatcagctacgacggcagaaacaactacaaccccagcctgaagaaccgcttcaccatcagccgggacaacgccaagaagtccctgtacctccagatgaacagcctgagagccgaggacacagccctgtactattgcgccaaagagggcgactacgacgtcggcaactactacgctatggactactggggccagggaaccaccgtgactgtctcttctacgcgtatccagaaccctgatcctgccgtgtaccagctgcgggatagcaagagcagcgacaagagcgtgtgtctgttcaccgacttcgacagccagaccaacgtgtcccagagcaaggactccgacgtgtacatcaccgataagtgcgtgctggacatgcggagcatggacttcaagagcaactccgccgtggcctggtccaacaagtccgatttcgcctgcgccaacgccttcaacaacagcattatccccgaggacacattcttcccaagccccgagagcagcgactccaccgaccacgtgaagcccaaagagacagagaacaccaagcagcccagcaagagctgccacaagcccaaggccatcgtgcacaccgagaaagtgaacatgatgagcctgaccgtgctgggcctgcggatgctgttcgccaaaaccgtggccgtgaacttcctgctgaccgccaagctgttcttcctc

SEQ ID NO: 7828 - DNA, 2991 bp, synthetic construct
  source 1..2991: mol_type = other DNA
atggccttaccagtgaccgccttgctcctgccgctggccttgctgctccacgccgccaggccggaagtgcagctggttgaatctggcggaggactggttcagcctggcggatctctgagactgtcttgtgccgccagcggcttcagcttcagcgacttttggatgagctgggtccgacaggcccctggcaaaggacttgaatgggtcgccacaatcagccaggccggcagcgagaaggactacgtggactctgtgaagggcagattcaccatcagccgggacaacgccaagaagtccctgtacctccagatgaacagcctgagagccgaggacaccgccgtgtactattgtgcctctggcgtgtacagcttcgactacagaggccagggcaccctggtcacagtctcttctggtaccggcggaggcggatctggcggcggaggtagcggtggcggaggatctgaattcgacgtggtcatgacacagaccccactgagcctgcctgtgtctctgggagatcaggccagcatctcctgtagaagcagccagagcctggtgcacagcaacggcaacacctacctgcggtggtatctccagaagcctggacagagccccaaggtgctgatctacaaggtgtccaacagagtgtccggcgtgcccgatagattttctggcagcggctctggcaccgacttcaccctgaagatcaatagagtggaagccgaggacctgggcgtgtacttctgtagccagagcacccatgtgccttggacctttggcggaggcaccaagctggaaatcaagctcgaggacctgaagaacgtgttcccacctgaggtggccgtgttcgagcctagcgaggccgagatcagccacacccagaaagccaccctcgtgtgcctggctaccggcttctaccccgaccatgtggaactgtcttggtgggtcaacggcaaagaggtgcacagcggcgtgtgtaccgacccccagccactgaaagaacagcccgccctgaacgacagccggtactgcctgagcagcagactgagagtgtccgccaccttctggcagaacccccggaaccacttcagatgccaggtgcagttctacggcctgagcgagaacgacgagtggacccaggacagagccaagcccgtgacccagatcgtgtctgccgaagcctggggcagagccgatgatgtgattaagatccactggcaggaaaagaagtccaacaccatcctgggcagccaggaaggcaacaccatgaagaccaacgacacctacatgaagttcagctggctgaccgtgcccgagaagtccctggacaaagaacacagatgcatcgtgcggcacgaaaacaacaagaacggcgtggaccaggaaatcatcttcccacccatcaagaccgatgtgattacaatggaccccaaggacaactgctccaaggacgccaacgataccctgctgctccagctgaccaacaccagcgcctactacatgtacttgttgctgctgctgaagtccgtggtgtacttcgccatcatcacatgctgcctgctgcggagaaccgccttctgctgcaacggcgagaagtctagggccaagcgatctggatctggagcaacaaacttctcactactcaaacaagcaggtgacgtggaggagaatcccgggcctactagtatggactggatttggcgcatccttttccttgtcggcgctgctaccggcgcgcattccgggccccagctccagctgcaagagtctggacctggcctggtcaagcctagcgagacactgagcctgacctgtaccgtgtccggcgatagcatcagcagcggcgattactactggggctggatcagacagcctcctggcaaaggactggaatggatcggccacatctactacagcggcgtgacctactacaaccccagcctgaagtccagagtgaccatcagcgtggacaccagccggaaccagttctccctgaagctgtctagcgtgacagccgccgataccgccgtgtactactgcaccagagaggacagcagcaactggcggagtagaggccagggaacactggtcacagttagctctggatccggcggaggcggaagtggaggcggaggatctggcggcggaggctctttcgaaggcgtgaagctggacgagacaggcggaggacttgttcaacctggcggagccatgaagctgagctgtgtgaccagcggctttaccttcggccactactggatgaactgggtccgacagtcccctgagaaaggactggaatgggtcgcccagttcagaaacaagccctacaactacgaaacctactacagcgacagcgtgaagggcagattcaccatcagccgggacgacagcaagtccagcgtgtacctccagatgaacaacctgcgcgtggaagataccggcatctactactgtaccggggccagctacggcatggaatatctcggccagggcaccagcgtgaccgtgtctacaacgcgtatccagaaccctgatcctgccgtgtaccagctgcgggatagcaagagcagcgacaagagcgtgtgtctgttcaccgacttcgacagccagaccaacgtgtcccagagcaaggactccgacgtgtacatcaccgataagtgcgtgctggacatgcggagcatggacttcaagagcaactccgccgtggcctggtccaacaagtccgatttcgcctgcgccaacgccttcaacaacagcattatccccgaggacacattcttcccaagccccgagagcagcgactccaccgaccacgtgaagcccaaagagacagagaacaccaagcagcccagcaagagctgccacaagcccaaggccatcgtgcacaccgagaaagtgaacatgatgagcctgaccgtgctgggcctgcggatgctgttcgccaaaaccgtggccgtgaacttcctgctgaccgccaagctgttcttcctc

SEQ ID NO: 7829 - DNA, 3009 bp, synthetic construct
  source 1..3009: mol_type = other DNA
atggccttaccagtgaccgccttgctcctgccgctggccttgctgctccacgccgccaggccggaagtgcagctggttgaatctggcggaggactggttcagcctggcggatctctgagactgtcttgtgccgccagcggcttcagcttcagcgacttttggatgagctgggtccgacaggcccctggcaaaggacttgaatgggtcgccacaatcagccaggccggcagcgagaaggactacgtggactctgtgaagggcagattcaccatcagccgggacaacgccaagaagtccctgtacctccagatgaacagcctgagagccgaggacaccgccgtgtactattgtgcctctggcgtgtacagcttcgactacagaggccagggcaccctggtcacagtctcttctggtaccggcggaggcggatctggcggcggaggtagcggtggcggaggatctgaattccaggtgcaactggtggaatctggcggcaatctggttcagcctggcggctctctgagactgtcttgtgccgccagcggcttcaccttcggcagcttttctatgagctgggtccgacaagctcctggcggaggacttgaatgggtggcaggactgtctgccagaagcagcctgacacactacgccgactctgtgaagggcagattcaccatcagccgggacaacgccaagaacagcgtgtacctccagatgaacagcctgagagtggaagataccgccgtgtactactgcgccagaagaagctacgacagcagcggctactggggccacttctacagctacatggatgtgtggggccagggcaccctggttacagtttctctcgaggacctgaagaacgtgttcccacctgaggtggccgtgttcgagcctagcgaggccgagatcagccacacccagaaagccaccctcgtgtgcctggctaccggcttctaccccgaccatgtggaactgtcttggtgggtcaacggcaaagaggtgcacagcggcgtgtgtaccgacccccagccactgaaagaacagcccgccctgaacgacagccggtactgcctgagcagcagactgagagtgtccgccaccttctggcagaacccccggaaccacttcagatgccaggtgcagttctacggcctgagcgagaacgacgagtggacccaggacagagccaagcccgtgacccagatcgtgtctgccgaagcctggggcagagccgatgatgtgattaagatccactggcaggaaaagaagtccaacaccatcctgggcagccaggaaggcaacaccatgaagaccaacgacacctacatgaagttcagctggctgaccgtgcccgagaagtccctggacaaagaacacagatgcatcgtgcggcacgaaaacaacaagaacggcgtggaccaggaaatcatcttcccacccatcaagaccgatgtgattacaatggaccccaaggacaactgctccaaggacgccaacgataccctgctgctccagctgaccaacaccagcgcctactacatgtacttgttgctgctgctgaagtccgtggtgtacttcgccatcatcacatgctgcctgctgcggagaaccgccttctgctgcaacggcgagaagtctagggccaagcgatctggatctggagcaacaaacttctcactactcaaacaagcaggtgacgtggaggagaatcccgggcctactagtatggactggatttggcgcatccttttccttgtcggcgctgctaccggcgcgcattccgggccccagctccagctgcaagagtctggacctggcctggtcaagcctagcgagacactgagcctgacctgtaccgtgtccggcgatagcatcagcagcggcgattactactggggctggatcagacagcctcctggcaaaggactggaatggatcggccacatctactacagcggcgtgacctactacaaccccagcctgaagtccagagtgaccatcagcgtggacaccagccggaaccagttctccctgaagctgtctagcgtgacagccgccgataccgccgtgtactactgcaccagagaggacagcagcaactggcggagtagaggccagggaacactggtcacagttagctctggatccggcggaggcggaagtggaggcggaggatctggcggcggaggctctttcgaatctgtgctgacccagcctagctccgtgtctgctgctcctggacagaaagtgaccatctcctgtagcggcagcaccagcaacatcggcaacaactacgtgtcctggtatcagcagcaccccggcaaggcccctaagctgatgatctacgacgtgtccaagaggcccagcggcgtgccagatagattttccggcagcaagagcggcaacagcgccagcctggatattagcggactccagtctgaggacgaggccgactactattgcgccgcctgggatgatagcctgagcgagtttctgtttggcaccggcaccaagctgacagtgcttggaacgcgtatccagaaccctgatcctgccgtgtaccagctgcgggatagcaagagcagcgacaagagcgtgtgtctgttcaccgacttcgacagccagaccaacgtgtcccagagcaaggactccgacgtgtacatcaccgataagtgcgtgctggacatgcggagcatggacttcaagagcaactccgccgtggcctggtccaacaagtccgatttcgcctgcgccaacgccttcaacaacagcattatccccgaggacacattcttcccaagccccgagagcagcgactccaccgaccacgtgaagcccaaagagacagagaacaccaagcagcccagcaagagctgccacaagcccaaggccatcgtgcacaccgagaaagtgaacatgatgagcctgaccgtgctgggcctgcggatgctgttcgccaaaaccgtggccgtgaacttcctgctgaccgccaagctgttcttcctc

SEQ ID NO: 7830 - DNA, 2994 bp, synthetic construct
  source 1..2994: mol_type = other DNA
atggccttaccagtgaccgccttgctcctgccgctggccttgctgctccacgccgccaggccggaagtgcagctggttgaatctggcggaggactggttcagcctggcggatctctgagactgtcttgtgccgccagcggcttcagcttcagcgacttttggatgagctgggtccgacaggcccctggcaaaggacttgaatgggtcgccacaatcagccaggccggcagcgagaaggactacgtggactctgtgaagggcagattcaccatcagccgggacaacgccaagaagtccctgtacctccagatgaacagcctgagagccgaggacaccgccgtgtactattgtgcctctggcgtgtacagcttcgactacagaggccagggcaccctggtcacagtctcttctggtaccggcggaggcggatctggcggcggaggtagcggtggcggaggatctgaattcgacgtggtcatgacacagagcccttctagcctgtctgccagcgtgggcgacagagtgacaatcacctgtcagagcagcctggacatcagccactacctgaactggtatcagcagaagcccggcaaggcccctaagctgctgatctacgacgccagcaatctggaaaccggcgtgcccagcagattttctggcagcggaagcggcacccacttcaccttcacaatatccagcctccagcctgaggacttcgccacctactactgccagcagtacgacaacctgcctctgacctttggcggaggcaccaagctggaaatcaagagactcgaggacctgaagaacgtgttcccacctgaggtggccgtgttcgagcctagcgaggccgagatcagccacacccagaaagccaccctcgtgtgcctggctaccggcttctaccccgaccatgtggaactgtcttggtgggtcaacggcaaagaggtgcacagcggcgtgtgtaccgacccccagccactgaaagaacagcccgccctgaacgacagccggtactgcctgagcagcagactgagagtgtccgccaccttctggcagaacccccggaaccacttcagatgccaggtgcagttctacggcctgagcgagaacgacgagtggacccaggacagagccaagcccgtgacccagatcgtgtctgccgaagcctggggcagagccgatgatgtgattaagatccactggcaggaaaagaagtccaacaccatcctgggcagccaggaaggcaacaccatgaagaccaacgacacctacatgaagttcagctggctgaccgtgcccgagaagtccctggacaaagaacacagatgcatcgtgcggcacgaaaacaacaagaacggcgtggaccaggaaatcatcttcccacccatcaagaccgatgtgattacaatggaccccaaggacaactgctccaaggacgccaacgataccctgctgctccagctgaccaacaccagcgcctactacatgtacttgttgctgctgctgaagtccgtggtgtacttcgccatcatcacatgctgcctgctgcggagaaccgccttctgctgcaacggcgagaagtctagggccaagcgatctggatctggagcaacaaacttctcactactcaaacaagcaggtgacgtggaggagaatcccgggcctactagtatggactggatttggcgcatccttttccttgtcggcgctgctaccggcgcgcattccgggccccagctccagctgcaagagtctggacctggcctggtcaagcctagcgagacactgagcctgacctgtaccgtgtccggcgatagcatcagcagcggcgattactactggggctggatcagacagcctcctggcaaaggactggaatggatcggccacatctactacagcggcgtgacctactacaaccccagcctgaagtccagagtgaccatcagcgtggacaccagccggaaccagttctccctgaagctgtctagcgtgacagccgccgataccgccgtgtactactgcaccagagaggacagcagcaactggcggagtagaggccagggaacactggtcacagttagctctggatccggcggaggcggaagtggaggcggaggatctggcggcggaggctctttcgaacaagttcaactggttcaatcaggcggaggcgtggtgcaacctggtggctctctgagagtgtcttgtgctgcctctggcgtgaccctgagcgactatggaatgcactgggtccgacaggcccctggcaaaggacttgagtgggtcgccttcatcagaaacgacggcagcgacaagtattacgccgacagcgtgaagggcagattcaccatcagccgggacaacagcgagaaaaccgtgtctctccagatgtctagcctgagagccgaggacaccgccgtgtactactgtgccaagaatggcgagagcggccctctggactactggtatctggatctgtggggcagaggcaccctggtcacagtctcttctacgcgtatccagaaccctgatcctgccgtgtaccagctgcgggatagcaagagcagcgacaagagcgtgtgtctgttcaccgacttcgacagccagaccaacgtgtcccagagcaaggactccgacgtgtacatcaccgataagtgcgtgctggacatgcggagcatggacttcaagagcaactccgccgtggcctggtccaacaagtccgatttcgcctgcgccaacgccttcaacaacagcattatccccgaggacacattcttcccaagccccgagagcagcgactccaccgaccacgtgaagcccaaagagacagagaacaccaagcagcccagcaagagctgccacaagcccaaggccatcgtgcacaccgagaaagtgaacatgatgagcctgaccgtgctgggcctgcggatgctgttcgccaaaaccgtggccgtgaacttcctgctgaccgccaagctgttcttcctc

SEQ ID NO: 7831 - DNA, 3006 bp, synthetic construct
  source 1..3006: mol_type = other DNA
atggccttaccagtgaccgccttgctcctgccgctggccttgctgctccacgccgccaggccggaagtgcagctggttgaatctggcggaggactggttcagcctggcggatctctgagactgtcttgtgccgccagcggcttcagcttcagcgacttttggatgagctgggtccgacaggcccctggcaaaggacttgaatgggtcgccacaatcagccaggccggcagcgagaaggactacgtggactctgtgaagggcagattcaccatcagccgggacaacgccaagaagtccctgtacctccagatgaacagcctgagagccgaggacaccgccgtgtactattgtgcctctggcgtgtacagcttcgactacagaggccagggcaccctggtcacagtctcttctggtaccggcggaggcggatctggcggcggaggtagcggtggcggaggatctgaattcagctacgagctgacacagcctccatccgtgtctggcacacctggacagagagtggctatctcctgtagcggcagcagcagcaacatcggcaccagaatggtcacctggtatcagcacgtgccaggcacagcccctaagctgctgatcttcaacaacaaccagcggcctagcggcgtgcccgatagattttctgccagcaagagcggcacaagcgccagcctggctatcatcggactccagtctgacgacgaggccgactactactgtgccacctgggacgacaacgtgaagtcctacgtgttcggcaccggcaccaaagtgacagtgcttggaagtagactcgaggacctgaagaacgtgttcccacctgaggtggccgtgttcgagcctagcgaggccgagatcagccacacccagaaagccaccctcgtgtgcctggctaccggcttctaccccgaccatgtggaactgtcttggtgggtcaacggcaaagaggtgcacagcggcgtgtgtaccgacccccagccactgaaagaacagcccgccctgaacgacagccggtactgcctgagcagcagactgagagtgtccgccaccttctggcagaacccccggaaccacttcagatgccaggtgcagttctacggcctgagcgagaacgacgagtggacccaggacagagccaagcccgtgacccagatcgtgtctgccgaagcctggggcagagccgatgatgtgattaagatccactggcaggaaaagaagtccaacaccatcctgggcagccaggaaggcaacaccatgaagaccaacgacacctacatgaagttcagctggctgaccgtgcccgagaagtccctggacaaagaacacagatgcatcgtgcggcacgaaaacaacaagaacggcgtggaccaggaaatcatcttcccacccatcaagaccgatgtgattacaatggaccccaaggacaactgctccaaggacgccaacgataccctgctgctccagctgaccaacaccagcgcctactacatgtacttgttgctgctgctgaagtccgtggtgtacttcgccatcatcacatgctgcctgctgcggagaaccgccttctgctgcaacggcgagaagtctagggccaagcgatctggatctggagcaacaaacttctcactactcaaacaagcaggtgacgtggaggagaatcccgggcctactagtatggactggatttggcgcatccttttccttgtcggcgctgctaccggcgcgcattccgggccccagctccagctgcaagagtctggacctggcctggtcaagcctagcgagacactgagcctgacctgtaccgtgtccggcgatagcatcagcagcggcgattactactggggctggatcagacagcctcctggcaaaggactggaatggatcggccacatctactacagcggcgtgacctactacaaccccagcctgaagtccagagtgaccatcagcgtggacaccagccggaaccagttctccctgaagctgtctagcgtgacagccgccgataccgccgtgtactactgcaccagagaggacagcagcaactggcggagtagaggccagggaacactggtcacagttagctctggatccggcggaggcggaagtggaggcggaggatctggcggcggaggctctttcgaacttgaaatggcccaggttcagctccagcagtggggagctggactgctgaagcctagcgagacactgagcctgacctgtgctgtgtacggcggcagcttcagcggctactactggtcctggatcagacagcctcctggcaaaggactggaatggatcggcgagatcaaccacagcggctccaccaactacaaccccagcctgaagtccagagtgaccatcagcgtggacaccagcaagaaccagttctccctgaagctgagcagcgtgacagccgctgataccgccgtgtactattgcgctagagcccctcagtcttggtacgtgggagatgtgtggggccagggcacactggttacagtgtcatctacgcgtatccagaaccctgatcctgccgtgtaccagctgcgggatagcaagagcagcgacaagagcgtgtgtctgttcaccgacttcgacagccagaccaacgtgtcccagagcaaggactccgacgtgtacatcaccgataagtgcgtgctggacatgcggagcatggacttcaagagcaactccgccgtggcctggtccaacaagtccgatttcgcctgcgccaacgccttcaacaacagcattatccccgaggacacattcttcccaagccccgagagcagcgactccaccgaccacgtgaagcccaaagagacagagaacaccaagcagcccagcaagagctgccacaagcccaaggccatcgtgcacaccgagaaagtgaacatgatgagcctgaccgtgctgggcctgcggatgctgttcgccaaaaccgtggccgtgaacttcctgctgaccgccaagctgttcttcctc

SEQ ID NO: 7832 - DNA, 2997 bp, synthetic construct
  source 1..2997: mol_type = other DNA
atggccttaccagtgaccgccttgctcctgccgctggccttgctgctccacgccgccaggccggaagtgcagctggttgaatctggcggaggactggttcagcctggcggatctctgagactgtcttgtgccgccagcggcttcagcttcagcgacttttggatgagctgggtccgacaggcccctggcaaaggacttgaatgggtcgccacaatcagccaggccggcagcgagaaggactacgtggactctgtgaagggcagattcaccatcagccgggacaacgccaagaagtccctgtacctccagatgaacagcctgagagccgaggacaccgccgtgtactattgtgcctctggcgtgtacagcttcgactacagaggccagggcaccctggtcacagtctcttctggtaccggcggaggcggatctggcggcggaggtagcggtggcggaggatctgaattccagtctgtgctgacacagcctcctagcctgtctgtggcccctggaaagacagccagcatcacatgcggcggcaacaacatcggcatgaagtccgtgcactggtatcagcagaggccaggacaggctcctgtgctggtcatctactacgacagcgacagaccctctggcatccccggcagattttccggcagcaactctggcaataccgccacactgaccatctccagagtggaagctggcgacgaggccgactactactgccaagtgtgggataccaccggcgatcaccctggctatgtgtttggcaccggcaccaaagtgacagtgcttctcgaggacctgaagaacgtgttcccacctgaggtggccgtgttcgagcctagcgaggccgagatcagccacacccagaaagccaccctcgtgtgcctggctaccggcttctaccccgaccatgtggaactgtcttggtgggtcaacggcaaagaggtgcacagcggcgtgtgtaccgacccccagccactgaaagaacagcccgccctgaacgacagccggtactgcctgagcagcagactgagagtgtccgccaccttctggcagaacccccggaaccacttcagatgccaggtgcagttctacggcctgagcgagaacgacgagtggacccaggacagagccaagcccgtgacccagatcgtgtctgccgaagcctggggcagagccgatgatgtgattaagatccactggcaggaaaagaagtccaacaccatcctgggcagccaggaaggcaacaccatgaagaccaacgacacctacatgaagttcagctggctgaccgtgcccgagaagtccctggacaaagaacacagatgcatcgtgcggcacgaaaacaacaagaacggcgtggaccaggaaatcatcttcccacccatcaagaccgatgtgattacaatggaccccaaggacaactgctccaaggacgccaacgataccctgctgctccagctgaccaacaccagcgcctactacatgtacttgttgctgctgctgaagtccgtggtgtacttcgccatcatcacatgctgcctgctgcggagaaccgccttctgctgcaacggcgagaagtctagggccaagcgatctggatctggagcaacaaacttctcactactcaaacaagcaggtgacgtggaggagaatcccgggcctactagtatggactggatttggcgcatccttttccttgtcggcgctgctaccggcgcgcattccgggccccagctccagctgcaagagtctggacctggcctggtcaagcctagcgagacactgagcctgacctgtaccgtgtccggcgatagcatcagcagcggcgattactactggggctggatcagacagcctcctggcaaaggactggaatggatcggccacatctactacagcggcgtgacctactacaaccccagcctgaagtccagagtgaccatcagcgtggacaccagccggaaccagttctccctgaagctgtctagcgtgacagccgccgataccgccgtgtactactgcaccagagaggacagcagcaactggcggagtagaggccagggaacactggtcacagttagctctggatccggcggaggcggaagtggaggcggaggatctggcggcggaggctctttcgaacaagttcaactggttcagagcggagccgaagtgaagaaacctggcagcagcgtgaaggtgtcctgcaaagcaagcggcggcacctttagcagctacgccatctcttgggtccgacaggcacctggacaaggactggaatggatgggcggcatcatccccatcttcggcacagccaattacgcccagaaattccagggcagagtgaccatcaccgccgacgagtctacaagcaccgcctacatggaactgagcagcctgagaagcgaggacaccgccgtgtactattgtgccagaggcgtgtacggctacagcggctctgccccttatgatgagtggggccagggaaccctggtcaccgtttcttctacgcgtatccagaaccctgatcctgccgtgtaccagctgcgggatagcaagagcagcgacaagagcgtgtgtctgttcaccgacttcgacagccagaccaacgtgtcccagagcaaggactccgacgtgtacatcaccgataagtgcgtgctggacatgcggagcatggacttcaagagcaactccgccgtggcctggtccaacaagtccgatttcgcctgcgccaacgccttcaacaacagcattatccccgaggacacattcttcccaagccccgagagcagcgactccaccgaccacgtgaagcccaaagagacagagaacaccaagcagcccagcaagagctgccacaagcccaaggccatcgtgcacaccgagaaagtgaacatgatgagcctgaccgtgctgggcctgcggatgctgttcgccaaaaccgtggccgtgaacttcctgctgaccgccaagctgttcttcctc

SEQ ID NO: 7833 - DNA, 2991 bp, synthetic construct
  source 1..2991: mol_type = other DNA
atggccttaccagtgaccgccttgctcctgccgctggccttgctgctccacgccgccaggccggaagtgcagctggttgaatctggcggaggactggttcagcctggcggatctctgagactgtcttgtgccgccagcggcttcagcttcagcgacttttggatgagctgggtccgacaggcccctggcaaaggacttgaatgggtcgccacaatcagccaggccggcagcgagaaggactacgtggactctgtgaagggcagattcaccatcagccgggacaacgccaagaagtccctgtacctccagatgaacagcctgagagccgaggacaccgccgtgtactattgtgcctctggcgtgtacagcttcgactacagaggccagggcaccctggtcacagtctcttctggtaccggcggaggcggatctggcggcggaggtagcggtggcggaggatctgaattcgaggtgcaactggttgagtctggcggaggactggtgcagcctggaagaagcctgagactgtcttgtgccgccagcggcttcaccttcgacgattatgccatgcactgggtccgacaggcccctggcaaaggacttgaatgggtgtccggcatctcctggaacagcggctctatcggctacgccgattccgtgaagggcagattcaccatcagccgggacaacgccaagaacagcctgtacctccagatgaactccctgagagccgaggacacagccctgtactactgcgccaaagacaaaggcggaggctactacgacttttggagcggcagcgattattggggccagggcacactggtcacagtgtctagcctcgaggacctgaagaacgtgttcccacctgaggtggccgtgttcgagcctagcgaggccgagatcagccacacccagaaagccaccctcgtgtgcctggctaccggcttctaccccgaccatgtggaactgtcttggtgggtcaacggcaaagaggtgcacagcggcgtgtgtaccgacccccagccactgaaagaacagcccgccctgaacgacagccggtactgcctgagcagcagactgagagtgtccgccaccttctggcagaacccccggaaccacttcagatgccaggtgcagttctacggcctgagcgagaacgacgagtggacccaggacagagccaagcccgtgacccagatcgtgtctgccgaagcctggggcagagccgatgatgtgattaagatccactggcaggaaaagaagtccaacaccatcctgggcagccaggaaggcaacaccatgaagaccaacgacacctacatgaagttcagctggctgaccgtgcccgagaagtccctggacaaagaacacagatgcatcgtgcggcacgaaaacaacaagaacggcgtggaccaggaaatcatcttcccacccatcaagaccgatgtgattacaatggaccccaaggacaactgctccaaggacgccaacgataccctgctgctccagctgaccaacaccagcgcctactacatgtacttgttgctgctgctgaagtccgtggtgtacttcgccatcatcacatgctgcctgctgcggagaaccgccttctgctgcaacggcgagaagtctagggccaagcgatctggatctggagcaacaaacttctcactactcaaacaagcaggtgacgtggaggagaatcccgggcctactagtatggactggatttggcgcatccttttccttgtcggcgctgctaccggcgcgcattccgggccccagctccagctgcaagagtctggacctggcctggtcaagcctagcgagacactgagcctgacctgtaccgtgtccggcgatagcatcagcagcggcgattactactggggctggatcagacagcctcctggcaaaggactggaatggatcggccacatctactacagcggcgtgacctactacaaccccagcctgaagtccagagtgaccatcagcgtggacaccagccggaaccagttctccctgaagctgtctagcgtgacagccgccgataccgccgtgtactactgcaccagagaggacagcagcaactggcggagtagaggccagggaacactggtcacagttagctctggatccggcggaggcggaagtggaggcggaggatctggcggcggaggctctttcgaatcttctgagctgacacaggaccctgccgtgtctgttgctctgggccagacagtgcggattacctgtcagggcgatagcctgagaagctactacgcctcctggtatcagcagaagccaggccaggctcctgtgctggtcatctacggcaagaacaacagacccagcggcatccccgatagattcagcggaagcagctctggcaataccgccagcctgacaattactggcgctcaggccgaggacgaggccgactactactgcaacagcagagatagcagcggctgggttttcggcggaggcacaaaactgacagtgctgacgcgtatccagaaccctgatcctgccgtgtaccagctgcgggatagcaagagcagcgacaagagcgtgtgtctgttcaccgacttcgacagccagaccaacgtgtcccagagcaaggactccgacgtgtacatcaccgataagtgcgtgctggacatgcggagcatggacttcaagagcaactccgccgtggcctggtccaacaagtccgatttcgcctgcgccaacgccttcaacaacagcattatccccgaggacacattcttcccaagccccgagagcagcgactccaccgaccacgtgaagcccaaagagacagagaacaccaagcagcccagcaagagctgccacaagcccaaggccatcgtgcacaccgagaaagtgaacatgatgagcctgaccgtgctgggcctgcggatgctgttcgccaaaaccgtggccgtgaacttcctgctgaccgccaagctgttcttcctc

SEQ ID NO: 7834 - DNA, 3018 bp, synthetic construct
  source 1..3018: mol_type = other DNA
atggccttaccagtgaccgccttgctcctgccgctggccttgctgctccacgccgccaggccggaagtgcagctggttgaatctggcggaggactggttcagcctggcggatctctgagactgtcttgtgccgccagcggcttcagcttcagcgacttttggatgagctgggtccgacaggcccctggcaaaggacttgaatgggtcgccacaatcagccaggccggcagcgagaaggactacgtggactctgtgaagggcagattcaccatcagccgggacaacgccaagaagtccctgtacctccagatgaacagcctgagagccgaggacaccgccgtgtactattgtgcctctggcgtgtacagcttcgactacagaggccagggcaccctggtcacagtctcttctggtaccggcggaggcggatctggcggcggaggtagcggtggcggaggatctgaattcgaagtgcagctccagcagtctggacctggcctggttaagcctagccagacactgagcctgacctgtgccatcagcggcgatagcgtgctgagcaacagcgacacctggaactggatcagacagagccctagcagaggactggaatggctgggcagaacctaccacagaagcacttggtacgacgactacgccagctctgtgcggggcagagtgtccatcaatgtggacaccagcaagaaccagtacagcctgcaactgaacgccgtgacacctgaggataccggcgtgtactactgcgccagagacagactccaggacggcaactcttggagcgacgcctttgatgtgtggggccagggcacaatggtcaccgtttctagcctcgaggacctgaagaacgtgttcccacctgaggtggccgtgttcgagcctagcgaggccgagatcagccacacccagaaagccaccctcgtgtgcctggctaccggcttctaccccgaccatgtggaactgtcttggtgggtcaacggcaaagaggtgcacagcggcgtgtgtaccgacccccagccactgaaagaacagcccgccctgaacgacagccggtactgcctgagcagcagactgagagtgtccgccaccttctggcagaacccccggaaccacttcagatgccaggtgcagttctacggcctgagcgagaacgacgagtggacccaggacagagccaagcccgtgacccagatcgtgtctgccgaagcctggggcagagccgatgatgtgattaagatccactggcaggaaaagaagtccaacaccatcctgggcagccaggaaggcaacaccatgaagaccaacgacacctacatgaagttcagctggctgaccgtgcccgagaagtccctggacaaagaacacagatgcatcgtgcggcacgaaaacaacaagaacggcgtggaccaggaaatcatcttcccacccatcaagaccgatgtgattacaatggaccccaaggacaactgctccaaggacgccaacgataccctgctgctccagctgaccaacaccagcgcctactacatgtacttgttgctgctgctgaagtccgtggtgtacttcgccatcatcacatgctgcctgctgcggagaaccgccttctgctgcaacggcgagaagtctagggccaagcgatctggatctggagcaacaaacttctcactactcaaacaagcaggtgacgtggaggagaatcccgggcctactagtatggactggatttggcgcatccttttccttgtcggcgctgctaccggcgcgcattccgggccccagctccagctgcaagagtctggacctggcctggtcaagcctagcgagacactgagcctgacctgtaccgtgtccggcgatagcatcagcagcggcgattactactggggctggatcagacagcctcctggcaaaggactggaatggatcggccacatctactacagcggcgtgacctactacaaccccagcctgaagtccagagtgaccatcagcgtggacaccagccggaaccagttctccctgaagctgtctagcgtgacagccgccgataccgccgtgtactactgcaccagagaggacagcagcaactggcggagtagaggccagggaacactggtcacagttagctctggatccggcggaggcggaagtggaggcggaggatctggcggcggaggctctttcgaacaatctgctctgacacagcctgccagcgtgtcaggatctcctggacagagcatcaccatctcttgcaccggcaccagctctgatgtcggcggctacaattacgtgtcctggtatcagcagcaccccggcaaggcccctaagctgatgatctacgacgtgtccaacagacccagcggcgtgtccaatagattctccggcagcaagagcggcaacaccgccagcctgacaatttctggactgcaagccgaggacgaggccgactactactgtagcagctacaccagcagcagcacactggtgtacgtgttcggcacaggcaccaaagtgaccgtgcttacgcgtatccagaaccctgatcctgccgtgtaccagctgcgggatagcaagagcagcgacaagagcgtgtgtctgttcaccgacttcgacagccagaccaacgtgtcccagagcaaggactccgacgtgtacatcaccgataagtgcgtgctggacatgcggagcatggacttcaagagcaactccgccgtggcctggtccaacaagtccgatttcgcctgcgccaacgccttcaacaacagcattatccccgaggacacattcttcccaagccccgagagcagcgactccaccgaccacgtgaagcccaaagagacagagaacaccaagcagcccagcaagagctgccacaagcccaaggccatcgtgcacaccgagaaagtgaacatgatgagcctgaccgtgctgggcctgcggatgctgttcgccaaaaccgtggccgtgaacttcctgctgaccgccaagctgttcttcctc

SEQ ID NO: 7835 - DNA, 2952 bp, synthetic construct
  source 1..2952: mol_type = other DNA
atggccttaccagtgaccgccttgctcctgccgctggccttgctgctccacgccgccaggccggaagtgcagctggttgaatctggcggaggactggttcagcctggcggatctctgagactgtcttgtgccgccagcggcttcagcttcagcgacttttggatgagctgggtccgacaggcccctggcaaaggacttgaatgggtcgccacaatcagccaggccggcagcgagaaggactacgtggactctgtgaagggcagattcaccatcagccgggacaacgccaagaagtccctgtacctccagatgaacagcctgagagccgaggacaccgccgtgtactattgtgcctctggcgtgtacagcttcgactacagaggccagggcaccctggtcacagtctcttctggtaccggcggaggcggatctggcggcggaggtagcggtggcggaggatctgaattccaggtgcaactggttcagtctggggccgaagtgaagaaacctggggcctctgtgaaggtgtcctgcaaggcttccggctacacctttaccagctacgacatcaactgggtccgacaggccacaggccaaggactggaatggatgggctggatgaaccccaacagcggcaataccggctacgcccagaaattccagggcagagtgaccatgaccagaaacaccagcatcagcaccgcctacatggaactgagcagcctgagaagcgaggacaccgccgtgtactattgcgccagaggcgacagcaccaaggtggaaatcaaactcgaggacctgaagaacgtgttcccacctgaggtggccgtgttcgagcctagcgaggccgagatcagccacacccagaaagccaccctcgtgtgcctggctaccggcttctaccccgaccatgtggaactgtcttggtgggtcaacggcaaagaggtgcacagcggcgtgtgtaccgacccccagccactgaaagaacagcccgccctgaacgacagccggtactgcctgagcagcagactgagagtgtccgccaccttctggcagaacccccggaaccacttcagatgccaggtgcagttctacggcctgagcgagaacgacgagtggacccaggacagagccaagcccgtgacccagatcgtgtctgccgaagcctggggcagagccgatgatgtgattaagatccactggcaggaaaagaagtccaacaccatcctgggcagccaggaaggcaacaccatgaagaccaacgacacctacatgaagttcagctggctgaccgtgcccgagaagtccctggacaaagaacacagatgcatcgtgcggcacgaaaacaacaagaacggcgtggaccaggaaatcatcttcccacccatcaagaccgatgtgattacaatggaccccaaggacaactgctccaaggacgccaacgataccctgctgctccagctgaccaacaccagcgcctactacatgtacttgttgctgctgctgaagtccgtggtgtacttcgccatcatcacatgctgcctgctgcggagaaccgccttctgctgcaacggcgagaagtctagggccaagcgatctggatctggagcaacaaacttctcactactcaaacaagcaggtgacgtggaggagaatcccgggcctactagtatggactggatttggcgcatccttttccttgtcggcgctgctaccggcgcgcattccgggccccagctccagctgcaagagtctggacctggcctggtcaagcctagcgagacactgagcctgacctgtaccgtgtccggcgatagcatcagcagcggcgattactactggggctggatcagacagcctcctggcaaaggactggaatggatcggccacatctactacagcggcgtgacctactacaaccccagcctgaagtccagagtgaccatcagcgtggacaccagccggaaccagttctccctgaagctgtctagcgtgacagccgccgataccgccgtgtactactgcaccagagaggacagcagcaactggcggagtagaggccagggaacactggtcacagttagctctggatccggcggaggcggaagtggaggcggaggatctggcggcggaggctctttcgaacaatctgtgctgacccagcctagatccgtgtctggctctcctggacagagcgtgaccatctcttgtaccggcaccagctctgatgtcggcggctacaattacgtgtcctggtatcagcagcaccccggcgaagcccctaagctgattatctacgacgccgacaagcggcccagcggcatcagcaatagattcagctctggcaagagcggcaacaccgccagcctgacaatcagcggactccaggtggaagatgaggccgactactactgctgctcctatgccggcggaagcacctgggttttcggaggcggtacaaaagtgaccgtgctgacgcgtatccagaaccctgatcctgccgtgtaccagctgcgggatagcaagagcagcgacaagagcgtgtgtctgttcaccgacttcgacagccagaccaacgtgtcccagagcaaggactccgacgtgtacatcaccgataagtgcgtgctggacatgcggagcatggacttcaagagcaactccgccgtggcctggtccaacaagtccgatttcgcctgcgccaacgccttcaacaacagcattatccccgaggacacattcttcccaagccccgagagcagcgactccaccgaccacgtgaagcccaaagagacagagaacaccaagcagcccagcaagagctgccacaagcccaaggccatcgtgcacaccgagaaagtgaacatgatgagcctgaccgtgctgggcctgcggatgctgttcgccaaaaccgtggccgtgaacttcctgctgaccgccaagctgttcttcctc

SEQ ID NO: 7836 - DNA, 3018 bp, synthetic construct
  source 1..3018: mol_type = other DNA
atggccttaccagtgaccgccttgctcctgccgctggccttgctgctccacgccgccaggccggaagtgcagctggttgaatctggcggaggactggttcagcctggcggatctctgagactgtcttgtgccgccagcggcttcagcttcagcgacttttggatgagctgggtccgacaggcccctggcaaaggacttgaatgggtcgccacaatcagccaggccggcagcgagaaggactacgtggactctgtgaagggcagattcaccatcagccgggacaacgccaagaagtccctgtacctccagatgaacagcctgagagccgaggacaccgccgtgtactattgtgcctctggcgtgtacagcttcgactacagaggccagggcaccctggtcacagtctcttctggtaccggcggaggcggatctggcggcggaggtagcggtggcggaggatctgaattcgaagtgcagctccagcagtctggacctggcctggttaagcctagccagacactgagcctgacctgtgccatcagcggcgatagcgtgtcctctaatagcgccgcctggaactggatcagacagagccctagcagaggactggaatggctgggcagaacctactaccgcagcaagtggtacagcgactacgccgtgtccgtgaagtcccggatcaccatcaatcccgacaccagcaagaaccagttcagcctgcaactgaacagcgtgacccctgaggataccgccgtgtactactgcgccagagatccctacgacttttggagcggctaccccgacgcctttgacatctggggacagggcacaatggtcaccgtttctagcctcgaggacctgaagaacgtgttcccacctgaggtggccgtgttcgagcctagcgaggccgagatcagccacacccagaaagccaccctcgtgtgcctggctaccggcttctaccccgaccatgtggaactgtcttggtgggtcaacggcaaagaggtgcacagcggcgtgtgtaccgacccccagccactgaaagaacagcccgccctgaacgacagccggtactgcctgagcagcagactgagagtgtccgccaccttctggcagaacccccggaaccacttcagatgccaggtgcagttctacggcctgagcgagaacgacgagtggacccaggacagagccaagcccgtgacccagatcgtgtctgccgaagcctggggcagagccgatgatgtgattaagatccactggcaggaaaagaagtccaacaccatcctgggcagccaggaaggcaacaccatgaagaccaacgacacctacatgaagttcagctggctgaccgtgcccgagaagtccctggacaaagaacacagatgcatcgtgcggcacgaaaacaacaagaacggcgtggaccaggaaatcatcttcccacccatcaagaccgatgtgattacaatggaccccaaggacaactgctccaaggacgccaacgataccctgctgctccagctgaccaacaccagcgcctactacatgtacttgttgctgctgctgaagtccgtggtgtacttcgccatcatcacatgctgcctgctgcggagaaccgccttctgctgcaacggcgagaagtctagggccaagcgatctggatctggagcaacaaacttctcactactcaaacaagcaggtgacgtggaggagaatcccgggcctactagtatggactggatttggcgcatccttttccttgtcggcgctgctaccggcgcgcattccgggccccagctccagctgcaagagtctggacctggcctggtcaagcctagcgagacactgagcctgacctgtaccgtgtccggcgatagcatcagcagcggcgattactactggggctggatcagacagcctcctggcaaaggactggaatggatcggccacatctactacagcggcgtgacctactacaaccccagcctgaagtccagagtgaccatcagcgtggacaccagccggaaccagttctccctgaagctgtctagcgtgacagccgccgataccgccgtgtactactgcaccagagaggacagcagcaactggcggagtagaggccagggaacactggtcacagttagctctggatccggcggaggcggaagtggaggcggaggatctggcggcggaggctctttcgaacaatctgctctgacacagcctgccagcgtgtcaggatctcctggacagagcatcaccatctcttgcaccggcaccagctctgatgtcggcggctacaattacgtgtcctggtatcagcagcaccccggcaaggcccctaaagtgattatcagcgaagtgaacaacagacccagcggcgtgtcccacagattcagcggctctaagtctggcaacaccgccagcctgacaatctctggactgcaagccgaggacgaggccgactacttctgtagcagctacaccagcggcagaaccctgtacgtgttcggcacaggcagcaaagtgacagtgctgggaacgcgtatccagaaccctgatcctgccgtgtaccagctgcgggatagcaagagcagcgacaagagcgtgtgtctgttcaccgacttcgacagccagaccaacgtgtcccagagcaaggactccgacgtgtacatcaccgataagtgcgtgctggacatgcggagcatggacttcaagagcaactccgccgtggcctggtccaacaagtccgatttcgcctgcgccaacgccttcaacaacagcattatccccgaggacacattcttcccaagccccgagagcagcgactccaccgaccacgtgaagcccaaagagacagagaacaccaagcagcccagcaagagctgccacaagcccaaggccatcgtgcacaccgagaaagtgaacatgatgagcctgaccgtgctgggcctgcggatgctgttcgccaaaaccgtggccgtgaacttcctgctgaccgccaagctgttcttcctc

SEQ ID NO: 7837 - DNA, 3015 bp, synthetic construct
  source 1..3015: mol_type = other DNA
atggccttaccagtgaccgccttgctcctgccgctggccttgctgctccacgccgccaggccggaagtgcagctggttgaatctggcggaggactggttcagcctggcggatctctgagactgtcttgtgccgccagcggcttcagcttcagcgacttttggatgagctgggtccgacaggcccctggcaaaggacttgaatgggtcgccacaatcagccaggccggcagcgagaaggactacgtggactctgtgaagggcagattcaccatcagccgggacaacgccaagaagtccctgtacctccagatgaacagcctgagagccgaggacaccgccgtgtactattgtgcctctggcgtgtacagcttcgactacagaggccagggcaccctggtcacagtctcttctggtaccggcggaggcggatctggcggcggaggtagcggtggcggaggatctgaattccaatctgctctgacacagcctgccagcgcctctggatctcctggacagagcgtgaccatctcctgtaccggcacctcttctgatgtcggcggctacaactacgtgtcctggtatcagcagcaccccggcaaggcccctaagctgatgatctacgacgtgtccaacagacccagcggcgtgtccaatagattctccggcagcaagagcggcaacaccgccagcctgacaatttctggactgcaagccgaggacgaggccgactactactgtagcagctacaccagcagcagcacactgtacgtgttcggcacaggcacccagctcacagttcttctcgaggacctgaagaacgtgttcccacctgaggtggccgtgttcgagcctagcgaggccgagatcagccacacccagaaagccaccctcgtgtgcctggctaccggcttctaccccgaccatgtggaactgtcttggtgggtcaacggcaaagaggtgcacagcggcgtgtgtaccgacccccagccactgaaagaacagcccgccctgaacgacagccggtactgcctgagcagcagactgagagtgtccgccaccttctggcagaacccccggaaccacttcagatgccaggtgcagttctacggcctgagcgagaacgacgagtggacccaggacagagccaagcccgtgacccagatcgtgtctgccgaagcctggggcagagccgatgatgtgattaagatccactggcaggaaaagaagtccaacaccatcctgggcagccaggaaggcaacaccatgaagaccaacgacacctacatgaagttcagctggctgaccgtgcccgagaagtccctggacaaagaacacagatgcatcgtgcggcacgaaaacaacaagaacggcgtggaccaggaaatcatcttcccacccatcaagaccgatgtgattacaatggaccccaaggacaactgctccaaggacgccaacgataccctgctgctccagctgaccaacaccagcgcctactacatgtacttgttgctgctgctgaagtccgtggtgtacttcgccatcatcacatgctgcctgctgcggagaaccgccttctgctgcaacggcgagaagtctagggccaagcgatctggatctggagcaacaaacttctcactactcaaacaagcaggtgacgtggaggagaatcccgggcctactagtatggactggatttggcgcatccttttccttgtcggcgctgctaccggcgcgcattccgggccccagctccagctgcaagagtctggacctggcctggtcaagcctagcgagacactgagcctgacctgtaccgtgtccggcgatagcatcagcagcggcgattactactggggctggatcagacagcctcctggcaaaggactggaatggatcggccacatctactacagcggcgtgacctactacaaccccagcctgaagtccagagtgaccatcagcgtggacaccagccggaaccagttctccctgaagctgtctagcgtgacagccgccgataccgccgtgtactactgcaccagagaggacagcagcaactggcggagtagaggccagggaacactggtcacagttagctctggatccggcggaggcggaagtggaggcggaggatctggcggcggaggctctttcgaagaagtgcagctccagcagtctggacctggcctggttaagcctagccagacactgagcctgacctgtgccatcagcggcgattccatgctgagcaacagcgacacctggaactggatcagacagagccccagcagaggcctggaatggctgggcagaacataccacagaagcacttggtacgacgactacgccagctctgtgcggggcagagtgtccatcaatgtggacaccagcaagaaccagtacagcctgcaactgaacgccgtgacacctgaggataccggcgtgtactactgtgccagagtgcggctccaggacggcaattcttggagcgacgcctttgatgtgtggggccagggcacaatggtcaccgtttctagcacgcgtatccagaaccctgatcctgccgtgtaccagctgcgggatagcaagagcagcgacaagagcgtgtgtctgttcaccgacttcgacagccagaccaacgtgtcccagagcaaggactccgacgtgtacatcaccgataagtgcgtgctggacatgcggagcatggacttcaagagcaactccgccgtggcctggtccaacaagtccgatttcgcctgcgccaacgccttcaacaacagcattatccccgaggacacattcttcccaagccccgagagcagcgactccaccgaccacgtgaagcccaaagagacagagaacaccaagcagcccagcaagagctgccacaagcccaaggccatcgtgcacaccgagaaagtgaacatgatgagcctgaccgtgctgggcctgcggatgctgttcgccaaaaccgtggccgtgaacttcctgctgaccgccaagctgttcttcctc

SEQ ID NO: 7838 - DNA, 3015 bp, synthetic construct
  source 1..3015: mol_type = other DNA
atggccttaccagtgaccgccttgctcctgccgctggccttgctgctccacgccgccaggccggaagtgcagctggttgaatctggcggaggactggttcagcctggcggatctctgagactgtcttgtgccgccagcggcttcagcttcagcgacttttggatgagctgggtccgacaggcccctggcaaaggacttgaatgggtcgccacaatcagccaggccggcagcgagaaggactacgtggactctgtgaagggcagattcaccatcagccgggacaacgccaagaagtccctgtacctccagatgaacagcctgagagccgaggacaccgccgtgtactattgtgcctctggcgtgtacagcttcgactacagaggccagggcaccctggtcacagtctcttctggtaccggcggaggcggatctggcggcggaggtagcggtggcggaggatctgaattcgacgtgatgctgacccagacaccactgagcctgcctgtgtctctgggcgatcaggccagcatctcctgtagaagcagccagagcatcctgcacagcaccggcgatacctacctggaatggtatctccagaagcctggacagagccccaagctgctgattaacaaggtgtccaaccggctgagcggcgtgcccgatagattttctggcagcggctctggcaccgacttcaccctgaagatcagcagagtggaagccgaggacctgggcgtgtactactgcttccaaggcagccatgttccttggacctttggcggaggcaccaagctggaaatcaagagagctgacgccgctcctaccgtgtccatctttcctctcgaggacctgaagaacgtgttcccacctgaggtggccgtgttcgagcctagcgaggccgagatcagccacacccagaaagccaccctcgtgtgcctggctaccggcttctaccccgaccatgtggaactgtcttggtgggtcaacggcaaagaggtgcacagcggcgtgtgtaccgacccccagccactgaaagaacagcccgccctgaacgacagccggtactgcctgagcagcagactgagagtgtccgccaccttctggcagaacccccggaaccacttcagatgccaggtgcagttctacggcctgagcgagaacgacgagtggacccaggacagagccaagcccgtgacccagatcgtgtctgccgaagcctggggcagagccgatgatgtgattaagatccactggcaggaaaagaagtccaacaccatcctgggcagccaggaaggcaacaccatgaagaccaacgacacctacatgaagttcagctggctgaccgtgcccgagaagtccctggacaaagaacacagatgcatcgtgcggcacgaaaacaacaagaacggcgtggaccaggaaatcatcttcccacccatcaagaccgatgtgattacaatggaccccaaggacaactgctccaaggacgccaacgataccctgctgctccagctgaccaacaccagcgcctactacatgtacttgttgctgctgctgaagtccgtggtgtacttcgccatcatcacatgctgcctgctgcggagaaccgccttctgctgcaacggcgagaagtctagggccaagcgatctggatctggagcaacaaacttctcactactcaaacaagcaggtgacgtggaggagaatcccgggcctactagtatggactggatttggcgcatccttttccttgtcggcgctgctaccggcgcgcattccgggccccagctccagctgcaagagtctggacctggcctggtcaagcctagcgagacactgagcctgacctgtaccgtgtccggcgatagcatcagcagcggcgattactactggggctggatcagacagcctcctggcaaaggactggaatggatcggccacatctactacagcggcgtgacctactacaaccccagcctgaagtccagagtgaccatcagcgtggacaccagccggaaccagttctccctgaagctgtctagcgtgacagccgccgataccgccgtgtactactgcaccagagaggacagcagcaactggcggagtagaggccagggaacactggtcacagttagctctggatccggcggaggcggaagtggaggcggaggatctggcggcggaggctctttcgaacaagtgaagctccagcagagcggccctagccttgtgaaacctggcgcttccgtgaagatgagctgcaaggccagcggctacaccttcaccgatttctacatgaaatgggtcaagcagagccacggcaagtctctggaatggatcggcgacatcaaccccaacatcggagacaccttctacaaccagaagttcaagggcaaagccacactgaccgtggacaagagcagcagcaccgcctacatgcagctcaacagcctgaccagcgaggacagcgccgtgtacttttgttccgtgggctacttcgacgtgtggggagccggaacaaccgtgacagtctcttctacgcgtatccagaaccctgatcctgccgtgtaccagctgcgggatagcaagagcagcgacaagagcgtgtgtctgttcaccgacttcgacagccagaccaacgtgtcccagagcaaggactccgacgtgtacatcaccgataagtgcgtgctggacatgcggagcatggacttcaagagcaactccgccgtggcctggtccaacaagtccgatttcgcctgcgccaacgccttcaacaacagcattatccccgaggacacattcttcccaagccccgagagcagcgactccaccgaccacgtgaagcccaaagagacagagaacaccaagcagcccagcaagagctgccacaagcccaaggccatcgtgcacaccgagaaagtgaacatgatgagcctgaccgtgctgggcctgcggatgctgttcgccaaaaccgtggccgtgaacttcctgctgaccgccaagctgttcttcctc

SEQ ID NO: 7839 - DNA, 3003 bp, synthetic construct
  source 1..3003: mol_type = other DNA
atggccttaccagtgaccgccttgctcctgccgctggccttgctgctccacgccgccaggccggaagtgcagctggttgaatctggcggaggactggttcagcctggcggatctctgagactgtcttgtgccgccagcggcttcagcttcagcgacttttggatgagctgggtccgacaggcccctggcaaaggacttgaatgggtcgccacaatcagccaggccggcagcgagaaggactacgtggactctgtgaagggcagattcaccatcagccgggacaacgccaagaagtccctgtacctccagatgaacagcctgagagccgaggacaccgccgtgtactattgtgcctctggcgtgtacagcttcgactacagaggccagggcaccctggtcacagtctcttctggtaccggcggaggcggatctggcggcggaggtagcggtggcggaggatctgaattcgagatcgtgctgacacagtctcccgccacactgtcactgtctccaggcgaaagagccacactgagctgtagagccagccagagcgtgtccatctacctggcctggtatcagcagaagcctggacaggctccccggctgctgatctacgatgccagcaatagagccacaggcatccccgccagattttctggctctggcagcggcaccgatttcaccctgaccataagcagcctggaacctgaggacttcgccgtgtactactgccagcagagaagcaactggcctcctttcacattcggccctggcaccaaggtggacatcaaactcgaggacctgaagaacgtgttcccacctgaggtggccgtgttcgagcctagcgaggccgagatcagccacacccagaaagccaccctcgtgtgcctggctaccggcttctaccccgaccatgtggaactgtcttggtgggtcaacggcaaagaggtgcacagcggcgtgtgtaccgacccccagccactgaaagaacagcccgccctgaacgacagccggtactgcctgagcagcagactgagagtgtccgccaccttctggcagaacccccggaaccacttcagatgccaggtgcagttctacggcctgagcgagaacgacgagtggacccaggacagagccaagcccgtgacccagatcgtgtctgccgaagcctggggcagagccgatgatgtgattaagatccactggcaggaaaagaagtccaacaccatcctgggcagccaggaaggcaacaccatgaagaccaacgacacctacatgaagttcagctggctgaccgtgcccgagaagtccctggacaaagaacacagatgcatcgtgcggcacgaaaacaacaagaacggcgtggaccaggaaatcatcttcccacccatcaagaccgatgtgattacaatggaccccaaggacaactgctccaaggacgccaacgataccctgctgctccagctgaccaacaccagcgcctactacatgtacttgttgctgctgctgaagtccgtggtgtacttcgccatcatcacatgctgcctgctgcggagaaccgccttctgctgcaacggcgagaagtctagggccaagcgatctggatctggagcaacaaacttctcactactcaaacaagcaggtgacgtggaggagaatcccgggcctactagtatggactggatttggcgcatccttttccttgtcggcgctgctaccggcgcgcattccgggccccagctccagctgcaagagtctggacctggcctggtcaagcctagcgagacactgagcctgacctgtaccgtgtccggcgatagcatcagcagcggcgattactactggggctggatcagacagcctcctggcaaaggactggaatggatcggccacatctactacagcggcgtgacctactacaaccccagcctgaagtccagagtgaccatcagcgtggacaccagccggaaccagttctccctgaagctgtctagcgtgacagccgccgataccgccgtgtactactgcaccagagaggacagcagcaactggcggagtagaggccagggaacactggtcacagttagctctggatccggcggaggcggaagtggaggcggaggatctggcggcggaggctctttcgaacaggtgcagcttgttgaaagcggaggcggagttgtgcagcctggcagaagtctgagactgtcttgtgccgccagcggcttcaccttcagcagctatggaatgcactgggtccgacaggcccctggcaaaggacttgaatgggttgccgtgatctgggacgacggcagcaacaagtattacgtggacagcgtgaagggcagattcaccatcagccgggacaacagcaagaacaccctgtacctccagatgaacagcctgagagccgaggacacagccgtgtattattgcgccagagatgactactacggcagcggctccttcaacagctactatggcacagacgtgtggggccagggcacaacagttaccgttagctctacgcgtatccagaaccctgatcctgccgtgtaccagctgcgggatagcaagagcagcgacaagagcgtgtgtctgttcaccgacttcgacagccagaccaacgtgtcccagagcaaggactccgacgtgtacatcaccgataagtgcgtgctggacatgcggagcatggacttcaagagcaactccgccgtggcctggtccaacaagtccgatttcgcctgcgccaacgccttcaacaacagcattatccccgaggacacattcttcccaagccccgagagcagcgactccaccgaccacgtgaagcccaaagagacagagaacaccaagcagcccagcaagagctgccacaagcccaaggccatcgtgcacaccgagaaagtgaacatgatgagcctgaccgtgctgggcctgcggatgctgttcgccaaaaccgtggccgtgaacttcctgctgaccgccaagctgttcttcctc

SEQ ID NO: 7840 - DNA, 2958 bp, synthetic construct
  source 1..2958: mol_type = other DNA
atggccttaccagtgaccgccttgctcctgccgctggccttgctgctccacgccgccaggccggaagtgcagctggttgaatctggcggaggactggttcagcctggcggatctctgagactgtcttgtgccgccagcggcttcagcttcagcgacttttggatgagctgggtccgacaggcccctggcaaaggacttgaatgggtcgccacaatcagccaggccggcagcgagaaggactacgtggactctgtgaagggcagattcaccatcagccgggacaacgccaagaagtccctgtacctccagatgaacagcctgagagccgaggacaccgccgtgtactattgtgcctctggcgtgtacagcttcgactacagaggccagggcaccctggtcacagtctcttctggtaccggcggaggcggatctggcggcggaggtagcggtggcggaggatctgaattcgacatccagatgacacagagccctagcagcctgtctgccagcgtgggagacagagtgaccatcacctgtagagccagccagggcatctcttcttggctggcctggtatcagcagaagcccgagaaggcccctaagagcctgatctatgccgccagctctctccagagcggagtgcctagcagattttctggcagcggctccggcaccgatttcaccctgacaatatccagcctccagcctgaggacttcgccacctactactgccagcagtacaacagctacccctacaccttcggccagggcaccaagctggaaatcaaactcgaggacctgaagaacgtgttcccacctgaggtggccgtgttcgagcctagcgaggccgagatcagccacacccagaaagccaccctcgtgtgcctggctaccggcttctaccccgaccatgtggaactgtcttggtgggtcaacggcaaagaggtgcacagcggcgtgtgtaccgacccccagccactgaaagaacagcccgccctgaacgacagccggtactgcctgagcagcagactgagagtgtccgccaccttctggcagaacccccggaaccacttcagatgccaggtgcagttctacggcctgagcgagaacgacgagtggacccaggacagagccaagcccgtgacccagatcgtgtctgccgaagcctggggcagagccgatgatgtgattaagatccactggcaggaaaagaagtccaacaccatcctgggcagccaggaaggcaacaccatgaagaccaacgacacctacatgaagttcagctggctgaccgtgcccgagaagtccctggacaaagaacacagatgcatcgtgcggcacgaaaacaacaagaacggcgtggaccaggaaatcatcttcccacccatcaagaccgatgtgattacaatggaccccaaggacaactgctccaaggacgccaacgataccctgctgctccagctgaccaacaccagcgcctactacatgtacttgttgctgctgctgaagtccgtggtgtacttcgccatcatcacatgctgcctgctgcggagaaccgccttctgctgcaacggcgagaagtctagggccaagcgatctggatctggagcaacaaacttctcactactcaaacaagcaggtgacgtggaggagaatcccgggcctactagtatggactggatttggcgcatccttttccttgtcggcgctgctaccggcgcgcattccgggccccagctccagctgcaagagtctggacctggcctggtcaagcctagcgagacactgagcctgacctgtaccgtgtccggcgatagcatcagcagcggcgattactactggggctggatcagacagcctcctggcaaaggactggaatggatcggccacatctactacagcggcgtgacctactacaaccccagcctgaagtccagagtgaccatcagcgtggacaccagccggaaccagttctccctgaagctgtctagcgtgacagccgccgataccgccgtgtactactgcaccagagaggacagcagcaactggcggagtagaggccagggaacactggtcacagttagctctggatccggcggaggcggaagtggaggcggaggatctggcggcggaggctctttcgaagaagtgcaactggttcaatctggcggcggactggttcatccaggcggttctctgagactgagctgtgccggctctggcttcaccttcagcacctacctgatgtactgggtccgacaggcccctggcaagacactggaatgggtgtccgctattggcagcggaggcgatacctactacgccgactctgtgaagggcagattcaccatcagccgggacaacgccaagaacagcctgtacctccagatgaactccctgagagccgaggacatggccgtgtactactgtgccagaggactcggctattggggccagggaacactggtcacagtgtcctctacgcgtatccagaaccctgatcctgccgtgtaccagctgcgggatagcaagagcagcgacaagagcgtgtgtctgttcaccgacttcgacagccagaccaacgtgtcccagagcaaggactccgacgtgtacatcaccgataagtgcgtgctggacatgcggagcatggacttcaagagcaactccgccgtggcctggtccaacaagtccgatttcgcctgcgccaacgccttcaacaacagcattatccccgaggacacattcttcccaagccccgagagcagcgactccaccgaccacgtgaagcccaaagagacagagaacaccaagcagcccagcaagagctgccacaagcccaaggccatcgtgcacaccgagaaagtgaacatgatgagcctgaccgtgctgggcctgcggatgctgttcgccaaaaccgtggccgtgaacttcctgctgaccgccaagctgttcttcctc

SEQ ID NO: 7841 - DNA, 3015 bp, synthetic construct
  source 1..3015: mol_type = other DNA
atggccttaccagtgaccgccttgctcctgccgctggccttgctgctccacgccgccaggccggaagtgcagctggttgaatctggcggaggactggttcagcctggcggatctctgagactgtcttgtgccgccagcggcttcagcttcagcgacttttggatgagctgggtccgacaggcccctggcaaaggacttgaatgggtcgccacaatcagccaggccggcagcgagaaggactacgtggactctgtgaagggcagattcaccatcagccgggacaacgccaagaagtccctgtacctccagatgaacagcctgagagccgaggacaccgccgtgtactattgtgcctctggcgtgtacagcttcgactacagaggccagggcaccctggtcacagtctcttctggtaccggcggaggcggatctggcggcggaggtagcggtggcggaggatctgaattcctgcctgttctgacacagcctccatccgtgtctgtggcccctggaaagaccgccagaatcacatgcggcggcaacaacatcggcagcaagagcgtgcactggtatcagcagaagcctggacaggctcctgtgctggtggtgtacgacgacagcgatagacctagcggcatccccgagagattcagcggcagcaattccggcaataccgccacactgaccatcagcagagtggaagctggcgacgaggccgactactactgccaagtgtgggacagcagcagcgactacgtggtgtttggcggcggaacaaagctgacagtgcttctcgaggacctgaagaacgtgttcccacctgaggtggccgtgttcgagcctagcgaggccgagatcagccacacccagaaagccaccctcgtgtgcctggctaccggcttctaccccgaccatgtggaactgtcttggtgggtcaacggcaaagaggtgcacagcggcgtgtgtaccgacccccagccactgaaagaacagcccgccctgaacgacagccggtactgcctgagcagcagactgagagtgtccgccaccttctggcagaacccccggaaccacttcagatgccaggtgcagttctacggcctgagcgagaacgacgagtggacccaggacagagccaagcccgtgacccagatcgtgtctgccgaagcctggggcagagccgatgatgtgattaagatccactggcaggaaaagaagtccaacaccatcctgggcagccaggaaggcaacaccatgaagaccaacgacacctacatgaagttcagctggctgaccgtgcccgagaagtccctggacaaagaacacagatgcatcgtgcggcacgaaaacaacaagaacggcgtggaccaggaaatcatcttcccacccatcaagaccgatgtgattacaatggaccccaaggacaactgctccaaggacgccaacgataccctgctgctccagctgaccaacaccagcgcctactacatgtacttgttgctgctgctgaagtccgtggtgtacttcgccatcatcacatgctgcctgctgcggagaaccgccttctgctgcaacggcgagaagtctagggccaagcgatctggatctggagcaacaaacttctcactactcaaacaagcaggtgacgtggaggagaatcccgggcctactagtatggactggatttggcgcatccttttccttgtcggcgctgctaccggcgcgcattccgggccccagctccagctgcaagagtctggacctggcctggtcaagcctagcgagacactgagcctgacctgtaccgtgtccggcgatagcatcagcagcggcgattactactggggctggatcagacagcctcctggcaaaggactggaatggatcggccacatctactacagcggcgtgacctactacaaccccagcctgaagtccagagtgaccatcagcgtggacaccagccggaaccagttctccctgaagctgtctagcgtgacagccgccgataccgccgtgtactactgcaccagagaggacagcagcaactggcggagtagaggccagggaacactggtcacagttagctctggatccggcggaggcggaagtggaggcggaggatctggcggcggaggctctttcgaagaagttcaactggtgcagagcggagccgaagtgaagaagccaggcgagagcctgaagattagctgcaaaggcagcggctacagcttcaccagctactggatcggctgggtccgacagatgcctggcaaaggactggaatggatgggcatcatctaccccggcgacagcgacaccagatacagccctagctttcagggccaagtgaccatctccgccgacaagagcatcagcacagcctacctccagtggtcctctctgaaggccagcgataccgccatgtactactgcgccagacaagtctggggatggcaaggcggcatgtaccccaggtctaactggtggtacaacctggactcttggggccagggcacactggtcacagtctcttctacgcgtatccagaaccctgatcctgccgtgtaccagctgcgggatagcaagagcagcgacaagagcgtgtgtctgttcaccgacttcgacagccagaccaacgtgtcccagagcaaggactccgacgtgtacatcaccgataagtgcgtgctggacatgcggagcatggacttcaagagcaactccgccgtggcctggtccaacaagtccgatttcgcctgcgccaacgccttcaacaacagcattatccccgaggacacattcttcccaagccccgagagcagcgactccaccgaccacgtgaagcccaaagagacagagaacaccaagcagcccagcaagagctgccacaagcccaaggccatcgtgcacaccgagaaagtgaacatgatgagcctgaccgtgctgggcctgcggatgctgttcgccaaaaccgtggccgtgaacttcctgctgaccgccaagctgttcttcctc

SEQ ID NO: 7842 - DNA, 2994 bp, synthetic construct
  source 1..2994: mol_type = other DNA
atggccttaccagtgaccgccttgctcctgccgctggccttgctgctccacgccgccaggccggaagtgcagctggttgaatctggcggaggactggttcagcctggcggatctctgagactgtcttgtgccgccagcggcttcagcttcagcgacttttggatgagctgggtccgacaggcccctggcaaaggacttgaatgggtcgccacaatcagccaggccggcagcgagaaggactacgtggactctgtgaagggcagattcaccatcagccgggacaacgccaagaagtccctgtacctccagatgaacagcctgagagccgaggacaccgccgtgtactattgtgcctctggcgtgtacagcttcgactacagaggccagggcaccctggtcacagtctcttctggtaccggcggaggcggatctggcggcggaggtagcggtggcggaggatctgaattcgagctggtcatgacacagagccctgcttctctggccgtgtcactgggacagagagccaccatctcttgcagagccagcgagagcgtggacagctacggcaagagcttcatgcactggtatcagctcaagcccggccagcctcctaagctgctgatctacagagcctccaacctggaaagcggcgtgccagccagattttctggcagcggcagcagaaccgacttcaccctgaccattgatcccgtggaagccgatgatgccgccacctactactgccagcagaacaacgaggacccctggacatttggcggaggcaccaagctggaaatcaaactcgaggacctgaagaacgtgttcccacctgaggtggccgtgttcgagcctagcgaggccgagatcagccacacccagaaagccaccctcgtgtgcctggctaccggcttctaccccgaccatgtggaactgtcttggtgggtcaacggcaaagaggtgcacagcggcgtgtgtaccgacccccagccactgaaagaacagcccgccctgaacgacagccggtactgcctgagcagcagactgagagtgtccgccaccttctggcagaacccccggaaccacttcagatgccaggtgcagttctacggcctgagcgagaacgacgagtggacccaggacagagccaagcccgtgacccagatcgtgtctgccgaagcctggggcagagccgatgatgtgattaagatccactggcaggaaaagaagtccaacaccatcctgggcagccaggaaggcaacaccatgaagaccaacgacacctacatgaagttcagctggctgaccgtgcccgagaagtccctggacaaagaacacagatgcatcgtgcggcacgaaaacaacaagaacggcgtggaccaggaaatcatcttcccacccatcaagaccgatgtgattacaatggaccccaaggacaactgctccaaggacgccaacgataccctgctgctccagctgaccaacaccagcgcctactacatgtacttgttgctgctgctgaagtccgtggtgtacttcgccatcatcacatgctgcctgctgcggagaaccgccttctgctgcaacggcgagaagtctagggccaagcgatctggatctggagcaacaaacttctcactactcaaacaagcaggtgacgtggaggagaatcccgggcctactagtatggactggatttggcgcatccttttccttgtcggcgctgctaccggcgcgcattccgggccccagctccagctgcaagagtctggacctggcctggtcaagcctagcgagacactgagcctgacctgtaccgtgtccggcgatagcatcagcagcggcgattactactggggctggatcagacagcctcctggcaaaggactggaatggatcggccacatctactacagcggcgtgacctactacaaccccagcctgaagtccagagtgaccatcagcgtggacaccagccggaaccagttctccctgaagctgtctagcgtgacagccgccgataccgccgtgtactactgcaccagagaggacagcagcaactggcggagtagaggccagggaacactggtcacagttagctctggatccggcggaggcggaagtggaggcggaggatctggcggcggaggctctttcgaagaagtgcagctcgaacagtctggccccgagcttgtgaaacctggcgcttccgtgaagatgagctgcaaggccagcggctacaccttcaccaactactacatgaaatgggtcaagcagagccacggcaagtccctggaatggatcggcgatctgaaccccaacaacggcgacaccttctacaaccagaagttcaagggcaaagccacactgaccgtggacaagagcagcaacaccgcctacatgcagctcaactccctgaccagcgaggacagcgccgtgtactactgtgccagaaccggcagatacgaagagaacgctatggactactggggccagggcacaagcgtgacagtctcttctacgcgtatccagaaccctgatcctgccgtgtaccagctgcgggatagcaagagcagcgacaagagcgtgtgtctgttcaccgacttcgacagccagaccaacgtgtcccagagcaaggactccgacgtgtacatcaccgataagtgcgtgctggacatgcggagcatggacttcaagagcaactccgccgtggcctggtccaacaagtccgatttcgcctgcgccaacgccttcaacaacagcattatccccgaggacacattcttcccaagccccgagagcagcgactccaccgaccacgtgaagcccaaagagacagagaacaccaagcagcccagcaagagctgccacaagcccaaggccatcgtgcacaccgagaaagtgaacatgatgagcctgaccgtgctgggcctgcggatgctgttcgccaaaaccgtggccgtgaacttcctgctgaccgccaagctgttcttcctc

SEQ ID NO: 7843 - DNA, 2976 bp, synthetic construct
  source 1..2976: mol_type = other DNA
atggccttaccagtgaccgccttgctcctgccgctggccttgctgctccacgccgccaggccggaagtgcagctggttgaatctggcggaggactggttcagcctggcggatctctgagactgtcttgtgccgccagcggcttcagcttcagcgacttttggatgagctgggtccgacaggcccctggcaaaggacttgaatgggtcgccacaatcagccaggccggcagcgagaaggactacgtggactctgtgaagggcagattcaccatcagccgggacaacgccaagaagtccctgtacctccagatgaacagcctgagagccgaggacaccgccgtgtactattgtgcctctggcgtgtacagcttcgactacagaggccagggcaccctggtcacagtctcttctggtaccggcggaggcggatctggcggcggaggtagcggtggcggaggatctgaattcgacgtggtcatgacacagagcccttctagcctgtctgccagcgtgggcgacagagtgaccatcacctgtatggcctccgaggacatctacatccggctggcctggtatcagcagaagcctggaaacgcccctaagctgctgatctacgccgccacctctctggaaacaggcgtgccaagcagattttccggcagcggctctggcaccgatttcaccctgacaatatccagcctccagcctgaggacttcgccacctactactgccagcagtattggagcagcccctggacatttggcggaggcaccaaggtggaaatcaaactcgaggacctgaagaacgtgttcccacctgaggtggccgtgttcgagcctagcgaggccgagatcagccacacccagaaagccaccctcgtgtgcctggctaccggcttctaccccgaccatgtggaactgtcttggtgggtcaacggcaaagaggtgcacagcggcgtgtgtaccgacccccagccactgaaagaacagcccgccctgaacgacagccggtactgcctgagcagcagactgagagtgtccgccaccttctggcagaacccccggaaccacttcagatgccaggtgcagttctacggcctgagcgagaacgacgagtggacccaggacagagccaagcccgtgacccagatcgtgtctgccgaagcctggggcagagccgatgatgtgattaagatccactggcaggaaaagaagtccaacaccatcctgggcagccaggaaggcaacaccatgaagaccaacgacacctacatgaagttcagctggctgaccgtgcccgagaagtccctggacaaagaacacagatgcatcgtgcggcacgaaaacaacaagaacggcgtggaccaggaaatcatcttcccacccatcaagaccgatgtgattacaatggaccccaaggacaactgctccaaggacgccaacgataccctgctgctccagctgaccaacaccagcgcctactacatgtacttgttgctgctgctgaagtccgtggtgtacttcgccatcatcacatgctgcctgctgcggagaaccgccttctgctgcaacggcgagaagtctagggccaagcgatctggatctggagcaacaaacttctcactactcaaacaagcaggtgacgtggaggagaatcccgggcctactagtatggactggatttggcgcatccttttccttgtcggcgctgctaccggcgcgcattccgggccccagctccagctgcaagagtctggacctggcctggtcaagcctagcgagacactgagcctgacctgtaccgtgtccggcgatagcatcagcagcggcgattactactggggctggatcagacagcctcctggcaaaggactggaatggatcggccacatctactacagcggcgtgacctactacaaccccagcctgaagtccagagtgaccatcagcgtggacaccagccggaaccagttctccctgaagctgtctagcgtgacagccgccgataccgccgtgtactactgcaccagagaggacagcagcaactggcggagtagaggccagggaacactggtcacagttagctctggatccggcggaggcggaagtggaggcggaggatctggcggcggaggctctttcgaacaggttcagctgcaagagtctggccccggactggtcaagcctagccaaacactgagcctgacctgtaccgtgtccggctacagcatcaccagcgactacacctggaactggatcagacagcctcctggcaacggactggaatggatcggctacatcacctacagcggcagcaccagctacaaccccagcctgaaaagccgggtgctgatctccgtggacaccagcaagaatcaggtgtccctgaagctgagcagcgtgacagccgctgataccgccgtgtactactgtgccagactggggagaagatacacaatggactactggggccagggcaccaccgtgacagtttcttctacgcgtatccagaaccctgatcctgccgtgtaccagctgcgggatagcaagagcagcgacaagagcgtgtgtctgttcaccgacttcgacagccagaccaacgtgtcccagagcaaggactccgacgtgtacatcaccgataagtgcgtgctggacatgcggagcatggacttcaagagcaactccgccgtggcctggtccaacaagtccgatttcgcctgcgccaacgccttcaacaacagcattatccccgaggacacattcttcccaagccccgagagcagcgactccaccgaccacgtgaagcccaaagagacagagaacaccaagcagcccagcaagagctgccacaagcccaaggccatcgtgcacaccgagaaagtgaacatgatgagcctgaccgtgctgggcctgcggatgctgttcgccaaaaccgtggccgtgaacttcctgctgaccgccaagctgttcttcctc

SEQ ID NO: 7844 - DNA, 2988 bp, synthetic construct
  source 1..2988: mol_type = other DNA
atggccttaccagtgaccgccttgctcctgccgctggccttgctgctccacgccgccaggccggaagtgcagctggttgaatctggcggaggactggttcagcctggcggatctctgagactgtcttgtgccgccagcggcttcagcttcagcgacttttggatgagctgggtccgacaggcccctggcaaaggacttgaatgggtcgccacaatcagccaggccggcagcgagaaggactacgtggactctgtgaagggcagattcaccatcagccgggacaacgccaagaagtccctgtacctccagatgaacagcctgagagccgaggacaccgccgtgtactattgtgcctctggcgtgtacagcttcgactacagaggccagggcaccctggtcacagtctcttctggtaccggcggaggcggatctggcggcggaggtagcggtggcggaggatctgaattcgatattgtgctgactcagagccctgccactctgagccttagtccaggcgacagagctaccatctcctgtagggcctctgaatccgtgaccattctgggctctcatctcatatattggtatcaacaaaagccgggccagcctccacggctgctcattcaactggcctctaacgtgcagaccggcgtgccagctagattttctggctctggctcccggaccgactttacactgacaatcagctccgtggaacccgaagattttgccgtctattattgcctccagtccaggaccattcctcggacattcggccagggaacaaaactcgaaatcaagcggctcgaggacctgaagaacgtgttcccacctgaggtggccgtgttcgagcctagcgaggccgagatcagccacacccagaaagccaccctcgtgtgcctggctaccggcttctaccccgaccatgtggaactgtcttggtgggtcaacggcaaagaggtgcacagcggcgtgtgtaccgacccccagccactgaaagaacagcccgccctgaacgacagccggtactgcctgagcagcagactgagagtgtccgccaccttctggcagaacccccggaaccacttcagatgccaggtgcagttctacggcctgagcgagaacgacgagtggacccaggacagagccaagcccgtgacccagatcgtgtctgccgaagcctggggcagagccgatgatgtgattaagatccactggcaggaaaagaagtccaacaccatcctgggcagccaggaaggcaacaccatgaagaccaacgacacctacatgaagttcagctggctgaccgtgcccgagaagtccctggacaaagaacacagatgcatcgtgcggcacgaaaacaacaagaacggcgtggaccaggaaatcatcttcccacccatcaagaccgatgtgattacaatggaccccaaggacaactgctccaaggacgccaacgataccctgctgctccagctgaccaacaccagcgcctactacatgtacttgttgctgctgctgaagtccgtggtgtacttcgccatcatcacatgctgcctgctgcggagaaccgccttctgctgcaacggcgagaagtctagggccaagcgatctggatctggagcaacaaacttctcactactcaaacaagcaggtgacgtggaggagaatcccgggcctactagtatggactggatttggcgcatccttttccttgtcggcgctgctaccggcgcgcattccgggccccagctccagctgcaagagtctggacctggcctggtcaagcctagcgagacactgagcctgacctgtaccgtgtccggcgatagcatcagcagcggcgattactactggggctggatcagacagcctcctggcaaaggactggaatggatcggccacatctactacagcggcgtgacctactacaaccccagcctgaagtccagagtgaccatcagcgtggacaccagccggaaccagttctccctgaagctgtctagcgtgacagccgccgataccgccgtgtactactgcaccagagaggacagcagcaactggcggagtagaggccagggaacactggtcacagttagctctggatccggcggaggcggaagtggaggcggaggatctggcggcggaggctctttcgaacaggtgcagctcgttcagagtggccccgaagtgaaaaagccaggcgagtccgtgaagatttcctgcaaagcctccggctacacattccggcactactctatgaattgggtcaagcaggccccaggccagggccttaagtggatgggacgcatcaataccgagtccggcgtgccaatctacgccgatgacttcaaaggccggttcagcttcaccgtggatacctctgcctccaccgcctacctggaaatcagcagcctgaccagcgaggatacagctgtgtacttctgtagcaacgattacctctacagcctggatttctggggacagggaaccacactgaccgtgtctagcacgcgtatccagaaccctgatcctgccgtgtaccagctgcgggatagcaagagcagcgacaagagcgtgtgtctgttcaccgacttcgacagccagaccaacgtgtcccagagcaaggactccgacgtgtacatcaccgataagtgcgtgctggacatgcggagcatggacttcaagagcaactccgccgtggcctggtccaacaagtccgatttcgcctgcgccaacgccttcaacaacagcattatccccgaggacacattcttcccaagccccgagagcagcgactccaccgaccacgtgaagcccaaagagacagagaacaccaagcagcccagcaagagctgccacaagcccaaggccatcgtgcacaccgagaaagtgaacatgatgagcctgaccgtgctgggcctgcggatgctgttcgccaaaaccgtggccgtgaacttcctgctgaccgccaagctgttcttcctc

SEQ ID NO: 7845 - DNA, 2988 bp, synthetic construct
  source 1..2988: mol_type = other DNA
atggccttaccagtgaccgccttgctcctgccgctggccttgctgctccacgccgccaggccggaagtgcagctggttgaatctggcggaggactggttcagcctggcggatctctgagactgtcttgtgccgccagcggcttcagcttcagcgacttttggatgagctgggtccgacaggcccctggcaaaggacttgaatgggtcgccacaatcagccaggccggcagcgagaaggactacgtggactctgtgaagggcagattcaccatcagccgggacaacgccaagaagtccctgtacctccagatgaacagcctgagagccgaggacaccgccgtgtactattgtgcctctggcgtgtacagcttcgactacagaggccagggcaccctggtcacagtctcttctggtaccggcggaggcggatctggcggcggaggtagcggtggcggaggatctgaattcgacatcgtgctgacacagtctcccgccacactgtcactgagccctggcgatagagccacactgagctgtagagccagcgagagcgtgacaatcctgggcagccacctgatctactggtatcagcagaagcccggacaggcccctagactgctgattcagctcgccagcaatgtgcagacaggcatccctgccagattttccggcagcggcagcagaaccgatttcaccctgaccataagcagcctggaacctgaggacttcgccgtgtactactgcctccagagccggacaatccccagaacctttggacagggcaccaagctggaaatcaagagactcgaggacctgaagaacgtgttcccacctgaggtggccgtgttcgagcctagcgaggccgagatcagccacacccagaaagccaccctcgtgtgcctggctaccggcttctaccccgaccatgtggaactgtcttggtgggtcaacggcaaagaggtgcacagcggcgtgtgtaccgacccccagccactgaaagaacagcccgccctgaacgacagccggtactgcctgagcagcagactgagagtgtccgccaccttctggcagaacccccggaaccacttcagatgccaggtgcagttctacggcctgagcgagaacgacgagtggacccaggacagagccaagcccgtgacccagatcgtgtctgccgaagcctggggcagagccgatgatgtgattaagatccactggcaggaaaagaagtccaacaccatcctgggcagccaggaaggcaacaccatgaagaccaacgacacctacatgaagttcagctggctgaccgtgcccgagaagtccctggacaaagaacacagatgcatcgtgcggcacgaaaacaacaagaacggcgtggaccaggaaatcatcttcccacccatcaagaccgatgtgattacaatggaccccaaggacaactgctccaaggacgccaacgataccctgctgctccagctgaccaacaccagcgcctactacatgtacttgttgctgctgctgaagtccgtggtgtacttcgccatcatcacatgctgcctgctgcggagaaccgccttctgctgcaacggcgagaagtctagggccaagcgatctggatctggagcaacaaacttctcactactcaaacaagcaggtgacgtggaggagaatcccgggcctactagtatggactggatttggcgcatccttttccttgtcggcgctgctaccggcgcgcattccgggccccagctccagctgcaagagtctggacctggcctggtcaagcctagcgagacactgagcctgacctgtaccgtgtccggcgatagcatcagcagcggcgattactactggggctggatcagacagcctcctggcaaaggactggaatggatcggccacatctactacagcggcgtgacctactacaaccccagcctgaagtccagagtgaccatcagcgtggacaccagccggaaccagttctccctgaagctgtctagcgtgacagccgccgataccgccgtgtactactgcaccagagaggacagcagcaactggcggagtagaggccagggaacactggtcacagttagctctggatccggcggaggcggaagtggaggcggaggatctggcggcggaggctctttcgaacaggttcagctggtgcagtctggcagcgagctgaagaaacctggcgagagcgtgaagatcagctgcaaggccagcggctacaccttcacacactacagcatgaactgggtccgacaggcccctggacaaggactggaatggatgggcagaatcaacaccgagacaggcgagcccctgtacgccgacgatttcaagggcagattcgtgttcagcctggacaccagcgccagcacagcctatctccagatcagctctctgaaggccgaggacaccgccgtgtactactgctccaacgactacctgtactccctggactattggggccagggcacactggtcacagtgtctagtacgcgtatccagaaccctgatcctgccgtgtaccagctgcgggatagcaagagcagcgacaagagcgtgtgtctgttcaccgacttcgacagccagaccaacgtgtcccagagcaaggactccgacgtgtacatcaccgataagtgcgtgctggacatgcggagcatggacttcaagagcaactccgccgtggcctggtccaacaagtccgatttcgcctgcgccaacgccttcaacaacagcattatccccgaggacacattcttcccaagccccgagagcagcgactccaccgaccacgtgaagcccaaagagacagagaacaccaagcagcccagcaagagctgccacaagcccaaggccatcgtgcacaccgagaaagtgaacatgatgagcctgaccgtgctgggcctgcggatgctgttcgccaaaaccgtggccgtgaacttcctgctgaccgccaagctgttcttcctc

SEQ ID NO: 7846 - DNA, 2991 bp, synthetic construct
  source 1..2991: mol_type = other DNA
atggccttaccagtgaccgccttgctcctgccgctggccttgctgctccacgccgccaggccggaagtgcagctggttgaatctggcggaggactggttcagcctggcggatctctgagactgtcttgtgccgccagcggcttcagcttcagcgacttttggatgagctgggtccgacaggcccctggcaaaggacttgaatgggtcgccacaatcagccaggccggcagcgagaaggactacgtggactctgtgaagggcagattcaccatcagccgggacaacgccaagaagtccctgtacctccagatgaacagcctgagagccgaggacaccgccgtgtactattgtgcctctggcgtgtacagcttcgactacagaggccagggcaccctggtcacagtctcttctggtaccggcggaggcggatctggcggcggaggtagcggtggcggaggatctgaattcgacatccagctgactcagagccctagctttctgagcgccagcgtgggcgacagagtgaccattacatgtagagccagccagggcatcagcaccgacctgaactggtatcagcagaagcctggcaaggcccctaagctgctgatctacgccgccagcaatctggaaagcggcgtgccaagcagattttccggctctggcagcggcaccgagttcaccctgacaatatctagcctccagcctgaggacttcgccacctactactgccagcagagctacaactggccctacacctttggcggaggcaccaaggtggaaatcaagagactcgaggacctgaagaacgtgttcccacctgaggtggccgtgttcgagcctagcgaggccgagatcagccacacccagaaagccaccctcgtgtgcctggctaccggcttctaccccgaccatgtggaactgtcttggtgggtcaacggcaaagaggtgcacagcggcgtgtgtaccgacccccagccactgaaagaacagcccgccctgaacgacagccggtactgcctgagcagcagactgagagtgtccgccaccttctggcagaacccccggaaccacttcagatgccaggtgcagttctacggcctgagcgagaacgacgagtggacccaggacagagccaagcccgtgacccagatcgtgtctgccgaagcctggggcagagccgatgatgtgattaagatccactggcaggaaaagaagtccaacaccatcctgggcagccaggaaggcaacaccatgaagaccaacgacacctacatgaagttcagctggctgaccgtgcccgagaagtccctggacaaagaacacagatgcatcgtgcggcacgaaaacaacaagaacggcgtggaccaggaaatcatcttcccacccatcaagaccgatgtgattacaatggaccccaaggacaactgctccaaggacgccaacgataccctgctgctccagctgaccaacaccagcgcctactacatgtacttgttgctgctgctgaagtccgtggtgtacttcgccatcatcacatgctgcctgctgcggagaaccgccttctgctgcaacggcgagaagtctagggccaagcgatctggatctggagcaacaaacttctcactactcaaacaagcaggtgacgtggaggagaatcccgggcctactagtatggactggatttggcgcatccttttccttgtcggcgctgctaccggcgcgcattccgggccccagctccagctgcaagagtctggacctggcctggtcaagcctagcgagacactgagcctgacctgtaccgtgtccggcgatagcatcagcagcggcgattactactggggctggatcagacagcctcctggcaaaggactggaatggatcggccacatctactacagcggcgtgacctactacaaccccagcctgaagtccagagtgaccatcagcgtggacaccagccggaaccagttctccctgaagctgtctagcgtgacagccgccgataccgccgtgtactactgcaccagagaggacagcagcaactggcggagtagaggccagggaacactggtcacagttagctctggatccggcggaggcggaagtggaggcggaggatctggcggcggaggctctttcgaagaagttcagctggttgaatcaggcggaggactcgtgaaacctggcggctctctgagactgtcttgtgccgccagcggcttcaccttcagcaacttcgagatgaactgggtccgacaggccccaggcaaaggactggaatgggtgtccggcatcagctccaatggccggtacatcaactacgccgacagcgtgaagggcagattcaccatcagccgggacaacgccaagaacagcctgtacctccagatgaactccctgagagccgaggacaccgccgtgtactattgtgccagagtggtggacttcgaccaggactacaacggcttcgactattggggccagggcaccctggttaccgttagctctacgcgtatccagaaccctgatcctgccgtgtaccagctgcgggatagcaagagcagcgacaagagcgtgtgtctgttcaccgacttcgacagccagaccaacgtgtcccagagcaaggactccgacgtgtacatcaccgataagtgcgtgctggacatgcggagcatggacttcaagagcaactccgccgtggcctggtccaacaagtccgatttcgcctgcgccaacgccttcaacaacagcattatccccgaggacacattcttcccaagccccgagagcagcgactccaccgaccacgtgaagcccaaagagacagagaacaccaagcagcccagcaagagctgccacaagcccaaggccatcgtgcacaccgagaaagtgaacatgatgagcctgaccgtgctgggcctgcggatgctgttcgccaaaaccgtggccgtgaacttcctgctgaccgccaagctgttcttcctc

SEQ ID NO: 7847 - DNA, 2985 bp, synthetic construct
  source 1..2985: mol_type = other DNA
atggccttaccagtgaccgccttgctcctgccgctggccttgctgctccacgccgccaggccggaagtgcagctggttgaatctggcggaggactggttcagcctggcggatctctgagactgtcttgtgccgccagcggcttcagcttcagcgacttttggatgagctgggtccgacaggcccctggcaaaggacttgaatgggtcgccacaatcagccaggccggcagcgagaaggactacgtggactctgtgaagggcagattcaccatcagccgggacaacgccaagaagtccctgtacctccagatgaacagcctgagagccgaggacaccgccgtgtactattgtgcctctggcgtgtacagcttcgactacagaggccagggcaccctggtcacagtctcttctggtaccggcggaggcggatctggcggcggaggtagcggtggcggaggatctgaattcgacatccaactgactcagagccccagctttctgagcgcctctgtgggcgacagagtgaccatcacatgtagtctcagcctgggcatcagcacatggcgggattggtttccgccgaggcttggcaggggccttgagccgctgacctacgccgccagcacactgcaaagcggagtgcctagcagattttccggcagcggctctggcaccgagttcaccctgacaatatccagcctccagcctgaggacttcgccacctactactgccagcagctcaacagctaccctctgacctttggcggaggcaccaaggtggaaatcaagagactcgaggacctgaagaacgtgttcccacctgaggtggccgtgttcgagcctagcgaggccgagatcagccacacccagaaagccaccctcgtgtgcctggctaccggcttctaccccgaccatgtggaactgtcttggtgggtcaacggcaaagaggtgcacagcggcgtgtgtaccgacccccagccactgaaagaacagcccgccctgaacgacagccggtactgcctgagcagcagactgagagtgtccgccaccttctggcagaacccccggaaccacttcagatgccaggtgcagttctacggcctgagcgagaacgacgagtggacccaggacagagccaagcccgtgacccagatcgtgtctgccgaagcctggggcagagccgatgatgtgattaagatccactggcaggaaaagaagtccaacaccatcctgggcagccaggaaggcaacaccatgaagaccaacgacacctacatgaagttcagctggctgaccgtgcccgagaagtccctggacaaagaacacagatgcatcgtgcggcacgaaaacaacaagaacggcgtggaccaggaaatcatcttcccacccatcaagaccgatgtgattacaatggaccccaaggacaactgctccaaggacgccaacgataccctgctgctccagctgaccaacaccagcgcctactacatgtacttgttgctgctgctgaagtccgtggtgtacttcgccatcatcacatgctgcctgctgcggagaaccgccttctgctgcaacggcgagaagtctagggccaagcgatctggatctggagcaacaaacttctcactactcaaacaagcaggtgacgtggaggagaatcccgggcctactagtatggactggatttggcgcatccttttccttgtcggcgctgctaccggcgcgcattccgggccccagctccagctgcaagagtctggacctggcctggtcaagcctagcgagacactgagcctgacctgtaccgtgtccggcgatagcatcagcagcggcgattactactggggctggatcagacagcctcctggcaaaggactggaatggatcggccacatctactacagcggcgtgacctactacaaccccagcctgaagtccagagtgaccatcagcgtggacaccagccggaaccagttctccctgaagctgtctagcgtgacagccgccgataccgccgtgtactactgcaccagagaggacagcagcaactggcggagtagaggccagggaacactggtcacagttagctctggatccggcggaggcggaagtggaggcggaggatctggcggcggaggctctttcgaagaagttcaactggttgagtctggtggcggcctggttaagcctggcggatctctgagactgagctgtgccgccagcggcttcacctttagcacatacggcatgagctgggtccgacaggcccctggaaaaggacttgagtgggtcgcctacatcaacaacggctccggctacatctactacgccgacagcgtgaagggcagattcaccatcagccgggacaacgccaagaacagcctgtacctccagatgaactccctgagagccgaggacaccgccgtgtactattgtgccagaggacagtggtggagcggcggagactttgattattggggccagggcaccctggtcaccgtttcttctacgcgtatccagaaccctgatcctgccgtgtaccagctgcgggatagcaagagcagcgacaagagcgtgtgtctgttcaccgacttcgacagccagaccaacgtgtcccagagcaaggactccgacgtgtacatcaccgataagtgcgtgctggacatgcggagcatggacttcaagagcaactccgccgtggcctggtccaacaagtccgatttcgcctgcgccaacgccttcaacaacagcattatccccgaggacacattcttcccaagccccgagagcagcgactccaccgaccacgtgaagcccaaagagacagagaacaccaagcagcccagcaagagctgccacaagcccaaggccatcgtgcacaccgagaaagtgaacatgatgagcctgaccgtgctgggcctgcggatgctgttcgccaaaaccgtggccgtgaacttcctgctgaccgccaagctgttcttcctc

SEQ ID NO: 7848 - DNA, 2988 bp, synthetic construct
  source 1..2988: mol_type = other DNA
atggccttaccagtgaccgccttgctcctgccgctggccttgctgctccacgccgccaggccggaagtgcagctggttgaatctggcggaggactggttcagcctggcggatctctgagactgtcttgtgccgccagcggcttcagcttcagcgacttttggatgagctgggtccgacaggcccctggcaaaggacttgaatgggtcgccacaatcagccaggccggcagcgagaaggactacgtggactctgtgaagggcagattcaccatcagccgggacaacgccaagaagtccctgtacctccagatgaacagcctgagagccgaggacaccgccgtgtactattgtgcctctggcgtgtacagcttcgactacagaggccagggcaccctggtcacagtctcttctggtaccggcggaggcggatctggcggcggaggtagcggtggcggaggatctgaattcgagatcgtgctgacacagtctcccgccacactgtcactgtctccaggcgaaagagccacactgagctgtagcgccagcagcagcgtgtcctacatgtactggtatcagcagaagcccggacaggcccctagactgctgatctacagaaccagcaacctggcctctggcatccccgccagattttctggctctggcagcggcaccgatttcaccctgaccataagcagcctggaacctgaggacttcgccgtgtactactgccagcagtaccacagctaccccaccacctttggacagggcaccaaggtggaaatcaagcggacagttctcgaggacctgaagaacgtgttcccacctgaggtggccgtgttcgagcctagcgaggccgagatcagccacacccagaaagccaccctcgtgtgcctggctaccggcttctaccccgaccatgtggaactgtcttggtgggtcaacggcaaagaggtgcacagcggcgtgtgtaccgacccccagccactgaaagaacagcccgccctgaacgacagccggtactgcctgagcagcagactgagagtgtccgccaccttctggcagaacccccggaaccacttcagatgccaggtgcagttctacggcctgagcgagaacgacgagtggacccaggacagagccaagcccgtgacccagatcgtgtctgccgaagcctggggcagagccgatgatgtgattaagatccactggcaggaaaagaagtccaacaccatcctgggcagccaggaaggcaacaccatgaagaccaacgacacctacatgaagttcagctggctgaccgtgcccgagaagtccctggacaaagaacacagatgcatcgtgcggcacgaaaacaacaagaacggcgtggaccaggaaatcatcttcccacccatcaagaccgatgtgattacaatggaccccaaggacaactgctccaaggacgccaacgataccctgctgctccagctgaccaacaccagcgcctactacatgtacttgttgctgctgctgaagtccgtggtgtacttcgccatcatcacatgctgcctgctgcggagaaccgccttctgctgcaacggcgagaagtctagggccaagcgatctggatctggagcaacaaacttctcactactcaaacaagcaggtgacgtggaggagaatcccgggcctactagtatggactggatttggcgcatccttttccttgtcggcgctgctaccggcgcgcattccgggccccagctccagctgcaagagtctggacctggcctggtcaagcctagcgagacactgagcctgacctgtaccgtgtccggcgatagcatcagcagcggcgattactactggggctggatcagacagcctcctggcaaaggactggaatggatcggccacatctactacagcggcgtgacctactacaaccccagcctgaagtccagagtgaccatcagcgtggacaccagccggaaccagttctccctgaagctgtctagcgtgacagccgccgataccgccgtgtactactgcaccagagaggacagcagcaactggcggagtagaggccagggaacactggtcacagttagctctggatccggcggaggcggaagtggaggcggaggatctggcggcggaggctctttcgaagaagtgcagctggttgaatcaggtggcggcctggttcaacctggcggatctctgagactgtcttgtgccgccagcggcttcagcttcaacacctacgccatgaactgggtccgacaggctcctggcaaaggactggaatgggtgtcccacatcagaagcaagagcaacaacttcgccacctactacgccgacagcgtgaaggacagattcaccatcagccgggacaacgccaagaacagcctgtacctccagatgaactccctgagagccgaggacaccgccgtgtattattgcgccagacaaggcggcgacttccctatggattattggggccagggcaccctggtcaccgtttcttctacgcgtatccagaaccctgatcctgccgtgtaccagctgcgggatagcaagagcagcgacaagagcgtgtgtctgttcaccgacttcgacagccagaccaacgtgtcccagagcaaggactccgacgtgtacatcaccgataagtgcgtgctggacatgcggagcatggacttcaagagcaactccgccgtggcctggtccaacaagtccgatttcgcctgcgccaacgccttcaacaacagcattatccccgaggacacattcttcccaagccccgagagcagcgactccaccgaccacgtgaagcccaaagagacagagaacaccaagcagcccagcaagagctgccacaagcccaaggccatcgtgcacaccgagaaagtgaacatgatgagcctgaccgtgctgggcctgcggatgctgttcgccaaaaccgtggccgtgaacttcctgctgaccgccaagctgttcttcctc

SEQ ID NO: 7849 - DNA, 2976 bp, synthetic construct
  source 1..2976: mol_type = other DNA
atggccttaccagtgaccgccttgctcctgccgctggccttgctgctccacgccgccaggccggaagtgcagctggttgaatctggcggaggactggttcagcctggcggatctctgagactgtcttgtgccgccagcggcttcagcttcagcgacttttggatgagctgggtccgacaggcccctggcaaaggacttgaatgggtcgccacaatcagccaggccggcagcgagaaggactacgtggactctgtgaagggcagattcaccatcagccgggacaacgccaagaagtccctgtacctccagatgaacagcctgagagccgaggacaccgccgtgtactattgtgcctctggcgtgtacagcttcgactacagaggccagggcaccctggtcacagtctcttctggtaccggcggaggcggatctggcggcggaggtagcggtggcggaggatctgaattcgacgtggtcatgacacagagcccttctagcctgtctgccagcgtgggcgacagagtgaccatcacctgtaaagccagcgaggacatctacatccggctggcctggtatcagcagaagcctggaaaggcccctaagctgctgatctacgccgccacctctctggaaacaggcgtgccaagcagattttccggcagcggctctggcaccgatttcaccctgacaatatccagcctccagcctgaggacttcgccacctactactgccagcagtattggaccacaccttggacctttggcggaggcaccaaggtggaaatcaaactcgaggacctgaagaacgtgttcccacctgaggtggccgtgttcgagcctagcgaggccgagatcagccacacccagaaagccaccctcgtgtgcctggctaccggcttctaccccgaccatgtggaactgtcttggtgggtcaacggcaaagaggtgcacagcggcgtgtgtaccgacccccagccactgaaagaacagcccgccctgaacgacagccggtactgcctgagcagcagactgagagtgtccgccaccttctggcagaacccccggaaccacttcagatgccaggtgcagttctacggcctgagcgagaacgacgagtggacccaggacagagccaagcccgtgacccagatcgtgtctgccgaagcctggggcagagccgatgatgtgattaagatccactggcaggaaaagaagtccaacaccatcctgggcagccaggaaggcaacaccatgaagaccaacgacacctacatgaagttcagctggctgaccgtgcccgagaagtccctggacaaagaacacagatgcatcgtgcggcacgaaaacaacaagaacggcgtggaccaggaaatcatcttcccacccatcaagaccgatgtgattacaatggaccccaaggacaactgctccaaggacgccaacgataccctgctgctccagctgaccaacaccagcgcctactacatgtacttgttgctgctgctgaagtccgtggtgtacttcgccatcatcacatgctgcctgctgcggagaaccgccttctgctgcaacggcgagaagtctagggccaagcgatctggatctggagcaacaaacttctcactactcaaacaagcaggtgacgtggaggagaatcccgggcctactagtatggactggatttggcgcatccttttccttgtcggcgctgctaccggcgcgcattccgggccccagctccagctgcaagagtctggacctggcctggtcaagcctagcgagacactgagcctgacctgtaccgtgtccggcgatagcatcagcagcggcgattactactggggctggatcagacagcctcctggcaaaggactggaatggatcggccacatctactacagcggcgtgacctactacaaccccagcctgaagtccagagtgaccatcagcgtggacaccagccggaaccagttctccctgaagctgtctagcgtgacagccgccgataccgccgtgtactactgcaccagagaggacagcagcaactggcggagtagaggccagggaacactggtcacagttagctctggatccggcggaggcggaagtggaggcggaggatctggcggcggaggctctttcgaacaggtgcagctccaagagtctggccctggactggtcaagcctagccagacactgagcctgacctgtaccgtgtccggctacagcatcaccatcgactacacctggaactggatcagacagcctcctggcaaaggactggaatggatcggctacatcacctacagcggcagcaccgactacaaccccagcctgaaaagccgggtgctgatctccgtggacaccagcaagaatcaggtgtccctgaagctgagcagcgtgacagccgctgataccgccgtgtactactgtgccagactgggcagaagatacgccctggattattggggccagggcaccaccgtgacagtgtcatctacgcgtatccagaaccctgatcctgccgtgtaccagctgcgggatagcaagagcagcgacaagagcgtgtgtctgttcaccgacttcgacagccagaccaacgtgtcccagagcaaggactccgacgtgtacatcaccgataagtgcgtgctggacatgcggagcatggacttcaagagcaactccgccgtggcctggtccaacaagtccgatttcgcctgcgccaacgccttcaacaacagcattatccccgaggacacattcttcccaagccccgagagcagcgactccaccgaccacgtgaagcccaaagagacagagaacaccaagcagcccagcaagagctgccacaagcccaaggccatcgtgcacaccgagaaagtgaacatgatgagcctgaccgtgctgggcctgcggatgctgttcgccaaaaccgtggccgtgaacttcctgctgaccgccaagctgttcttcctc

SEQ ID NO: 7850 - DNA, 2991 bp, synthetic construct
  source 1..2991: mol_type = other DNA
atggccttaccagtgaccgccttgctcctgccgctggccttgctgctccacgccgccaggccggaagtgcagctggttgaatctggcggaggactggttcagcctggcggatctctgagactgtcttgtgccgccagcggcttcagcttcagcgacttttggatgagctgggtccgacaggcccctggcaaaggacttgaatgggtcgccacaatcagccaggccggcagcgagaaggactacgtggactctgtgaagggcagattcaccatcagccgggacaacgccaagaagtccctgtacctccagatgaacagcctgagagccgaggacaccgccgtgtactattgtgcctctggcgtgtacagcttcgactacagaggccagggcaccctggtcacagtctcttctggtaccggcggaggcggatctggcggcggaggtagcggtggcggaggatctgaattcgacatccagatgacccagaccacaagcagcctgtctgccagcctgggcgacagagtgaccatctcttgtagagccagccaggacatcagcaactacctgaactggtatcagcagaaacccgacggcaccgtgaagctgctgatctactacaccagcatcctgcacagcggcgtgcccagcagattttctggctctggcagcggcaccgactacagcctgaccatcagcaatctggaacaagaggacttcgctacctacttctgccagcaaggcaacaccctgccttggacatttggcggaggcaccaagctggaaatcaaagctctcgaggacctgaagaacgtgttcccacctgaggtggccgtgttcgagcctagcgaggccgagatcagccacacccagaaagccaccctcgtgtgcctggctaccggcttctaccccgaccatgtggaactgtcttggtgggtcaacggcaaagaggtgcacagcggcgtgtgtaccgacccccagccactgaaagaacagcccgccctgaacgacagccggtactgcctgagcagcagactgagagtgtccgccaccttctggcagaacccccggaaccacttcagatgccaggtgcagttctacggcctgagcgagaacgacgagtggacccaggacagagccaagcccgtgacccagatcgtgtctgccgaagcctggggcagagccgatgatgtgattaagatccactggcaggaaaagaagtccaacaccatcctgggcagccaggaaggcaacaccatgaagaccaacgacacctacatgaagttcagctggctgaccgtgcccgagaagtccctggacaaagaacacagatgcatcgtgcggcacgaaaacaacaagaacggcgtggaccaggaaatcatcttcccacccatcaagaccgatgtgattacaatggaccccaaggacaactgctccaaggacgccaacgataccctgctgctccagctgaccaacaccagcgcctactacatgtacttgttgctgctgctgaagtccgtggtgtacttcgccatcatcacatgctgcctgctgcggagaaccgccttctgctgcaacggcgagaagtctagggccaagcgatctggatctggagcaacaaacttctcactactcaaacaagcaggtgacgtggaggagaatcccgggcctactagtatggactggatttggcgcatccttttccttgtcggcgctgctaccggcgcgcattccgggccccagctccagctgcaagagtctggacctggcctggtcaagcctagcgagacactgagcctgacctgtaccgtgtccggcgatagcatcagcagcggcgattactactggggctggatcagacagcctcctggcaaaggactggaatggatcggccacatctactacagcggcgtgacctactacaaccccagcctgaagtccagagtgaccatcagcgtggacaccagccggaaccagttctccctgaagctgtctagcgtgacagccgccgataccgccgtgtactactgcaccagagaggacagcagcaactggcggagtagaggccagggaacactggtcacagttagctctggatccggcggaggcggaagtggaggcggaggatctggcggcggaggctctttcgaagaagtgcaactggttgaatctggcggcggactggttaagcctggcggatctctgaagctgagctgtgccgcctctggcttcgccttcagcatctacgatatgagctgggtccgacagacccctgagaagagactggaatgggtcgcctacatctctagcggcggagggacctactatcccgacacagtgaagggcagattcaccatctccagagacaacgccaagaacaccctgtacctccagatgagcagcctgaagtccgaggacaccgccatgtactactgcgccagacacagcggctatggcacacattggggagtgctgtttgcctactggggccagggaacactggtcacagtttctgctacgcgtatccagaaccctgatcctgccgtgtaccagctgcgggatagcaagagcagcgacaagagcgtgtgtctgttcaccgacttcgacagccagaccaacgtgtcccagagcaaggactccgacgtgtacatcaccgataagtgcgtgctggacatgcggagcatggacttcaagagcaactccgccgtggcctggtccaacaagtccgatttcgcctgcgccaacgccttcaacaacagcattatccccgaggacacattcttcccaagccccgagagcagcgactccaccgaccacgtgaagcccaaagagacagagaacaccaagcagcccagcaagagctgccacaagcccaaggccatcgtgcacaccgagaaagtgaacatgatgagcctgaccgtgctgggcctgcggatgctgttcgccaaaaccgtggccgtgaacttcctgctgaccgccaagctgttcttcctc

SEQ ID NO: 7851 - DNA, 3021 bp, synthetic construct
  source 1..3021: mol_type = other DNA
atggccttaccagtgaccgccttgctcctgccgctggccttgctgctccacgccgccaggccggaagtgcagctggttgaatctggcggaggactggttcagcctggcggatctctgagactgtcttgtgccgccagcggcttcagcttcagcgacttttggatgagctgggtccgacaggcccctggcaaaggacttgaatgggtcgccacaatcagccaggccggcagcgagaaggactacgtggactctgtgaagggcagattcaccatcagccgggacaacgccaagaagtccctgtacctccagatgaacagcctgagagccgaggacaccgccgtgtactattgtgcctctggcgtgtacagcttcgactacagaggccagggcaccctggtcacagtctcttctggtaccggcggaggcggatctggcggcggaggtagcggtggcggaggatctgaattcgacatcgtgatgacacagagccctgatagcctggccgtgtctctgggagagagagccaccatcaactgcaagagcagccagagcctgctgtacagaagcaaccagaagaactacctggcctggtatcagcagaagcccggccagcctcctaagctgctgatctactgggccagcaccagagaaagcggcgtgcccgatagattttctggctctggcagcggcaccgacttcaccctgacaatttctagcctgcaagccgaggacgtggccgtgtactactgccagcagtattacaactaccccagaaccttcggccagggcaccaaggtggaaatcaagagaacagttctcgaggacctgaagaacgtgttcccacctgaggtggccgtgttcgagcctagcgaggccgagatcagccacacccagaaagccaccctcgtgtgcctggctaccggcttctaccccgaccatgtggaactgtcttggtgggtcaacggcaaagaggtgcacagcggcgtgtgtaccgacccccagccactgaaagaacagcccgccctgaacgacagccggtactgcctgagcagcagactgagagtgtccgccaccttctggcagaacccccggaaccacttcagatgccaggtgcagttctacggcctgagcgagaacgacgagtggacccaggacagagccaagcccgtgacccagatcgtgtctgccgaagcctggggcagagccgatgatgtgattaagatccactggcaggaaaagaagtccaacaccatcctgggcagccaggaaggcaacaccatgaagaccaacgacacctacatgaagttcagctggctgaccgtgcccgagaagtccctggacaaagaacacagatgcatcgtgcggcacgaaaacaacaagaacggcgtggaccaggaaatcatcttcccacccatcaagaccgatgtgattacaatggaccccaaggacaactgctccaaggacgccaacgataccctgctgctccagctgaccaacaccagcgcctactacatgtacttgttgctgctgctgaagtccgtggtgtacttcgccatcatcacatgctgcctgctgcggagaaccgccttctgctgcaacggcgagaagtctagggccaagcgatctggatctggagcaacaaacttctcactactcaaacaagcaggtgacgtggaggagaatcccgggcctactagtatggactggatttggcgcatccttttccttgtcggcgctgctaccggcgcgcattccgggccccagctccagctgcaagagtctggacctggcctggtcaagcctagcgagacactgagcctgacctgtaccgtgtccggcgatagcatcagcagcggcgattactactggggctggatcagacagcctcctggcaaaggactggaatggatcggccacatctactacagcggcgtgacctactacaaccccagcctgaagtccagagtgaccatcagcgtggacaccagccggaaccagttctccctgaagctgtctagcgtgacagccgccgataccgccgtgtactactgcaccagagaggacagcagcaactggcggagtagaggccagggaacactggtcacagttagctctggatccggcggaggcggaagtggaggcggaggatctggcggcggaggctctttcgaagaagttcagctgcttgaatcaggcggcggactggttcaacctggcggatctctgagactgagctgtgccgccagcggctacagcatcacaagcgactatgcctggaactgggtccgacaggcccctggcaaaggactggaatgggtgtcctacatcagcaacagcggcagcaccagctacaaccccagcctgaagtcccggttcaccatcagcagagacaacagcaagaacaccctgtacctccagatgaacagcctgagagctgaggacaccgccgtgtattattgcgccaaagagcggaactacgactacgacgattactactacgctatggactactggggccagggaaccctggtcacagtctcttctacgcgtatccagaaccctgatcctgccgtgtaccagctgcgggatagcaagagcagcgacaagagcgtgtgtctgttcaccgacttcgacagccagaccaacgtgtcccagagcaaggactccgacgtgtacatcaccgataagtgcgtgctggacatgcggagcatggacttcaagagcaactccgccgtggcctggtccaacaagtccgatttcgcctgcgccaacgccttcaacaacagcattatccccgaggacacattcttcccaagccccgagagcagcgactccaccgaccacgtgaagcccaaagagacagagaacaccaagcagcccagcaagagctgccacaagcccaaggccatcgtgcacaccgagaaagtgaacatgatgagcctgaccgtgctgggcctgcggatgctgttcgccaaaaccgtggccgtgaacttcctgctgaccgccaagctgttcttcctc

SEQ ID NO: 7852 - DNA, 3000 bp, synthetic construct
  source 1..3000: mol_type = other DNA
atggccttaccagtgaccgccttgctcctgccgctggccttgctgctccacgccgccaggccggaagtgcagctggttgaatctggcggaggactggttcagcctggcggatctctgagactgtcttgtgccgccagcggcttcagcttcagcgacttttggatgagctgggtccgacaggcccctggcaaaggacttgaatgggtcgccacaatcagccaggccggcagcgagaaggactacgtggactctgtgaagggcagattcaccatcagccgggacaacgccaagaagtccctgtacctccagatgaacagcctgagagccgaggacaccgccgtgtactattgtgcctctggcgtgtacagcttcgactacagaggccagggcaccctggtcacagtctcttctggtaccggcggaggcggatctggcggcggaggtagcggtggcggaggatctgaattcgacgtggtcatgacacagagccctctgagcctgcctgtgacacttggacagcctgccagcatcagctgtagaagcagccagagcctgctgcacagcagcggcaatacctacctggaatggtatcagcagaggcccggacagagccccagacctctgatctacaagatcagcacccggttcagcggcgtgcccgatagattttctggctctggcagcggcaccgacttcaccctgaagattagcagagtggaagccgaggacgtgggcgtgtactactgcttccaaggcagccacgtgccatacacctttggcggcggaacaaaggtggaaatcaagagactcgaggacctgaagaacgtgttcccacctgaggtggccgtgttcgagcctagcgaggccgagatcagccacacccagaaagccaccctcgtgtgcctggctaccggcttctaccccgaccatgtggaactgtcttggtgggtcaacggcaaagaggtgcacagcggcgtgtgtaccgacccccagccactgaaagaacagcccgccctgaacgacagccggtactgcctgagcagcagactgagagtgtccgccaccttctggcagaacccccggaaccacttcagatgccaggtgcagttctacggcctgagcgagaacgacgagtggacccaggacagagccaagcccgtgacccagatcgtgtctgccgaagcctggggcagagccgatgatgtgattaagatccactggcaggaaaagaagtccaacaccatcctgggcagccaggaaggcaacaccatgaagaccaacgacacctacatgaagttcagctggctgaccgtgcccgagaagtccctggacaaagaacacagatgcatcgtgcggcacgaaaacaacaagaacggcgtggaccaggaaatcatcttcccacccatcaagaccgatgtgattacaatggaccccaaggacaactgctccaaggacgccaacgataccctgctgctccagctgaccaacaccagcgcctactacatgtacttgttgctgctgctgaagtccgtggtgtacttcgccatcatcacatgctgcctgctgcggagaaccgccttctgctgcaacggcgagaagtctagggccaagcgatctggatctggagcaacaaacttctcactactcaaacaagcaggtgacgtggaggagaatcccgggcctactagtatggactggatttggcgcatccttttccttgtcggcgctgctaccggcgcgcattccgggccccagctccagctgcaagagtctggacctggcctggtcaagcctagcgagacactgagcctgacctgtaccgtgtccggcgatagcatcagcagcggcgattactactggggctggatcagacagcctcctggcaaaggactggaatggatcggccacatctactacagcggcgtgacctactacaaccccagcctgaagtccagagtgaccatcagcgtggacaccagccggaaccagttctccctgaagctgtctagcgtgacagccgccgataccgccgtgtactactgcaccagagaggacagcagcaactggcggagtagaggccagggaacactggtcacagttagctctggatccggcggaggcggaagtggaggcggaggatctggcggcggaggctctttcgaacaagttcagctggttcagagcggagccgaagtgaagaaacctggggcctctgtgaaggtgtcctgcaaagcctctggcctgaccatcgaggactactacatgcactgggtccgacaggcccctggacaaggacttgaatggatgggctggatcgaccccgagaacggcgatacagagtacggccctaagttccagggcagagtgaccatgaccagagacaccagcatcaacaccgcctacatggaactgagccggctgagatccgatgacaccgccgtgtactattgcgccgtgcacaatgcccactacggcacttggtttgcctattggggccagggcacactggtcaccgttagctctacgcgtatccagaaccctgatcctgccgtgtaccagctgcgggatagcaagagcagcgacaagagcgtgtgtctgttcaccgacttcgacagccagaccaacgtgtcccagagcaaggactccgacgtgtacatcaccgataagtgcgtgctggacatgcggagcatggacttcaagagcaactccgccgtggcctggtccaacaagtccgatttcgcctgcgccaacgccttcaacaacagcattatccccgaggacacattcttcccaagccccgagagcagcgactccaccgaccacgtgaagcccaaagagacagagaacaccaagcagcccagcaagagctgccacaagcccaaggccatcgtgcacaccgagaaagtgaacatgatgagcctgaccgtgctgggcctgcggatgctgttcgccaaaaccgtggccgtgaacttcctgctgaccgccaagctgttcttcctc

SEQ ID NO: 7853 - DNA, 2976 bp, synthetic construct
  source 1..2976: mol_type = other DNA
atggccttaccagtgaccgccttgctcctgccgctggccttgctgctccacgccgccaggccggaagtgcagctggttgaatctggcggaggactggttcagcctggcggatctctgagactgtcttgtgccgccagcggcttcagcttcagcgacttttggatgagctgggtccgacaggcccctggcaaaggacttgaatgggtcgccacaatcagccaggccggcagcgagaaggactacgtggactctgtgaagggcagattcaccatcagccgggacaacgccaagaagtccctgtacctccagatgaacagcctgagagccgaggacaccgccgtgtactattgtgcctctggcgtgtacagcttcgactacagaggccagggcaccctggtcacagtctcttctggtaccggcggaggcggatctggcggcggaggtagcggtggcggaggatctgaattcgacatccagatgacacagagccctagcagcctgtctgccagcgtgggagacagagtgaccatcacctgtagagccagcgagaacatctacagcaacctggcctggtatcagcagaagcctggcaaggcccctaagctgctgatctacgccgccaccaatctggctgatggcgtgccaagcagattttccggctctggcagcggcaccgatttcaccctgacaatatccagcctccagcctgaggacttcgccacctactactgccagcacttttggggcacccctacattcggccagggcaccaaggtggaaatcaagagaacagttctcgaggacctgaagaacgtgttcccacctgaggtggccgtgttcgagcctagcgaggccgagatcagccacacccagaaagccaccctcgtgtgcctggctaccggcttctaccccgaccatgtggaactgtcttggtgggtcaacggcaaagaggtgcacagcggcgtgtgtaccgacccccagccactgaaagaacagcccgccctgaacgacagccggtactgcctgagcagcagactgagagtgtccgccaccttctggcagaacccccggaaccacttcagatgccaggtgcagttctacggcctgagcgagaacgacgagtggacccaggacagagccaagcccgtgacccagatcgtgtctgccgaagcctggggcagagccgatgatgtgattaagatccactggcaggaaaagaagtccaacaccatcctgggcagccaggaaggcaacaccatgaagaccaacgacacctacatgaagttcagctggctgaccgtgcccgagaagtccctggacaaagaacacagatgcatcgtgcggcacgaaaacaacaagaacggcgtggaccaggaaatcatcttcccacccatcaagaccgatgtgattacaatggaccccaaggacaactgctccaaggacgccaacgataccctgctgctccagctgaccaacaccagcgcctactacatgtacttgttgctgctgctgaagtccgtggtgtacttcgccatcatcacatgctgcctgctgcggagaaccgccttctgctgcaacggcgagaagtctagggccaagcgatctggatctggagcaacaaacttctcactactcaaacaagcaggtgacgtggaggagaatcccgggcctactagtatggactggatttggcgcatccttttccttgtcggcgctgctaccggcgcgcattccgggccccagctccagctgcaagagtctggacctggcctggtcaagcctagcgagacactgagcctgacctgtaccgtgtccggcgatagcatcagcagcggcgattactactggggctggatcagacagcctcctggcaaaggactggaatggatcggccacatctactacagcggcgtgacctactacaaccccagcctgaagtccagagtgaccatcagcgtggacaccagccggaaccagttctccctgaagctgtctagcgtgacagccgccgataccgccgtgtactactgcaccagagaggacagcagcaactggcggagtagaggccagggaacactggtcacagttagctctggatccggcggaggcggaagtggaggcggaggatctggcggcggaggctctttcgaagaagtgcagctggttgaatcaggtggcggcctggttcaacctggcggatctctgagactgagctgtgccgcctctggcttcagcctgacaaattacggcgtgcactgggtccgacaggcccctggaaaaggactggaatgggtgtccgtgatttggagcggcggcagcaccgattacaacgccgccttcatcagccggttcaccatcagcgccgacaccagcaagaataccgcctacctccagatgaactccctgagagccgaggacaccgccgtgtactattgcgccagagaactgatccacgctatggacaactggggccagggaaccctggtcacagtctcttctacgcgtatccagaaccctgatcctgccgtgtaccagctgcgggatagcaagagcagcgacaagagcgtgtgtctgttcaccgacttcgacagccagaccaacgtgtcccagagcaaggactccgacgtgtacatcaccgataagtgcgtgctggacatgcggagcatggacttcaagagcaactccgccgtggcctggtccaacaagtccgatttcgcctgcgccaacgccttcaacaacagcattatccccgaggacacattcttcccaagccccgagagcagcgactccaccgaccacgtgaagcccaaagagacagagaacaccaagcagcccagcaagagctgccacaagcccaaggccatcgtgcacaccgagaaagtgaacatgatgagcctgaccgtgctgggcctgcggatgctgttcgccaaaaccgtggccgtgaacttcctgctgaccgccaagctgttcttcctc

SEQ ID NO: 7854 - DNA, 2997 bp, synthetic construct
  source 1..2997: mol_type = other DNA
atggccttaccagtgaccgccttgctcctgccgctggccttgctgctccacgccgccaggccggaagtgcagctggttgaatctggcggaggactggttcagcctggcggatctctgagactgtcttgtgccgccagcggcttcagcttcagcgacttttggatgagctgggtccgacaggcccctggcaaaggacttgaatgggtcgccacaatcagccaggccggcagcgagaaggactacgtggactctgtgaagggcagattcaccatcagccgggacaacgccaagaagtccctgtacctccagatgaacagcctgagagccgaggacaccgccgtgtactattgtgcctctggcgtgtacagcttcgactacagaggccagggcaccctggtcacagtctcttctggtaccggcggaggcggatctggcggcggaggtagcggtggcggaggatctgaattcgacttcgtgatgacacagagccctctgagcctgcctgtgacacctggcgaacctgccagcatcagctgtagaagcagccagagcatcgtgcacagcaacggcaacacctacctggaatggtatctccagaagcctggacagagcccacagctgctgatctacaaggtgtccaacagattcagcggcgtgcccgacagattttctggcagcggctctggcaccgacttcaccctgaagattagcagagtggaagccgaggacgtgggcgtgtactactgcttccaaggctctcacgtgcccctgacctttggacagggcaccaagctggaaatcaagagactcgaggacctgaagaacgtgttcccacctgaggtggccgtgttcgagcctagcgaggccgagatcagccacacccagaaagccaccctcgtgtgcctggctaccggcttctaccccgaccatgtggaactgtcttggtgggtcaacggcaaagaggtgcacagcggcgtgtgtaccgacccccagccactgaaagaacagcccgccctgaacgacagccggtactgcctgagcagcagactgagagtgtccgccaccttctggcagaacccccggaaccacttcagatgccaggtgcagttctacggcctgagcgagaacgacgagtggacccaggacagagccaagcccgtgacccagatcgtgtctgccgaagcctggggcagagccgatgatgtgattaagatccactggcaggaaaagaagtccaacaccatcctgggcagccaggaaggcaacaccatgaagaccaacgacacctacatgaagttcagctggctgaccgtgcccgagaagtccctggacaaagaacacagatgcatcgtgcggcacgaaaacaacaagaacggcgtggaccaggaaatcatcttcccacccatcaagaccgatgtgattacaatggaccccaaggacaactgctccaaggacgccaacgataccctgctgctccagctgaccaacaccagcgcctactacatgtacttgttgctgctgctgaagtccgtggtgtacttcgccatcatcacatgctgcctgctgcggagaaccgccttctgctgcaacggcgagaagtctagggccaagcgatctggatctggagcaacaaacttctcactactcaaacaagcaggtgacgtggaggagaatcccgggcctactagtatggactggatttggcgcatccttttccttgtcggcgctgctaccggcgcgcattccgggccccagctccagctgcaagagtctggacctggcctggtcaagcctagcgagacactgagcctgacctgtaccgtgtccggcgatagcatcagcagcggcgattactactggggctggatcagacagcctcctggcaaaggactggaatggatcggccacatctactacagcggcgtgacctactacaaccccagcctgaagtccagagtgaccatcagcgtggacaccagccggaaccagttctccctgaagctgtctagcgtgacagccgccgataccgccgtgtactactgcaccagagaggacagcagcaactggcggagtagaggccagggaacactggtcacagttagctctggatccggcggaggcggaagtggaggcggaggatctggcggcggaggctctttcgaagaagtgcagctggttgaaagcggagccgaagtgaagaaacctggggcctctgtgaaggtgtcctgcaaggccagcggctacacctttaccagctactggattcactgggtccgacaggcccctggacaaggacttgagtggatgggcgagaacgacccctccaacggcaggaccaactacaacgagaagttcaagaaccgcgtgaccctgaccgtggacaccagcatctctaccgcctacatggaactgagccggctgagatccgatgacaccgccgtgtactattgcgccagaggacccaactacttttacagcatggactactggggccagggcacaatggtcaccgttagctctacgcgtatccagaaccctgatcctgccgtgtaccagctgcgggatagcaagagcagcgacaagagcgtgtgtctgttcaccgacttcgacagccagaccaacgtgtcccagagcaaggactccgacgtgtacatcaccgataagtgcgtgctggacatgcggagcatggacttcaagagcaactccgccgtggcctggtccaacaagtccgatttcgcctgcgccaacgccttcaacaacagcattatccccgaggacacattcttcccaagccccgagagcagcgactccaccgaccacgtgaagcccaaagagacagagaacaccaagcagcccagcaagagctgccacaagcccaaggccatcgtgcacaccgagaaagtgaacatgatgagcctgaccgtgctgggcctgcggatgctgttcgccaaaaccgtggccgtgaacttcctgctgaccgccaagctgttcttcctc

SEQ ID NO: 7855 - DNA, 2976 bp, synthetic construct
  source 1..2976: mol_type = other DNA
atggccttaccagtgaccgccttgctcctgccgctggccttgctgctccacgccgccaggccggaagtgcagctggttgaatctggcggaggactggttcagcctggcggatctctgagactgtcttgtgccgccagcggcttcagcttcagcgacttttggatgagctgggtccgacaggcccctggcaaaggacttgaatgggtcgccacaatcagccaggccggcagcgagaaggactacgtggactctgtgaagggcagattcaccatcagccgggacaacgccaagaagtccctgtacctccagatgaacagcctgagagccgaggacaccgccgtgtactattgtgcctctggcgtgtacagcttcgactacagaggccagggcaccctggtcacagtctcttctggtaccggcggaggcggatctggcggcggaggtagcggtggcggaggatctgaattcgacatccagctgactcagagccctagctttctgagcgccagcgtgggcgacagagtgaccatcacatgtagcgccagatccagcatcagcttcatgtactggtatcagcagaagcccggcaaggcccctaagctgctgatctacgacaccagcaatctggcctctggcgtgcccagcagattttctggaagcggcagcggcaccgagttcaccctgacaatctctagcctggaagccgaggatgccgccacctactattgccagcagtggtccagctatcccctgacatttggacagggcaccaagctggaaatcaaactcgaggacctgaagaacgtgttcccacctgaggtggccgtgttcgagcctagcgaggccgagatcagccacacccagaaagccaccctcgtgtgcctggctaccggcttctaccccgaccatgtggaactgtcttggtgggtcaacggcaaagaggtgcacagcggcgtgtgtaccgacccccagccactgaaagaacagcccgccctgaacgacagccggtactgcctgagcagcagactgagagtgtccgccaccttctggcagaacccccggaaccacttcagatgccaggtgcagttctacggcctgagcgagaacgacgagtggacccaggacagagccaagcccgtgacccagatcgtgtctgccgaagcctggggcagagccgatgatgtgattaagatccactggcaggaaaagaagtccaacaccatcctgggcagccaggaaggcaacaccatgaagaccaacgacacctacatgaagttcagctggctgaccgtgcccgagaagtccctggacaaagaacacagatgcatcgtgcggcacgaaaacaacaagaacggcgtggaccaggaaatcatcttcccacccatcaagaccgatgtgattacaatggaccccaaggacaactgctccaaggacgccaacgataccctgctgctccagctgaccaacaccagcgcctactacatgtacttgttgctgctgctgaagtccgtggtgtacttcgccatcatcacatgctgcctgctgcggagaaccgccttctgctgcaacggcgagaagtctagggccaagcgatctggatctggagcaacaaacttctcactactcaaacaagcaggtgacgtggaggagaatcccgggcctactagtatggactggatttggcgcatccttttccttgtcggcgctgctaccggcgcgcattccgggccccagctccagctgcaagagtctggacctggcctggtcaagcctagcgagacactgagcctgacctgtaccgtgtccggcgatagcatcagcagcggcgattactactggggctggatcagacagcctcctggcaaaggactggaatggatcggccacatctactacagcggcgtgacctactacaaccccagcctgaagtccagagtgaccatcagcgtggacaccagccggaaccagttctccctgaagctgtctagcgtgacagccgccgataccgccgtgtactactgcaccagagaggacagcagcaactggcggagtagaggccagggaacactggtcacagttagctctggatccggcggaggcggaagtggaggcggaggatctggcggcggaggctctttcgaacaggttcagctggttcagtctggggccgaagtgaagaaacctggggcctctgtgaaggtgtcctgcaaggcttccggctacacctttaccggctcttggatgaactgggtccgacaggctcctggacagggactcgaatggatcggcagaatctatcctggcgacggcgagacaaactacaacggcaagttcaaggaccgcgtgacaatcaccgccgacaagagcacaagcaccgcctacatggaactgagcagcctgcggagcgaagataccgccgtgtactactgcgcccggatctacggcaacaacgtgtacttcgatgtgtggggccagggcacaaccgtgacagtctcttctacgcgtatccagaaccctgatcctgccgtgtaccagctgcgggatagcaagagcagcgacaagagcgtgtgtctgttcaccgacttcgacagccagaccaacgtgtcccagagcaaggactccgacgtgtacatcaccgataagtgcgtgctggacatgcggagcatggacttcaagagcaactccgccgtggcctggtccaacaagtccgatttcgcctgcgccaacgccttcaacaacagcattatccccgaggacacattcttcccaagccccgagagcagcgactccaccgaccacgtgaagcccaaagagacagagaacaccaagcagcccagcaagagctgccacaagcccaaggccatcgtgcacaccgagaaagtgaacatgatgagcctgaccgtgctgggcctgcggatgctgttcgccaaaaccgtggccgtgaacttcctgctgaccgccaagctgttcttcctc

SEQ ID NO: 7856 - DNA, 3000 bp, synthetic construct
  source 1..3000: mol_type = other DNA
atggccttaccagtgaccgccttgctcctgccgctggccttgctgctccacgccgccaggccggaagtgcagctggttgaatctggcggaggactggttcagcctggcggatctctgagactgtcttgtgccgccagcggcttcagcttcagcgacttttggatgagctgggtccgacaggcccctggcaaaggacttgaatgggtcgccacaatcagccaggccggcagcgagaaggactacgtggactctgtgaagggcagattcaccatcagccgggacaacgccaagaagtccctgtacctccagatgaacagcctgagagccgaggacaccgccgtgtactattgtgcctctggcgtgtacagcttcgactacagaggccagggcaccctggtcacagtctcttctggtaccggcggaggcggatctggcggcggaggtagcggtggcggaggatctgaattccagctggtgctgacacagtctccaagcgcctctgccagcctgggatctagcgtgaagctgacctgtacactgagcagcggccacaagaccgacaccatcgactggtatcagcagcagcctggcaaggcccctagatacctgatgaagctggaaggcagcggcagctacaacaaaggctctggcgtgcccgatagattcagcggcagttcttctggcgctgattggtatctgaccatcagcagcctccagagcgaggacgaggccgattactactgcggcacagactaccccggcaactacctgtttggcggcggaacacagctgacagtgcttggcctcgaggacctgaagaacgtgttcccacctgaggtggccgtgttcgagcctagcgaggccgagatcagccacacccagaaagccaccctcgtgtgcctggctaccggcttctaccccgaccatgtggaactgtcttggtgggtcaacggcaaagaggtgcacagcggcgtgtgtaccgacccccagccactgaaagaacagcccgccctgaacgacagccggtactgcctgagcagcagactgagagtgtccgccaccttctggcagaacccccggaaccacttcagatgccaggtgcagttctacggcctgagcgagaacgacgagtggacccaggacagagccaagcccgtgacccagatcgtgtctgccgaagcctggggcagagccgatgatgtgattaagatccactggcaggaaaagaagtccaacaccatcctgggcagccaggaaggcaacaccatgaagaccaacgacacctacatgaagttcagctggctgaccgtgcccgagaagtccctggacaaagaacacagatgcatcgtgcggcacgaaaacaacaagaacggcgtggaccaggaaatcatcttcccacccatcaagaccgatgtgattacaatggaccccaaggacaactgctccaaggacgccaacgataccctgctgctccagctgaccaacaccagcgcctactacatgtacttgttgctgctgctgaagtccgtggtgtacttcgccatcatcacatgctgcctgctgcggagaaccgccttctgctgcaacggcgagaagtctagggccaagcgatctggatctggagcaacaaacttctcactactcaaacaagcaggtgacgtggaggagaatcccgggcctactagtatggactggatttggcgcatccttttccttgtcggcgctgctaccggcgcgcattccgggccccagctccagctgcaagagtctggacctggcctggtcaagcctagcgagacactgagcctgacctgtaccgtgtccggcgatagcatcagcagcggcgattactactggggctggatcagacagcctcctggcaaaggactggaatggatcggccacatctactacagcggcgtgacctactacaaccccagcctgaagtccagagtgaccatcagcgtggacaccagccggaaccagttctccctgaagctgtctagcgtgacagccgccgataccgccgtgtactactgcaccagagaggacagcagcaactggcggagtagaggccagggaacactggtcacagttagctctggatccggcggaggcggaagtggaggcggaggatctggcggcggaggctctttcgaacaagaacagctggttgaaagcggcggaggactggttcaacctggcggttctctgagactgagctgtgccgccagcggcttcaccttcagcgactactacatgagctggatcagacaggccccaggcaaaggactggaatgggtcgccacaatctaccccagcagcggcaagacctactacgccgattctgccaagggcagactgaccatctccagcgacaacgccaaggacagcctgtacctccagatgaacagcctgagagccgaggacaccgccgtgtactactgcaccagagatagctacgccgacgacgccgctctgtttgacatttggggccagggcaccaccgtgaccgtttcttctacgcgtatccagaaccctgatcctgccgtgtaccagctgcgggatagcaagagcagcgacaagagcgtgtgtctgttcaccgacttcgacagccagaccaacgtgtcccagagcaaggactccgacgtgtacatcaccgataagtgcgtgctggacatgcggagcatggacttcaagagcaactccgccgtggcctggtccaacaagtccgatttcgcctgcgccaacgccttcaacaacagcattatccccgaggacacattcttcccaagccccgagagcagcgactccaccgaccacgtgaagcccaaagagacagagaacaccaagcagcccagcaagagctgccacaagcccaaggccatcgtgcacaccgagaaagtgaacatgatgagcctgaccgtgctgggcctgcggatgctgttcgccaaaaccgtggccgtgaacttcctgctgaccgccaagctgttcttcctc

SEQ ID NO: 7857 - DNA, 2976 bp, synthetic construct; identical to SEQ ID NO: 7853
  source 1..2976: mol_type = other DNA

SEQ ID NO: 7858 - DNA, 2997 bp, synthetic construct; identical to SEQ ID NO: 7854
  source 1..2997: mol_type = other DNA

SEQ ID NO: 7859 - DNA, 2976 bp, synthetic construct; identical to SEQ ID NO: 7855
  source 1..2976: mol_type = other DNA

SEQ ID NO: 7860 - DNA, 3000 bp, synthetic construct; identical to SEQ ID NO: 7856
  source 1..3000: mol_type = other DNA

SEQ ID NO: 7861 - DNA, 2997 bp, synthetic construct
  source 1..2997: mol_type = other DNA
atggccttaccagtgaccgccttgctcctgccgctggccttgctgctccacgccgccaggccggaagtgcagctggttgaatctggcggaggactggttcagcctggcggatctctgagactgtcttgtgccgccagcggcttcagcttcagcgacttttggatgagctgggtccgacaggcccctggcaaaggacttgaatgggtcgccacaatcagccaggccggcagcgagaaggactacgtggactctgtgaagggcagattcaccatcagccgggacaacgccaagaagtccctgtacctccagatgaacagcctgagagccgaggacaccgccgtgtactattgtgcctctggcgtgtacagcttcgactacagaggccagggcaccctggtcacagtctcttctggtaccggcggaggcggatctggcggcggaggtagcggtggcggaggatctgaattcgatatccagctcactcaaagcccctctagtctctctgcctcagtgggggatcgggtcagttttacttgtcaagcttcacaggatatcaacaacttccttaattggtatcagcagaagccaggaaaagcacccaagctgctcatctatgatgcctcaaatttggagacgggtgttcccagtcgattctctgggtcagggtccgggaccgactttacgtttacgatctcctctctgcagcccgaagacatcgccacatactattgtcaacagtacggcaacttgcctttcacatttgggggcgggactaaggttgaaatcaagaggctcgaggacctgaagaacgtgttcccacctgaggtggccgtgttcgagcctagcgaggccgagatcagccacacccagaaagccaccctcgtgtgcctggctaccggcttctaccccgaccatgtggaactgtcttggtgggtcaacggcaaagaggtgcacagcggcgtgtgtaccgacccccagccactgaaagaacagcccgccctgaacgacagccggtactgcctgagcagcagactgagagtgtccgccaccttctggcagaacccccggaaccacttcagatgccaggtgcagttctacggcctgagcgagaacgacgagtggacccaggacagagccaagcccgtgacccagatcgtgtctgccgaagcctggggcagagccgatgatgtgattaagatccactggcaggaaaagaagtccaacaccatcctgggcagccaggaaggcaacaccatgaagaccaacgacacctacatgaagttcagctggctgaccgtgcccgagaagtccctggacaaagaacacagatgcatcgtgcggcacgaaaacaacaagaacggcgtggaccaggaaatcatcttcccacccatcaagaccgatgtgattacaatggaccccaaggacaactgctccaaggacgccaacgataccctgctgctccagctgaccaacaccagcgcctactacatgtacttgttgctgctgctgaagtccgtggtgtacttcgccatcatcacatgctgcctgctgcggagaaccgccttctgctgcaacggcgagaagtctagggccaagcgatctggatctggagcaacaaacttctcactactcaaacaagcaggtgacgtggaggagaatcccgggcctactagtatggactggatttggcgcatccttttccttgtcggcgctgctaccggcgcgcattccgggccccagctccagctgcaagagtctggacctggcctggtcaagcctagcgagacactgagcctgacctgtaccgtgtccggcgatagcatcagcagcggcgattactactggggctggatcagacagcctcctggcaaaggactggaatggatcggccacatctactacagcggcgtgacctactacaaccccagcctgaagtccagagtgaccatcagcgtggacaccagccggaaccagttctccctgaagctgtctagcgtgacagccgccgataccgccgtgtactactgcaccagagaggacagcagcaactggcggagtagaggccagggaacactggtcacagttagctctggatccggcggaggcggaagtggaggcggaggatctggcggcggaggctctttcgaacaggtacagctgcaggaatctgggcccggacttgtcaagccaagtcagacactttctcttacatgtaccgtgagcggcggaagtataagcagtggaggcttttactggtcttggatacggcagcacccaggcaaaggcttggagtggattggatacattcatcattcaggatctacacactataatccatcccttaagtcccgggtcaccattagcattgatacgtctaagaatctgttcagtctcaggctgtcctccgtcactgctgccgacacagccgtgtactactgcgcctccttggtttactgcggaggcgactgttatagcggctttgattattgggggcaggggaccctcgtaaccgtgagctctacgcgtatccagaaccctgatcctgccgtgtaccagctgcgggatagcaagagcagcgacaagagcgtgtgtctgttcaccgacttcgacagccagaccaacgtgtcccagagcaaggactccgacgtgtacatcaccgataagtgcgtgctggacatgcggagcatggacttcaagagcaactccgccgtggcctggtccaacaagtccgatttcgcctgcgccaacgccttcaacaacagcattatccccgaggacacattcttcccaagccccgagagcagcgactccaccgaccacgtgaagcccaaagagacagagaacaccaagcagcccagcaagagctgccacaagcccaaggccatcgtgcacaccgagaaagtgaacatgatgagcctgaccgtgctgggcctgcggatgctgttcgccaaaaccgtggccgtgaacttcctgctgaccgccaagctgttcttcctc

SEQ ID NO: 7862 - DNA, 2985 bp, synthetic construct
  source 1..2985: mol_type = other DNA
atggccttaccagtgaccgccttgctcctgccgctggccttgctgctccacgccgccaggccggaagtgcagctggttgaatctggcggaggactggttcagcctggcggatctctgagactgtcttgtgccgccagcggcttcagcttcagcgacttttggatgagctgggtccgacaggcccctggcaaaggacttgaatgggtcgccacaatcagccaggccggcagcgagaaggactacgtggactctgtgaagggcagattcaccatcagccgggacaacgccaagaagtccctgtacctccagatgaacagcctgagagccgaggacaccgccgtgtactattgtgcctctggcgtgtacagcttcgactacagaggccagggcaccctggtcacagtctcttctggtaccggcggaggcggatctggcggcggaggtagcggtggcggaggatctgaattcgacattcagatgacacagagccctagcagcctgagcgcctctgtgggagacagagtgaccatcacatgcaagagcagccagagcgtgctgtactccagcaatcagaagaactacctggcctggttccagcagaagcctggcaaggctcctaagctgctgatctactgggccagcaccagagaaagcggcgtgccaagcagattttctggcagcggctctggcaccgacttcaccctgacaatatccagcctccagcctgaggacttcgccacctacttttgccaccagtacctgagcagctacacattcggacagggcaccaaggtggaaatcaagcggctcgaggacctgaagaacgtgttcccacctgaggtggccgtgttcgagcctagcgaggccgagatcagccacacccagaaagccaccctcgtgtgcctggctaccggcttctaccccgaccatgtggaactgtcttggtgggtcaacggcaaagaggtgcacagcggcgtgtgtaccgacccccagccactgaaagaacagcccgccctgaacgacagccggtactgcctgagcagcagactgagagtgtccgccaccttctggcagaacccccggaaccacttcagatgccaggtgcagttctacggcctgagcgagaacgacgagtggacccaggacagagccaagcccgtgacccagatcgtgtctgccgaagcctggggcagagccgatgatgtgattaagatccactggcaggaaaagaagtccaacaccatcctgggcagccaggaaggcaacaccatgaagaccaacgacacctacatgaagttcagctggctgaccgtgcccgagaagtccctggacaaagaacacagatgcatcgtgcggcacgaaaacaacaagaacggcgtggaccaggaaatcatcttcccacccatcaagaccgatgtgattacaatggaccccaaggacaactgctccaaggacgccaacgataccctgctgctccagctgaccaacaccagcgcctactacatgtacttgttgctgctgctgaagtccgtggtgtacttcgccatcatcacatgctgcctgctgcggagaaccgccttctgctgcaacggcgagaagtctagggccaagcgatctggatctggagcaacaaacttctcactactcaaacaagcaggtgacgtggaggagaatcccgggcctactagtatggactggatttggcgcatccttttccttgtcggcgctgctaccggcgcgcattccgggccccagctccagctgcaagagtctggacctggcctggtcaagcctagcgagacactgagcctgacctgtaccgtgtccggcgatagcatcagcagcggcgattactactggggctggatcagacagcctcctggcaaaggactggaatggatcggccacatctactacagcggcgtgacctactacaaccccagcctgaagtccagagtgaccatcagcgtggacaccagccggaaccagttctccctgaagctgtctagcgtgacagccgccgataccgccgtgtactactgcaccagagaggacagcagcaactggcggagtagaggccagggaacactggtcacagttagctctggatccggcggaggcggaagtggaggcggaggatctggcggcggaggctctttcgaagaggtgcagctggttgaatctggcggaggactggttcagcctggcggatctctgagactgtcttgtgccgccagcggctacaccttcaccacctattggatgcactgggtccgacaggcccctggcaaaggacttgagtgggtcggatatatcaggcccagcaccggctacacagagtacaaccagaagttcaaggaccgcttcaccatcagcgccgacaccagcaagaataccgcctacctccagatgaacagcctgagagccgaggacaccgccgtgtactactgtgccagatccagatggctgctggactattggggccagggcacactggttacagtttctacgcgtatccagaaccctgatcctgccgtgtaccagctgcgggatagcaagagcagcgacaagagcgtgtgtctgttcaccgacttcgacagccagaccaacgtgtcccagagcaaggactccgacgtgtacatcaccgataagtgcgtgctggacatgcggagcatggacttcaagagcaactccgccgtggcctggtccaacaagtccgatttcgcctgcgccaacgccttcaacaacagcattatccccgaggacacattcttcccaagccccgagagcagcgactccaccgaccacgtgaagcccaaagagacagagaacaccaagcagcccagcaagagctgccacaagcccaaggccatcgtgcacaccgagaaagtgaacatgatgagcctgaccgtgctgggcctgcggatgctgttcgccaaaaccgtggccgtgaacttcctgctgaccgccaagctgttcttcctc

SEQ ID NO: 7863 - DNA, 2976 bp, synthetic construct
  source 1..2976: mol_type = other DNA
atggccttaccagtgaccgccttgctcctgccgctggccttgctgctccacgccgccaggccggaagtgcagctggttgaatctggcggaggactggttcagcctggcggatctctgagactgtcttgtgccgccagcggcttcagcttcagcgacttttggatgagctgggtccgacaggcccctggcaaaggacttgaatgggtcgccacaatcagccaggccggcagcgagaaggactacgtggactctgtgaagggcagattcaccatcagccgggacaacgccaagaagtccctgtacctccagatgaacagcctgagagccgaggacaccgccgtgtactattgtgcctctggcgtgtacagcttcgactacagaggccagggcaccctggtcacagtctcttctggtaccggcggaggcggatctggcggcggaggtagcggtggcggaggatctgaattcgacatccagatgacacagagccctagcagcctgtctgccagcgtgggagacagagtgaccatcacctgtagagccagccaggacatcagcaactacctgaactggtatcagcagaagcccggcaaggcccctaagctgctgatctactacaccagcagactgcacagcggcgtgcccagcagattttctggctctggcagcggcaccgacttcaccctgacaatatctagcctccagcctgaggacttcgccacctactattgccagcagggcaacaccctgccttacacatttggacagggcaccaaggtggaaatcaagagactcgaggacctgaagaacgtgttcccacctgaggtggccgtgttcgagcctagcgaggccgagatcagccacacccagaaagccaccctcgtgtgcctggctaccggcttctaccccgaccatgtggaactgtcttggtgggtcaacggcaaagaggtgcacagcggcgtgtgtaccgacccccagccactgaaagaacagcccgccctgaacgacagccggtactgcctgagcagcagactgagagtgtccgccaccttctggcagaacccccggaaccacttcagatgccaggtgcagttctacggcctgagcgagaacgacgagtggacccaggacagagccaagcccgtgacccagatcgtgtctgccgaagcctggggcagagccgatgatgtgattaagatccactggcaggaaaagaagtccaacaccatcctgggcagccaggaaggcaacaccatgaagaccaacgacacctacatgaagttcagctggctgaccgtgcccgagaagtccctggacaaagaacacagatgcatcgtgcggcacgaaaacaacaagaacggcgtggaccaggaaatcatcttcccacccatcaagaccgatgtgattacaatggaccccaaggacaactgctccaaggacgccaacgataccctgctgctccagctgaccaacaccagcgcctactacatgtacttgttgctgctgctgaagtccgtggtgtacttcgccatcatcacatgctgcctgctgcggagaaccgccttctgctgcaacggcgagaagtctagggccaagcgatctggatctggagcaacaaacttctcactactcaaacaagcaggtgacgtggaggagaatcccgggcctactagtatggactggatttggcgcatccttttccttgtcggcgctgctaccggcgcgcattccgggccccagctccagctgcaagagtctggacctggcctggtcaagcctagcgagacactgagcctgacctgtaccgtgtccggcgatagcatcagcagcggcgattactactggggctggatcagacagcctcctggcaaaggactggaatggatcggccacatctactacagcggcgtgacctactacaaccccagcctgaagtccagagtgaccatcagcgtggacaccagccggaaccagttctccctgaagctgtctagcgtgacagccgccgataccgccgtgtactactgcaccagagaggacagcagcaactggcggagtagaggccagggaacactggtcacagttagctctggatccggcggaggcggaagtggaggcggaggatctggcggcggaggctctttcgaagaagtgcagctggttgaatcaggtggcggcctggttcaacctggcggatctctgagactgagctgtgccgccagcggcttcaccttcagcgactactttatgagctgggtccgacaggcccctggcaaaggacttgaatgggtcgccaccatcagcaatggcggcacctacacttactaccccgacagcgtgaagggcagattcaccatctccagagacaacagcaagaacaccctgtacctccagatgaactccctgagagccgaggacaccgccgtgtactactgcgccagattcgacggctacatcttcgactattggggccagggcaccctggtcacagtctcttctacgcgtatccagaaccctgatcctgccgtgtaccagctgcgggatagcaagagcagcgacaagagcgtgtgtctgttcaccgacttcgacagccagaccaacgtgtcccagagcaaggactccgacgtgtacatcaccgataagtgcgtgctggacatgcggagcatggacttcaagagcaactccgccgtggcctggtccaacaagtccgatttcgcctgcgccaacgccttcaacaacagcattatccccgaggacacattcttcccaagccccgagagcagcgactccaccgaccacgtgaagcccaaagagacagagaacaccaagcagcccagcaagagctgccacaagcccaaggccatcgtgcacaccgagaaagtgaacatgatgagcctgaccgtgctgggcctgcggatgctgttcgccaaaaccgtggccgtgaacttcctgctgaccgccaagctgttcttcctc

SEQ ID NO: 7864 - DNA, 2991 bp, synthetic construct
  source 1..2991: mol_type = other DNA
atggccttaccagtgaccgccttgctcctgccgctggccttgctgctccacgccgccaggccggaagtgcagctggttgaatctggcggaggactggttcagcctggcggatctctgagactgtcttgtgccgccagcggcttcagcttcagcgacttttggatgagctgggtccgacaggcccctggcaaaggacttgaatgggtcgccacaatcagccaggccggcagcgagaaggactacgtggactctgtgaagggcagattcaccatcagccgggacaacgccaagaagtccctgtacctccagatgaacagcctgagagccgaggacaccgccgtgtactattgtgcctctggcgtgtacagcttcgactacagaggccagggcaccctggtcacagtctcttctggtaccggcggaggcggatctggcggcggaggtagcggtggcggaggatctgaattcgacatccagatgacacagactacatcctccctgtctgcctctctgggagacagagtcaccatcagttgcagggcaagtcaggacattagtaagtacctgaactggtatcagcagaaaccagatggaactgttaaactcctgatctaccatacatcaagattacactcaggagtcccatcaaggttcagtggcagtgggtctggaacagattattctctcaccattagcaacctggagcaagaagatattgccacttacttttgccaacagggtaatacgcttccgtacacgttcggaggggggaccaagctggagatcacactcgagatccagaaccctgatcctgccgtgtaccagctgcgggatagcaagagcagcgacaagagcgtgtgtctgttcaccgacttcgacagccagaccaacgtgtcccagagcaaggactccgacgtgtacatcaccgataagtgcgtgctggacatgcggagcatggacttcaagagcaactccgccgtggcctggtccaacaagtccgatttcgcctgcgccaacgccttcaacaacagcattatccccgaggacacattcttcccaagccccgagagcagcgactccaccgaccacgtgaagcccaaagagacagagaacaccaagcagcccagcaagagctgccacaagcccaaggccatcgtgcacaccgagaaagtgaacatgatgagcctgaccgtgctgggcctgcggatgctgttcgccaaaaccgtggccgtgaacttcctgctgaccgccaagctgttcttcctccgcgccaagagaagcggatctggcgtgaagcagaccctgaatttcgacctgctgaagctggctggcgacgtggaatccaacccaggccctactagtatggactggatttggcgcatccttttccttgtcggcgctgctaccggcgcgcattccgggccccagctccagctgcaagagtctggacctggcctggtcaagcctagcgagacactgagcctgacctgtaccgtgtccggcgatagcatcagcagcggcgattactactggggctggatcagacagcctcctggcaaaggactggaatggatcggccacatctactacagcggcgtgacctactacaaccccagcctgaagtccagagtgaccatcagcgtggacaccagccggaaccagttctccctgaagctgtctagcgtgacagccgccgataccgccgtgtactactgcaccagagaggacagcagcaactggcggagtagaggccagggaacactggtcacagttagctctggatccggcggaggcggaagtggaggcggaggatctggcggcggaggctctttcgaagtgaaactgcaggagtcaggacctggcctggtggcgccctcacagagcctgtccgtcacatgcactgtctcaggggtctcattacccgactatggtgtaagctggattcgccagcctccacgaaagggtctggagtggctgggagtaatatggggtagtgaaaccacatactataattcagctctcaaatccagactgaccatcatcaaggacaactccaagagccaagttttcttaaaaatgaacagtctgcaaactgatgacacagccatttactactgtgccaaacattattactacggtggtagctatgctatggactactggggccaaggaacctcagtcaccgtctcctcaacgcgtgaggacctgaagaacgtgttcccacctgaggtggccgtgttcgagcctagcgaggccgagatcagccacacccagaaagccaccctcgtgtgcctggctaccggcttctaccccgaccatgtggaactgtcttggtgggtcaacggcaaagaggtgcacagcggcgtgtgtaccgacccccagccactgaaagaacagcccgccctgaacgacagccggtactgcctgagcagcagactgagagtgtccgccaccttctggcagaacccccggaaccacttcagatgccaggtgcagttctacggcctgagcgagaacgacgagtggacccaggacagagccaagcccgtgacccagatcgtgtctgccgaagcctggggcagagccgatgatgtgattaagatccactggcaggaaaagaagtccaacaccatcctgggcagccaggaaggcaacaccatgaagaccaacgacacctacatgaagttcagctggctgaccgtgcccgagaagtccctggacaaagaacacagatgcatcgtgcggcacgaaaacaacaagaacggcgtggaccaggaaatcatcttcccacccatcaagaccgatgtgattacaatggaccccaaggacaactgctccaaggacgccaacgataccctgctgctccagctgaccaacaccagcgcctactacatgtacttgttgctgctgctgaagtccgtggtgtacttcgccatcatcacatgctgcctgctgcggagaaccgccttctgctgcaacggcgagaagtct

SEQ ID NO: 7865 - DNA, 2994 bp, synthetic construct
  source 1..2994: mol_type = other DNA
atggccttaccagtgaccgccttgctcctgccgctggccttgctgctccacgccgccaggccggaagtgcagctggttgaatctggcggaggactggttcagcctggcggatctctgagactgtcttgtgccgccagcggcttcagcttcagcgacttttggatgagctgggtccgacaggcccctggcaaaggacttgaatgggtcgccacaatcagccaggccggcagcgagaaggactacgtggactctgtgaagggcagattcaccatcagccgggacaacgccaagaagtccctgtacctccagatgaacagcctgagagccgaggacaccgccgtgtactattgtgcctctggcgtgtacagcttcgactacagaggccagggcaccctggtcacagtctcttctggtaccggcggaggcggatctggcggcggaggtagcggtggcggaggatctgaattcgagatcgtgatgacccagagccctgccaccctgtctctgagccctggcgaaagagccaccctgagctgtagagccagccaggacatcagcaagtacctgaactggtatcagcagaagcccggccaggcccccagactgctgatctaccacaccagcagactgcacagcggcatccccgccagattttctggctctggcagcggcaccgactacaccctgacaatcagcagcctccagcccgaggacttcgccgtgtacttctgtcagcaaggcaacaccctgccctacaccttcggccagggcaccaagctggaaatcaagctcgagatccagaaccctgatcctgccgtgtaccagctgcgggatagcaagagcagcgacaagagcgtgtgtctgttcaccgacttcgacagccagaccaacgtgtcccagagcaaggactccgacgtgtacatcaccgataagtgcgtgctggacatgcggagcatggacttcaagagcaactccgccgtggcctggtccaacaagtccgatttcgcctgcgccaacgccttcaacaacagcattatccccgaggacacattcttcccaagccccgagagcagcgactccaccgaccacgtgaagcccaaagagacagagaacaccaagcagcccagcaagagctgccacaagcccaaggccatcgtgcacaccgagaaagtgaacatgatgagcctgaccgtgctgggcctgcggatgctgttcgccaaaaccgtggccgtgaacttcctgctgaccgccaagctgttcttcctccgcgccaagagaagcggatctggcgtgaagcagaccctgaatttcgacctgctgaagctggctggcgacgtggaatccaacccaggccctactagtatggactggatttggcgcatccttttccttgtcggcgctgctaccggcgcgcattccgggccccagctccagctgcaagagtctggacctggcctggtcaagcctagcgagacactgagcctgacctgtaccgtgtccggcgatagcatcagcagcggcgattactactggggctggatcagacagcctcctggcaaaggactggaatggatcggccacatctactacagcggcgtgacctactacaaccccagcctgaagtccagagtgaccatcagcgtggacaccagccggaaccagttctccctgaagctgtctagcgtgacagccgccgataccgccgtgtactactgcaccagagaggacagcagcaactggcggagtagaggccagggaacactggtcacagttagctctggatccggcggaggcggaagtggaggcggaggatctggcggcggaggctctttcgaacaggtgcaactccaggaatctggccctggcctcgtgaagcccagcgagacactgagcctgacctgtaccgtgtccggcgtgtccctgcctgactatggcgtgtcctggatcagacagccccctggcaagggcctggaatggatcggagtgatttggggcagcgaaaccacctactacaacagctccctgaagtccagagtgaccatctccaaggacaactccaagaaccaggtgtccctgaagctgagcagcgtgacagccgccgacaccgccgtgtattactgcgccaagcactactactacggcggcagctacgctatggactactggggccagggaaccctcgtgaccgtgtctagtacgcgtgaggacctgaagaacgtgttcccacctgaggtggccgtgttcgagcctagcgaggccgagatcagccacacccagaaagccaccctcgtgtgcctggctaccggcttctaccccgaccatgtggaactgtcttggtgggtcaacggcaaagaggtgcacagcggcgtgtgtaccgacccccagccactgaaagaacagcccgccctgaacgacagccggtactgcctgagcagcagactgagagtgtccgccaccttctggcagaacccccggaaccacttcagatgccaggtgcagttctacggcctgagcgagaacgacgagtggacccaggacagagccaagcccgtgacccagatcgtgtctgccgaagcctggggcagagccgatgatgtgattaagatccactggcaggaaaagaagtccaacaccatcctgggcagccaggaaggcaacaccatgaagaccaacgacacctacatgaagttcagctggctgaccgtgcccgagaagtccctggacaaagaacacagatgcatcgtgcggcacgaaaacaacaagaacggcgtggaccaggaaatcatcttcccacccatcaagaccgatgtgattacaatggaccccaaggacaactgctccaaggacgccaacgataccctgctgctccagctgaccaacaccagcgcctactacatgtacttgttgctgctgctgaagtccgtggtgtacttcgccatcatcacatgctgcctgctgcggagaaccgccttctgctgcaacggcgagaagtct

SEQ ID NO: 7866 - DNA, 2997 bp, synthetic construct
  source 1..2997: mol_type = other DNA
atggccttaccagtgaccgccttgctcctgccgctggccttgctgctccacgccgccaggccggaagtgcagctggttgaatctggcggaggactggttcagcctggcggatctctgagactgtcttgtgccgccagcggcttcagcttcagcgacttttggatgagctgggtccgacaggcccctggcaaaggacttgaatgggtcgccacaatcagccaggccggcagcgagaaggactacgtggactctgtgaagggcagattcaccatcagccgggacaacgccaagaagtccctgtacctccagatgaacagcctgagagccgaggacaccgccgtgtactattgtgcctctggcgtgtacagcttcgactacagaggccagggcaccctggtcacagtctcttctggtaccggcggaggcggatctggcggcggaggtagcggtggcggaggatctgaattcgacgagatcgtgctgacacagagccccgccaccctgtcactgtctccaggcgaaagagccaccctgagctgtagcgccagcagcagcgtgtcctacatgcactggtatcagcagaagcccggccaggcccccagactgctgatctacgataccagcaagctggcctccggcatccccgccagattttctggcagcggctccggcaccgacttcaccctgacaatcagcagcctggaacccgaggacgtggccgtgtactactgttttcaaggcagcgtgtaccccttcaccttcggccagggcaccaagctggaaatcaagagactcgagatccagaaccctgatcctgccgtgtaccagctgcgggatagcaagagcagcgacaagagcgtgtgtctgttcaccgacttcgacagccagaccaacgtgtcccagagcaaggactccgacgtgtacatcaccgataagtgcgtgctggacatgcggagcatggacttcaagagcaactccgccgtggcctggtccaacaagtccgatttcgcctgcgccaacgccttcaacaacagcattatccccgaggacacattcttcccaagccccgagagcagcgactccaccgaccacgtgaagcccaaagagacagagaacaccaagcagcccagcaagagctgccacaagcccaaggccatcgtgcacaccgagaaagtgaacatgatgagcctgaccgtgctgggcctgcggatgctgttcgccaaaaccgtggccgtgaacttcctgctgaccgccaagctgttcttcctccgcgccaagagaagcggatctggcgtgaagcagaccctgaatttcgacctgctgaagctggctggcgacgtggaatccaacccaggccctactagtatggactggatttggcgcatccttttccttgtcggcgctgctaccggcgcgcattccgggccccagctccagctgcaagagtctggacctggcctggtcaagcctagcgagacactgagcctgacctgtaccgtgtccggcgatagcatcagcagcggcgattactactggggctggatcagacagcctcctggcaaaggactggaatggatcggccacatctactacagcggcgtgacctactacaaccccagcctgaagtccagagtgaccatcagcgtggacaccagccggaaccagttctccctgaagctgtctagcgtgacagccgccgataccgccgtgtactactgcaccagagaggacagcagcaactggcggagtagaggccagggaacactggtcacagttagctctggatccggcggaggcggaagtggaggcggaggatctggcggcggaggctctttcgaacaggtgcagctccaggaatctggccctggcctcgtgaagcctagccagaccctgagcctgacctgtaccgtgtctggcggcagcatcagcacaagcggcatgggcgtgggctggatcagacagcaccctggcaagggcctggaatggatcggccacatttggtgggacgacgacaagcggtacaaccccgccctgaagtccagagtgaccatcagcgtggacaccagcaagaaccagttcagcctgaagctgagcagcgtgacagccgccgataccgccgtgtattattgcgcccggatggaactgtggtcctactacttcgactactggggccagggaaccctcgtgaccgtgtctagtacgcgtgaggacctgaagaacgtgttcccacctgaggtggccgtgttcgagcctagcgaggccgagatcagccacacccagaaagccaccctcgtgtgcctggctaccggcttctaccccgaccatgtggaactgtcttggtgggtcaacggcaaagaggtgcacagcggcgtgtgtaccgacccccagccactgaaagaacagcccgccctgaacgacagccggtactgcctgagcagcagactgagagtgtccgccaccttctggcagaacccccggaaccacttcagatgccaggtgcagttctacggcctgagcgagaacgacgagtggacccaggacagagccaagcccgtgacccagatcgtgtctgccgaagcctggggcagagccgatgatgtgattaagatccactggcaggaaaagaagtccaacaccatcctgggcagccaggaaggcaacaccatgaagaccaacgacacctacatgaagttcagctggctgaccgtgcccgagaagtccctggacaaagaacacagatgcatcgtgcggcacgaaaacaacaagaacggcgtggaccaggaaatcatcttcccacccatcaagaccgatgtgattacaatggaccccaaggacaactgctccaaggacgccaacgataccctgctgctccagctgaccaacaccagcgcctactacatgtacttgttgctgctgctgaagtccgtggtgtacttcgccatcatcacatgctgcctgctgcggagaaccgccttctgctgcaacggcgagaagtct

SEQ ID NO: 7867 - DNA, 2991 bp, synthetic construct
  source 1..2991: mol_type = other DNA
atggccttaccagtgaccgccttgctcctgccgctggccttgctgctccacgccgccaggccggaagtgcagctggttgaatctggcggaggactggttcagcctggcggatctctgagactgtcttgtgccgccagcggcttcagcttcagcgacttttggatgagctgggtccgacaggcccctggcaaaggacttgaatgggtcgccacaatcagccaggccggcagcgagaaggactacgtggactctgtgaagggcagattcaccatcagccgggacaacgccaagaagtccctgtacctccagatgaacagcctgagagccgaggacaccgccgtgtactattgtgcctctggcgtgtacagcttcgactacagaggccagggcaccctggtcacagtctcttctggtaccggcggaggcggatctggcggcggaggtagcggtggcggaggatctgaattcgactacatccacgtgacacagagccctagcagcctgtccgtgtccatcggcgatagagtgaccatcaactgccagacctctcaaggcgtgggcagcgacctgcactggtatcagcacaaacctggcagagcccctaagctgctgatccaccatgccagctctgtggaagatggcgtgcccagcagattttccggcaccggatttcacaccagcttcaacctgacaatcaacgacctccaggccgacgacatcggcacctactactgtcaagtgctccagagcttcggcagaggcagcagactggatacaaaactcgagatccagaaccctgatcctgccgtgtaccagctgcgggatagcaagagcagcgacaagagcgtgtgtctgttcaccgacttcgacagccagaccaacgtgtcccagagcaaggactccgacgtgtacatcaccgataagtgcgtgctggacatgcggagcatggacttcaagagcaactccgccgtggcctggtccaacaagtccgatttcgcctgcgccaacgccttcaacaacagcattatccccgaggacacattcttcccaagccccgagagcagcgactccaccgaccacgtgaagcccaaagagacagagaacaccaagcagcccagcaagagctgccacaagcccaaggccatcgtgcacaccgagaaagtgaacatgatgagcctgaccgtgctgggcctgcggatgctgttcgccaaaaccgtggccgtgaacttcctgctgaccgccaagctgttcttcctccgcgccaagagaagcggatctggcgtgaagcagaccctgaatttcgacctgctgaagctggctggcgacgtggaatccaacccaggccctactagtatggactggatttggcgcatccttttccttgtcggcgctgctaccggcgcgcattccgggccccagctccagctgcaagagtctggacctggcctggtcaagcctagcgagacactgagcctgacctgtaccgtgtccggcgatagcatcagcagcggcgattactactggggctggatcagacagcctcctggcaaaggactggaatggatcggccacatctactacagcggcgtgacctactacaaccccagcctgaagtccagagtgaccatcagcgtggacaccagccggaaccagttctccctgaagctgtctagcgtgacagccgccgataccgccgtgtactactgcaccagagaggacagcagcaactggcggagtagaggccagggaacactggtcacagttagctctggatccggcggaggcggaagtggaggcggaggatctggcggcggaggctctttcgaaagggcacacctggtgcagtctggcaccgccatgaagaaacctggcgcttccgtcagagtgtcctgtcagacaagcggctacaccttcacagcccacatcctgttctggttcagacaggccccaggcagaggactggaatgggtcggatggatcaagccccagtacggggccgtgaatttcggcggaggcttcagagacagagtgaccctgaccagggacgtgtaccgggaaatcgcctacatggacatccggggcctgaagcctgatgacaccgccgtgtactactgcgccagggatagaagctacggcgacagctcttgggctctcgatgcttggggacagggcacaacagtggtggtgtctgctacgcgtgaggacctgaagaacgtgttcccacctgaggtggccgtgttcgagcctagcgaggccgagatcagccacacccagaaagccaccctcgtgtgcctggctaccggcttctaccccgaccatgtggaactgtcttggtgggtcaacggcaaagaggtgcacagcggcgtgtgtaccgacccccagccactgaaagaacagcccgccctgaacgacagccggtactgcctgagcagcagactgagagtgtccgccaccttctggcagaacccccggaaccacttcagatgccaggtgcagttctacggcctgagcgagaacgacgagtggacccaggacagagccaagcccgtgacccagatcgtgtctgccgaagcctggggcagagccgatgatgtgattaagatccactggcaggaaaagaagtccaacaccatcctgggcagccaggaaggcaacaccatgaagaccaacgacacctacatgaagttcagctggctgaccgtgcccgagaagtccctggacaaagaacacagatgcatcgtgcggcacgaaaacaacaagaacggcgtggaccaggaaatcatcttcccacccatcaagaccgatgtgattacaatggaccccaaggacaactgctccaaggacgccaacgataccctgctgctccagctgaccaacaccagcgcctactacatgtacttgttgctgctgctgaagtccgtggtgtacttcgccatcatcacatgctgcctgctgcggagaaccgccttctgctgcaacggcgagaagtct

SEQ ID NO: 7868 - DNA, 3021 bp, synthetic construct
  source 1..3021: mol_type = other DNA
atggccttaccagtgaccgccttgctcctgccgctggccttgctgctccacgccgccaggccggaagtgcagctggttgaatctggcggaggactggttcagcctggcggatctctgagactgtcttgtgccgccagcggcttcagcttcagcgacttttggatgagctgggtccgacaggcccctggcaaaggacttgaatgggtcgccacaatcagccaggccggcagcgagaaggactacgtggactctgtgaagggcagattcaccatcagccgggacaacgccaagaagtccctgtacctccagatgaacagcctgagagccgaggacaccgccgtgtactattgtgcctctggcgtgtacagcttcgactacagaggccagggcaccctggtcacagtctcttctggtaccggcggaggcggatctggcggcggaggtagcggtggcggaggatctgaattcgacgtgcagatgatccagacccccgatagcctggccgtgtccctgggacagagagccaccatctcttgcagagccagcgagagcgtggacaactacggcatcagcttcatgcactggtatcagcagaagcccggccagagccccaagctgctgatctacagagcctccaacctggaaagcggcatccccgccagattttccggcagcggcagcagaaccgacttcaccctgaccatcaaccccgtggaaaccgacgacgtggcaacctactactgccagcagaacaacaaggacccccccacctttggcggaggcaccaagctggaaatcaagctcgagatccagaaccctgatcctgccgtgtaccagctgcgggatagcaagagcagcgacaagagcgtgtgtctgttcaccgacttcgacagccagaccaacgtgtcccagagcaaggactccgacgtgtacatcaccgataagtgcgtgctggacatgcggagcatggacttcaagagcaactccgccgtggcctggtccaacaagtccgatttcgcctgcgccaacgccttcaacaacagcattatccccgaggacacattcttcccaagccccgagagcagcgactccaccgaccacgtgaagcccaaagagacagagaacaccaagcagcccagcaagagctgccacaagcccaaggccatcgtgcacaccgagaaagtgaacatgatgagcctgaccgtgctgggcctgcggatgctgttcgccaaaaccgtggccgtgaacttcctgctgaccgccaagctgttcttcctccgcgccaagagaagcggatctggcgtgaagcagaccctgaatttcgacctgctgaagctggctggcgacgtggaatccaacccaggccctactagtatggactggatttggcgcatccttttccttgtcggcgctgctaccggcgcgcattccgggccccagctccagctgcaagagtctggacctggcctggtcaagcctagcgagacactgagcctgacctgtaccgtgtccggcgatagcatcagcagcggcgattactactggggctggatcagacagcctcctggcaaaggactggaatggatcggccacatctactacagcggcgtgacctactacaaccccagcctgaagtccagagtgaccatcagcgtggacaccagccggaaccagttctccctgaagctgtctagcgtgacagccgccgataccgccgtgtactactgcaccagagaggacagcagcaactggcggagtagaggccagggaacactggtcacagttagctctggatccggcggaggcggaagtggaggcggaggatctggcggcggaggctctttcgaagggggaggcggctctcaggtgcaactccagcagtctggcgctgagcttgtgaagcctggggccagcgtgaagattagctgcaaggccagcggctacgccttcagcagctactggatgaactgggtcaagcagcggcctggcaagggcctggaatggatcggccaaatctaccccggcgacggcgacaccacctacaacggcaagttcaagggcaaggccaccctgacagccgacaagagcagcagcaccgtgtacatgcaactgaacagcctgaccagcgaggacagcgccgtgtacttctgcgtgcggtactactacggcagctccggctacttcgactattggggccagggcaccacactgaccgtgtcctctacgcgtgaggacctgaagaacgtgttcccacctgaggtggccgtgttcgagcctagcgaggccgagatcagccacacccagaaagccaccctcgtgtgcctggctaccggcttctaccccgaccatgtggaactgtcttggtgggtcaacggcaaagaggtgcacagcggcgtgtgtaccgacccccagccactgaaagaacagcccgccctgaacgacagccggtactgcctgagcagcagactgagagtgtccgccaccttctggcagaacccccggaaccacttcagatgccaggtgcagttctacggcctgagcgagaacgacgagtggacccaggacagagccaagcccgtgacccagatcgtgtctgccgaagcctggggcagagccgatgatgtgattaagatccactggcaggaaaagaagtccaacaccatcctgggcagccaggaaggcaacaccatgaagaccaacgacacctacatgaagttcagctggctgaccgtgcccgagaagtccctggacaaagaacacagatgcatcgtgcggcacgaaaacaacaagaacggcgtggaccaggaaatcatcttcccacccatcaagaccgatgtgattacaatggaccccaaggacaactgctccaaggacgccaacgataccctgctgctccagctgaccaacaccagcgcctactacatgtacttgttgctgctgctgaagtccgtggtgtacttcgccatcatcacatgctgcctgctgcggagaaccgccttctgctgcaacggcgagaagtct

SEQ ID NO: 7869 - DNA, 2994 bp, synthetic construct
  source 1..2994: mol_type = other DNA
atggccttaccagtgaccgccttgctcctgccgctggccttgctgctccacgccgccaggccggaagtgcagctggttgaatctggcggaggactggttcagcctggcggatctctgagactgtcttgtgccgccagcggcttcagcttcagcgacttttggatgagctgggtccgacaggcccctggcaaaggacttgaatgggtcgccacaatcagccaggccggcagcgagaaggactacgtggactctgtgaagggcagattcaccatcagccgggacaacgccaagaagtccctgtacctccagatgaacagcctgagagccgaggacaccgccgtgtactattgtgcctctggcgtgtacagcttcgactacagaggccagggcaccctggtcacagtctcttctggtaccggcggaggcggatctggcggcggaggtagcggtggcggaggatctgaattcgacgtgcagatgatccagacccccagcagcctgtctgccagcctgggcgatagagtgaccatcagctgtcgggccagccaggacatcggcaactacctgaactggtatcagcagaaacccgacggcaccgtgaagctgctgatctactacaccagcagactgcacagcggcgtgcccagcagattttctggcagcggctctggcaccgagtacagcctgaccatctccaacctggaacaggaagatattgctacctacttctgtcagcaaggcagcgccctgccccctacatttggcggcggaacaaagctggaaatcaacctcgagatccagaaccctgatcctgccgtgtaccagctgcgggatagcaagagcagcgacaagagcgtgtgtctgttcaccgacttcgacagccagaccaacgtgtcccagagcaaggactccgacgtgtacatcaccgataagtgcgtgctggacatgcggagcatggacttcaagagcaactccgccgtggcctggtccaacaagtccgatttcgcctgcgccaacgccttcaacaacagcattatccccgaggacacattcttcccaagccccgagagcagcgactccaccgaccacgtgaagcccaaagagacagagaacaccaagcagcccagcaagagctgccacaagcccaaggccatcgtgcacaccgagaaagtgaacatgatgagcctgaccgtgctgggcctgcggatgctgttcgccaaaaccgtggccgtgaacttcctgctgaccgccaagctgttcttcctccgcgccaagagaagcggatctggcgtgaagcagaccctgaatttcgacctgctgaagctggctggcgacgtggaatccaacccaggccctactagtatggactggatttggcgcatccttttccttgtcggcgctgctaccggcgcgcattccgggccccagctccagctgcaagagtctggacctggcctggtcaagcctagcgagacactgagcctgacctgtaccgtgtccggcgatagcatcagcagcggcgattactactggggctggatcagacagcctcctggcaaaggactggaatggatcggccacatctactacagcggcgtgacctactacaaccccagcctgaagtccagagtgaccatcagcgtggacaccagccggaaccagttctccctgaagctgtctagcgtgacagccgccgataccgccgtgtactactgcaccagagaggacagcagcaactggcggagtagaggccagggaacactggtcacagttagctctggatccggcggaggcggaagtggaggcggaggatctggcggcggaggctctttcgaagctctccagctccagcagtctggcgcagaactcgtgcggcctggcgcttctgtgaccctgagctgtaaagccagcggctacaccttcaccgactacgagatgcactgggtcaagcagacccctgtgcacggcctggaatggatcggagccatcgaccctgagacaggcggcaccgcctacaaccagaagttcgagggcaaggccatcctgaccgccgacaagagcagcagcacagcctacatggaactgcggagcctgacctccgaggacagccccgtgtactactgtgccagacggcggtactacggcagcagctccttcgactattggggccagggcaccaccctgaccgtgtctagtacgcgtgaggacctgaagaacgtgttcccacctgaggtggccgtgttcgagcctagcgaggccgagatcagccacacccagaaagccaccctcgtgtgcctggctaccggcttctaccccgaccatgtggaactgtcttggtgggtcaacggcaaagaggtgcacagcggcgtgtgtaccgacccccagccactgaaagaacagcccgccctgaacgacagccggtactgcctgagcagcagactgagagtgtccgccaccttctggcagaacccccggaaccacttcagatgccaggtgcagttctacggcctgagcgagaacgacgagtggacccaggacagagccaagcccgtgacccagatcgtgtctgccgaagcctggggcagagccgatgatgtgattaagatccactggcaggaaaagaagtccaacaccatcctgggcagccaggaaggcaacaccatgaagaccaacgacacctacatgaagttcagctggctgaccgtgcccgagaagtccctggacaaagaacacagatgcatcgtgcggcacgaaaacaacaagaacggcgtggaccaggaaatcatcttcccacccatcaagaccgatgtgattacaatggaccccaaggacaactgctccaaggacgccaacgataccctgctgctccagctgaccaacaccagcgcctactacatgtacttgttgctgctgctgaagtccgtggtgtacttcgccatcatcacatgctgcctgctgcggagaaccgccttctgctgcaacggcgagaagtct

SEQ ID NO: 7870 - DNA, 3006 bp, synthetic construct
  source 1..3006: mol_type = other DNA
atggccttaccagtgaccgccttgctcctgccgctggccttgctgctccacgccgccaggccggaagtgcagctggttgaatctggcggaggactggttcagcctggcggatctctgagactgtcttgtgccgccagcggcttcagcttcagcgacttttggatgagctgggtccgacaggcccctggcaaaggacttgaatgggtcgccacaatcagccaggccggcagcgagaaggactacgtggactctgtgaagggcagattcaccatcagccgggacaacgccaagaagtccctgtacctccagatgaacagcctgagagccgaggacaccgccgtgtactattgtgcctctggcgtgtacagcttcgactacagaggccagggcaccctggtcacagtctcttctggtaccggcggaggcggatctggcggcggaggtagcggtggcggaggatctgaattcgacatcgtcctgacccagtccccagccagcctggcggtgtccctgggtcaacgagctaccatttcctgcagagcctctaagtccgtatccacttccggctatagttacctgcattggtaccaacagaaaccagggcagccacccaagctgctcatctatctggcctcaaacctggagtccggcgtgcccgccagattctccggaagtgggagcggcaccgactttacattgaacatccacccagtcgaagaggaagatgctgccacttattactgtcagcactccagggagctgccatttacatttggctctggcacaaaactggagatcaaactcgagatccagaaccctgatcctgccgtgtaccagctgcgggatagcaagagcagcgacaagagcgtgtgtctgttcaccgacttcgacagccagaccaacgtgtcccagagcaaggactccgacgtgtacatcaccgataagtgcgtgctggacatgcggagcatggacttcaagagcaactccgccgtggcctggtccaacaagtccgatttcgcctgcgccaacgccttcaacaacagcattatccccgaggacacattcttcccaagccccgagagcagcgactccaccgaccacgtgaagcccaaagagacagagaacaccaagcagcccagcaagagctgccacaagcccaaggccatcgtgcacaccgagaaagtgaacatgatgagcctgaccgtgctgggcctgcggatgctgttcgccaaaaccgtggccgtgaacttcctgctgaccgccaagctgttcttcctccgcgccaagagaagcggatctggcgtgaagcagaccctgaatttcgacctgctgaagctggctggcgacgtggaatccaacccaggccctactagtatggactggatttggcgcatccttttccttgtcggcgctgctaccggcgcgcattccgggccccagctccagctgcaagagtctggacctggcctggtcaagcctagcgagacactgagcctgacctgtaccgtgtccggcgatagcatcagcagcggcgattactactggggctggatcagacagcctcctggcaaaggactggaatggatcggccacatctactacagcggcgtgacctactacaaccccagcctgaagtccagagtgaccatcagcgtggacaccagccggaaccagttctccctgaagctgtctagcgtgacagccgccgataccgccgtgtactactgcaccagagaggacagcagcaactggcggagtagaggccagggaacactggtcacagttagctctggatccggcggaggcggaagtggaggcggaggatctggcggcggaggctctttcgaacaggttcagctggtcgagtccgggggaggtctggtacagccgggtggcagcctcaagctgtcatgtgccgcatctggttttgactttagcaggtattggatgagctgggtccgccaggccccgggcaagggacttgagtggattggagaaataaaccctacttccagcacaatcaacttcacaccttctttgaaagataaggtttttatctctcgggataacgctaaaaacacactgtacttgcagatgtctaaggtgcgaagcgaagacaccgccctctattattgcgcccggggtaattactaccgctatggggatgcgatggactattgggggcaaggtacctccgtcacggtctcaacgcgtgaggacctgaagaacgtgttcccacctgaggtggccgtgttcgagcctagcgaggccgagatcagccacacccagaaagccaccctcgtgtgcctggctaccggcttctaccccgaccatgtggaactgtcttggtgggtcaacggcaaagaggtgcacagcggcgtgtgtaccgacccccagccactgaaagaacagcccgccctgaacgacagccggtactgcctgagcagcagactgagagtgtccgccaccttctggcagaacccccggaaccacttcagatgccaggtgcagttctacggcctgagcgagaacgacgagtggacccaggacagagccaagcccgtgacccagatcgtgtctgccgaagcctggggcagagccgatgatgtgattaagatccactggcaggaaaagaagtccaacaccatcctgggcagccaggaaggcaacaccatgaagaccaacgacacctacatgaagttcagctggctgaccgtgcccgagaagtccctggacaaagaacacagatgcatcgtgcggcacgaaaacaacaagaacggcgtggaccaggaaatcatcttcccacccatcaagaccgatgtgattacaatggaccccaaggacaactgctccaaggacgccaacgataccctgctgctccagctgaccaacaccagcgcctactacatgtacttgttgctgctgctgaagtccgtggtgtacttcgccatcatcacatgctgcctgctgcggagaaccgccttctgctgcaacggcgagaagtct

SEQ ID NO: 7871 - DNA, 3000 bp, synthetic construct
  source 1..3000: mol_type = other DNA
atggccttaccagtgaccgccttgctcctgccgctggccttgctgctccacgccgccaggccggaagtgcagctggttgaatctggcggaggactggttcagcctggcggatctctgagactgtcttgtgccgccagcggcttcagcttcagcgacttttggatgagctgggtccgacaggcccctggcaaaggacttgaatgggtcgccacaatcagccaggccggcagcgagaaggactacgtggactctgtgaagggcagattcaccatcagccgggacaacgccaagaagtccctgtacctccagatgaacagcctgagagccgaggacaccgccgtgtactattgtgcctctggcgtgtacagcttcgactacagaggccagggcaccctggtcacagtctcttctggtaccggcggaggcggatctggcggcggaggtagcggtggcggaggatctgaattcgacatccagatgacccagagccctagctcactgagcgccagcgtgggcgacagggtgaccattacctgctccgccagccaggacatcagcaactacctgaactggtaccagcagaagcccggcaaggcccccaagctgctgatctactacacctccaacctgcactccggcgtgcccagcaggttcagcggaagcggcagcggcaccgatttcaccctgaccatctccagcctgcagcccgaggacttcgccacctactactgccagcagtacaggaagctcccctggactttcggccagggcaccaaactggagatcaagcgtctcgagatccagaaccctgatcctgccgtgtaccagctgcgggatagcaagagcagcgacaagagcgtgtgtctgttcaccgacttcgacagccagaccaacgtgtcccagagcaaggactccgacgtgtacatcaccgataagtgcgtgctggacatgcggagcatggacttcaagagcaactccgccgtggcctggtccaacaagtccgatttcgcctgcgccaacgccttcaacaacagcattatccccgaggacacattcttcccaagccccgagagcagcgactccaccgaccacgtgaagcccaaagagacagagaacaccaagcagcccagcaagagctgccacaagcccaaggccatcgtgcacaccgagaaagtgaacatgatgagcctgaccgtgctgggcctgcggatgctgttcgccaaaaccgtggccgtgaacttcctgctgaccgccaagctgttcttcctccgcgccaagagaagcggatctggcgtgaagcagaccctgaatttcgacctgctgaagctggctggcgacgtggaatccaacccaggccctactagtatggactggatttggcgcatccttttccttgtcggcgctgctaccggcgcgcattccgggccccagctccagctgcaagagtctggacctggcctggtcaagcctagcgagacactgagcctgacctgtaccgtgtccggcgatagcatcagcagcggcgattactactggggctggatcagacagcctcctggcaaaggactggaatggatcggccacatctactacagcggcgtgacctactacaaccccagcctgaagtccagagtgaccatcagcgtggacaccagccggaaccagttctccctgaagctgtctagcgtgacagccgccgataccgccgtgtactactgcaccagagaggacagcagcaactggcggagtagaggccagggaacactggtcacagttagctctggatccggcggaggcggaagtggaggcggaggatctggcggcggaggctctttcgaacaggtgcagctggtccagagcggcgccgaagtgaagaagcccggcagctccgtgaaagtgagctgcaaggccagcggcggcaccttcagcaactactggatgcactgggtgaggcaggcccccggacagggcctggagtggatgggcgccacctacaggggccacagcgacacctactacaaccagaagttcaagggccgggtgaccatcaccgccgacaagagcaccagcaccgcctacatggaactgagcagcctcaggagcgaggacaccgctgtgtattactgcgccaggggcgccatctacgacggctacgacgtgctggacaactggggccagggcacactggtgaccgtgtccagcacgcgtgaggacctgaagaacgtgttcccacctgaggtggccgtgttcgagcctagcgaggccgagatcagccacacccagaaagccaccctcgtgtgcctggctaccggcttctaccccgaccatgtggaactgtcttggtgggtcaacggcaaagaggtgcacagcggcgtgtgtaccgacccccagccactgaaagaacagcccgccctgaacgacagccggtactgcctgagcagcagactgagagtgtccgccaccttctggcagaacccccggaaccacttcagatgccaggtgcagttctacggcctgagcgagaacgacgagtggacccaggacagagccaagcccgtgacccagatcgtgtctgccgaagcctggggcagagccgatgatgtgattaagatccactggcaggaaaagaagtccaacaccatcctgggcagccaggaaggcaacaccatgaagaccaacgacacctacatgaagttcagctggctgaccgtgcccgagaagtccctggacaaagaacacagatgcatcgtgcggcacgaaaacaacaagaacggcgtggaccaggaaatcatcttcccacccatcaagaccgatgtgattacaatggaccccaaggacaactgctccaaggacgccaacgataccctgctgctccagctgaccaacaccagcgcctactacatgtacttgttgctgctgctgaagtccgtggtgtacttcgccatcatcacatgctgcctgctgcggagaaccgccttctgctgcaacggcgagaagtct

SEQ ID NO: 7872 - DNA, 3000 bp, synthetic construct
  source 1..3000: mol_type = other DNA
atggccttaccagtgaccgccttgctcctgccgctggccttgctgctccacgccgccaggccggaagtgcagctggttgaatctggcggaggactggttcagcctggcggatctctgagactgtcttgtgccgccagcggcttcagcttcagcgacttttggatgagctgggtccgacaggcccctggcaaaggacttgaatgggtcgccacaatcagccaggccggcagcgagaaggactacgtggactctgtgaagggcagattcaccatcagccgggacaacgccaagaagtccctgtacctccagatgaacagcctgagagccgaggacaccgccgtgtactattgtgcctctggcgtgtacagcttcgactacagaggccagggcaccctggtcacagtctcttctggtaccggcggaggcggatctggcggcggaggtagcggtggcggaggatctgaattcgacatcgtgctgacacagagccctgccaccctgtctctgagccctggcgatagagccaccatcagctgtagagccagcgagagcgtgaccatcctgggcagccacctgatctactggtatcagcagaagcccggccagccccccagactgctgattcagctggcctccaatgtgcagaccggcgtgccagccagattttccggcagcggcagcagaaccgacttcaccctgaccatcagcagcgtggaacccgaggacttcgccgtgtactactgcctccagagccggaccatccccagaacattcggccagggcaccaagctggaaatcaagagactcgagatccagaaccctgatcctgccgtgtaccagctgcgggatagcaagagcagcgacaagagcgtgtgtctgttcaccgacttcgacagccagaccaacgtgtcccagagcaaggactccgacgtgtacatcaccgataagtgcgtgctggacatgcggagcatggacttcaagagcaactccgccgtggcctggtccaacaagtccgatttcgcctgcgccaacgccttcaacaacagcattatccccgaggacacattcttcccaagccccgagagcagcgactccaccgaccacgtgaagcccaaagagacagagaacaccaagcagcccagcaagagctgccacaagcccaaggccatcgtgcacaccgagaaagtgaacatgatgagcctgaccgtgctgggcctgcggatgctgttcgccaaaaccgtggccgtgaacttcctgctgaccgccaagctgttcttcctccgcgccaagagaagcggatctggcgtgaagcagaccctgaatttcgacctgctgaagctggctggcgacgtggaatccaacccaggccctactagtatggactggatttggcgcatccttttccttgtcggcgctgctaccggcgcgcattccgggccccagctccagctgcaagagtctggacctggcctggtcaagcctagcgagacactgagcctgacctgtaccgtgtccggcgatagcatcagcagcggcgattactactggggctggatcagacagcctcctggcaaaggactggaatggatcggccacatctactacagcggcgtgacctactacaaccccagcctgaagtccagagtgaccatcagcgtggacaccagccggaaccagttctccctgaagctgtctagcgtgacagccgccgataccgccgtgtactactgcaccagagaggacagcagcaactggcggagtagaggccagggaacactggtcacagttagctctggatccggcggaggcggaagtggaggcggaggatctggcggcggaggctctttcgaacaggtgcagctggtgcagtctggccccgaagtgaagaaacccggcgagtccgtgaagatcagctgcaaggccagcggctacaccttccggcactacagcatgaactgggtcaagcaggccccaggccagggcctgaagtggatgggcagaatcaacaccgagagcggcgtgcccatctacgccgacgacttcaagggccggttcagcttcaccgtggacaccagcgccagcaccgcctacctggaaatctccagcctgaccagcgaggataccgccgtgtatttctgctccaacgactacctgtacagcctggatttctggggccagggaaccaccctgacagtgtcctctacgcgtgaggacctgaagaacgtgttcccacctgaggtggccgtgttcgagcctagcgaggccgagatcagccacacccagaaagccaccctcgtgtgcctggctaccggcttctaccccgaccatgtggaactgtcttggtgggtcaacggcaaagaggtgcacagcggcgtgtgtaccgacccccagccactgaaagaacagcccgccctgaacgacagccggtactgcctgagcagcagactgagagtgtccgccaccttctggcagaacccccggaaccacttcagatgccaggtgcagttctacggcctgagcgagaacgacgagtggacccaggacagagccaagcccgtgacccagatcgtgtctgccgaagcctggggcagagccgatgatgtgattaagatccactggcaggaaaagaagtccaacaccatcctgggcagccaggaaggcaacaccatgaagaccaacgacacctacatgaagttcagctggctgaccgtgcccgagaagtccctggacaaagaacacagatgcatcgtgcggcacgaaaacaacaagaacggcgtggaccaggaaatcatcttcccacccatcaagaccgatgtgattacaatggaccccaaggacaactgctccaaggacgccaacgataccctgctgctccagctgaccaacaccagcgcctactacatgtacttgttgctgctgctgaagtccgtggtgtacttcgccatcatcacatgctgcctgctgcggagaaccgccttctgctgcaacggcgagaagtct

SEQ ID NO: 7873 - DNA, 3003 bp, synthetic construct
  source 1..3003: mol_type = other DNA
atggccttaccagtgaccgccttgctcctgccgctggccttgctgctccacgccgccaggccggaagtgcagctggttgaatctggcggaggactggttcagcctggcggatctctgagactgtcttgtgccgccagcggcttcagcttcagcgacttttggatgagctgggtccgacaggcccctggcaaaggacttgaatgggtcgccacaatcagccaggccggcagcgagaaggactacgtggactctgtgaagggcagattcaccatcagccgggacaacgccaagaagtccctgtacctccagatgaacagcctgagagccgaggacaccgccgtgtactattgtgcctctggcgtgtacagcttcgactacagaggccagggcaccctggtcacagtctcttctggtaccggcggaggcggatctggcggcggaggtagcggtggcggaggatctgaattccagtctgtgctgacacagcctcctagtgtgtctggcgctcctggacagagagtgaccatcagctgtacaggcagcagcagcaatatcggagccggctttgacgtgcactggtatcagcagctgcctggcacagcccctaaactgctgatctacggcaacagcaacagacccagcggcgtgcccgatagattttccggctctaagagcggcacaagcgccagcctggctattactggactccaggccgaggacgaggccgactactactgtcagagctacgacagcagcctgagcggctacgttttcggcaccggcaccaaagtgacagtgcttggtctcgagatccagaaccctgatcctgccgtgtaccagctgcgggatagcaagagcagcgacaagagcgtgtgtctgttcaccgacttcgacagccagaccaacgtgtcccagagcaaggactccgacgtgtacatcaccgataagtgcgtgctggacatgcggagcatggacttcaagagcaactccgccgtggcctggtccaacaagtccgatttcgcctgcgccaacgccttcaacaacagcattatccccgaggacacattcttcccaagccccgagagcagcgactccaccgaccacgtgaagcccaaagagacagagaacaccaagcagcccagcaagagctgccacaagcccaaggccatcgtgcacaccgagaaagtgaacatgatgagcctgaccgtgctgggcctgcggatgctgttcgccaaaaccgtggccgtgaacttcctgctgaccgccaagctgttcttcctccgcgccaagagaagcggatctggcgtgaagcagaccctgaatttcgacctgctgaagctggctggcgacgtggaatccaacccaggccctactagtatggactggatttggcgcatccttttccttgtcggcgctgctaccggcgcgcattccgggccccagctccagctgcaagagtctggacctggcctggtcaagcctagcgagacactgagcctgacctgtaccgtgtccggcgatagcatcagcagcggcgattactactggggctggatcagacagcctcctggcaaaggactggaatggatcggccacatctactacagcggcgtgacctactacaaccccagcctgaagtccagagtgaccatcagcgtggacaccagccggaaccagttctccctgaagctgtctagcgtgacagccgccgataccgccgtgtactactgcaccagagaggacagcagcaactggcggagtagaggccagggaacactggtcacagttagctctggatccggcggaggcggaagtggaggcggaggatctggcggcggaggctctttcgaacaagttcagctggttcagagcggagccgaagtgaagaaacctggggcctctgtgaaggtgtcctgcaaggcttccggctacacctttaccgattactacatgcactgggtccgacaggctcccggccaaagacttgaatggatgggctggatcaaccccaacagcggcggcacaaattacgcccagaagttccaggaccggatcaccgtgaccagagacaccagctccaacaccggctacatggaactgacccggctgagatccgatgacaccgccgtgtactactgcgctagaagcccttactccggcgtgctggataagtggggacagggcacactggtcaccgtgtcatctacgcgtgaggacctgaagaacgtgttcccacctgaggtggccgtgttcgagcctagcgaggccgagatcagccacacccagaaagccaccctcgtgtgcctggctaccggcttctaccccgaccatgtggaactgtcttggtgggtcaacggcaaagaggtgcacagcggcgtgtgtaccgacccccagccactgaaagaacagcccgccctgaacgacagccggtactgcctgagcagcagactgagagtgtccgccaccttctggcagaacccccggaaccacttcagatgccaggtgcagttctacggcctgagcgagaacgacgagtggacccaggacagagccaagcccgtgacccagatcgtgtctgccgaagcctggggcagagccgatgatgtgattaagatccactggcaggaaaagaagtccaacaccatcctgggcagccaggaaggcaacaccatgaagaccaacgacacctacatgaagttcagctggctgaccgtgcccgagaagtccctggacaaagaacacagatgcatcgtgcggcacgaaaacaacaagaacggcgtggaccaggaaatcatcttcccacccatcaagaccgatgtgattacaatggaccccaaggacaactgctccaaggacgccaacgataccctgctgctccagctgaccaacaccagcgcctactacatgtacttgttgctgctgctgaagtccgtggtgtacttcgccatcatcacatgctgcctgctgcggagaaccgccttctgctgcaacggcgagaagtct

SEQ ID NO: 7874 - DNA, 2994 bp, synthetic construct
  source 1..2994: mol_type = other DNA
atggccttaccagtgaccgccttgctcctgccgctggccttgctgctccacgccgccaggccggaagtgcagctggttgaatctggcggaggactggttcagcctggcggatctctgagactgtcttgtgccgccagcggcttcagcttcagcgacttttggatgagctgggtccgacaggcccctggcaaaggacttgaatgggtcgccacaatcagccaggccggcagcgagaaggactacgtggactctgtgaagggcagattcaccatcagccgggacaacgccaagaagtccctgtacctccagatgaacagcctgagagccgaggacaccgccgtgtactattgtgcctctggcgtgtacagcttcgactacagaggccagggcaccctggtcacagtctcttctggtaccggcggaggcggatctggcggcggaggtagcggtggcggaggatctgaattccaggctgttctgacacagcctccatctgcctctggcacacctggacagagagtgaccatctcctgtagcggcagcagcagcaacatcggcagctacaccgtgtcctggtatcagcagctccctggaacagcccctaagttcctgatctacagcaacaaccagcggcctagcggcgtgcccgatagattttctggcagcaagagcggcacaagcgccagcctggctatttctggactccagtctgaggacgaggccgactactattgtgccgcctgggacgatagcctgaacggctatgtgtttggcaccggcaccaaagtgacagtgcttggtctcgagatccagaaccctgatcctgccgtgtaccagctgcgggatagcaagagcagcgacaagagcgtgtgtctgttcaccgacttcgacagccagaccaacgtgtcccagagcaaggactccgacgtgtacatcaccgataagtgcgtgctggacatgcggagcatggacttcaagagcaactccgccgtggcctggtccaacaagtccgatttcgcctgcgccaacgccttcaacaacagcattatccccgaggacacattcttcccaagccccgagagcagcgactccaccgaccacgtgaagcccaaagagacagagaacaccaagcagcccagcaagagctgccacaagcccaaggccatcgtgcacaccgagaaagtgaacatgatgagcctgaccgtgctgggcctgcggatgctgttcgccaaaaccgtggccgtgaacttcctgctgaccgccaagctgttcttcctccgcgccaagagaagcggatctggcgtgaagcagaccctgaatttcgacctgctgaagctggctggcgacgtggaatccaacccaggccctactagtatggactggatttggcgcatccttttccttgtcggcgctgctaccggcgcgcattccgggccccagctccagctgcaagagtctggacctggcctggtcaagcctagcgagacactgagcctgacctgtaccgtgtccggcgatagcatcagcagcggcgattactactggggctggatcagacagcctcctggcaaaggactggaatggatcggccacatctactacagcggcgtgacctactacaaccccagcctgaagtccagagtgaccatcagcgtggacaccagccggaaccagttctccctgaagctgtctagcgtgacagccgccgataccgccgtgtactactgcaccagagaggacagcagcaactggcggagtagaggccagggaacactggtcacagttagctctggatccggcggaggcggaagtggaggcggaggatctggcggcggaggctctttcgaagttcaactggttcagagcggagccgaagtgaagaagcctggcgagagcctgaagattagctgcaaaggcagcggctacgacttcaccacctactggatcggctgggtccgacagatgcctggcaaaggactggaatggatgggcatcatctaccccggcgacagcgacaccagatacagccctagcgttagaggccgcgtgaccatcagcgccgacaagtctatcaacaccgcctacctccagtggtccagcctggaagcctctgacaccgccatgtactactgcgccagaatgtggaccttcagccaggatggatggggccagggaacactggtcacagtgtcatctacgcgtgaggacctgaagaacgtgttcccacctgaggtggccgtgttcgagcctagcgaggccgagatcagccacacccagaaagccaccctcgtgtgcctggctaccggcttctaccccgaccatgtggaactgtcttggtgggtcaacggcaaagaggtgcacagcggcgtgtgtaccgacccccagccactgaaagaacagcccgccctgaacgacagccggtactgcctgagcagcagactgagagtgtccgccaccttctggcagaacccccggaaccacttcagatgccaggtgcagttctacggcctgagcgagaacgacgagtggacccaggacagagccaagcccgtgacccagatcgtgtctgccgaagcctggggcagagccgatgatgtgattaagatccactggcaggaaaagaagtccaacaccatcctgggcagccaggaaggcaacaccatgaagaccaacgacacctacatgaagttcagctggctgaccgtgcccgagaagtccctggacaaagaacacagatgcatcgtgcggcacgaaaacaacaagaacggcgtggaccaggaaatcatcttcccacccatcaagaccgatgtgattacaatggaccccaaggacaactgctccaaggacgccaacgataccctgctgctccagctgaccaacaccagcgcctactacatgtacttgttgctgctgctgaagtccgtggtgtacttcgccatcatcacatgctgcctgctgcggagaaccgccttctgctgcaacggcgagaagtct

SEQ ID NO: 7875 - DNA, 3003 bp, synthetic construct
  source 1..3003: mol_type = other DNA
atggccttaccagtgaccgccttgctcctgccgctggccttgctgctccacgccgccaggccggaagtgcagctggttgaatctggcggaggactggttcagcctggcggatctctgagactgtcttgtgccgccagcggcttcagcttcagcgacttttggatgagctgggtccgacaggcccctggcaaaggacttgaatgggtcgccacaatcagccaggccggcagcgagaaggactacgtggactctgtgaagggcagattcaccatcagccgggacaacgccaagaagtccctgtacctccagatgaacagcctgagagccgaggacaccgccgtgtactattgtgcctctggcgtgtacagcttcgactacagaggccagggcaccctggtcacagtctcttctggtaccggcggaggcggatctggcggcggaggtagcggtggcggaggatctgaattcgacatcgtgatgacccagagccccgatagcctggccgtgtctctgggagagagagccaccatcaactgcaagagcagccagagcatcctgtacagcagcaaccagaagaactacctggcctggtatcagcagaagcccggccagagccctaagctgctgatctactgggccagcaccagagaaagcggcgtgcccgatagattcagcggcagcggctctggcaccgacttcaccctgaccatcagttctcttcaggccgaggacgtggccgtgtactactgccaccagtacatcagctcctacaccttcggccagggcaccaagctggaaatcaagctcgagatccagaaccctgatcctgccgtgtaccagctgcgggatagcaagagcagcgacaagagcgtgtgtctgttcaccgacttcgacagccagaccaacgtgtcccagagcaaggactccgacgtgtacatcaccgataagtgcgtgctggacatgcggagcatggacttcaagagcaactccgccgtggcctggtccaacaagtccgatttcgcctgcgccaacgccttcaacaacagcattatccccgaggacacattcttcccaagccccgagagcagcgactccaccgaccacgtgaagcccaaagagacagagaacaccaagcagcccagcaagagctgccacaagcccaaggccatcgtgcacaccgagaaagtgaacatgatgagcctgaccgtgctgggcctgcggatgctgttcgccaaaaccgtggccgtgaacttcctgctgaccgccaagctgttcttcctccgcgccaagagaagcggatctggcgtgaagcagaccctgaatttcgacctgctgaagctggctggcgacgtggaatccaacccaggccctactagtatggactggatttggcgcatccttttccttgtcggcgctgctaccggcgcgcattccgggccccagctccagctgcaagagtctggacctggcctggtcaagcctagcgagacactgagcctgacctgtaccgtgtccggcgatagcatcagcagcggcgattactactggggctggatcagacagcctcctggcaaaggactggaatggatcggccacatctactacagcggcgtgacctactacaaccccagcctgaagtccagagtgaccatcagcgtggacaccagccggaaccagttctccctgaagctgtctagcgtgacagccgccgataccgccgtgtactactgcaccagagaggacagcagcaactggcggagtagaggccagggaacactggtcacagttagctctggatccggcggaggcggaagtggaggcggaggatctggcggcggaggctctttcgaacaggtgcagctggtgcagtctggcgctgaagtgaagaaacctggggccagcgtgaaggtgtcctgcaaggccagcggctacacctttgccagccagtggatgcactggatgagacaggcccctggacagggcctggaatggatcggctggatcaaccccggcaacgtgaacaccaagtacaacgagaagttcaagggcagagccaccctgacagtggacaccagcaccaacaccgcctacatggaactgagcagcctgcggagcgaggacaccgccgtgtattattgcgccagaagcacctggtacagacccctggattattggggccagggaacccttgtgaccgtgtcctctacgcgtgaggacctgaagaacgtgttcccacctgaggtggccgtgttcgagcctagcgaggccgagatcagccacacccagaaagccaccctcgtgtgcctggctaccggcttctaccccgaccatgtggaactgtcttggtgggtcaacggcaaagaggtgcacagcggcgtgtgtaccgacccccagccactgaaagaacagcccgccctgaacgacagccggtactgcctgagcagcagactgagagtgtccgccaccttctggcagaacccccggaaccacttcagatgccaggtgcagttctacggcctgagcgagaacgacgagtggacccaggacagagccaagcccgtgacccagatcgtgtctgccgaagcctggggcagagccgatgatgtgattaagatccactggcaggaaaagaagtccaacaccatcctgggcagccaggaaggcaacaccatgaagaccaacgacacctacatgaagttcagctggctgaccgtgcccgagaagtccctggacaaagaacacagatgcatcgtgcggcacgaaaacaacaagaacggcgtggaccaggaaatcatcttcccacccatcaagaccgatgtgattacaatggaccccaaggacaactgctccaaggacgccaacgataccctgctgctccagctgaccaacaccagcgcctactacatgtacttgttgctgctgctgaagtccgtggtgtacttcgccatcatcacatgctgcctgctgcggagaaccgccttctgctgcaacggcgagaagtct

SEQ ID NO: 7876 - DNA, 3003 bp, synthetic construct
  source 1..3003: mol_type = other DNA
atggccttaccagtgaccgccttgctcctgccgctggccttgctgctccacgccgccaggccggaagtgcagctggttgaatctggcggaggactggttcagcctggcggatctctgagactgtcttgtgccgccagcggcttcagcttcagcgacttttggatgagctgggtccgacaggcccctggcaaaggacttgaatgggtcgccacaatcagccaggccggcagcgagaaggactacgtggactctgtgaagggcagattcaccatcagccgggacaacgccaagaagtccctgtacctccagatgaacagcctgagagccgaggacaccgccgtgtactattgtgcctctggcgtgtacagcttcgactacagaggccagggcaccctggtcacagtctcttctggtaccggcggaggcggatctggcggcggaggtagcggtggcggaggatctgaattcgaccacatcgtgctgacccagagccctagcagcctgtctgccagcctgggcgacagagtgaccatcagctgtagagccagccaggacatcagcacctacctgaactggtatcagcagaaacccgacggcaccgtgaagctgctgatcttctacaccagcagactgcacgccggggtgcccagcagattttctggcagcggctctggcacccaccacagcctgaccatctccaacctggaacaggaagatattgctacctacttctgtcagcaaggcaacagcctgcccttcaccttcggcagcggcaccaagctggaaatcaagagactcgagatccagaaccctgatcctgccgtgtaccagctgcgggatagcaagagcagcgacaagagcgtgtgtctgttcaccgacttcgacagccagaccaacgtgtcccagagcaaggactccgacgtgtacatcaccgataagtgcgtgctggacatgcggagcatggacttcaagagcaactccgccgtggcctggtccaacaagtccgatttcgcctgcgccaacgccttcaacaacagcattatccccgaggacacattcttcccaagccccgagagcagcgactccaccgaccacgtgaagcccaaagagacagagaacaccaagcagcccagcaagagctgccacaagcccaaggccatcgtgcacaccgagaaagtgaacatgatgagcctgaccgtgctgggcctgcggatgctgttcgccaaaaccgtggccgtgaacttcctgctgaccgccaagctgttcttcctccgcgccaagagaagcggatctggcgtgaagcagaccctgaatttcgacctgctgaagctggctggcgacgtggaatccaacccaggccctactagtatggactggatttggcgcatccttttccttgtcggcgctgctaccggcgcgcattccgggccccagctccagctgcaagagtctggacctggcctggtcaagcctagcgagacactgagcctgacctgtaccgtgtccggcgatagcatcagcagcggcgattactactggggctggatcagacagcctcctggcaaaggactggaatggatcggccacatctactacagcggcgtgacctactacaaccccagcctgaagtccagagtgaccatcagcgtggacaccagccggaaccagttctccctgaagctgtctagcgtgacagccgccgataccgccgtgtactactgcaccagagaggacagcagcaactggcggagtagaggccagggaacactggtcacagttagctctggatccggcggaggcggaagtggaggcggaggatctggcggcggaggctctttcgaacaggtgcagctgaaagagagcggccctgagctggaaaagcctggggccagcgtgaagattagctgcaaggccagcggctacagcttcaccgcctacagcatgaactgggtcaagcagaacaacggcatgagcctggaatggatcggcagcatcgacccctactacggcgacaccaaatacgcccagaagttcaagggcaaggccaccctgaccgtggataaggccagcagcaccgcctacctccagctgaagtctctgaccagcgaggacagcgccgtgtactactgcgccagacggatgattaccaccggcgactggtacttcgacgtgtggggagccggaaccaccgtgacagtgtctagcacgcgtgaggacctgaagaacgtgttcccacctgaggtggccgtgttcgagcctagcgaggccgagatcagccacacccagaaagccaccctcgtgtgcctggctaccggcttctaccccgaccatgtggaactgtcttggtgggtcaacggcaaagaggtgcacagcggcgtgtgtaccgacccccagccactgaaagaacagcccgccctgaacgacagccggtactgcctgagcagcagactgagagtgtccgccaccttctggcagaacccccggaaccacttcagatgccaggtgcagttctacggcctgagcgagaacgacgagtggacccaggacagagccaagcccgtgacccagatcgtgtctgccgaagcctggggcagagccgatgatgtgattaagatccactggcaggaaaagaagtccaacaccatcctgggcagccaggaaggcaacaccatgaagaccaacgacacctacatgaagttcagctggctgaccgtgcccgagaagtccctggacaaagaacacagatgcatcgtgcggcacgaaaacaacaagaacggcgtggaccaggaaatcatcttcccacccatcaagaccgatgtgattacaatggaccccaaggacaactgctccaaggacgccaacgataccctgctgctccagctgaccaacaccagcgcctactacatgtacttgttgctgctgctgaagtccgtggtgtacttcgccatcatcacatgctgcctgctgcggagaaccgccttctgctgcaacggcgagaagtct

SEQ ID NO: 7877 - DNA, 3003 bp, synthetic construct; identical to SEQ ID NO: 7876
  source 1..3003: mol_type = other DNA

SEQ ID NO: 7878 - DNA, 3003 bp, synthetic construct
  source 1..3003: mol_type = other DNA
atggccttaccagtgaccgccttgctcctgccgctggccttgctgctccacgccgccaggccggaagtgcagctggttgaatctggcggaggactggttcagcctggcggatctctgagactgtcttgtgccgccagcggcttcagcttcagcgacttttggatgagctgggtccgacaggcccctggcaaaggacttgaatgggtcgccacaatcagccaggccggcagcgagaaggactacgtggactctgtgaagggcagattcaccatcagccgggacaacgccaagaagtccctgtacctccagatgaacagcctgagagccgaggacaccgccgtgtactattgtgcctctggcgtgtacagcttcgactacagaggccagggcaccctggtcacagtctcttctggtaccggcggaggcggatctggcggcggaggtagcggtggcggaggatctgaattcgacgagatcgtgctgacacagagccctgccaccctgtctctgagccctggcgaaagagccaccctgagctgtagagccagccagagcgtgtccagctacctggcctggtatcagcagaagcccggccaggctccccggctgctgatctacgatgccagcaatagagccaccggcatccccgccagattttccggctctggcagcggcaccgacttcaccctgaccatcagctccctggaacccgaggacttcgccgtgtactactgccagcagcggagcaactggcccatcacattcggccagggcacccggctggaaatcaaactcgagatccagaaccctgatcctgccgtgtaccagctgcgggatagcaagagcagcgacaagagcgtgtgtctgttcaccgacttcgacagccagaccaacgtgtcccagagcaaggactccgacgtgtacatcaccgataagtgcgtgctggacatgcggagcatggacttcaagagcaactccgccgtggcctggtccaacaagtccgatttcgcctgcgccaacgccttcaacaacagcattatccccgaggacacattcttcccaagccccgagagcagcgactccaccgaccacgtgaagcccaaagagacagagaacaccaagcagcccagcaagagctgccacaagcccaaggccatcgtgcacaccgagaaagtgaacatgatgagcctgaccgtgctgggcctgcggatgctgttcgccaaaaccgtggccgtgaacttcctgctgaccgccaagctgttcttcctccgcgccaagagaagcggatctggcgtgaagcagaccctgaatttcgacctgctgaagctggctggcgacgtggaatccaacccaggccctactagtatggactggatttggcgcatccttttccttgtcggcgctgctaccggcgcgcattccgggccccagctccagctgcaagagtctggacctggcctggtcaagcctagcgagacactgagcctgacctgtaccgtgtccggcgatagcatcagcagcggcgattactactggggctggatcagacagcctcctggcaaaggactggaatggatcggccacatctactacagcggcgtgacctactacaaccccagcctgaagtccagagtgaccatcagcgtggacaccagccggaaccagttctccctgaagctgtctagcgtgacagccgccgataccgccgtgtactactgcaccagagaggacagcagcaactggcggagtagaggccagggaacactggtcacagttagctctggatccggcggaggcggaagtggaggcggaggatctggcggcggaggctctttcgaagaagtgcagctggtggaatcaggcggcggactggtgcagcctggcagaagcctgagactgagctgtgccgccagcggcttcaccttcaacgactacgccatgcactgggtgcgccaggcccctggaaaaggactggaatgggtgtccacaatcagctggaacagcggcagcatcggctacgccgatagcgtgaagggccggttcaccatcagccgggacaacgccaagaagtccctgtacctccagatgaacagcctgcgggccgaggacacagccctgtactattgcgccaaggacatccagtacggcaactactactacggcatggacgtgtggggccagggaaccaccgtgaccgtgtcatctacgcgtgaggacctgaagaacgtgttcccacctgaggtggccgtgttcgagcctagcgaggccgagatcagccacacccagaaagccaccctcgtgtgcctggctaccggcttctaccccgaccatgtggaactgtcttggtgggtcaacggcaaagaggtgcacagcggcgtgtgtaccgacccccagccactgaaagaacagcccgccctgaacgacagccggtactgcctgagcagcagactgagagtgtccgccaccttctggcagaacccccggaaccacttcagatgccaggtgcagttctacggcctgagcgagaacgacgagtggacccaggacagagccaagcccgtgacccagatcgtgtctgccgaagcctggggcagagccgatgatgtgattaagatccactggcaggaaaagaagtccaacaccatcctgggcagccaggaaggcaacaccatgaagaccaacgacacctacatgaagttcagctggctgaccgtgcccgagaagtccctggacaaagaacacagatgcatcgtgcggcacgaaaacaacaagaacggcgtggaccaggaaatcatcttcccacccatcaagaccgatgtgattacaatggaccccaaggacaactgctccaaggacgccaacgataccctgctgctccagctgaccaacaccagcgcctactacatgtacttgttgctgctgctgaagtccgtggtgtacttcgccatcatcacatgctgcctgctgcggagaaccgccttctgctgcaacggcgagaagtct

SEQ ID NO: 7879 - DNA, 3009 bp, synthetic construct
  source 1..3009: mol_type = other DNA
atggccttaccagtgaccgccttgctcctgccgctggccttgctgctccacgccgccaggccggaagtgcagctggttgaatctggcggaggactggttcagcctggcggatctctgagactgtcttgtgccgccagcggcttcagcttcagcgacttttggatgagctgggtccgacaggcccctggcaaaggacttgaatgggtcgccacaatcagccaggccggcagcgagaaggactacgtggactctgtgaagggcagattcaccatcagccgggacaacgccaagaagtccctgtacctccagatgaacagcctgagagccgaggacaccgccgtgtactattgtgcctctggcgtgtacagcttcgactacagaggccagggcaccctggtcacagtctcttctggtaccggcggaggcggatctggcggcggaggtagcggtggcggaggatctgaattcgacatcgtgatgacccagacccccctgagcctgcctgtgacacctggcgagcctgccagcatctcctgcagaagcagcaagagcctgctgcacagcaacggcatcacctacctgtactggtatctgcagaaacccggccagagcccccaactgctgatctaccagatgagcaacctggtgtccggcgtgcccgacagattttctggcagcggctccggcaccgacttcaccctgaagatcagccgggtggaagccgaggacgtgggcgtgtactactgcgcccagaacctggaactgccctacacctttggcggcggaacaaaggtggaaatcaagcggctcgagatccagaaccctgatcctgccgtgtaccagctgcgggatagcaagagcagcgacaagagcgtgtgtctgttcaccgacttcgacagccagaccaacgtgtcccagagcaaggactccgacgtgtacatcaccgataagtgcgtgctggacatgcggagcatggacttcaagagcaactccgccgtggcctggtccaacaagtccgatttcgcctgcgccaacgccttcaacaacagcattatccccgaggacacattcttcccaagccccgagagcagcgactccaccgaccacgtgaagcccaaagagacagagaacaccaagcagcccagcaagagctgccacaagcccaaggccatcgtgcacaccgagaaagtgaacatgatgagcctgaccgtgctgggcctgcggatgctgttcgccaaaaccgtggccgtgaacttcctgctgaccgccaagctgttcttcctccgcgccaagagaagcggatctggcgtgaagcagaccctgaatttcgacctgctgaagctggctggcgacgtggaatccaacccaggccctactagtatggactggatttggcgcatccttttccttgtcggcgctgctaccggcgcgcattccgggccccagctccagctgcaagagtctggacctggcctggtcaagcctagcgagacactgagcctgacctgtaccgtgtccggcgatagcatcagcagcggcgattactactggggctggatcagacagcctcctggcaaaggactggaatggatcggccacatctactacagcggcgtgacctactacaaccccagcctgaagtccagagtgaccatcagcgtggacaccagccggaaccagttctccctgaagctgtctagcgtgacagccgccgataccgccgtgtactactgcaccagagaggacagcagcaactggcggagtagaggccagggaacactggtcacagttagctctggatccggcggaggcggaagtggaggcggaggatctggcggcggaggctctttcgaacaggtgcaactggtgcagagcggagccgaagtgaaaaagcccggcagcagcgtgaaggtgtcctgcaaggccagcggctacgccttcagctactcctggatcaactgggtgcgccaggcccctggacagggcctggaatggatgggcagaatcttccccggcgacggcgacaccgactacaacggcaagttcaagggcagagtgaccatcaccgccgacaagagcaccagcaccgcctacatggaactgagcagcctgcggagcgaggataccgccgtgtactattgtgccagaaacgtgttcgacggctactggctggtgtactggggccagggaacacttgtgaccgtgtccagcacgcgtgaggacctgaagaacgtgttcccacctgaggtggccgtgttcgagcctagcgaggccgagatcagccacacccagaaagccaccctcgtgtgcctggctaccggcttctaccccgaccatgtggaactgtcttggtgggtcaacggcaaagaggtgcacagcggcgtgtgtaccgacccccagccactgaaagaacagcccgccctgaacgacagccggtactgcctgagcagcagactgagagtgtccgccaccttctggcagaacccccggaaccacttcagatgccaggtgcagttctacggcctgagcgagaacgacgagtggacccaggacagagccaagcccgtgacccagatcgtgtctgccgaagcctggggcagagccgatgatgtgattaagatccactggcaggaaaagaagtccaacaccatcctgggcagccaggaaggcaacaccatgaagaccaacgacacctacatgaagttcagctggctgaccgtgcccgagaagtccctggacaaagaacacagatgcatcgtgcggcacgaaaacaacaagaacggcgtggaccaggaaatcatcttcccacccatcaagaccgatgtgattacaatggaccccaaggacaactgctccaaggacgccaacgataccctgctgctccagctgaccaacaccagcgcctactacatgtacttgttgctgctgctgaagtccgtggtgtacttcgccatcatcacatgctgcctgctgcggagaaccgccttctgctgcaacggcgagaagtct

SEQ ID NO: 7880 - DNA, 3012 bp, synthetic construct
  source 1..3012: mol_type = other DNA
atggccttaccagtgaccgccttgctcctgccgctggccttgctgctccacgccgccaggccggaagtgcagctggttgaatctggcggaggactggttcagcctggcggatctctgagactgtcttgtgccgccagcggcttcagcttcagcgacttttggatgagctgggtccgacaggcccctggcaaaggacttgaatgggtcgccacaatcagccaggccggcagcgagaaggactacgtggactctgtgaagggcagattcaccatcagccgggacaacgccaagaagtccctgtacctccagatgaacagcctgagagccgaggacaccgccgtgtactattgtgcctctggcgtgtacagcttcgactacagaggccagggcaccctggtcacagtctcttctggtaccggcggaggcggatctggcggcggaggtagcggtggcggaggatctgaattcgacatccagatgacccagagccccagcagcctgtctgccagcgtgggcgacagagtgaccatcacctgtcggagcagccagagcatcgtgcactccgtgggcaacaccttcctggaatggtatcagcagaagcccggcaaggcccccaagctgctgatctacaaggtgtccaacagattcagcggcgtgcccagcaggtttagcggctctggcagcggcaccgacttcaccctgaccatctctagcctccagcccgaggacttcgccacctactactgttttcaaggcagccagttcccctacaccttcggccagggaacaaaggtggaaatcaagcggctcgagatccagaaccctgatcctgccgtgtaccagctgcgggatagcaagagcagcgacaagagcgtgtgtctgttcaccgacttcgacagccagaccaacgtgtcccagagcaaggactccgacgtgtacatcaccgataagtgcgtgctggacatgcggagcatggacttcaagagcaactccgccgtggcctggtccaacaagtccgatttcgcctgcgccaacgccttcaacaacagcattatccccgaggacacattcttcccaagccccgagagcagcgactccaccgaccacgtgaagcccaaagagacagagaacaccaagcagcccagcaagagctgccacaagcccaaggccatcgtgcacaccgagaaagtgaacatgatgagcctgaccgtgctgggcctgcggatgctgttcgccaaaaccgtggccgtgaacttcctgctgaccgccaagctgttcttcctccgcgccaagagaagcggatctggcgtgaagcagaccctgaatttcgacctgctgaagctggctggcgacgtggaatccaacccaggccctactagtatggactggatttggcgcatccttttccttgtcggcgctgctaccggcgcgcattccgggccccagctccagctgcaagagtctggacctggcctggtcaagcctagcgagacactgagcctgacctgtaccgtgtccggcgatagcatcagcagcggcgattactactggggctggatcagacagcctcctggcaaaggactggaatggatcggccacatctactacagcggcgtgacctactacaaccccagcctgaagtccagagtgaccatcagcgtggacaccagccggaaccagttctccctgaagctgtctagcgtgacagccgccgataccgccgtgtactactgcaccagagaggacagcagcaactggcggagtagaggccagggaacactggtcacagttagctctggatccggcggaggcggaagtggaggcggaggatctggcggcggaggctctttcgaagaagtgcaactggtggaaagcggaggcggcctggtgcagcctggcggatctctgagactgagctgtgccgccagcggctacgagttcagccggtcctggatgaactgggtgcgccaggcccctggcaagggactggaatgggtgggaagaatctaccccggcgacggcgacaccaactacagcggcaagttcaagggccggttcaccatcagcgccgacaccagcaagaacaccgcctacctccagatgaacagcctgcgggccgaggataccgccgtgtactactgtgccagagatggcagctcctgggactggtacttcgacgtgtggggacagggaacccttgtgaccgtgtccagcacgcgtgaggacctgaagaacgtgttcccacctgaggtggccgtgttcgagcctagcgaggccgagatcagccacacccagaaagccaccctcgtgtgcctggctaccggcttctaccccgaccatgtggaactgtcttggtgggtcaacggcaaagaggtgcacagcggcgtgtgtaccgacccccagccactgaaagaacagcccgccctgaacgacagccggtactgcctgagcagcagactgagagtgtccgccaccttctggcagaacccccggaaccacttcagatgccaggtgcagttctacggcctgagcgagaacgacgagtggacccaggacagagccaagcccgtgacccagatcgtgtctgccgaagcctggggcagagccgatgatgtgattaagatccactggcaggaaaagaagtccaacaccatcctgggcagccaggaaggcaacaccatgaagaccaacgacacctacatgaagttcagctggctgaccgtgcccgagaagtccctggacaaagaacacagatgcatcgtgcggcacgaaaacaacaagaacggcgtggaccaggaaatcatcttcccacccatcaagaccgatgtgattacaatggaccccaaggacaactgctccaaggacgccaacgataccctgctgctccagctgaccaacaccagcgcctactacatgtacttgttgctgctgctgaagtccgtggtgtacttcgccatcatcacatgctgcctgctgcggagaaccgccttctgctgcaacggcgagaagtct

SEQ ID NO: 7881 - DNA, 3006 bp, synthetic construct
  source 1..3006: mol_type = other DNA
atggccttaccagtgaccgccttgctcctgccgctggccttgctgctccacgccgccaggccggaagtgcagctggttgaatctggcggaggactggttcagcctggcggatctctgagactgtcttgtgccgccagcggcttcagcttcagcgacttttggatgagctgggtccgacaggcccctggcaaaggacttgaatgggtcgccacaatcagccaggccggcagcgagaaggactacgtggactctgtgaagggcagattcaccatcagccgggacaacgccaagaagtccctgtacctccagatgaacagcctgagagccgaggacaccgccgtgtactattgtgcctctggcgtgtacagcttcgactacagaggccagggcaccctggtcacagtctcttctggtaccggcggaggcggatctggcggcggaggtagcggtggcggaggatctgaattcgacatccagatgacccagagccccagcagcctgtctgccagcgtgggcgacagagtgaccatcacctgtagagccagccagaccatctggtcctacctgaactggtatcagcagaggcccggcaaggcccccaacctgctgatctatgccgccagctctctccagagcggcgtgcccagcagattttccggcagaggcagcggcaccgacttcaccctgaccatcagttccttgcaggccgaggacttcgccacctactactgccagcagagctacagcatcccccagattttcggccagggcaccaagctggaaatcaagctcgagatccagaaccctgatcctgccgtgtaccagctgcgggatagcaagagcagcgacaagagcgtgtgtctgttcaccgacttcgacagccagaccaacgtgtcccagagcaaggactccgacgtgtacatcaccgataagtgcgtgctggacatgcggagcatggacttcaagagcaactccgccgtggcctggtccaacaagtccgatttcgcctgcgccaacgccttcaacaacagcattatccccgaggacacattcttcccaagccccgagagcagcgactccaccgaccacgtgaagcccaaagagacagagaacaccaagcagcccagcaagagctgccacaagcccaaggccatcgtgcacaccgagaaagtgaacatgatgagcctgaccgtgctgggcctgcggatgctgttcgccaaaaccgtggccgtgaacttcctgctgaccgccaagctgttcttcctccgcgccaagagaagcggatctggcgtgaagcagaccctgaatttcgacctgctgaagctggctggcgacgtggaatccaacccaggccctactagtatggactggatttggcgcatccttttccttgtcggcgctgctaccggcgcgcattccgggccccagctccagctgcaagagtctggacctggcctggtcaagcctagcgagacactgagcctgacctgtaccgtgtccggcgatagcatcagcagcggcgattactactggggctggatcagacagcctcctggcaaaggactggaatggatcggccacatctactacagcggcgtgacctactacaaccccagcctgaagtccagagtgaccatcagcgtggacaccagccggaaccagttctccctgaagctgtctagcgtgacagccgccgataccgccgtgtactactgcaccagagaggacagcagcaactggcggagtagaggccagggaacactggtcacagttagctctggatccggcggaggcggaagtggaggcggaggatctggcggcggaggctctttcgaacaggtgcagctccagcagtctggacccggcctcgtgaagcctagccagacactgagcctgacctgcgccatcagcggcgatagcgtgtccagcaatagcgccgcctggaactggatcagacagtccccctctcggggcctggaatggctgggccggacctactaccgcagcaagtggtacaacgactacgccgtgtccgtgaagtcccggatcaccatcaaccccgacaccagcaagaaccagttctccttgcaactgaacagcgtgacccccgaggacaccgccgtgtactactgcgccagagaagtgaccggcgacctggaagatgccttcgacatctggggccagggaacaatggtcacagtgtccagcacgcgtgaggacctgaagaacgtgttcccacctgaggtggccgtgttcgagcctagcgaggccgagatcagccacacccagaaagccaccctcgtgtgcctggctaccggcttctaccccgaccatgtggaactgtcttggtgggtcaacggcaaagaggtgcacagcggcgtgtgtaccgacccccagccactgaaagaacagcccgccctgaacgacagccggtactgcctgagcagcagactgagagtgtccgccaccttctggcagaacccccggaaccacttcagatgccaggtgcagttctacggcctgagcgagaacgacgagtggacccaggacagagccaagcccgtgacccagatcgtgtctgccgaagcctggggcagagccgatgatgtgattaagatccactggcaggaaaagaagtccaacaccatcctgggcagccaggaaggcaacaccatgaagaccaacgacacctacatgaagttcagctggctgaccgtgcccgagaagtccctggacaaagaacacagatgcatcgtgcggcacgaaaacaacaagaacggcgtggaccaggaaatcatcttcccacccatcaagaccgatgtgattacaatggaccccaaggacaactgctccaaggacgccaacgataccctgctgctccagctgaccaacaccagcgcctactacatgtacttgttgctgctgctgaagtccgtggtgtacttcgccatcatcacatgctgcctgctgcggagaaccgccttctgctgcaacggcgagaagtct

SEQ ID NO: 7882 - DNA, 2985 bp, synthetic construct
  source 1..2985: mol_type = other DNA
atggccttaccagtgaccgccttgctcctgccgctggccttgctgctccacgccgccaggccggaagtgcagctggttgaatctggcggaggactggttcagcctggcggatctctgagactgtcttgtgccgccagcggcttcagcttcagcgacttttggatgagctgggtccgacaggcccctggcaaaggacttgaatgggtcgccacaatcagccaggccggcagcgagaaggactacgtggactctgtgaagggcagattcaccatcagccgggacaacgccaagaagtccctgtacctccagatgaacagcctgagagccgaggacaccgccgtgtactattgtgcctctggcgtgtacagcttcgactacagaggccagggcaccctggtcacagtctcttctggtaccggcggaggcggatctggcggcggaggtagcggtggcggaggatctgaattcgacatccagatgacccagagccccgccaccatcgagaacacaagcctgtctgccagcgtgggcgacagagtgaccatcacctgtagagccagccagggcatcagctcttggctgacctggtatcagcagaagcccgagaaggcccccaagagcctgatctacgccgccagctctctgcagtctggcgtgcccagcagattttccggcagcggctctggcaccgacttcaccctgacaatcagcagcctgcagcccgaggacttcgccacctactactgccagcagtacgacagctaccccatcaccttcggccagggcacccggctggaaatcaagctcgagatccagaaccctgatcctgccgtgtaccagctgcgggatagcaagagcagcgacaagagcgtgtgtctgttcaccgacttcgacagccagaccaacgtgtcccagagcaaggactccgacgtgtacatcaccgataagtgcgtgctggacatgcggagcatggacttcaagagcaactccgccgtggcctggtccaacaagtccgatttcgcctgcgccaacgccttcaacaacagcattatccccgaggacacattcttcccaagccccgagagcagcgactccaccgaccacgtgaagcccaaagagacagagaacaccaagcagcccagcaagagctgccacaagcccaaggccatcgtgcacaccgagaaagtgaacatgatgagcctgaccgtgctgggcctgcggatgctgttcgccaaaaccgtggccgtgaacttcctgctgaccgccaagctgttcttcctccgcgccaagagaagcggatctggcgtgaagcagaccctgaatttcgacctgctgaagctggctggcgacgtggaatccaacccaggccctactagtatggactggatttggcgcatccttttccttgtcggcgctgctaccggcgcgcattccgggccccagctccagctgcaagagtctggacctggcctggtcaagcctagcgagacactgagcctgacctgtaccgtgtccggcgatagcatcagcagcggcgattactactggggctggatcagacagcctcctggcaaaggactggaatggatcggccacatctactacagcggcgtgacctactacaaccccagcctgaagtccagagtgaccatcagcgtggacaccagccggaaccagttctccctgaagctgtctagcgtgacagccgccgataccgccgtgtactactgcaccagagaggacagcagcaactggcggagtagaggccagggaacactggtcacagttagctctggatccggcggaggcggaagtggaggcggaggatctggcggcggaggctctttcgaacaggtgcaactgcagcagtggggagccggactgctgaagcctagcgagacactgagcctgacctgcgccgtgtacggcggcagcttcagcgcctactattggagctggatcagacagccccctggcaagggcctggaatggatcggcgacatcaatcacggcggaggcaccaactacaaccccagcctgaagtcccgcgtgaccatctccgtggacaccagcaagaaccagttctccctgaagctgaacagcgtgacagccgccgacacagccgtgtactactgtgccagcctgaccgcctattggggccagggatctcttgtgaccgtgtccagcacgcgtgaggacctgaagaacgtgttcccacctgaggtggccgtgttcgagcctagcgaggccgagatcagccacacccagaaagccaccctcgtgtgcctggctaccggcttctaccccgaccatgtggaactgtcttggtgggtcaacggcaaagaggtgcacagcggcgtgtgtaccgacccccagccactgaaagaacagcccgccctgaacgacagccggtactgcctgagcagcagactgagagtgtccgccaccttctggcagaacccccggaaccacttcagatgccaggtgcagttctacggcctgagcgagaacgacgagtggacccaggacagagccaagcccgtgacccagatcgtgtctgccgaagcctggggcagagccgatgatgtgattaagatccactggcaggaaaagaagtccaacaccatcctgggcagccaggaaggcaacaccatgaagaccaacgacacctacatgaagttcagctggctgaccgtgcccgagaagtccctggacaaagaacacagatgcatcgtgcggcacgaaaacaacaagaacggcgtggaccaggaaatcatcttcccacccatcaagaccgatgtgattacaatggaccccaaggacaactgctccaaggacgccaacgataccctgctgctccagctgaccaacaccagcgcctactacatgtacttgttgctgctgctgaagtccgtggtgtacttcgccatcatcacatgctgcctgctgcggagaaccgccttctgctgcaacggcgagaagtct

SEQ ID NO: 7883 - DNA, 3000 bp, synthetic construct
  source 1..3000: mol_type = other DNA
atggccttaccagtgaccgccttgctcctgccgctggccttgctgctccacgccgccaggccggaagtgcagctggttgaatctggcggaggactggttcagcctggcggatctctgagactgtcttgtgccgccagcggcttcagcttcagcgacttttggatgagctgggtccgacaggcccctggcaaaggacttgaatgggtcgccacaatcagccaggccggcagcgagaaggactacgtggactctgtgaagggcagattcaccatcagccgggacaacgccaagaagtccctgtacctccagatgaacagcctgagagccgaggacaccgccgtgtactattgtgcctctggcgtgtacagcttcgactacagaggccagggcaccctggtcacagtctcttctggtaccggcggaggcggatctggcggcggaggtagcggtggcggaggatctgaattcgacgagatcgtgctgacccagagccctgatagcctggccgtgtctctgggcgagagagccaccatcaactgcaaggccagccagagcgtggacttcgacggcgacagctacctgaactggtatcagcagaagcccggccagccccccaaggtgctgatctatgccgccagcacactgcagagcggcgtgcccagcagattttctggcagcggctccggcaccgacttcaccctgaccatcaacagcctggaagccgaggacgccgccacctactactgccagcagagcaacgaggacccctggacctttggcggcggaacaaaggtggaaatcaagctcgagatccagaaccctgatcctgccgtgtaccagctgcgggatagcaagagcagcgacaagagcgtgtgtctgttcaccgacttcgacagccagaccaacgtgtcccagagcaaggactccgacgtgtacatcaccgataagtgcgtgctggacatgcggagcatggacttcaagagcaactccgccgtggcctggtccaacaagtccgatttcgcctgcgccaacgccttcaacaacagcattatccccgaggacacattcttcccaagccccgagagcagcgactccaccgaccacgtgaagcccaaagagacagagaacaccaagcagcccagcaagagctgccacaagcccaaggccatcgtgcacaccgagaaagtgaacatgatgagcctgaccgtgctgggcctgcggatgctgttcgccaaaaccgtggccgtgaacttcctgctgaccgccaagctgttcttcctccgcgccaagagaagcggatctggcgtgaagcagaccctgaatttcgacctgctgaagctggctggcgacgtggaatccaacccaggccctactagtatggactggatttggcgcatccttttccttgtcggcgctgctaccggcgcgcattccgggccccagctccagctgcaagagtctggacctggcctggtcaagcctagcgagacactgagcctgacctgtaccgtgtccggcgatagcatcagcagcggcgattactactggggctggatcagacagcctcctggcaaaggactggaatggatcggccacatctactacagcggcgtgacctactacaaccccagcctgaagtccagagtgaccatcagcgtggacaccagccggaaccagttctccctgaagctgtctagcgtgacagccgccgataccgccgtgtactactgcaccagagaggacagcagcaactggcggagtagaggccagggaacactggtcacagttagctctggatccggcggaggcggaagtggaggcggaggatctggcggcggaggctctttcgaacaggtgcaactggtgcagtccggcgctgaagtgaagaaacctggggccagcgtgaaggtgtcctgcaaggtgtccggctacacctttaccgactactacattacctgggtgcgccaggcccctggacaggccctggaatggatgggctggatctaccccggcagcggcaacaccaagtacagccagaagttccagggcagattcgtgttcagcgtggacaccagcgccagcaccgcctacctgcaactgtctagcctgaaggccgaagataccgccgtgtactactgcgccaactacggcaactattggttcgcctattggggccagggaacccttgtgaccgtgtcctctacgcgtgaggacctgaagaacgtgttcccacctgaggtggccgtgttcgagcctagcgaggccgagatcagccacacccagaaagccaccctcgtgtgcctggctaccggcttctaccccgaccatgtggaactgtcttggtgggtcaacggcaaagaggtgcacagcggcgtgtgtaccgacccccagccactgaaagaacagcccgccctgaacgacagccggtactgcctgagcagcagactgagagtgtccgccaccttctggcagaacccccggaaccacttcagatgccaggtgcagttctacggcctgagcgagaacgacgagtggacccaggacagagccaagcccgtgacccagatcgtgtctgccgaagcctggggcagagccgatgatgtgattaagatccactggcaggaaaagaagtccaacaccatcctgggcagccaggaaggcaacaccatgaagaccaacgacacctacatgaagttcagctggctgaccgtgcccgagaagtccctggacaaagaacacagatgcatcgtgcggcacgaaaacaacaagaacggcgtggaccaggaaatcatcttcccacccatcaagaccgatgtgattacaatggaccccaaggacaactgctccaaggacgccaacgataccctgctgctccagctgaccaacaccagcgcctactacatgtacttgttgctgctgctgaagtccgtggtgtacttcgccatcatcacatgctgcctgctgcggagaaccgccttctgctgcaacggcgagaagtct

SEQ ID NO: 7884 - DNA, 2991 bp, synthetic construct
  source 1..2991: mol_type = other DNA
atggccttaccagtgaccgccttgctcctgccgctggccttgctgctccacgccgccaggccggaagtgcagctggttgaatctggcggaggactggttcagcctggcggatctctgagactgtcttgtgccgccagcggcttcagcttcagcgacttttggatgagctgggtccgacaggcccctggcaaaggacttgaatgggtcgccacaatcagccaggccggcagcgagaaggactacgtggactctgtgaagggcagattcaccatcagccgggacaacgccaagaagtccctgtacctccagatgaacagcctgagagccgaggacaccgccgtgtactattgtgcctctggcgtgtacagcttcgactacagaggccagggcaccctggtcacagtctcttctggtaccggcggaggcggatctggcggcggaggtagcggtggcggaggatctgaattcgacatccagatgacccagagccccagcagcctgtctgccagcgtgggcgacagagtgaccatcacctgtagagccagccagggcatcagctcttggctggcctggtatcagcagaagcccgagaaggcccccaagagcctgatctacgccgcctctagtctccagagcggcgtgcccagcagattttctggcagcggctccggcaccgacttcaccctgacaatcagctccctccagcccgaggacttcgccacctactactgccagcagtacaacagctaccctcccacctttggcggaggcaccaaggtggaaatcaagctcgagatccagaaccctgatcctgccgtgtaccagctgcgggatagcaagagcagcgacaagagcgtgtgtctgttcaccgacttcgacagccagaccaacgtgtcccagagcaaggactccgacgtgtacatcaccgataagtgcgtgctggacatgcggagcatggacttcaagagcaactccgccgtggcctggtccaacaagtccgatttcgcctgcgccaacgccttcaacaacagcattatccccgaggacacattcttcccaagccccgagagcagcgactccaccgaccacgtgaagcccaaagagacagagaacaccaagcagcccagcaagagctgccacaagcccaaggccatcgtgcacaccgagaaagtgaacatgatgagcctgaccgtgctgggcctgcggatgctgttcgccaaaaccgtggccgtgaacttcctgctgaccgccaagctgttcttcctccgcgccaagagaagcggatctggcgtgaagcagaccctgaatttcgacctgctgaagctggctggcgacgtggaatccaacccaggccctactagtatggactggatttggcgcatccttttccttgtcggcgctgctaccggcgcgcattccgggccccagctccagctgcaagagtctggacctggcctggtcaagcctagcgagacactgagcctgacctgtaccgtgtccggcgatagcatcagcagcggcgattactactggggctggatcagacagcctcctggcaaaggactggaatggatcggccacatctactacagcggcgtgacctactacaaccccagcctgaagtccagagtgaccatcagcgtggacaccagccggaaccagttctccctgaagctgtctagcgtgacagccgccgataccgccgtgtactactgcaccagagaggacagcagcaactggcggagtagaggccagggaacactggtcacagttagctctggatccggcggaggcggaagtggaggcggaggatctggcggcggaggctctttcgaagaagtgcaactggtgcagtctggcggagggctggtgcatcctgggggaagcctgagactgagctgtgccggctctggcttcgccttcagcagcagcaccatgcactggatcagacaggcccctggcaagggcctggaatggatcagcctgatcggaagcggagggggcatctactacggcgacagcgtgaagggccggttcaccatcagccgggacaacgccaagaacagcctgtacctccagatgaactccctgcgggccgaggacatggccgtgtactattgtgtgcggggctacttcgactgggtggactacttcgattactggggccagggcaccctcgtgaccgtgtcatctacgcgtgaggacctgaagaacgtgttcccacctgaggtggccgtgttcgagcctagcgaggccgagatcagccacacccagaaagccaccctcgtgtgcctggctaccggcttctaccccgaccatgtggaactgtcttggtgggtcaacggcaaagaggtgcacagcggcgtgtgtaccgacccccagccactgaaagaacagcccgccctgaacgacagccggtactgcctgagcagcagactgagagtgtccgccaccttctggcagaacccccggaaccacttcagatgccaggtgcagttctacggcctgagcgagaacgacgagtggacccaggacagagccaagcccgtgacccagatcgtgtctgccgaagcctggggcagagccgatgatgtgattaagatccactggcaggaaaagaagtccaacaccatcctgggcagccaggaaggcaacaccatgaagaccaacgacacctacatgaagttcagctggctgaccgtgcccgagaagtccctggacaaagaacacagatgcatcgtgcggcacgaaaacaacaagaacggcgtggaccaggaaatcatcttcccacccatcaagaccgatgtgattacaatggaccccaaggacaactgctccaaggacgccaacgataccctgctgctccagctgaccaacaccagcgcctactacatgtacttgttgctgctgctgaagtccgtggtgtacttcgccatcatcacatgctgcctgctgcggagaaccgccttctgctgcaacggcgagaagtct

SEQ ID NO: 7885 - DNA, 3021 bp, synthetic construct
  source 1..3021: mol_type = other DNA
atggccttaccagtgaccgccttgctcctgccgctggccttgctgctccacgccgccaggccggaagtgcagctggttgaatctggcggaggactggttcagcctggcggatctctgagactgtcttgtgccgccagcggcttcagcttcagcgacttttggatgagctgggtccgacaggcccctggcaaaggacttgaatgggtcgccacaatcagccaggccggcagcgagaaggactacgtggactctgtgaagggcagattcaccatcagccgggacaacgccaagaagtccctgtacctccagatgaacagcctgagagccgaggacaccgccgtgtactattgtgcctctggcgtgtacagcttcgactacagaggccagggcaccctggtcacagtctcttctggtaccggcggaggcggatctggcggcggaggtagcggtggcggaggatctgaattcgacgacatcgtgatgacacagtcaccagatagcctcaccgtctccctgggggagcggaccaccattaattgtaaatccagccaaagcgtgctggactcaagcaagaacaagaatagcctcgcctggtatcagcagaagcccggtcagcctccaaagctgctgctttcttgggcctccaccagagagtccgggattcctgataggtttagtggttcaggctccggcacagattttactctgaccattgattctctccagccagaggattctgcaacttattactgccagcaaagcgcccactttcctataacttttggccagggaacccgacttgaaatcaagctcgagatccagaaccctgatcctgccgtgtaccagctgcgggatagcaagagcagcgacaagagcgtgtgtctgttcaccgacttcgacagccagaccaacgtgtcccagagcaaggactccgacgtgtacatcaccgataagtgcgtgctggacatgcggagcatggacttcaagagcaactccgccgtggcctggtccaacaagtccgatttcgcctgcgccaacgccttcaacaacagcattatccccgaggacacattcttcccaagccccgagagcagcgactccaccgaccacgtgaagcccaaagagacagagaacaccaagcagcccagcaagagctgccacaagcccaaggccatcgtgcacaccgagaaagtgaacatgatgagcctgaccgtgctgggcctgcggatgctgttcgccaaaaccgtggccgtgaacttcctgctgaccgccaagctgttcttcctccgcgccaagagaagcggatctggcgtgaagcagaccctgaatttcgacctgctgaagctggctggcgacgtggaatccaacccaggccctactagtatggactggatttggcgcatccttttccttgtcggcgctgctaccggcgcgcattccgggccccagctccagctgcaagagtctggacctggcctggtcaagcctagcgagacactgagcctgacctgtaccgtgtccggcgatagcatcagcagcggcgattactactggggctggatcagacagcctcctggcaaaggactggaatggatcggccacatctactacagcggcgtgacctactacaaccccagcctgaagtccagagtgaccatcagcgtggacaccagccggaaccagttctccctgaagctgtctagcgtgacagccgccgataccgccgtgtactactgcaccagagaggacagcagcaactggcggagtagaggccagggaacactggtcacagttagctctggatccggcggaggcggaagtggaggcggaggatctggcggcggaggctctttcgaacaggtgcagctggtgcagagcggtgccgaagtgaagaaaccaggtgcatccgttaaagtttcatgtaaggctagtggatataccttcaccaattacggaatgaactgggtgaaacaggcccctggccagggactgaagtggatggggtggattaacacctacaccggggagccgacttatgcagacgactttaaggggcgggtcacgatgacctccgacacctccaccagtaccgcctacctggagctgcacaaccttaggtcagacgataccgccgtgtattactgtgcccgatggtcttggtccgacggatactatgtctacttcgactattggggccaggggaccacagttaccgtgtcctctacgcgtgaggacctgaagaacgtgttcccacctgaggtggccgtgttcgagcctagcgaggccgagatcagccacacccagaaagccaccctcgtgtgcctggctaccggcttctaccccgaccatgtggaactgtcttggtgggtcaacggcaaagaggtgcacagcggcgtgtgtaccgacccccagccactgaaagaacagcccgccctgaacgacagccggtactgcctgagcagcagactgagagtgtccgccaccttctggcagaacccccggaaccacttcagatgccaggtgcagttctacggcctgagcgagaacgacgagtggacccaggacagagccaagcccgtgacccagatcgtgtctgccgaagcctggggcagagccgatgatgtgattaagatccactggcaggaaaagaagtccaacaccatcctgggcagccaggaaggcaacaccatgaagaccaacgacacctacatgaagttcagctggctgaccgtgcccgagaagtccctggacaaagaacacagatgcatcgtgcggcacgaaaacaacaagaacggcgtggaccaggaaatcatcttcccacccatcaagaccgatgtgattacaatggaccccaaggacaactgctccaaggacgccaacgataccctgctgctccagctgaccaacaccagcgcctactacatgtacttgttgctgctgctgaagtccgtggtgtacttcgccatcatcacatgctgcctgctgcggagaaccgccttctgctgcaacggcgagaagtct

SEQ ID NO: 7886 - DNA, 3009 bp, synthetic construct
  source 1..3009: mol_type = other DNA
atggccttaccagtgaccgccttgctcctgccgctggccttgctgctccacgccgccaggccggaagtgcagctggttgaatctggcggaggactggttcagcctggcggatctctgagactgtcttgtgccgccagcggcttcagcttcagcgacttttggatgagctgggtccgacaggcccctggcaaaggacttgaatgggtcgccacaatcagccaggccggcagcgagaaggactacgtggactctgtgaagggcagattcaccatcagccgggacaacgccaagaagtccctgtacctccagatgaacagcctgagagccgaggacaccgccgtgtactattgtgcctctggcgtgtacagcttcgactacagaggccagggcaccctggtcacagtctcttctggtaccggcggaggcggatctggcggcggaggtagcggtggcggaggatctgaattcgacgagatcgtgctgacacagagccctggaagcctggccgtgtctcctggcgagcgcgtgacaatgagctgcaagagcagccagagcgtgttcttcagcagctcccagaagaactacctggcctggtatcagcagatccccggccagagccccagactgctgatctactgggccagcaccagagaaagcggcgtgcccgatagattcaccggcagcggctctggcaccgacttcaccctgacaatcagcagcgtgcagcccgaggacctggctatctactactgccaccagtacctgagcagccggaccttcggccagggcaccaagctggaaatcaagagactcgagatccagaaccctgatcctgccgtgtaccagctgcgggatagcaagagcagcgacaagagcgtgtgtctgttcaccgacttcgacagccagaccaacgtgtcccagagcaaggactccgacgtgtacatcaccgataagtgcgtgctggacatgcggagcatggacttcaagagcaactccgccgtggcctggtccaacaagtccgatttcgcctgcgccaacgccttcaacaacagcattatccccgaggacacattcttcccaagccccgagagcagcgactccaccgaccacgtgaagcccaaagagacagagaacaccaagcagcccagcaagagctgccacaagcccaaggccatcgtgcacaccgagaaagtgaacatgatgagcctgaccgtgctgggcctgcggatgctgttcgccaaaaccgtggccgtgaacttcctgctgaccgccaagctgttcttcctccgcgccaagagaagcggatctggcgtgaagcagaccctgaatttcgacctgctgaagctggctggcgacgtggaatccaacccaggccctactagtatggactggatttggcgcatccttttccttgtcggcgctgctaccggcgcgcattccgggccccagctccagctgcaagagtctggacctggcctggtcaagcctagcgagacactgagcctgacctgtaccgtgtccggcgatagcatcagcagcggcgattactactggggctggatcagacagcctcctggcaaaggactggaatggatcggccacatctactacagcggcgtgacctactacaaccccagcctgaagtccagagtgaccatcagcgtggacaccagccggaaccagttctccctgaagctgtctagcgtgacagccgccgataccgccgtgtactactgcaccagagaggacagcagcaactggcggagtagaggccagggaacactggtcacagttagctctggatccggcggaggcggaagtggaggcggaggatctggcggcggaggctctttcgaacaggtgcaactgcagcagcctggcgctgaggtcgtgaagccaggcgcttccgtgaagatgtcctgcaaggccagcggctacaccttcaccagctactacatccactggatcaagcagacccctggacagggcctggaatgggtgggagtgatctaccccggcaacgacgacatcagctacaaccagaagttccagggcaaggccaccctgaccgccgacaagtctagcaccaccgcctacatgcaactgtccagcctgaccagcgaggacagcgccgtgtactactgcgccagagaagtgcggctgcggtacttcgatgtgtggggccagggaaccaccgtgaccgtgtcatctacgcgtgaggacctgaagaacgtgttcccacctgaggtggccgtgttcgagcctagcgaggccgagatcagccacacccagaaagccaccctcgtgtgcctggctaccggcttctaccccgaccatgtggaactgtcttggtgggtcaacggcaaagaggtgcacagcggcgtgtgtaccgacccccagccactgaaagaacagcccgccctgaacgacagccggtactgcctgagcagcagactgagagtgtccgccaccttctggcagaacccccggaaccacttcagatgccaggtgcagttctacggcctgagcgagaacgacgagtggacccaggacagagccaagcccgtgacccagatcgtgtctgccgaagcctggggcagagccgatgatgtgattaagatccactggcaggaaaagaagtccaacaccatcctgggcagccaggaaggcaacaccatgaagaccaacgacacctacatgaagttcagctggctgaccgtgcccgagaagtccctggacaaagaacacagatgcatcgtgcggcacgaaaacaacaagaacggcgtggaccaggaaatcatcttcccacccatcaagaccgatgtgattacaatggaccccaaggacaactgctccaaggacgccaacgataccctgctgctccagctgaccaacaccagcgcctactacatgtacttgttgctgctgctgaagtccgtggtgtacttcgccatcatcacatgctgcctgctgcggagaaccgccttctgctgcaacggcgagaagtct

SEQ ID NO: 7887 - DNA, 3021 bp, synthetic construct
  source 1..3021: mol_type = other DNA
atggccttaccagtgaccgccttgctcctgccgctggccttgctgctccacgccgccaggccggaagtgcagctggttgaatctggcggaggactggttcagcctggcggatctctgagactgtcttgtgccgccagcggcttcagcttcagcgacttttggatgagctgggtccgacaggcccctggcaaaggacttgaatgggtcgccacaatcagccaggccggcagcgagaaggactacgtggactctgtgaagggcagattcaccatcagccgggacaacgccaagaagtccctgtacctccagatgaacagcctgagagccgaggacaccgccgtgtactattgtgcctctggcgtgtacagcttcgactacagaggccagggcaccctggtcacagtctcttctggtaccggcggaggcggatctggcggcggaggtagcggtggcggaggatctgaattcgatgtgctgctgacccagagccctctgagcctgcctgtgacactgggacagcctgccagcatctcctgtcggagcagccagaccatcgtgcacagcaacggcaacacctacctggaatggttccagcagcggccaggccagagccccagactgctgatctaccaggtgtccaacagattcagcggcgtgcccgacagattctccggcagcggctctggcaccgacttcaccctgaagatcagccgggtggaagccgaggacgtgggcgtgtactactgttttcaaggcagccacgtgccccggacctttggcggaggaacaaaggtggaaatcaagagagccctcgagatccagaaccctgatcctgccgtgtaccagctgcgggatagcaagagcagcgacaagagcgtgtgtctgttcaccgacttcgacagccagaccaacgtgtcccagagcaaggactccgacgtgtacatcaccgataagtgcgtgctggacatgcggagcatggacttcaagagcaactccgccgtggcctggtccaacaagtccgatttcgcctgcgccaacgccttcaacaacagcattatccccgaggacacattcttcccaagccccgagagcagcgactccaccgaccacgtgaagcccaaagagacagagaacaccaagcagcccagcaagagctgccacaagcccaaggccatcgtgcacaccgagaaagtgaacatgatgagcctgaccgtgctgggcctgcggatgctgttcgccaaaaccgtggccgtgaacttcctgctgaccgccaagctgttcttcctccgcgccaagagaagcggatctggcgtgaagcagaccctgaatttcgacctgctgaagctggctggcgacgtggaatccaacccaggccctactagtatggactggatttggcgcatccttttccttgtcggcgctgctaccggcgcgcattccgggccccagctccagctgcaagagtctggacctggcctggtcaagcctagcgagacactgagcctgacctgtaccgtgtccggcgatagcatcagcagcggcgattactactggggctggatcagacagcctcctggcaaaggactggaatggatcggccacatctactacagcggcgtgacctactacaaccccagcctgaagtccagagtgaccatcagcgtggacaccagccggaaccagttctccctgaagctgtctagcgtgacagccgccgataccgccgtgtactactgcaccagagaggacagcagcaactggcggagtagaggccagggaacactggtcacagttagctctggatccggcggaggcggaagtggaggcggaggatctggcggcggaggctctttcgaacagatccaactggtgcagagcggcagcgagctgaagaaacctggggccagcgtgaaggtgtcctgcaaggccagcggctacacctttaccaactacggcatgaactgggtgcgccaggcccctggacagggcctgaaatggatgggctggatcaacaccaacaccggcgagcctaagtacgccgaagagttcaagggcagattcgccctgagcctggacaccagcgtgtccacagcctacctccagatcaacagcctgaaggccgaggataccgccgtgtacttctgcgccagaggctacggcaactacgccagaggggcttggctggcctattggggccagggaacactcgtgaccgtgtcctctacgcgtgaggacctgaagaacgtgttcccacctgaggtggccgtgttcgagcctagcgaggccgagatcagccacacccagaaagccaccctcgtgtgcctggctaccggcttctaccccgaccatgtggaactgtcttggtgggtcaacggcaaagaggtgcacagcggcgtgtgtaccgacccccagccactgaaagaacagcccgccctgaacgacagccggtactgcctgagcagcagactgagagtgtccgccaccttctggcagaacccccggaaccacttcagatgccaggtgcagttctacggcctgagcgagaacgacgagtggacccaggacagagccaagcccgtgacccagatcgtgtctgccgaagcctggggcagagccgatgatgtgattaagatccactggcaggaaaagaagtccaacaccatcctgggcagccaggaaggcaacaccatgaagaccaacgacacctacatgaagttcagctggctgaccgtgcccgagaagtccctggacaaagaacacagatgcatcgtgcggcacgaaaacaacaagaacggcgtggaccaggaaatcatcttcccacccatcaagaccgatgtgattacaatggaccccaaggacaactgctccaaggacgccaacgataccctgctgctccagctgaccaacaccagcgcctactacatgtacttgttgctgctgctgaagtccgtggtgtacttcgccatcatcacatgctgcctgctgcggagaaccgccttctgctgcaacggcgagaagtct

SEQ ID NO: 7888 - DNA, 2976 bp, synthetic construct
  source 1..2976: mol_type = other DNA
atggccttaccagtgaccgccttgctcctgccgctggccttgctgctccacgccgccaggccggaagtgcagctggttgaatctggcggaggactggttcagcctggcggatctctgagactgtcttgtgccgccagcggcttcagcttcagcgacttttggatgagctgggtccgacaggcccctggcaaaggacttgaatgggtcgccacaatcagccaggccggcagcgagaaggactacgtggactctgtgaagggcagattcaccatcagccgggacaacgccaagaagtccctgtacctccagatgaacagcctgagagccgaggacaccgccgtgtactattgtgcctctggcgtgtacagcttcgactacagaggccagggcaccctggtcacagtctcttctggtaccggcggaggcggatctggcggcggaggtagcggtggcggaggatctgaattcgacgagatcgtgctgacacagagccctgccacactctctctgagccctggcgaaagagccaccctgagctgtagcgccagcagcagcatcaactacatctactggctccagcagaagcccggccaggcccccagaatcctgatctacctgaccagcaacctggcctccggcgtgccagccagattttctggcagcggctccggcaccgacttcaccctgacaatcagcagcctggaacccgaggacttcgccgtgtactactgcctccagtggtccagcaaccccctgacctttggcggaggcaccaaggtggaaatcaagctcgagatccagaaccctgatcctgccgtgtaccagctgcgggatagcaagagcagcgacaagagcgtgtgtctgttcaccgacttcgacagccagaccaacgtgtcccagagcaaggactccgacgtgtacatcaccgataagtgcgtgctggacatgcggagcatggacttcaagagcaactccgccgtggcctggtccaacaagtccgatttcgcctgcgccaacgccttcaacaacagcattatccccgaggacacattcttcccaagccccgagagcagcgactccaccgaccacgtgaagcccaaagagacagagaacaccaagcagcccagcaagagctgccacaagcccaaggccatcgtgcacaccgagaaagtgaacatgatgagcctgaccgtgctgggcctgcggatgctgttcgccaaaaccgtggccgtgaacttcctgctgaccgccaagctgttcttcctccgcgccaagagaagcggatctggcgtgaagcagaccctgaatttcgacctgctgaagctggctggcgacgtggaatccaacccaggccctactagtatggactggatttggcgcatccttttccttgtcggcgctgctaccggcgcgcattccgggccccagctccagctgcaagagtctggacctggcctggtcaagcctagcgagacactgagcctgacctgtaccgtgtccggcgatagcatcagcagcggcgattactactggggctggatcagacagcctcctggcaaaggactggaatggatcggccacatctactacagcggcgtgacctactacaaccccagcctgaagtccagagtgaccatcagcgtggacaccagccggaaccagttctccctgaagctgtctagcgtgacagccgccgataccgccgtgtactactgcaccagagaggacagcagcaactggcggagtagaggccagggaacactggtcacagttagctctggatccggcggaggcggaagtggaggcggaggatctggcggcggaggctctttcgaagaagtgcaactggtggaaagcgggggaggacttgtgaagcctggcggctctctgagactgagctgtgccgcctctggcttcaccttcagcagctacgacatgagctgggtgcgccaggctcctggcaagggactggaatgggtgtccaccatcagcagcggcggcagctacacctactacctggacagcatcaagggccggttcaccatctccagagacaacgccaagaacagcctgtacctccagatgaactccctgcgggccgaggacacagccgtgtattattgcgccagacagggcctggattactggggcagaggcacccttgtgaccgtgtcctctacgcgtgaggacctgaagaacgtgttcccacctgaggtggccgtgttcgagcctagcgaggccgagatcagccacacccagaaagccaccctcgtgtgcctggctaccggcttctaccccgaccatgtggaactgtcttggtgggtcaacggcaaagaggtgcacagcggcgtgtgtaccgacccccagccactgaaagaacagcccgccctgaacgacagccggtactgcctgagcagcagactgagagtgtccgccaccttctggcagaacccccggaaccacttcagatgccaggtgcagttctacggcctgagcgagaacgacgagtggacccaggacagagccaagcccgtgacccagatcgtgtctgccgaagcctggggcagagccgatgatgtgattaagatccactggcaggaaaagaagtccaacaccatcctgggcagccaggaaggcaacaccatgaagaccaacgacacctacatgaagttcagctggctgaccgtgcccgagaagtccctggacaaagaacacagatgcatcgtgcggcacgaaaacaacaagaacggcgtggaccaggaaatcatcttcccacccatcaagaccgatgtgattacaatggaccccaaggacaactgctccaaggacgccaacgataccctgctgctccagctgaccaacaccagcgcctactacatgtacttgttgctgctgctgaagtccgtggtgtacttcgccatcatcacatgctgcctgctgcggagaaccgccttctgctgcaacggcgagaagtct

SEQ ID NO: 7889 - DNA, 3003 bp, synthetic construct
  source 1..3003: mol_type = other DNA
atggccttaccagtgaccgccttgctcctgccgctggccttgctgctccacgccgccaggccggaagtgcagctggttgaatctggcggaggactggttcagcctggcggatctctgagactgtcttgtgccgccagcggcttcagcttcagcgacttttggatgagctgggtccgacaggcccctggcaaaggacttgaatgggtcgccacaatcagccaggccggcagcgagaaggactacgtggactctgtgaagggcagattcaccatcagccgggacaacgccaagaagtccctgtacctccagatgaacagcctgagagccgaggacaccgccgtgtactattgtgcctctggcgtgtacagcttcgactacagaggccagggcaccctggtcacagtctcttctggtaccggcggaggcggatctggcggcggaggtagcggtggcggaggatctgaattcgacatcgtgatgacccagagccccgatagcctggccgtgtctctgggagagagagccaccatcaactgccgggccagcaagagcgtgtccaccagcggctacagcttcatgcactggtatcagcagaagcccggccagccccccaagctgctgatctacctggcctccaacctggaaagcggcgtgcccgatagattcagcggcagcggctctggcaccgacttcaccctgaccatcagttctcttcaggccgaggacgtggccgtgtactactgccagcacagcagagaggtgccctggacattcggccagggcacaaaggtggaaatcaagcggctcgagatccagaaccctgatcctgccgtgtaccagctgcgggatagcaagagcagcgacaagagcgtgtgtctgttcaccgacttcgacagccagaccaacgtgtcccagagcaaggactccgacgtgtacatcaccgataagtgcgtgctggacatgcggagcatggacttcaagagcaactccgccgtggcctggtccaacaagtccgatttcgcctgcgccaacgccttcaacaacagcattatccccgaggacacattcttcccaagccccgagagcagcgactccaccgaccacgtgaagcccaaagagacagagaacaccaagcagcccagcaagagctgccacaagcccaaggccatcgtgcacaccgagaaagtgaacatgatgagcctgaccgtgctgggcctgcggatgctgttcgccaaaaccgtggccgtgaacttcctgctgaccgccaagctgttcttcctccgcgccaagagaagcggatctggcgtgaagcagaccctgaatttcgacctgctgaagctggctggcgacgtggaatccaacccaggccctactagtatggactggatttggcgcatccttttccttgtcggcgctgctaccggcgcgcattccgggccccagctccagctgcaagagtctggacctggcctggtcaagcctagcgagacactgagcctgacctgtaccgtgtccggcgatagcatcagcagcggcgattactactggggctggatcagacagcctcctggcaaaggactggaatggatcggccacatctactacagcggcgtgacctactacaaccccagcctgaagtccagagtgaccatcagcgtggacaccagccggaaccagttctccctgaagctgtctagcgtgacagccgccgataccgccgtgtactactgcaccagagaggacagcagcaactggcggagtagaggccagggaacactggtcacagttagctctggatccggcggaggcggaagtggaggcggaggatctggcggcggaggctctttcgaacaggtgcagctggtgcagtctggggccgaagtgaagaaacctggggccagcgtgaaggtgtcctgcaaggccagcggatacacctttaccaactacggcatgaactgggtgcgccaggcccctggacagggcctggaatggatgggctggatcaacacctacaccggcgagcccacatacgccgacgccttcaagggcagattcgccttcagcctggacaccagcacctccaccgcctacctccagatcaacagcctgcggagcgacgacaccgccgtgtattattgcgccagagattacggcgactacgggatggactattggggccagggaaccaccgtgaccgtgtcctctacgcgtgaggacctgaagaacgtgttcccacctgaggtggccgtgttcgagcctagcgaggccgagatcagccacacccagaaagccaccctcgtgtgcctggctaccggcttctaccccgaccatgtggaactgtcttggtgggtcaacggcaaagaggtgcacagcggcgtgtgtaccgacccccagccactgaaagaacagcccgccctgaacgacagccggtactgcctgagcagcagactgagagtgtccgccaccttctggcagaacccccggaaccacttcagatgccaggtgcagttctacggcctgagcgagaacgacgagtggacccaggacagagccaagcccgtgacccagatcgtgtctgccgaagcctggggcagagccgatgatgtgattaagatccactggcaggaaaagaagtccaacaccatcctgggcagccaggaaggcaacaccatgaagaccaacgacacctacatgaagttcagctggctgaccgtgcccgagaagtccctggacaaagaacacagatgcatcgtgcggcacgaaaacaacaagaacggcgtggaccaggaaatcatcttcccacccatcaagaccgatgtgattacaatggaccccaaggacaactgctccaaggacgccaacgataccctgctgctccagctgaccaacaccagcgcctactacatgtacttgttgctgctgctgaagtccgtggtgtacttcgccatcatcacatgctgcctgctgcggagaaccgccttctgctgcaacggcgagaagtct

SEQ ID NO: 7890 - DNA, 2991 bp, synthetic construct
  source 1..2991: mol_type = other DNA
atggccttaccagtgaccgccttgctcctgccgctggccttgctgctccacgccgccaggccggaagtgcagctggttgaatctggcggaggactggttcagcctggcggatctctgagactgtcttgtgccgccagcggcttcagcttcagcgacttttggatgagctgggtccgacaggcccctggcaaaggacttgaatgggtcgccacaatcagccaggccggcagcgagaaggactacgtggactctgtgaagggcagattcaccatcagccgggacaacgccaagaagtccctgtacctccagatgaacagcctgagagccgaggacaccgccgtgtactattgtgcctctggcgtgtacagcttcgactacagaggccagggcaccctggtcacagtctcttctggtaccggcggaggcggatctggcggcggaggtagcggtggcggaggatctgaattcgacatcgtgatgacccagacccccctgaccctgagcgtgacaatcggacagcctgccagcatctcctgcaagagcagccagagcctgctggacagcgacggcaagacctacctgaactggctgctgcagaggccaggccagagccccgagagactgatctacctggtgtccaagctggactccggcgtgcccgatagattcacaggcagcggctccggcaccgacttcaccctgaagatcagccgggtggaagccgaggacctgggcgtgtactgttgttggcagggcacccacttcccttacaccttcggcggagggaccaaggtggaaatcaagggcctcgagatccagaaccctgatcctgccgtgtaccagctgcgggatagcaagagcagcgacaagagcgtgtgtctgttcaccgacttcgacagccagaccaacgtgtcccagagcaaggactccgacgtgtacatcaccgataagtgcgtgctggacatgcggagcatggacttcaagagcaactccgccgtggcctggtccaacaagtccgatttcgcctgcgccaacgccttcaacaacagcattatccccgaggacacattcttcccaagccccgagagcagcgactccaccgaccacgtgaagcccaaagagacagagaacaccaagcagcccagcaagagctgccacaagcccaaggccatcgtgcacaccgagaaagtgaacatgatgagcctgaccgtgctgggcctgcggatgctgttcgccaaaaccgtggccgtgaacttcctgctgaccgccaagctgttcttcctccgcgccaagagaagcggatctggcgtgaagcagaccctgaatttcgacctgctgaagctggctggcgacgtggaatccaacccaggccctactagtatggactggatttggcgcatccttttccttgtcggcgctgctaccggcgcgcattccgggccccagctccagctgcaagagtctggacctggcctggtcaagcctagcgagacactgagcctgacctgtaccgtgtccggcgatagcatcagcagcggcgattactactggggctggatcagacagcctcctggcaaaggactggaatggatcggccacatctactacagcggcgtgacctactacaaccccagcctgaagtccagagtgaccatcagcgtggacaccagccggaaccagttctccctgaagctgtctagcgtgacagccgccgataccgccgtgtactactgcaccagagaggacagcagcaactggcggagtagaggccagggaacactggtcacagttagctctggatccggcggaggcggaagtggaggcggaggatctggcggcggaggctctttcgaacaggtgcaactgcagcagcctggcgctgaacttgtgcggccaggcgcctctgtgaagctgagctgtaaagccagcggctacaccttcaccagctactggatgaactgggtcaagcagcgcccaggccagggcctggaatggatcggaatgatcgaccccagcgacagcgagacacactacaaccacatcttcaaggacaaggccaccctgaccgtggacaagtccagcagcacagcctacctgcaactgtccagcctgaccagcgaggacagcgccgtgtactactgcgcccggaacctgtatctgtggggccagggaacaagcgtgaccgtgtctagcacgcgtgaggacctgaagaacgtgttcccacctgaggtggccgtgttcgagcctagcgaggccgagatcagccacacccagaaagccaccctcgtgtgcctggctaccggcttctaccccgaccatgtggaactgtcttggtgggtcaacggcaaagaggtgcacagcggcgtgtgtaccgacccccagccactgaaagaacagcccgccctgaacgacagccggtactgcctgagcagcagactgagagtgtccgccaccttctggcagaacccccggaaccacttcagatgccaggtgcagttctacggcctgagcgagaacgacgagtggacccaggacagagccaagcccgtgacccagatcgtgtctgccgaagcctggggcagagccgatgatgtgattaagatccactggcaggaaaagaagtccaacaccatcctgggcagccaggaaggcaacaccatgaagaccaacgacacctacatgaagttcagctggctgaccgtgcccgagaagtccctggacaaagaacacagatgcatcgtgcggcacgaaaacaacaagaacggcgtggaccaggaaatcatcttcccacccatcaagaccgatgtgattacaatggaccccaaggacaactgctccaaggacgccaacgataccctgctgctccagctgaccaacaccagcgcctactacatgtacttgttgctgctgctgaagtccgtggtgtacttcgccatcatcacatgctgcctgctgcggagaaccgccttctgctgcaacggcgagaagtct

SEQ ID NO: 7891 - DNA, 3015 bp, synthetic construct
  source 1..3015: mol_type = other DNA
atggccttaccagtgaccgccttgctcctgccgctggccttgctgctccacgccgccaggccggaagtgcagctggttgaatctggcggaggactggttcagcctggcggatctctgagactgtcttgtgccgccagcggcttcagcttcagcgacttttggatgagctgggtccgacaggcccctggcaaaggacttgaatgggtcgccacaatcagccaggccggcagcgagaaggactacgtggactctgtgaagggcagattcaccatcagccgggacaacgccaagaagtccctgtacctccagatgaacagcctgagagccgaggacaccgccgtgtactattgtgcctctggcgtgtacagcttcgactacagaggccagggcaccctggtcacagtctcttctggtaccggcggaggcggatctggcggcggaggtagcggtggcggaggatctgaattcgacatcgtgatgacccagagccccgatagcctggccgtgtctctgggagagagagccaccatcaactgcgagagcagccagagcctgctgaacagcggcaaccagaagaactacctgacctggtatcagcagaagcccggccagccccccaagcccctgatctattgggccagcaccagagaaagcggcgtgcccgatagattcagcggcagcggaagcggcaccgacttcaccctgaccatcagttctcttcaggccgaggacgtggccgtgtactactgccagaacgactacagctacccctacaccttcggccagggcaccaagctggaaatcaagagactcgagatccagaaccctgatcctgccgtgtaccagctgcgggatagcaagagcagcgacaagagcgtgtgtctgttcaccgacttcgacagccagaccaacgtgtcccagagcaaggactccgacgtgtacatcaccgataagtgcgtgctggacatgcggagcatggacttcaagagcaactccgccgtggcctggtccaacaagtccgatttcgcctgcgccaacgccttcaacaacagcattatccccgaggacacattcttcccaagccccgagagcagcgactccaccgaccacgtgaagcccaaagagacagagaacaccaagcagcccagcaagagctgccacaagcccaaggccatcgtgcacaccgagaaagtgaacatgatgagcctgaccgtgctgggcctgcggatgctgttcgccaaaaccgtggccgtgaacttcctgctgaccgccaagctgttcttcctccgcgccaagagaagcggatctggcgtgaagcagaccctgaatttcgacctgctgaagctggctggcgacgtggaatccaacccaggccctactagtatggactggatttggcgcatccttttccttgtcggcgctgctaccggcgcgcattccgggccccagctccagctgcaagagtctggacctggcctggtcaagcctagcgagacactgagcctgacctgtaccgtgtccggcgatagcatcagcagcggcgattactactggggctggatcagacagcctcctggcaaaggactggaatggatcggccacatctactacagcggcgtgacctactacaaccccagcctgaagtccagagtgaccatcagcgtggacaccagccggaaccagttctccctgaagctgtctagcgtgacagccgccgataccgccgtgtactactgcaccagagaggacagcagcaactggcggagtagaggccagggaacactggtcacagttagctctggatccggcggaggcggaagtggaggcggaggatctggcggcggaggctctttcgaagaagtgcagctggtgcagtctggggccgaagtgaagaagcctggcgagagcctgaagatcagctgcaagggcagcggctacagcttcaccgactactacatgaagtgggccagacagatgcccggcaagggcctggaatggatgggcgacatcatccccagcaacggggccaccttctacaaccagaaattcaagggccaagtgaccatctccgccgacaagagcatcagcaccacctacctccagtggtccagcctgaaggccagcgacaccgccatgtactattgcgccagaagccatctgctgcgggccagttggttcgcctattggggccagggaacaatggtcacagtgtccagcacgcgtgaggacctgaagaacgtgttcccacctgaggtggccgtgttcgagcctagcgaggccgagatcagccacacccagaaagccaccctcgtgtgcctggctaccggcttctaccccgaccatgtggaactgtcttggtgggtcaacggcaaagaggtgcacagcggcgtgtgtaccgacccccagccactgaaagaacagcccgccctgaacgacagccggtactgcctgagcagcagactgagagtgtccgccaccttctggcagaacccccggaaccacttcagatgccaggtgcagttctacggcctgagcgagaacgacgagtggacccaggacagagccaagcccgtgacccagatcgtgtctgccgaagcctggggcagagccgatgatgtgattaagatccactggcaggaaaagaagtccaacaccatcctgggcagccaggaaggcaacaccatgaagaccaacgacacctacatgaagttcagctggctgaccgtgcccgagaagtccctggacaaagaacacagatgcatcgtgcggcacgaaaacaacaagaacggcgtggaccaggaaatcatcttcccacccatcaagaccgatgtgattacaatggaccccaaggacaactgctccaaggacgccaacgataccctgctgctccagctgaccaacaccagcgcctactacatgtacttgttgctgctgctgaagtccgtggtgtacttcgccatcatcacatgctgcctgctgcggagaaccgccttctgctgcaacggcgagaagtct

SEQ ID NO: 7892 - DNA, 3000 bp, synthetic construct
  source 1..3000: mol_type = other DNA
atggccttaccagtgaccgccttgctcctgccgctggccttgctgctccacgccgccaggccggaagtgcagctggttgaatctggcggaggactggttcagcctggcggatctctgagactgtcttgtgccgccagcggcttcagcttcagcgacttttggatgagctgggtccgacaggcccctggcaaaggacttgaatgggtcgccacaatcagccaggccggcagcgagaaggactacgtggactctgtgaagggcagattcaccatcagccgggacaacgccaagaagtccctgtacctccagatgaacagcctgagagccgaggacaccgccgtgtactattgtgcctctggcgtgtacagcttcgactacagaggccagggcaccctggtcacagtctcttctggtaccggcggaggcggatctggcggcggaggtagcggtggcggaggatctgaattcgacatccagatgacccagtctaccagttccctgagtgcatccctcggagacagggtgacgatcagttgcagcgcaagccaagggatcaataactatctgaactggtatcagcagaaaccggacggaacagtcgaactcctgatttattacaccagcacccttcagagtggcgtcccttcccggttcagtggctccggaagcgggaccgattactccctgaccatttctaatctggagccagaggacataggaacgtattattgccagcagtatagtaaactgccacgaacttttggaggggggacgaaactggagatcaaactcgagatccagaaccctgatcctgccgtgtaccagctgcgggatagcaagagcagcgacaagagcgtgtgtctgttcaccgacttcgacagccagaccaacgtgtcccagagcaaggactccgacgtgtacatcaccgataagtgcgtgctggacatgcggagcatggacttcaagagcaactccgccgtggcctggtccaacaagtccgatttcgcctgcgccaacgccttcaacaacagcattatccccgaggacacattcttcccaagccccgagagcagcgactccaccgaccacgtgaagcccaaagagacagagaacaccaagcagcccagcaagagctgccacaagcccaaggccatcgtgcacaccgagaaagtgaacatgatgagcctgaccgtgctgggcctgcggatgctgttcgccaaaaccgtggccgtgaacttcctgctgaccgccaagctgttcttcctccgcgccaagagaagcggatctggcgtgaagcagaccctgaatttcgacctgctgaagctggctggcgacgtggaatccaacccaggccctactagtatggactggatttggcgcatccttttccttgtcggcgctgctaccggcgcgcattccgggccccagctccagctgcaagagtctggacctggcctggtcaagcctagcgagacactgagcctgacctgtaccgtgtccggcgatagcatcagcagcggcgattactactggggctggatcagacagcctcctggcaaaggactggaatggatcggccacatctactacagcggcgtgacctactacaaccccagcctgaagtccagagtgaccatcagcgtggacaccagccggaaccagttctccctgaagctgtctagcgtgacagccgccgataccgccgtgtactactgcaccagagaggacagcagcaactggcggagtagaggccagggaacactggtcacagttagctctggatccggcggaggcggaagtggaggcggaggatctggcggcggaggctctttcgaacaggtgcaactccagcagtccggaagcgagcttatgatgccaggggcatcagtgaagatcagctgcaaggctactggctacaccttctctaattactggatagagtgggttaaacaaaggccagggcacggcctggaatggatcggcgagatcctgcctgggacaggccgaaccatttataacgagaagttcaaaggcaaggctactttcaccgcagatataagctctaatacagtgcaaatgcagctctcttccctgacaagtgaggatagtgccgtgtattattgcgcacgaagagattactatggaaatttttattacgctatggattattggggtcaaggaacaagtgtgaccgttagcagcacgcgtgaggacctgaagaacgtgttcccacctgaggtggccgtgttcgagcctagcgaggccgagatcagccacacccagaaagccaccctcgtgtgcctggctaccggcttctaccccgaccatgtggaactgtcttggtgggtcaacggcaaagaggtgcacagcggcgtgtgtaccgacccccagccactgaaagaacagcccgccctgaacgacagccggtactgcctgagcagcagactgagagtgtccgccaccttctggcagaacccccggaaccacttcagatgccaggtgcagttctacggcctgagcgagaacgacgagtggacccaggacagagccaagcccgtgacccagatcgtgtctgccgaagcctggggcagagccgatgatgtgattaagatccactggcaggaaaagaagtccaacaccatcctgggcagccaggaaggcaacaccatgaagaccaacgacacctacatgaagttcagctggctgaccgtgcccgagaagtccctggacaaagaacacagatgcatcgtgcggcacgaaaacaacaagaacggcgtggaccaggaaatcatcttcccacccatcaagaccgatgtgattacaatggaccccaaggacaactgctccaaggacgccaacgataccctgctgctccagctgaccaacaccagcgcctactacatgtacttgttgctgctgctgaagtccgtggtgtacttcgccatcatcacatgctgcctgctgcggagaaccgccttctgctgcaacggcgagaagtct

SEQ ID NO: 7893 - DNA, 2985 bp, synthetic construct
  source 1..2985: mol_type = other DNA
atggccttaccagtgaccgccttgctcctgccgctggccttgctgctccacgccgccaggccggaagtgcagctggttgaatctggcggaggactggttcagcctggcggatctctgagactgtcttgtgccgccagcggcttcagcttcagcgacttttggatgagctgggtccgacaggcccctggcaaaggacttgaatgggtcgccacaatcagccaggccggcagcgagaaggactacgtggactctgtgaagggcagattcaccatcagccgggacaacgccaagaagtccctgtacctccagatgaacagcctgagagccgaggacaccgccgtgtactattgtgcctctggcgtgtacagcttcgactacagaggccagggcaccctggtcacagtctcttctggtaccggcggaggcggatctggcggcggaggtagcggtggcggaggatctgaattcgacatccagatgacccagagccctgccagcctgtccgtgtctgtgggcgagacagtgaccatcacctgtcgggccagcgagaacatctacagcaacctggcctggtatcagcagaagcagggcaagagcccccaactgctggtgtacgccgccaccaatctggccgatggcgtgcccagcagattttccggctctggcagcggcacccagtacagcctgaagatcaacagcctccagagcgaggacttcggcagctactactgccagcacttctggggcacctggacctttggaggaggcaccaccctggaaatcaagctcgagatccagaaccctgatcctgccgtgtaccagctgcgggatagcaagagcagcgacaagagcgtgtgtctgttcaccgacttcgacagccagaccaacgtgtcccagagcaaggactccgacgtgtacatcaccgataagtgcgtgctggacatgcggagcatggacttcaagagcaactccgccgtggcctggtccaacaagtccgatttcgcctgcgccaacgccttcaacaacagcattatccccgaggacacattcttcccaagccccgagagcagcgactccaccgaccacgtgaagcccaaagagacagagaacaccaagcagcccagcaagagctgccacaagcccaaggccatcgtgcacaccgagaaagtgaacatgatgagcctgaccgtgctgggcctgcggatgctgttcgccaaaaccgtggccgtgaacttcctgctgaccgccaagctgttcttcctccgcgccaagagaagcggatctggcgtgaagcagaccctgaatttcgacctgctgaagctggctggcgacgtggaatccaacccaggccctactagtatggactggatttggcgcatccttttccttgtcggcgctgctaccggcgcgcattccgggccccagctccagctgcaagagtctggacctggcctggtcaagcctagcgagacactgagcctgacctgtaccgtgtccggcgatagcatcagcagcggcgattactactggggctggatcagacagcctcctggcaaaggactggaatggatcggccacatctactacagcggcgtgacctactacaaccccagcctgaagtccagagtgaccatcagcgtggacaccagccggaaccagttctccctgaagctgtctagcgtgacagccgccgataccgccgtgtactactgcaccagagaggacagcagcaactggcggagtagaggccagggaacactggtcacagttagctctggatccggcggaggcggaagtggaggcggaggatctggcggcggaggctctttcgaagaagtgcaactccagcagagcggccctgagcttgtgaagcctggcgcttccgtgaagatgagctgcaaggccagcggctacaccttcaccgactactacatgaagtggatgaagcagagccacggcaagtccctggaatggatcggcgacatcaaccccaacaacggcggcaccacctacaaccagaagttcaagggcaaggccaccctgaccgtggacaagagcagcagcaccgcctacatgcaactgaacagcctgaccagcgaggacagcgccgtgtactactgcgccagagactacggctacggctatttcgactactggggccagggcacaaccctgacagtgtcctctacgcgtgaggacctgaagaacgtgttcccacctgaggtggccgtgttcgagcctagcgaggccgagatcagccacacccagaaagccaccctcgtgtgcctggctaccggcttctaccccgaccatgtggaactgtcttggtgggtcaacggcaaagaggtgcacagcggcgtgtgtaccgacccccagccactgaaagaacagcccgccctgaacgacagccggtactgcctgagcagcagactgagagtgtccgccaccttctggcagaacccccggaaccacttcagatgccaggtgcagttctacggcctgagcgagaacgacgagtggacccaggacagagccaagcccgtgacccagatcgtgtctgccgaagcctggggcagagccgatgatgtgattaagatccactggcaggaaaagaagtccaacaccatcctgggcagccaggaaggcaacaccatgaagaccaacgacacctacatgaagttcagctggctgaccgtgcccgagaagtccctggacaaagaacacagatgcatcgtgcggcacgaaaacaacaagaacggcgtggaccaggaaatcatcttcccacccatcaagaccgatgtgattacaatggaccccaaggacaactgctccaaggacgccaacgataccctgctgctccagctgaccaacaccagcgcctactacatgtacttgttgctgctgctgaagtccgtggtgtacttcgccatcatcacatgctgcctgctgcggagaaccgccttctgctgcaacggcgagaagtct

SEQ ID NO: 7894 - DNA, 2994 bp, synthetic construct
  source 1..2994: mol_type = other DNA
atggccttaccagtgaccgccttgctcctgccgctggccttgctgctccacgccgccaggccggaagtgcagctggttgaatctggcggaggactggttcagcctggcggatctctgagactgtcttgtgccgccagcggcttcagcttcagcgacttttggatgagctgggtccgacaggcccctggcaaaggacttgaatgggtcgccacaatcagccaggccggcagcgagaaggactacgtggactctgtgaagggcagattcaccatcagccgggacaacgccaagaagtccctgtacctccagatgaacagcctgagagccgaggacaccgccgtgtactattgtgcctctggcgtgtacagcttcgactacagaggccagggcaccctggtcacagtctcttctggtaccggcggaggcggatctggcggcggaggtagcggtggcggaggatctgaattcgagatcgtgctgacacagagccctggcaccctgagcctgtctccaggcgaaagagccacactgagctgtcgggcctctcagagcgtgggaggctacctggcttggtatcagcagaagccaggccaggcccccagactgctgatctacgacgccagcaatcgggccacaggcatccccgccagattttctggcagcggctccggcaccgacttcaccctgacaatcagcagcctggaacccgaggacttcgccgtgtactactgccagcagcggaacaactggccccccatgtacacattcggccagggcaccaagctggaaatcaagagactcgagatccagaaccctgatcctgccgtgtaccagctgcgggatagcaagagcagcgacaagagcgtgtgtctgttcaccgacttcgacagccagaccaacgtgtcccagagcaaggactccgacgtgtacatcaccgataagtgcgtgctggacatgcggagcatggacttcaagagcaactccgccgtggcctggtccaacaagtccgatttcgcctgcgccaacgccttcaacaacagcattatccccgaggacacattcttcccaagccccgagagcagcgactccaccgaccacgtgaagcccaaagagacagagaacaccaagcagcccagcaagagctgccacaagcccaaggccatcgtgcacaccgagaaagtgaacatgatgagcctgaccgtgctgggcctgcggatgctgttcgccaaaaccgtggccgtgaacttcctgctgaccgccaagctgttcttcctccgcgccaagagaagcggatctggcgtgaagcagaccctgaatttcgacctgctgaagctggctggcgacgtggaatccaacccaggccctactagtatggactggatttggcgcatccttttccttgtcggcgctgctaccggcgcgcattccgggccccagctccagctgcaagagtctggacctggcctggtcaagcctagcgagacactgagcctgacctgtaccgtgtccggcgatagcatcagcagcggcgattactactggggctggatcagacagcctcctggcaaaggactggaatggatcggccacatctactacagcggcgtgacctactacaaccccagcctgaagtccagagtgaccatcagcgtggacaccagccggaaccagttctccctgaagctgtctagcgtgacagccgccgataccgccgtgtactactgcaccagagaggacagcagcaactggcggagtagaggccagggaacactggtcacagttagctctggatccggcggaggcggaagtggaggcggaggatctggcggcggaggctctttcgaacaggtgcaactggtgcagagcggagccgaagtgaagaaacccggcagcagcgtgaaggtgtcctgcaaggcttccggcggcaccttcagcagctacgccatttcttgggtgcgccaggctcctggacagggcctggaatggatgggcggcatcatccctatcctgggcaccgccaactacgcccagaaattccagggcagagtgaccatcaccgccgacgagagcaccagcaccgcctacatggaactgagcagcctgcggagcgaggacacagccgtgtattattgcgccagatggggcggaggggccttcgacatttggggccagggaacaatggtcaccgtgtccagcacgcgtgaggacctgaagaacgtgttcccacctgaggtggccgtgttcgagcctagcgaggccgagatcagccacacccagaaagccaccctcgtgtgcctggctaccggcttctaccccgaccatgtggaactgtcttggtgggtcaacggcaaagaggtgcacagcggcgtgtgtaccgacccccagccactgaaagaacagcccgccctgaacgacagccggtactgcctgagcagcagactgagagtgtccgccaccttctggcagaacccccggaaccacttcagatgccaggtgcagttctacggcctgagcgagaacgacgagtggacccaggacagagccaagcccgtgacccagatcgtgtctgccgaagcctggggcagagccgatgatgtgattaagatccactggcaggaaaagaagtccaacaccatcctgggcagccaggaaggcaacaccatgaagaccaacgacacctacatgaagttcagctggctgaccgtgcccgagaagtccctggacaaagaacacagatgcatcgtgcggcacgaaaacaacaagaacggcgtggaccaggaaatcatcttcccacccatcaagaccgatgtgattacaatggaccccaaggacaactgctccaaggacgccaacgataccctgctgctccagctgaccaacaccagcgcctactacatgtacttgttgctgctgctgaagtccgtggtgtacttcgccatcatcacatgctgcctgctgcggagaaccgccttctgctgcaacggcgagaagtct

SEQ ID NO: 7895 - DNA, 2979 bp, synthetic construct
  source 1..2979: mol_type = other DNA
atggccttaccagtgaccgccttgctcctgccgctggccttgctgctccacgccgccaggccggaagtgcagctggttgaatctggcggaggactggttcagcctggcggatctctgagactgtcttgtgccgccagcggcttcagcttcagcgacttttggatgagctgggtccgacaggcccctggcaaaggacttgaatgggtcgccacaatcagccaggccggcagcgagaaggactacgtggactctgtgaagggcagattcaccatcagccgggacaacgccaagaagtccctgtacctccagatgaacagcctgagagccgaggacaccgccgtgtactattgtgcctctggcgtgtacagcttcgactacagaggccagggcaccctggtcacagtctcttctggtaccggcggaggcggatctggcggcggaggtagcggtggcggaggatctgaattccagatcgtgctgacacagagccctgccctgatgagcgccagccctggcgagaaagtgaccatgacctgtagcgccagcagcagcgtgcgctacatgtactggtatcagcagaagcccagaagcagccccaagccctggattcacctgaccagcaatctggcctctggcgtgcccgctagattttccggctctggcagcggcaccagctacagcctgaccatcagcagcatggaagccgaggacgccgccacctactactgccagcagtggtccagccaccccttcacatttggctccggcaccaagctggaaatcaagctcgagatccagaaccctgatcctgccgtgtaccagctgcgggatagcaagagcagcgacaagagcgtgtgtctgttcaccgacttcgacagccagaccaacgtgtcccagagcaaggactccgacgtgtacatcaccgataagtgcgtgctggacatgcggagcatggacttcaagagcaactccgccgtggcctggtccaacaagtccgatttcgcctgcgccaacgccttcaacaacagcattatccccgaggacacattcttcccaagccccgagagcagcgactccaccgaccacgtgaagcccaaagagacagagaacaccaagcagcccagcaagagctgccacaagcccaaggccatcgtgcacaccgagaaagtgaacatgatgagcctgaccgtgctgggcctgcggatgctgttcgccaaaaccgtggccgtgaacttcctgctgaccgccaagctgttcttcctccgcgccaagagaagcggatctggcgtgaagcagaccctgaatttcgacctgctgaagctggctggcgacgtggaatccaacccaggccctactagtatggactggatttggcgcatccttttccttgtcggcgctgctaccggcgcgcattccgggccccagctccagctgcaagagtctggacctggcctggtcaagcctagcgagacactgagcctgacctgtaccgtgtccggcgatagcatcagcagcggcgattactactggggctggatcagacagcctcctggcaaaggactggaatggatcggccacatctactacagcggcgtgacctactacaaccccagcctgaagtccagagtgaccatcagcgtggacaccagccggaaccagttctccctgaagctgtctagcgtgacagccgccgataccgccgtgtactactgcaccagagaggacagcagcaactggcggagtagaggccagggaacactggtcacagttagctctggatccggcggaggcggaagtggaggcggaggatctggcggcggaggctctttcgaagatgtgcaactccaggaaagcggccctggccttgtgaagcctagccagagcctgtccctgacctgtaccgtgaccggcttcagcatcaccagcgactactcttggaactggatcagacagttccctggcaacaaactggaatggatgggctacatcagctactccggccacacctcctacaaccccagcctggaaagccggatctccatcaccagagacaccagcaagaaccagttcttcttgcaactgaacagcgtgaccaccgaggataccgccacatattactgtaccagaggcaactgggacgtggtgtactggggccagggcacacttgtgaccgtgtctgctacgcgtgaggacctgaagaacgtgttcccacctgaggtggccgtgttcgagcctagcgaggccgagatcagccacacccagaaagccaccctcgtgtgcctggctaccggcttctaccccgaccatgtggaactgtcttggtgggtcaacggcaaagaggtgcacagcggcgtgtgtaccgacccccagccactgaaagaacagcccgccctgaacgacagccggtactgcctgagcagcagactgagagtgtccgccaccttctggcagaacccccggaaccacttcagatgccaggtgcagttctacggcctgagcgagaacgacgagtggacccaggacagagccaagcccgtgacccagatcgtgtctgccgaagcctggggcagagccgatgatgtgattaagatccactggcaggaaaagaagtccaacaccatcctgggcagccaggaaggcaacaccatgaagaccaacgacacctacatgaagttcagctggctgaccgtgcccgagaagtccctggacaaagaacacagatgcatcgtgcggcacgaaaacaacaagaacggcgtggaccaggaaatcatcttcccacccatcaagaccgatgtgattacaatggaccccaaggacaactgctccaaggacgccaacgataccctgctgctccagctgaccaacaccagcgcctactacatgtacttgttgctgctgctgaagtccgtggtgtacttcgccatcatcacatgctgcctgctgcggagaaccgccttctgctgcaacggcgagaagtct

SEQ ID NO: 7896 - DNA, 3009 bp, synthetic construct
  source 1..3009: mol_type = other DNA
atggccttaccagtgaccgccttgctcctgccgctggccttgctgctccacgccgccaggccggaagtgcagctggttgaatctggcggaggactggttcagcctggcggatctctgagactgtcttgtgccgccagcggcttcagcttcagcgacttttggatgagctgggtccgacaggcccctggcaaaggacttgaatgggtcgccacaatcagccaggccggcagcgagaaggactacgtggactctgtgaagggcagattcaccatcagccgggacaacgccaagaagtccctgtacctccagatgaacagcctgagagccgaggacaccgccgtgtactattgtgcctctggcgtgtacagcttcgactacagaggccagggcaccctggtcacagtctcttctggtaccggcggaggcggatctggcggcggaggtagcggtggcggaggatctgaattcgacgtcgtgatgacccagagccctctgagcctgcctgtgacactgggacagcctgccagcatctcctgtcggagcagccagagcatcgtgcacagcgacggcaacacctacctggaatggtatcagcagcggccaggccagagccccagacggctgatctacaaggtgtccaacagattcagcggcgtgcccgacagattctccggcagcggctctggcaccgacttcaccctgaagatcagcagagtggaagccgaggacgtgggcgtgtactactgttttcaaggcagccacgccccctggacctttggcggaggaacaaaggtggaaatcaagctcgagatccagaaccctgatcctgccgtgtaccagctgcgggatagcaagagcagcgacaagagcgtgtgtctgttcaccgacttcgacagccagaccaacgtgtcccagagcaaggactccgacgtgtacatcaccgataagtgcgtgctggacatgcggagcatggacttcaagagcaactccgccgtggcctggtccaacaagtccgatttcgcctgcgccaacgccttcaacaacagcattatccccgaggacacattcttcccaagccccgagagcagcgactccaccgaccacgtgaagcccaaagagacagagaacaccaagcagcccagcaagagctgccacaagcccaaggccatcgtgcacaccgagaaagtgaacatgatgagcctgaccgtgctgggcctgcggatgctgttcgccaaaaccgtggccgtgaacttcctgctgaccgccaagctgttcttcctccgcgccaagagaagcggatctggcgtgaagcagaccctgaatttcgacctgctgaagctggctggcgacgtggaatccaacccaggccctactagtatggactggatttggcgcatccttttccttgtcggcgctgctaccggcgcgcattccgggccccagctccagctgcaagagtctggacctggcctggtcaagcctagcgagacactgagcctgacctgtaccgtgtccggcgatagcatcagcagcggcgattactactggggctggatcagacagcctcctggcaaaggactggaatggatcggccacatctactacagcggcgtgacctactacaaccccagcctgaagtccagagtgaccatcagcgtggacaccagccggaaccagttctccctgaagctgtctagcgtgacagccgccgataccgccgtgtactactgcaccagagaggacagcagcaactggcggagtagaggccagggaacactggtcacagttagctctggatccggcggaggcggaagtggaggcggaggatctggcggcggaggctctttcgaagaagtgcaactggtggaatcaggcggcggactggtgcagcctggcggatctctgagactgagctgtgccgccagcggcttcaccttcagcagctacggaatgcactgggtgcgccaggcccctggcaaaggactggaatgggtggcctacatcaccaccagaagcagcaccatctactacgccgacagcgtgaagggccggttcaccatctccagagacaacgccaagaacagcctgtacctccagatgaactccctgcgggccgaggacaccgccgtgtactattgcaccagagagcccctgaccggctactacgctatggactattggggccagggcaccagcgtgaccgtgtctagtacgcgtgaggacctgaagaacgtgttcccacctgaggtggccgtgttcgagcctagcgaggccgagatcagccacacccagaaagccaccctcgtgtgcctggctaccggcttctaccccgaccatgtggaactgtcttggtgggtcaacggcaaagaggtgcacagcggcgtgtgtaccgacccccagccactgaaagaacagcccgccctgaacgacagccggtactgcctgagcagcagactgagagtgtccgccaccttctggcagaacccccggaaccacttcagatgccaggtgcagttctacggcctgagcgagaacgacgagtggacccaggacagagccaagcccgtgacccagatcgtgtctgccgaagcctggggcagagccgatgatgtgattaagatccactggcaggaaaagaagtccaacaccatcctgggcagccaggaaggcaacaccatgaagaccaacgacacctacatgaagttcagctggctgaccgtgcccgagaagtccctggacaaagaacacagatgcatcgtgcggcacgaaaacaacaagaacggcgtggaccaggaaatcatcttcccacccatcaagaccgatgtgattacaatggaccccaaggacaactgctccaaggacgccaacgataccctgctgctccagctgaccaacaccagcgcctactacatgtacttgttgctgctgctgaagtccgtggtgtacttcgccatcatcacatgctgcctgctgcggagaaccgccttctgctgcaacggcgagaagtct

SEQ ID NO: 7897 - DNA, 2985 bp, synthetic construct
  source 1..2985: mol_type = other DNA
atggccttaccagtgaccgccttgctcctgccgctggccttgctgctccacgccgccaggccggaagtgcagctggttgaatctggcggaggactggttcagcctggcggatctctgagactgtcttgtgccgccagcggcttcagcttcagcgacttttggatgagctgggtccgacaggcccctggcaaaggacttgaatgggtcgccacaatcagccaggccggcagcgagaaggactacgtggactctgtgaagggcagattcaccatcagccgggacaacgccaagaagtccctgtacctccagatgaacagcctgagagccgaggacaccgccgtgtactattgtgcctctggcgtgtacagcttcgactacagaggccagggcaccctggtcacagtctcttctggtaccggcggaggcggatctggcggcggaggtagcggtggcggaggatctgaattcgacatccagatgacccagagccccagcagcctgtctgccagcgtgggcgacagagtgaccatcacctgtagagccagccagagcatcagcctgtggctgaactggtatcagcagaagcccggcaaggcccccaagctgctgatctacgccgccagcacactccagagcggcgtgccaagcagattttccggcagcggctccggcaccgacttcaccctgacaatcagctccctccagcccgaggacttcgccacctactactgccagcagtactacaccagcccctacaccttcggccagggcaccaaggtggaaatcaagagactcgagatccagaaccctgatcctgccgtgtaccagctgcgggatagcaagagcagcgacaagagcgtgtgtctgttcaccgacttcgacagccagaccaacgtgtcccagagcaaggactccgacgtgtacatcaccgataagtgcgtgctggacatgcggagcatggacttcaagagcaactccgccgtggcctggtccaacaagtccgatttcgcctgcgccaacgccttcaacaacagcattatccccgaggacacattcttcccaagccccgagagcagcgactccaccgaccacgtgaagcccaaagagacagagaacaccaagcagcccagcaagagctgccacaagcccaaggccatcgtgcacaccgagaaagtgaacatgatgagcctgaccgtgctgggcctgcggatgctgttcgccaaaaccgtggccgtgaacttcctgctgaccgccaagctgttcttcctccgcgccaagagaagcggatctggcgtgaagcagaccctgaatttcgacctgctgaagctggctggcgacgtggaatccaacccaggccctactagtatggactggatttggcgcatccttttccttgtcggcgctgctaccggcgcgcattccgggccccagctccagctgcaagagtctggacctggcctggtcaagcctagcgagacactgagcctgacctgtaccgtgtccggcgatagcatcagcagcggcgattactactggggctggatcagacagcctcctggcaaaggactggaatggatcggccacatctactacagcggcgtgacctactacaaccccagcctgaagtccagagtgaccatcagcgtggacaccagccggaaccagttctccctgaagctgtctagcgtgacagccgccgataccgccgtgtactactgcaccagagaggacagcagcaactggcggagtagaggccagggaacactggtcacagttagctctggatccggcggaggcggaagtggaggcggaggatctggcggcggaggctctttcgaacaggtgcaactgctggaatctggcggcggactggtgcagcctggcggatctctgagactgagctgtgccgccagcggcttcaccttcagcagctacgccatgagctgggtgcgccaggcccctggaaaaggactggaatgggtgtccgtgatccggtccagcggcagcagcacctattacgccgatagcgtgaagggccggttcaccatcagccgggacaacagcaagaacaccctgtacctccagatgaacagcctgcgggccgaggacaccgccgtgtactattgtgctaggggaggcggctacttcgactactggggccagggaacactcgtgaccgtgtcctctacgcgtgaggacctgaagaacgtgttcccacctgaggtggccgtgttcgagcctagcgaggccgagatcagccacacccagaaagccaccctcgtgtgcctggctaccggcttctaccccgaccatgtggaactgtcttggtgggtcaacggcaaagaggtgcacagcggcgtgtgtaccgacccccagccactgaaagaacagcccgccctgaacgacagccggtactgcctgagcagcagactgagagtgtccgccaccttctggcagaacccccggaaccacttcagatgccaggtgcagttctacggcctgagcgagaacgacgagtggacccaggacagagccaagcccgtgacccagatcgtgtctgccgaagcctggggcagagccgatgatgtgattaagatccactggcaggaaaagaagtccaacaccatcctgggcagccaggaaggcaacaccatgaagaccaacgacacctacatgaagttcagctggctgaccgtgcccgagaagtccctggacaaagaacacagatgcatcgtgcggcacgaaaacaacaagaacggcgtggaccaggaaatcatcttcccacccatcaagaccgatgtgattacaatggaccccaaggacaactgctccaaggacgccaacgataccctgctgctccagctgaccaacaccagcgcctactacatgtacttgttgctgctgctgaagtccgtggtgtacttcgccatcatcacatgctgcctgctgcggagaaccgccttctgctgcaacggcgagaagtct

SEQ ID NO: 7898 - DNA, 2994 bp, synthetic construct
  source 1..2994: mol_type = other DNA
atggccttaccagtgaccgccttgctcctgccgctggccttgctgctccacgccgccaggccggaagtgcagctggttgaatctggcggaggactggttcagcctggcggatctctgagactgtcttgtgccgccagcggcttcagcttcagcgacttttggatgagctgggtccgacaggcccctggcaaaggacttgaatgggtcgccacaatcagccaggccggcagcgagaaggactacgtggactctgtgaagggcagattcaccatcagccgggacaacgccaagaagtccctgtacctccagatgaacagcctgagagccgaggacaccgccgtgtactattgtgcctctggcgtgtacagcttcgactacagaggccagggcaccctggtcacagtctcttctggtaccggcggaggcggatctggcggcggaggtagcggtggcggaggatctgaattcgacatccagatgacccagagccccagcagcctgtctgccagcgtgggcgacagagtgaccatcacctgtagagccagccagagcatcagcagctacctgaactggtatcagcagaagcccggcaaggcccccaaactgctgatctacgccgtgtccacactccagagcggcgtgcccagcagattttctggcagcggctccggcaccgacttcaccctgacaatcagctccctccagcccgaggacttcgccacctactactgtcagcagagcggcaccttccctcccaccacatttggacagggcaccaaggtggaaatcaagagactcgagatccagaaccctgatcctgccgtgtaccagctgcgggatagcaagagcagcgacaagagcgtgtgtctgttcaccgacttcgacagccagaccaacgtgtcccagagcaaggactccgacgtgtacatcaccgataagtgcgtgctggacatgcggagcatggacttcaagagcaactccgccgtggcctggtccaacaagtccgatttcgcctgcgccaacgccttcaacaacagcattatccccgaggacacattcttcccaagccccgagagcagcgactccaccgaccacgtgaagcccaaagagacagagaacaccaagcagcccagcaagagctgccacaagcccaaggccatcgtgcacaccgagaaagtgaacatgatgagcctgaccgtgctgggcctgcggatgctgttcgccaaaaccgtggccgtgaacttcctgctgaccgccaagctgttcttcctccgcgccaagagaagcggatctggcgtgaagcagaccctgaatttcgacctgctgaagctggctggcgacgtggaatccaacccaggccctactagtatggactggatttggcgcatccttttccttgtcggcgctgctaccggcgcgcattccgggccccagctccagctgcaagagtctggacctggcctggtcaagcctagcgagacactgagcctgacctgtaccgtgtccggcgatagcatcagcagcggcgattactactggggctggatcagacagcctcctggcaaaggactggaatggatcggccacatctactacagcggcgtgacctactacaaccccagcctgaagtccagagtgaccatcagcgtggacaccagccggaaccagttctccctgaagctgtctagcgtgacagccgccgataccgccgtgtactactgcaccagagaggacagcagcaactggcggagtagaggccagggaacactggtcacagttagctctggatccggcggaggcggaagtggaggcggaggatctggcggcggaggctctttcgaacaggtgcaactgctggaatctggcggcggactggtgcagcctggcggatctctgagactgagctgtgccgccagcggcttcaccttcagcagccacggaatgcactgggtgcgccaggcccctggaaagggactggaatgggtgtccgtgatctccggcagcggcagcaataccggctacgccgatagcgtgaagggccggttcaccatcagccgggacaacagcaagaacaccctgtacctccagatgaacagcctgcgggccgaggacaccgccgtgtactattgtgccagacagtggggcagctacgccttcgattcttggggccagggcaccctcgtgaccgtgtcatctacgcgtgaggacctgaagaacgtgttcccacctgaggtggccgtgttcgagcctagcgaggccgagatcagccacacccagaaagccaccctcgtgtgcctggctaccggcttctaccccgaccatgtggaactgtcttggtgggtcaacggcaaagaggtgcacagcggcgtgtgtaccgacccccagccactgaaagaacagcccgccctgaacgacagccggtactgcctgagcagcagactgagagtgtccgccaccttctggcagaacccccggaaccacttcagatgccaggtgcagttctacggcctgagcgagaacgacgagtggacccaggacagagccaagcccgtgacccagatcgtgtctgccgaagcctggggcagagccgatgatgtgattaagatccactggcaggaaaagaagtccaacaccatcctgggcagccaggaaggcaacaccatgaagaccaacgacacctacatgaagttcagctggctgaccgtgcccgagaagtccctggacaaagaacacagatgcatcgtgcggcacgaaaacaacaagaacggcgtggaccaggaaatcatcttcccacccatcaagaccgatgtgattacaatggaccccaaggacaactgctccaaggacgccaacgataccctgctgctccagctgaccaacaccagcgcctactacatgtacttgttgctgctgctgaagtccgtggtgtacttcgccatcatcacatgctgcctgctgcggagaaccgccttctgctgcaacggcgagaagtct

SEQ ID NO: 7899 - DNA, 3024 bp, synthetic construct
  source 1..3024: mol_type = other DNA
atggccttaccagtgaccgccttgctcctgccgctggccttgctgctccacgccgccaggccggaagtgcagctggttgaatctggcggaggactggttcagcctggcggatctctgagactgtcttgtgccgccagcggcttcagcttcagcgacttttggatgagctgggtccgacaggcccctggcaaaggacttgaatgggtcgccacaatcagccaggccggcagcgagaaggactacgtggactctgtgaagggcagattcaccatcagccgggacaacgccaagaagtccctgtacctccagatgaacagcctgagagccgaggacaccgccgtgtactattgtgcctctggcgtgtacagcttcgactacagaggccagggcaccctggtcacagtctcttctggtaccggcggaggcggatctggcggcggaggtagcggtggcggaggatctgaattcgacatcgtgatgagccagagccctagcagcctggccgtgtccgtgggcgagaaagtgaccatgagctgcaagagcagccagtccctgctgcacagcagcaaccagaagaactacctggcctggtatcagcagaagcccggccagtcccccaaggtgctgatctactgggccagcaccagagaaagcggcgtgcccgatagattcaccggcagcggctctggcaccgacttcaccctgaccatcaccagcgtgaagtccgaggacctggctgtgtactactgccagcagtattacagctacccctggaccttcggcggaggcacccggctggaaatcaaaagactcgagatccagaaccctgatcctgccgtgtaccagctgcgggatagcaagagcagcgacaagagcgtgtgtctgttcaccgacttcgacagccagaccaacgtgtcccagagcaaggactccgacgtgtacatcaccgataagtgcgtgctggacatgcggagcatggacttcaagagcaactccgccgtggcctggtccaacaagtccgatttcgcctgcgccaacgccttcaacaacagcattatccccgaggacacattcttcccaagccccgagagcagcgactccaccgaccacgtgaagcccaaagagacagagaacaccaagcagcccagcaagagctgccacaagcccaaggccatcgtgcacaccgagaaagtgaacatgatgagcctgaccgtgctgggcctgcggatgctgttcgccaaaaccgtggccgtgaacttcctgctgaccgccaagctgttcttcctccgcgccaagagaagcggatctggcgtgaagcagaccctgaatttcgacctgctgaagctggctggcgacgtggaatccaacccaggccctactagtatggactggatttggcgcatccttttccttgtcggcgctgctaccggcgcgcattccgggccccagctccagctgcaagagtctggacctggcctggtcaagcctagcgagacactgagcctgacctgtaccgtgtccggcgatagcatcagcagcggcgattactactggggctggatcagacagcctcctggcaaaggactggaatggatcggccacatctactacagcggcgtgacctactacaaccccagcctgaagtccagagtgaccatcagcgtggacaccagccggaaccagttctccctgaagctgtctagcgtgacagccgccgataccgccgtgtactactgcaccagagaggacagcagcaactggcggagtagaggccagggaacactggtcacagttagctctggatccggcggaggcggaagtggaggcggaggatctggcggcggaggctctttcgaagaagtgcaactccagcagagcgtggccgagcttgtgaagcctggcgcttccgtgaagatgtcctgcaaggtgtccggctacaccctgacagaccacaccatccactggatgaagcagcggcctgagcagggcctggaatggatcggctacatctaccccagggacggcatcaccggctacaacgagaagttcaagggcaaggccacactgaccgccgacaccagcagcagcacagcctacatgcaactgaacagcctgaccagcgaggacagcgccgtgtacttctgtgccagatggggctacagctacagaaactacgcctactactacgactactggggccagggcacaaccctgaccgtgtctagtacgcgtgaggacctgaagaacgtgttcccacctgaggtggccgtgttcgagcctagcgaggccgagatcagccacacccagaaagccaccctcgtgtgcctggctaccggcttctaccccgaccatgtggaactgtcttggtgggtcaacggcaaagaggtgcacagcggcgtgtgtaccgacccccagccactgaaagaacagcccgccctgaacgacagccggtactgcctgagcagcagactgagagtgtccgccaccttctggcagaacccccggaaccacttcagatgccaggtgcagttctacggcctgagcgagaacgacgagtggacccaggacagagccaagcccgtgacccagatcgtgtctgccgaagcctggggcagagccgatgatgtgattaagatccactggcaggaaaagaagtccaacaccatcctgggcagccaggaaggcaacaccatgaagaccaacgacacctacatgaagttcagctggctgaccgtgcccgagaagtccctggacaaagaacacagatgcatcgtgcggcacgaaaacaacaagaacggcgtggaccaggaaatcatcttcccacccatcaagaccgatgtgattacaatggaccccaaggacaactgctccaaggacgccaacgataccctgctgctccagctgaccaacaccagcgcctactacatgtacttgttgctgctgctgaagtccgtggtgtacttcgccatcatcacatgctgcctgctgcggagaaccgccttctgctgcaacggcgagaagtct

SEQ ID NO: 7900 - DNA, 3015 bp, synthetic construct
  source 1..3015: mol_type = other DNA
atggccttaccagtgaccgccttgctcctgccgctggccttgctgctccacgccgccaggccggaagtgcagctggttgaatctggcggaggactggttcagcctggcggatctctgagactgtcttgtgccgccagcggcttcagcttcagcgacttttggatgagctgggtccgacaggcccctggcaaaggacttgaatgggtcgccacaatcagccaggccggcagcgagaaggactacgtggactctgtgaagggcagattcaccatcagccgggacaacgccaagaagtccctgtacctccagatgaacagcctgagagccgaggacaccgccgtgtactattgtgcctctggcgtgtacagcttcgactacagaggccagggcaccctggtcacagtctcttctggtaccggcggaggcggatctggcggcggaggtagcggtggcggaggatctgaattcgagatcgtgctgacacagagccctggcaccctgagcctgtctccaggcgaaagagccacactgagctgtcgggccagccagagcgtgtccagctcttacctggcctggtatcagcagaagcccggccaggctccccggctgctgatctacggaacaagcagcagagccaccggcatccccgacagattttctggcagcggctccggcaccgacttcaccctgacaatcagcagactggaacccgaggacttcgccgtgtactactgccagcagtacggcagcagccccttcacctttggcggaggcaccaaggtggaaatcaagagactcgagatccagaaccctgatcctgccgtgtaccagctgcgggatagcaagagcagcgacaagagcgtgtgtctgttcaccgacttcgacagccagaccaacgtgtcccagagcaaggactccgacgtgtacatcaccgataagtgcgtgctggacatgcggagcatggacttcaagagcaactccgccgtggcctggtccaacaagtccgatttcgcctgcgccaacgccttcaacaacagcattatccccgaggacacattcttcccaagccccgagagcagcgactccaccgaccacgtgaagcccaaagagacagagaacaccaagcagcccagcaagagctgccacaagcccaaggccatcgtgcacaccgagaaagtgaacatgatgagcctgaccgtgctgggcctgcggatgctgttcgccaaaaccgtggccgtgaacttcctgctgaccgccaagctgttcttcctccgcgccaagagaagcggatctggcgtgaagcagaccctgaatttcgacctgctgaagctggctggcgacgtggaatccaacccaggccctactagtatggactggatttggcgcatccttttccttgtcggcgctgctaccggcgcgcattccgggccccagctccagctgcaagagtctggacctggcctggtcaagcctagcgagacactgagcctgacctgtaccgtgtccggcgatagcatcagcagcggcgattactactggggctggatcagacagcctcctggcaaaggactggaatggatcggccacatctactacagcggcgtgacctactacaaccccagcctgaagtccagagtgaccatcagcgtggacaccagccggaaccagttctccctgaagctgtctagcgtgacagccgccgataccgccgtgtactactgcaccagagaggacagcagcaactggcggagtagaggccagggaacactggtcacagttagctctggatccggcggaggcggaagtggaggcggaggatctggcggcggaggctctttcgaacaggtgcaactccaggaatctggccccggactggctaagcccagcgagacactgagcctgacctgtaccgtgtccggcgacagcatcaccagctactactggtcctggatcagacagccccctggcaagggcctggaatggatcggctacatctactacagcggcagcaccaactacaaccccagcctgaagtccagagtgaccatcagcgtggacaccagcaagaaccagttctccctgaagctgagcagcgtgacagccgccgacaccgccgtgtattattgcgccagagatcagcggagaatcgccgctgccggcacccacttttacggcatggatgtgtggggccagggcaccaccgtgaccgtgtcatctacgcgtgaggacctgaagaacgtgttcccacctgaggtggccgtgttcgagcctagcgaggccgagatcagccacacccagaaagccaccctcgtgtgcctggctaccggcttctaccccgaccatgtggaactgtcttggtgggtcaacggcaaagaggtgcacagcggcgtgtgtaccgacccccagccactgaaagaacagcccgccctgaacgacagccggtactgcctgagcagcagactgagagtgtccgccaccttctggcagaacccccggaaccacttcagatgccaggtgcagttctacggcctgagcgagaacgacgagtggacccaggacagagccaagcccgtgacccagatcgtgtctgccgaagcctggggcagagccgatgatgtgattaagatccactggcaggaaaagaagtccaacaccatcctgggcagccaggaaggcaacaccatgaagaccaacgacacctacatgaagttcagctggctgaccgtgcccgagaagtccctggacaaagaacacagatgcatcgtgcggcacgaaaacaacaagaacggcgtggaccaggaaatcatcttcccacccatcaagaccgatgtgattacaatggaccccaaggacaactgctccaaggacgccaacgataccctgctgctccagctgaccaacaccagcgcctactacatgtacttgttgctgctgctgaagtccgtggtgtacttcgccatcatcacatgctgcctgctgcggagaaccgccttctgctgcaacggcgagaagtct

SEQ ID NO: 7901 - DNA, 2991 bp, synthetic construct
  source 1..2991: mol_type = other DNA
atggccttaccagtgaccgccttgctcctgccgctggccttgctgctccacgccgccaggccggaagtgcagctggttgaatctggcggaggactggttcagcctggcggatctctgagactgtcttgtgccgccagcggcttcagcttcagcgacttttggatgagctgggtccgacaggcccctggcaaaggacttgaatgggtcgccacaatcagccaggccggcagcgagaaggactacgtggactctgtgaagggcagattcaccatcagccgggacaacgccaagaagtccctgtacctccagatgaacagcctgagagccgaggacaccgccgtgtactattgtgcctctggcgtgtacagcttcgactacagaggccagggcaccctggtcacagtctcttctggtaccggcggaggcggatctggcggcggaggtagcggtggcggaggatctgaattcgacatcctgctgacccagagccccgtgatcctgtccgtgtctcctggcgagagagtgtccttcagctgtcgggccagccagagcatcggcaccaacatccactggtatcagcagcggaccaacggcagccccagactgctgattaagtacgccagcgagtccatcagcggcatccccagcagattttccggcagcggctccggcaccgacttcaccctgagcatcaacagcgtggaaagcgaggacattgccgactactactgccagcagaacaacaactggcccaccaccttcggagccggcaccaagctggaactgaagctcgagatccagaaccctgatcctgccgtgtaccagctgcgggatagcaagagcagcgacaagagcgtgtgtctgttcaccgacttcgacagccagaccaacgtgtcccagagcaaggactccgacgtgtacatcaccgataagtgcgtgctggacatgcggagcatggacttcaagagcaactccgccgtggcctggtccaacaagtccgatttcgcctgcgccaacgccttcaacaacagcattatccccgaggacacattcttcccaagccccgagagcagcgactccaccgaccacgtgaagcccaaagagacagagaacaccaagcagcccagcaagagctgccacaagcccaaggccatcgtgcacaccgagaaagtgaacatgatgagcctgaccgtgctgggcctgcggatgctgttcgccaaaaccgtggccgtgaacttcctgctgaccgccaagctgttcttcctccgcgccaagagaagcggatctggcgtgaagcagaccctgaatttcgacctgctgaagctggctggcgacgtggaatccaacccaggccctactagtatggactggatttggcgcatccttttccttgtcggcgctgctaccggcgcgcattccgggccccagctccagctgcaagagtctggacctggcctggtcaagcctagcgagacactgagcctgacctgtaccgtgtccggcgatagcatcagcagcggcgattactactggggctggatcagacagcctcctggcaaaggactggaatggatcggccacatctactacagcggcgtgacctactacaaccccagcctgaagtccagagtgaccatcagcgtggacaccagccggaaccagttctccctgaagctgtctagcgtgacagccgccgataccgccgtgtactactgcaccagagaggacagcagcaactggcggagtagaggccagggaacactggtcacagttagctctggatccggcggaggcggaagtggaggcggaggatctggcggcggaggctctttcgaacaggtgcagctgaagcagagcggacctggcctggtgcagcctagccagagcctgtccatcacctgtaccgtgtccggcttcagcctgaccaactacggcgtgcactgggtgcgccagagccctggaaaaggactggaatggctgggagtgatttggagcggcggcaacaccgactacaacacccccttcaccagcagactgtctatcaacaaggacaacagcaagagccaggtgttcttcaagatgaacagcctccagagcaacgacaccgccatctactactgtgctagagccctgacctactatgactacgagttcgcctactggggccagggcacactcgtgacagtgtctgctacgcgtgaggacctgaagaacgtgttcccacctgaggtggccgtgttcgagcctagcgaggccgagatcagccacacccagaaagccaccctcgtgtgcctggctaccggcttctaccccgaccatgtggaactgtcttggtgggtcaacggcaaagaggtgcacagcggcgtgtgtaccgacccccagccactgaaagaacagcccgccctgaacgacagccggtactgcctgagcagcagactgagagtgtccgccaccttctggcagaacccccggaaccacttcagatgccaggtgcagttctacggcctgagcgagaacgacgagtggacccaggacagagccaagcccgtgacccagatcgtgtctgccgaagcctggggcagagccgatgatgtgattaagatccactggcaggaaaagaagtccaacaccatcctgggcagccaggaaggcaacaccatgaagaccaacgacacctacatgaagttcagctggctgaccgtgcccgagaagtccctggacaaagaacacagatgcatcgtgcggcacgaaaacaacaagaacggcgtggaccaggaaatcatcttcccacccatcaagaccgatgtgattacaatggaccccaaggacaactgctccaaggacgccaacgataccctgctgctccagctgaccaacaccagcgcctactacatgtacttgttgctgctgctgaagtccgtggtgtacttcgccatcatcacatgctgcctgctgcggagaaccgccttctgctgcaacggcgagaagtct

SEQ ID NO: 7902 - DNA, 2970 bp, synthetic construct
  source 1..2970: mol_type = other DNA
atggccttaccagtgaccgccttgctcctgccgctggccttgctgctccacgccgccaggccggaagtgcagctggttgaatctggcggaggactggttcagcctggcggatctctgagactgtcttgtgccgccagcggcttcagcttcagcgacttttggatgagctgggtccgacaggcccctggcaaaggacttgaatgggtcgccacaatcagccaggccggcagcgagaaggactacgtggactctgtgaagggcagattcaccatcagccgggacaacgccaagaagtccctgtacctccagatgaacagcctgagagccgaggacaccgccgtgtactattgtgcctctggcgtgtacagcttcgactacagaggccagggcaccctggtcacagtctcttctggtaccggcggaggcggatctggcggcggaggtagcggtggcggaggatctgaattcatgacccagagccccaagttcctgctggtgtctgccggcgacagagtgaccctgacatgcaaggccagccagagcgtgaacaacgacgtgtactggtatcagcaggaacccggccagtcccccaagctgctgatctactgggccagcaccagagaaagcggcgtgcccgatagattcaccggcagcggctctggcaccgacttcaccctgacaatcagcagcgtgcaggccgaggacctggccgtgtactactgcaagcagagctacaacctgtacaccttcggcggaggcaccaagctggaaatcaagagactcgagatccagaaccctgatcctgccgtgtaccagctgcgggatagcaagagcagcgacaagagcgtgtgtctgttcaccgacttcgacagccagaccaacgtgtcccagagcaaggactccgacgtgtacatcaccgataagtgcgtgctggacatgcggagcatggacttcaagagcaactccgccgtggcctggtccaacaagtccgatttcgcctgcgccaacgccttcaacaacagcattatccccgaggacacattcttcccaagccccgagagcagcgactccaccgaccacgtgaagcccaaagagacagagaacaccaagcagcccagcaagagctgccacaagcccaaggccatcgtgcacaccgagaaagtgaacatgatgagcctgaccgtgctgggcctgcggatgctgttcgccaaaaccgtggccgtgaacttcctgctgaccgccaagctgttcttcctccgcgccaagagaagcggatctggcgtgaagcagaccctgaatttcgacctgctgaagctggctggcgacgtggaatccaacccaggccctactagtatggactggatttggcgcatccttttccttgtcggcgctgctaccggcgcgcattccgggccccagctccagctgcaagagtctggacctggcctggtcaagcctagcgagacactgagcctgacctgtaccgtgtccggcgatagcatcagcagcggcgattactactggggctggatcagacagcctcctggcaaaggactggaatggatcggccacatctactacagcggcgtgacctactacaaccccagcctgaagtccagagtgaccatcagcgtggacaccagccggaaccagttctccctgaagctgtctagcgtgacagccgccgataccgccgtgtactactgcaccagagaggacagcagcaactggcggagtagaggccagggaacactggtcacagttagctctggatccggcggaggcggaagtggaggcggaggatctggcggcggaggctctttcgaagaatctggaagaggactggtgcagcctggcggcagcagaaagctgtcttgtgccgccagcggcttcaccttcagcaccagcggaatgcactgggtgcgccaggcccctgagaagggactggaatgggtggcctacatcagctccggcagcaccaccatctaccacgccgataccgtgaagggccggttcaccatcagccgggacaaccccaagaataccctgttcctccagatgaccagcctgcggagcgaggacaccgccatgtactattgctgcgccagaagcggccagttcggcaactacttcgactactggggccagggcaccaccctgaccgtgtcatctacgcgtgaggacctgaagaacgtgttcccacctgaggtggccgtgttcgagcctagcgaggccgagatcagccacacccagaaagccaccctcgtgtgcctggctaccggcttctaccccgaccatgtggaactgtcttggtgggtcaacggcaaagaggtgcacagcggcgtgtgtaccgacccccagccactgaaagaacagcccgccctgaacgacagccggtactgcctgagcagcagactgagagtgtccgccaccttctggcagaacccccggaaccacttcagatgccaggtgcagttctacggcctgagcgagaacgacgagtggacccaggacagagccaagcccgtgacccagatcgtgtctgccgaagcctggggcagagccgatgatgtgattaagatccactggcaggaaaagaagtccaacaccatcctgggcagccaggaaggcaacaccatgaagaccaacgacacctacatgaagttcagctggctgaccgtgcccgagaagtccctggacaaagaacacagatgcatcgtgcggcacgaaaacaacaagaacggcgtggaccaggaaatcatcttcccacccatcaagaccgatgtgattacaatggaccccaaggacaactgctccaaggacgccaacgataccctgctgctccagctgaccaacaccagcgcctactacatgtacttgttgctgctgctgaagtccgtggtgtacttcgccatcatcacatgctgcctgctgcggagaaccgccttctgctgcaacggcgagaagtct

SEQ ID NO: 7903 - DNA, 2985 bp, synthetic construct
  source 1..2985: mol_type = other DNA
atggccttaccagtgaccgccttgctcctgccgctggccttgctgctccacgccgccaggccggaagtgcagctggttgaatctggcggaggactggttcagcctggcggatctctgagactgtcttgtgccgccagcggcttcagcttcagcgacttttggatgagctgggtccgacaggcccctggcaaaggacttgaatgggtcgccacaatcagccaggccggcagcgagaaggactacgtggactctgtgaagggcagattcaccatcagccgggacaacgccaagaagtccctgtacctccagatgaacagcctgagagccgaggacaccgccgtgtactattgtgcctctggcgtgtacagcttcgactacagaggccagggcaccctggtcacagtctcttctggtaccggcggaggcggatctggcggcggaggtagcggtggcggaggatctgaattccagagcccatctagcctggctgtgtctgccggcgagaaagtgaccatgagctgcaagagcagccagagcctgctgaacagccggacccggaagaactacctggcctggtatcagcagaagcccggccagagccccaagctgctgatctactgggccagcaccagagaaagcggcgtgcccgatagattcaccggctctggcagcggcaccgacttcaccctgacaatcagcagcgtgcaggccgaggacctggccgtgtactactgcaagcagagcaacctgtacaccttcggcggaggcaccaagctggaaatcaagctcgagatccagaaccctgatcctgccgtgtaccagctgcgggatagcaagagcagcgacaagagcgtgtgtctgttcaccgacttcgacagccagaccaacgtgtcccagagcaaggactccgacgtgtacatcaccgataagtgcgtgctggacatgcggagcatggacttcaagagcaactccgccgtggcctggtccaacaagtccgatttcgcctgcgccaacgccttcaacaacagcattatccccgaggacacattcttcccaagccccgagagcagcgactccaccgaccacgtgaagcccaaagagacagagaacaccaagcagcccagcaagagctgccacaagcccaaggccatcgtgcacaccgagaaagtgaacatgatgagcctgaccgtgctgggcctgcggatgctgttcgccaaaaccgtggccgtgaacttcctgctgaccgccaagctgttcttcctccgcgccaagagaagcggatctggcgtgaagcagaccctgaatttcgacctgctgaagctggctggcgacgtggaatccaacccaggccctactagtatggactggatttggcgcatccttttccttgtcggcgctgctaccggcgcgcattccgggccccagctccagctgcaagagtctggacctggcctggtcaagcctagcgagacactgagcctgacctgtaccgtgtccggcgatagcatcagcagcggcgattactactggggctggatcagacagcctcctggcaaaggactggaatggatcggccacatctactacagcggcgtgacctactacaaccccagcctgaagtccagagtgaccatcagcgtggacaccagccggaaccagttctccctgaagctgtctagcgtgacagccgccgataccgccgtgtactactgcaccagagaggacagcagcaactggcggagtagaggccagggaacactggtcacagttagctctggatccggcggaggcggaagtggaggcggaggatctggcggcggaggctctttcgaacaggtgcagctggaagagtctggacccgagcttgtgaagcctggggccagcgtgaagctgtcctgtaaagccagcggctacaccttcaccgagtacatcatccactgggtcaagcagcggagcggccagggcctggaatggatcggctggttttaccctggctccggcagcatcaagtacaacgagaagttcaaggacaaggccaccctgaccgccgacaagtccagcagcaccgtgtacatggaactgagcggcctgaccagcgaggacagcgccgtgtatttctgcgccagacacgacggctacagctacttcgactattggggccagggcaccacactgaccgtgtcctctacgcgtgaggacctgaagaacgtgttcccacctgaggtggccgtgttcgagcctagcgaggccgagatcagccacacccagaaagccaccctcgtgtgcctggctaccggcttctaccccgaccatgtggaactgtcttggtgggtcaacggcaaagaggtgcacagcggcgtgtgtaccgacccccagccactgaaagaacagcccgccctgaacgacagccggtactgcctgagcagcagactgagagtgtccgccaccttctggcagaacccccggaaccacttcagatgccaggtgcagttctacggcctgagcgagaacgacgagtggacccaggacagagccaagcccgtgacccagatcgtgtctgccgaagcctggggcagagccgatgatgtgattaagatccactggcaggaaaagaagtccaacaccatcctgggcagccaggaaggcaacaccatgaagaccaacgacacctacatgaagttcagctggctgaccgtgcccgagaagtccctggacaaagaacacagatgcatcgtgcggcacgaaaacaacaagaacggcgtggaccaggaaatcatcttcccacccatcaagaccgatgtgattacaatggaccccaaggacaactgctccaaggacgccaacgataccctgctgctccagctgaccaacaccagcgcctactacatgtacttgttgctgctgctgaagtccgtggtgtacttcgccatcatcacatgctgcctgctgcggagaaccgccttctgctgcaacggcgagaagtct

SEQ ID NO: 7904 - DNA, 2994 bp, synthetic construct
  source 1..2994: mol_type = other DNA
atggccttaccagtgaccgccttgctcctgccgctggccttgctgctccacgccgccaggccggaagtgcagctggttgaatctggcggaggactggttcagcctggcggatctctgagactgtcttgtgccgccagcggcttcagcttcagcgacttttggatgagctgggtccgacaggcccctggcaaaggacttgaatgggtcgccacaatcagccaggccggcagcgagaaggactacgtggactctgtgaagggcagattcaccatcagccgggacaacgccaagaagtccctgtacctccagatgaacagcctgagagccgaggacaccgccgtgtactattgtgcctctggcgtgtacagcttcgactacagaggccagggcaccctggtcacagtctcttctggtaccggcggaggcggatctggcggcggaggtagcggtggcggaggatctgaattcgacatccagatgacccagagccccagcagcctgtctgcctctctgggcgagagagtgtccctgacctgtcgggccacacaggaactgagcggctacctgtcttggctgcagcagaagcccgacggcaccatcaagcggctgatctacgccgccagcaccctggatagcggcgtgcccaagagattcagcggcaacagaagcggcagcgactacagcctgaccatcagctccctggaaagcgaggacttcgccgactactactgcctgcagtacgccatctacccctacaccttcggcggaggcaccaagctggaaatcaagctcgagatccagaaccctgatcctgccgtgtaccagctgcgggatagcaagagcagcgacaagagcgtgtgtctgttcaccgacttcgacagccagaccaacgtgtcccagagcaaggactccgacgtgtacatcaccgataagtgcgtgctggacatgcggagcatggacttcaagagcaactccgccgtggcctggtccaacaagtccgatttcgcctgcgccaacgccttcaacaacagcattatccccgaggacacattcttcccaagccccgagagcagcgactccaccgaccacgtgaagcccaaagagacagagaacaccaagcagcccagcaagagctgccacaagcccaaggccatcgtgcacaccgagaaagtgaacatgatgagcctgaccgtgctgggcctgcggatgctgttcgccaaaaccgtggccgtgaacttcctgctgaccgccaagctgttcttcctccgcgccaagagaagcggatctggcgtgaagcagaccctgaatttcgacctgctgaagctggctggcgacgtggaatccaacccaggccctactagtatggactggatttggcgcatccttttccttgtcggcgctgctaccggcgcgcattccgggccccagctccagctgcaagagtctggacctggcctggtcaagcctagcgagacactgagcctgacctgtaccgtgtccggcgatagcatcagcagcggcgattactactggggctggatcagacagcctcctggcaaaggactggaatggatcggccacatctactacagcggcgtgacctactacaaccccagcctgaagtccagagtgaccatcagcgtggacaccagccggaaccagttctccctgaagctgtctagcgtgacagccgccgataccgccgtgtactactgcaccagagaggacagcagcaactggcggagtagaggccagggaacactggtcacagttagctctggatccggcggaggcggaagtggaggcggaggatctggcggcggaggctctttcgaagaggtgcaactgcagcagtctggccccgagcttgtgaagcctggcgcctccgtgaagatgagctgcaaggccagcggctacacctttaccagctacttcatccactgggtcaagcagaaacccggccagggcctggaatggatcggcttcatcaacccttacaacgacggcagcaagtacaacgagaagttcaagggcaaggccaccctgaccagcgacaagagcagcagcaccgcctacatggaactgtccagcctgacatccgaggacagcgccgtgtactactgcaccagggacgacggctactacggctacgccatggactactggggccagggaacaagcgtcaccgtgtcctctacgcgtgaggacctgaagaacgtgttcccacctgaggtggccgtgttcgagcctagcgaggccgagatcagccacacccagaaagccaccctcgtgtgcctggctaccggcttctaccccgaccatgtggaactgtcttggtgggtcaacggcaaagaggtgcacagcggcgtgtgtaccgacccccagccactgaaagaacagcccgccctgaacgacagccggtactgcctgagcagcagactgagagtgtccgccaccttctggcagaacccccggaaccacttcagatgccaggtgcagttctacggcctgagcgagaacgacgagtggacccaggacagagccaagcccgtgacccagatcgtgtctgccgaagcctggggcagagccgatgatgtgattaagatccactggcaggaaaagaagtccaacaccatcctgggcagccaggaaggcaacaccatgaagaccaacgacacctacatgaagttcagctggctgaccgtgcccgagaagtccctggacaaagaacacagatgcatcgtgcggcacgaaaacaacaagaacggcgtggaccaggaaatcatcttcccacccatcaagaccgatgtgattacaatggaccccaaggacaactgctccaaggacgccaacgataccctgctgctccagctgaccaacaccagcgcctactacatgtacttgttgctgctgctgaagtccgtggtgtacttcgccatcatcacatgctgcctgctgcggagaaccgccttctgctgcaacggcgagaagtct

SEQ ID NO: 7905 - DNA, 3009 bp, synthetic construct
  source 1..3009: mol_type = other DNA
atggccttaccagtgaccgccttgctcctgccgctggccttgctgctccacgccgccaggccggaagtgcagctggttgaatctggcggaggactggttcagcctggcggatctctgagactgtcttgtgccgccagcggcttcagcttcagcgacttttggatgagctgggtccgacaggcccctggcaaaggacttgaatgggtcgccacaatcagccaggccggcagcgagaaggactacgtggactctgtgaagggcagattcaccatcagccgggacaacgccaagaagtccctgtacctccagatgaacagcctgagagccgaggacaccgccgtgtactattgtgcctctggcgtgtacagcttcgactacagaggccagggcaccctggtcacagtctcttctggtaccggcggaggcggatctggcggcggaggtagcggtggcggaggatctgaattcgacaccatcgtgctgacacagagccctgcttccctggccgtgtccctgggacagagagccaccatctcttgcagagccagcgagagcgtggacagctacggcaacagcttcatgcactggtatcagcagaagcccggccagccccccaagctgctgatctacctggcctccaacctggaaagcggcgtgcccgccagattttctggcagcggcagcagaaccgacttcaccctgaccatcgaccccgtggaagccgatgatgccgccacctactactgccagcagaacaactacgacccctggaccttcggcggaggcaccaagctggaaatcaagctcgagatccagaaccctgatcctgccgtgtaccagctgcgggatagcaagagcagcgacaagagcgtgtgtctgttcaccgacttcgacagccagaccaacgtgtcccagagcaaggactccgacgtgtacatcaccgataagtgcgtgctggacatgcggagcatggacttcaagagcaactccgccgtggcctggtccaacaagtccgatttcgcctgcgccaacgccttcaacaacagcattatccccgaggacacattcttcccaagccccgagagcagcgactccaccgaccacgtgaagcccaaagagacagagaacaccaagcagcccagcaagagctgccacaagcccaaggccatcgtgcacaccgagaaagtgaacatgatgagcctgaccgtgctgggcctgcggatgctgttcgccaaaaccgtggccgtgaacttcctgctgaccgccaagctgttcttcctccgcgccaagagaagcggatctggcgtgaagcagaccctgaatttcgacctgctgaagctggctggcgacgtggaatccaacccaggccctactagtatggactggatttggcgcatccttttccttgtcggcgctgctaccggcgcgcattccgggccccagctccagctgcaagagtctggacctggcctggtcaagcctagcgagacactgagcctgacctgtaccgtgtccggcgatagcatcagcagcggcgattactactggggctggatcagacagcctcctggcaaaggactggaatggatcggccacatctactacagcggcgtgacctactacaaccccagcctgaagtccagagtgaccatcagcgtggacaccagccggaaccagttctccctgaagctgtctagcgtgacagccgccgataccgccgtgtactactgcaccagagaggacagcagcaactggcggagtagaggccagggaacactggtcacagttagctctggatccggcggaggcggaagtggaggcggaggatctggcggcggaggctctttcgaagaagtgcaactccagcagagcggccctgagcttgtgaagcctggcgcttccgtgaagatgagctgcaaggccagcggctacaccttcaccagctacgtgatgcactgggtcaagcagaaacctggacagggcctggaatggatcggctacatcaacccctacaacgacggcaccaagtacaacgagaagttcaagggcaaggccaccctgacaagcgacaccagcagcagcaccgcctacatggaactgaacagcctgaccagcgaggacagcgccgtgtacttctgcgccagacccatctacttcgacaacgactacttcgattactggggccagggcaccaccctgaaggtgtcctctacgcgtgaggacctgaagaacgtgttcccacctgaggtggccgtgttcgagcctagcgaggccgagatcagccacacccagaaagccaccctcgtgtgcctggctaccggcttctaccccgaccatgtggaactgtcttggtgggtcaacggcaaagaggtgcacagcggcgtgtgtaccgacccccagccactgaaagaacagcccgccctgaacgacagccggtactgcctgagcagcagactgagagtgtccgccaccttctggcagaacccccggaaccacttcagatgccaggtgcagttctacggcctgagcgagaacgacgagtggacccaggacagagccaagcccgtgacccagatcgtgtctgccgaagcctggggcagagccgatgatgtgattaagatccactggcaggaaaagaagtccaacaccatcctgggcagccaggaaggcaacaccatgaagaccaacgacacctacatgaagttcagctggctgaccgtgcccgagaagtccctggacaaagaacacagatgcatcgtgcggcacgaaaacaacaagaacggcgtggaccaggaaatcatcttcccacccatcaagaccgatgtgattacaatggaccccaaggacaactgctccaaggacgccaacgataccctgctgctccagctgaccaacaccagcgcctactacatgtacttgttgctgctgctgaagtccgtggtgtacttcgccatcatcacatgctgcctgctgcggagaaccgccttctgctgcaacggcgagaagtct

SEQ ID NO: 7906 - DNA, 2994 bp, synthetic construct
  source 1..2994: mol_type = other DNA
atggccttaccagtgaccgccttgctcctgccgctggccttgctgctccacgccgccaggccggaagtgcagctggttgaatctggcggaggactggttcagcctggcggatctctgagactgtcttgtgccgccagcggcttcagcttcagcgacttttggatgagctgggtccgacaggcccctggcaaaggacttgaatgggtcgccacaatcagccaggccggcagcgagaaggactacgtggactctgtgaagggcagattcaccatcagccgggacaacgccaagaagtccctgtacctccagatgaacagcctgagagccgaggacaccgccgtgtactattgtgcctctggcgtgtacagcttcgactacagaggccagggcaccctggtcacagtctcttctggtaccggcggaggcggatctggcggcggaggtagcggtggcggaggatctgaattcgacatccagatgacccagagccccagcagcctgtctgccagcgtgggcgacagagtgaccatcacatgcaaggccagccaggacgtgggaatcgccgtggcctggtatcagcagaaacccggcaaggtgcccaagctgctgatctactgggccagcaccagacacaccggcgtgcccgatagattttccggcagcggctccggcaccgacttcaccctgacaatcagctccctccagcccgaggacgtggcaacctactactgccagcagtacagcagctacccctacaccttcggccagggcaccaaggtggaaatcaagagactcgagatccagaaccctgatcctgccgtgtaccagctgcgggatagcaagagcagcgacaagagcgtgtgtctgttcaccgacttcgacagccagaccaacgtgtcccagagcaaggactccgacgtgtacatcaccgataagtgcgtgctggacatgcggagcatggacttcaagagcaactccgccgtggcctggtccaacaagtccgatttcgcctgcgccaacgccttcaacaacagcattatccccgaggacacattcttcccaagccccgagagcagcgactccaccgaccacgtgaagcccaaagagacagagaacaccaagcagcccagcaagagctgccacaagcccaaggccatcgtgcacaccgagaaagtgaacatgatgagcctgaccgtgctgggcctgcggatgctgttcgccaaaaccgtggccgtgaacttcctgctgaccgccaagctgttcttcctccgcgccaagagaagcggatctggcgtgaagcagaccctgaatttcgacctgctgaagctggctggcgacgtggaatccaacccaggccctactagtatggactggatttggcgcatccttttccttgtcggcgctgctaccggcgcgcattccgggccccagctccagctgcaagagtctggacctggcctggtcaagcctagcgagacactgagcctgacctgtaccgtgtccggcgatagcatcagcagcggcgattactactggggctggatcagacagcctcctggcaaaggactggaatggatcggccacatctactacagcggcgtgacctactacaaccccagcctgaagtccagagtgaccatcagcgtggacaccagccggaaccagttctccctgaagctgtctagcgtgacagccgccgataccgccgtgtactactgcaccagagaggacagcagcaactggcggagtagaggccagggaacactggtcacagttagctctggatccggcggaggcggaagtggaggcggaggatctggcggcggaggctctttcgaagaagtgcaactggtggaatcaggcggcggactggtgcagcctggcggatctctgagactgagctgtgccgccagcggcttcgacttcagccggtactggatgagctgggtgcgccaggcccctggcaaaggactggaatggatcggcgagatcaaccccgacagcagcaccatcaactacgcccccagcctgaaggacaagttcatcatcagccgggacaacgccaagaacagcctgtacctccagatgaactccctgcgggccgaggacaccgccgtgtactattgcgccagacccgacggcaactactggtacttcgacgtgtggggccagggaaccctcgtgaccgtgtcatctacgcgtgaggacctgaagaacgtgttcccacctgaggtggccgtgttcgagcctagcgaggccgagatcagccacacccagaaagccaccctcgtgtgcctggctaccggcttctaccccgaccatgtggaactgtcttggtgggtcaacggcaaagaggtgcacagcggcgtgtgtaccgacccccagccactgaaagaacagcccgccctgaacgacagccggtactgcctgagcagcagactgagagtgtccgccaccttctggcagaacccccggaaccacttcagatgccaggtgcagttctacggcctgagcgagaacgacgagtggacccaggacagagccaagcccgtgacccagatcgtgtctgccgaagcctggggcagagccgatgatgtgattaagatccactggcaggaaaagaagtccaacaccatcctgggcagccaggaaggcaacaccatgaagaccaacgacacctacatgaagttcagctggctgaccgtgcccgagaagtccctggacaaagaacacagatgcatcgtgcggcacgaaaacaacaagaacggcgtggaccaggaaatcatcttcccacccatcaagaccgatgtgattacaatggaccccaaggacaactgctccaaggacgccaacgataccctgctgctccagctgaccaacaccagcgcctactacatgtacttgttgctgctgctgaagtccgtggtgtacttcgccatcatcacatgctgcctgctgcggagaaccgccttctgctgcaacggcgagaagtct

SEQ ID NO: 7907 - DNA, 2994 bp, synthetic construct
  source 1..2994: mol_type = other DNA
atggccttaccagtgaccgccttgctcctgccgctggccttgctgctccacgccgccaggccggaagtgcagctggttgaatctggcggaggactggttcagcctggcggatctctgagactgtcttgtgccgccagcggcttcagcttcagcgacttttggatgagctgggtccgacaggcccctggcaaaggacttgaatgggtcgccacaatcagccaggccggcagcgagaaggactacgtggactctgtgaagggcagattcaccatcagccgggacaacgccaagaagtccctgtacctccagatgaacagcctgagagccgaggacaccgccgtgtactattgtgcctctggcgtgtacagcttcgactacagaggccagggcaccctggtcacagtctcttctggtaccggcggaggcggatctggcggcggaggtagcggtggcggaggatctgaattcgacatcgtgatgacccagagccagaagagcatgagcaccagcgtgggcgacagagtgagcatcacctgcaaggccagccaggacgtgatcaccggcgtggcctggtaccagcagaagcccggccagagccccaagctgctgatctacagcgccagctacagatacaccggcgtgcccgacagattcaccggcagcggcagcggcaccgacttcaccttcaccatcagcaacgtgcaggccgaggacctggccgtgtactactgccagcagcactacagcacccccctgaccttcggcgccggcaccaagctggagctgaagctcgagatccagaaccctgatcctgccgtgtaccagctgcgggatagcaagagcagcgacaagagcgtgtgtctgttcaccgacttcgacagccagaccaacgtgtcccagagcaaggactccgacgtgtacatcaccgataagtgcgtgctggacatgcggagcatggacttcaagagcaactccgccgtggcctggtccaacaagtccgatttcgcctgcgccaacgccttcaacaacagcattatccccgaggacacattcttcccaagccccgagagcagcgactccaccgaccacgtgaagcccaaagagacagagaacaccaagcagcccagcaagagctgccacaagcccaaggccatcgtgcacaccgagaaagtgaacatgatgagcctgaccgtgctgggcctgcggatgctgttcgccaaaaccgtggccgtgaacttcctgctgaccgccaagctgttcttcctccgcgccaagagaagcggatctggcgtgaagcagaccctgaatttcgacctgctgaagctggctggcgacgtggaatccaacccaggccctactagtatggactggatttggcgcatccttttccttgtcggcgctgctaccggcgcgcattccgggccccagctccagctgcaagagtctggacctggcctggtcaagcctagcgagacactgagcctgacctgtaccgtgtccggcgatagcatcagcagcggcgattactactggggctggatcagacagcctcctggcaaaggactggaatggatcggccacatctactacagcggcgtgacctactacaaccccagcctgaagtccagagtgaccatcagcgtggacaccagccggaaccagttctccctgaagctgtctagcgtgacagccgccgataccgccgtgtactactgcaccagagaggacagcagcaactggcggagtagaggccagggaacactggtcacagttagctctggatccggcggaggcggaagtggaggcggaggatctggcggcggaggctctttcgaacaggtgcagctgcagcagcccggcgccgagctggtgagacccggcgccagcgtgaagctgagctgcaaggccagcggctacagcttcaccacctactggatgaactgggtgaagcagagacccggccagggcctggagtggatcggcatgatccaccccagcgacagcgagaccagactgaaccagaagttcaaggacaaggccaccctgaccgtggacaagagcagcagcaccgcctacatgcagctgagcagccccaccagcgaggacagcgccgtgtactactgcgccagaagcaccatgatcgccaccagagccatggactactggggccagggcaccagcgtgaccgtgagcagcacgcgtgaggacctgaagaacgtgttcccacctgaggtggccgtgttcgagcctagcgaggccgagatcagccacacccagaaagccaccctcgtgtgcctggctaccggcttctaccccgaccatgtggaactgtcttggtgggtcaacggcaaagaggtgcacagcggcgtgtgtaccgacccccagccactgaaagaacagcccgccctgaacgacagccggtactgcctgagcagcagactgagagtgtccgccaccttctggcagaacccccggaaccacttcagatgccaggtgcagttctacggcctgagcgagaacgacgagtggacccaggacagagccaagcccgtgacccagatcgtgtctgccgaagcctggggcagagccgatgatgtgattaagatccactggcaggaaaagaagtccaacaccatcctgggcagccaggaaggcaacaccatgaagaccaacgacacctacatgaagttcagctggctgaccgtgcccgagaagtccctggacaaagaacacagatgcatcgtgcggcacgaaaacaacaagaacggcgtggaccaggaaatcatcttcccacccatcaagaccgatgtgattacaatggaccccaaggacaactgctccaaggacgccaacgataccctgctgctccagctgaccaacaccagcgcctactacatgtacttgttgctgctgctgaagtccgtggtgtacttcgccatcatcacatgctgcctgctgcggagaaccgccttctgctgcaacggcgagaagtct

SEQ ID NO: 7908 - DNA, 3012 bp, synthetic construct
  source 1..3012: mol_type = other DNA
atggccttaccagtgaccgccttgctcctgccgctggccttgctgctccacgccgccaggccggaagtgcagctggttgaatctggcggaggactggttcagcctggcggatctctgagactgtcttgtgccgccagcggcttcagcttcagcgacttttggatgagctgggtccgacaggcccctggcaaaggacttgaatgggtcgccacaatcagccaggccggcagcgagaaggactacgtggactctgtgaagggcagattcaccatcagccgggacaacgccaagaagtccctgtacctccagatgaacagcctgagagccgaggacaccgccgtgtactattgtgcctctggcgtgtacagcttcgactacagaggccagggcaccctggtcacagtctcttctggtaccggcggaggcggatctggcggcggaggtagcggtggcggaggatctgaattccagagcgtgctgacacagcctccatccgtgtctggcgctccaggccagagagtgaccatctcctgtaccggcagcggcagcaacatcggagccccctacgacgtgtcctggtatcagcaactgcctggcaccgcccccaagctgctgatctaccacaacaacaagcggcccagcggcgtgcccgatagattcagcggctctaagagcggcaccagcgccagcctggctatcactggactccaggccgaggacgaggccgactactactgtgccacagtggaagccggcctgagcggctctgtgtttggcggcggaacaaagctgaccgtgctgggagctctcgagatccagaaccctgatcctgccgtgtaccagctgcgggatagcaagagcagcgacaagagcgtgtgtctgttcaccgacttcgacagccagaccaacgtgtcccagagcaaggactccgacgtgtacatcaccgataagtgcgtgctggacatgcggagcatggacttcaagagcaactccgccgtggcctggtccaacaagtccgatttcgcctgcgccaacgccttcaacaacagcattatccccgaggacacattcttcccaagccccgagagcagcgactccaccgaccacgtgaagcccaaagagacagagaacaccaagcagcccagcaagagctgccacaagcccaaggccatcgtgcacaccgagaaagtgaacatgatgagcctgaccgtgctgggcctgcggatgctgttcgccaaaaccgtggccgtgaacttcctgctgaccgccaagctgttcttcctccgcgccaagagaagcggatctggcgtgaagcagaccctgaatttcgacctgctgaagctggctggcgacgtggaatccaacccaggccctactagtatggactggatttggcgcatccttttccttgtcggcgctgctaccggcgcgcattccgggccccagctccagctgcaagagtctggacctggcctggtcaagcctagcgagacactgagcctgacctgtaccgtgtccggcgatagcatcagcagcggcgattactactggggctggatcagacagcctcctggcaaaggactggaatggatcggccacatctactacagcggcgtgacctactacaaccccagcctgaagtccagagtgaccatcagcgtggacaccagccggaaccagttctccctgaagctgtctagcgtgacagccgccgataccgccgtgtactactgcaccagagaggacagcagcaactggcggagtagaggccagggaacactggtcacagttagctctggatccggcggaggcggaagtggaggcggaggatctggcggcggaggctctttcgaacaggtgcaactggtgcagagcggagccgaagtgaagaaacctggggccagcgtgaaggtgtcctgcaaggtgtccggctacaccctgaccgagctgagcattcactgggtgcgccaggcccctggcaagggactggaatggatgggcggcttcgaccccgaagagaacgagatcgtgtacgcccagcggttccagggcagagtgacaatgaccgaggacaccagcaccgacaccgcctacatggaactgagcagcctgcggagcgaggataccgccgtgtactactgcgccatcgtgggcagcttcagccctctgacactgggcctgtggggccagggaactatggtcaccgtgtccagcacgcgtgaggacctgaagaacgtgttcccacctgaggtggccgtgttcgagcctagcgaggccgagatcagccacacccagaaagccaccctcgtgtgcctggctaccggcttctaccccgaccatgtggaactgtcttggtgggtcaacggcaaagaggtgcacagcggcgtgtgtaccgacccccagccactgaaagaacagcccgccctgaacgacagccggtactgcctgagcagcagactgagagtgtccgccaccttctggcagaacccccggaaccacttcagatgccaggtgcagttctacggcctgagcgagaacgacgagtggacccaggacagagccaagcccgtgacccagatcgtgtctgccgaagcctggggcagagccgatgatgtgattaagatccactggcaggaaaagaagtccaacaccatcctgggcagccaggaaggcaacaccatgaagaccaacgacacctacatgaagttcagctggctgaccgtgcccgagaagtccctggacaaagaacacagatgcatcgtgcggcacgaaaacaacaagaacggcgtggaccaggaaatcatcttcccacccatcaagaccgatgtgattacaatggaccccaaggacaactgctccaaggacgccaacgataccctgctgctccagctgaccaacaccagcgcctactacatgtacttgttgctgctgctgaagtccgtggtgtacttcgccatcatcacatgctgcctgctgcggagaaccgccttctgctgcaacggcgagaagtct

SEQ ID NO: 7909 - DNA, 3012 bp, synthetic construct
  source 1..3012: mol_type = other DNA
atggccttaccagtgaccgccttgctcctgccgctggccttgctgctccacgccgccaggccggaagtgcagctggttgaatctggcggaggactggttcagcctggcggatctctgagactgtcttgtgccgccagcggcttcagcttcagcgacttttggatgagctgggtccgacaggcccctggcaaaggacttgaatgggtcgccacaatcagccaggccggcagcgagaaggactacgtggactctgtgaagggcagattcaccatcagccgggacaacgccaagaagtccctgtacctccagatgaacagcctgagagccgaggacaccgccgtgtactattgtgcctctggcgtgtacagcttcgactacagaggccagggcaccctggtcacagtctcttctggtaccggcggaggcggatctggcggcggaggtagcggtggcggaggatctgaattccagagcgtgctgacacagcctccatccgtgtctggcgctccaggccagagagtgaccatctcctgtaccggcagcggcagcaacatcggagccccctacgacgtgtcctggtatcagcaactgcctggcaccgcccccaagctgctgatctaccacaacaacaagcggcccagcggcgtgcccgatagattcagcggctctaagagcggcaccagcgccagcctggctatcactggactccaggccgaggacgaggccgactactactgccagagctacgacagcagcagcatcagcaccatcttcggcggaggcaccaagctgacagtgctgggagctctcgagatccagaaccctgatcctgccgtgtaccagctgcgggatagcaagagcagcgacaagagcgtgtgtctgttcaccgacttcgacagccagaccaacgtgtcccagagcaaggactccgacgtgtacatcaccgataagtgcgtgctggacatgcggagcatggacttcaagagcaactccgccgtggcctggtccaacaagtccgatttcgcctgcgccaacgccttcaacaacagcattatccccgaggacacattcttcccaagccccgagagcagcgactccaccgaccacgtgaagcccaaagagacagagaacaccaagcagcccagcaagagctgccacaagcccaaggccatcgtgcacaccgagaaagtgaacatgatgagcctgaccgtgctgggcctgcggatgctgttcgccaaaaccgtggccgtgaacttcctgctgaccgccaagctgttcttcctccgcgccaagagaagcggatctggcgtgaagcagaccctgaatttcgacctgctgaagctggctggcgacgtggaatccaacccaggccctactagtatggactggatttggcgcatccttttccttgtcggcgctgctaccggcgcgcattccgggccccagctccagctgcaagagtctggacctggcctggtcaagcctagcgagacactgagcctgacctgtaccgtgtccggcgatagcatcagcagcggcgattactactggggctggatcagacagcctcctggcaaaggactggaatggatcggccacatctactacagcggcgtgacctactacaaccccagcctgaagtccagagtgaccatcagcgtggacaccagccggaaccagttctccctgaagctgtctagcgtgacagccgccgataccgccgtgtactactgcaccagagaggacagcagcaactggcggagtagaggccagggaacactggtcacagttagctctggatccggcggaggcggaagtggaggcggaggatctggcggcggaggctctttcgaacaggtgcaactggtgcagagcggagccgaagtgaagaaacctggggccagcgtgaaggtgtcctgcaaggtgtccggctacaccctgaccgagctgagcattcactgggtgcgccaggcccctggcaagggactggaatggatgggcggcttcgaccccgaagagaacgagatcgtgtacgcccagcggttccagggcagagtgacaatgaccgaggacaccagcaccgacaccgcctacatggaactgagcagcctgcggagcgaggataccgccgtgtactactgtgccatcgtgggcagcttcagcggaatcgcctacagaccttggggccagggcacaatggtcaccgtgtctagcacgcgtgaggacctgaagaacgtgttcccacctgaggtggccgtgttcgagcctagcgaggccgagatcagccacacccagaaagccaccctcgtgtgcctggctaccggcttctaccccgaccatgtggaactgtcttggtgggtcaacggcaaagaggtgcacagcggcgtgtgtaccgacccccagccactgaaagaacagcccgccctgaacgacagccggtactgcctgagcagcagactgagagtgtccgccaccttctggcagaacccccggaaccacttcagatgccaggtgcagttctacggcctgagcgagaacgacgagtggacccaggacagagccaagcccgtgacccagatcgtgtctgccgaagcctggggcagagccgatgatgtgattaagatccactggcaggaaaagaagtccaacaccatcctgggcagccaggaaggcaacaccatgaagaccaacgacacctacatgaagttcagctggctgaccgtgcccgagaagtccctggacaaagaacacagatgcatcgtgcggcacgaaaacaacaagaacggcgtggaccaggaaatcatcttcccacccatcaagaccgatgtgattacaatggaccccaaggacaactgctccaaggacgccaacgataccctgctgctccagctgaccaacaccagcgcctactacatgtacttgttgctgctgctgaagtccgtggtgtacttcgccatcatcacatgctgcctgctgcggagaaccgccttctgctgcaacggcgagaagtct

SEQ ID NO: 7910 - DNA, 2976 bp, synthetic construct
  source 1..2976: mol_type = other DNA
atggccttaccagtgaccgccttgctcctgccgctggccttgctgctccacgccgccaggccggaagtgcagctggttgaatctggcggaggactggttcagcctggcggatctctgagactgtcttgtgccgccagcggcttcagcttcagcgacttttggatgagctgggtccgacaggcccctggcaaaggacttgaatgggtcgccacaatcagccaggccggcagcgagaaggactacgtggactctgtgaagggcagattcaccatcagccgggacaacgccaagaagtccctgtacctccagatgaacagcctgagagccgaggacaccgccgtgtactattgtgcctctggcgtgtacagcttcgactacagaggccagggcaccctggtcacagtctcttctggtaccggcggaggcggatctggcggcggaggtagcggtggcggaggatctgaattcgacatccagatgacccagagccccagcagcctgtctgccagcgtgggcgacagagtgaccatcacctgtagagccagccagggcatcagaaacaacctggcctggtatcagcagaagcccggcaaggcccccaagcggctgatctacgccgccagcaatctccagagcggcgtgcccagcagattcacaggctctggcagcggcaccgagttcaccctgatcgtgtctagcctccagcccgaggacttcgccacctactactgcctccagcaccacagctaccccctgacatctggcggaggcaccaaggtggaactcgagatccagaaccctgatcctgccgtgtaccagctgcgggatagcaagagcagcgacaagagcgtgtgtctgttcaccgacttcgacagccagaccaacgtgtcccagagcaaggactccgacgtgtacatcaccgataagtgcgtgctggacatgcggagcatggacttcaagagcaactccgccgtggcctggtccaacaagtccgatttcgcctgcgccaacgccttcaacaacagcattatccccgaggacacattcttcccaagccccgagagcagcgactccaccgaccacgtgaagcccaaagagacagagaacaccaagcagcccagcaagagctgccacaagcccaaggccatcgtgcacaccgagaaagtgaacatgatgagcctgaccgtgctgggcctgcggatgctgttcgccaaaaccgtggccgtgaacttcctgctgaccgccaagctgttcttcctccgcgccaagagaagcggatctggcgtgaagcagaccctgaatttcgacctgctgaagctggctggcgacgtggaatccaacccaggccctactagtatggactggatttggcgcatccttttccttgtcggcgctgctaccggcgcgcattccgggccccagctccagctgcaagagtctggacctggcctggtcaagcctagcgagacactgagcctgacctgtaccgtgtccggcgatagcatcagcagcggcgattactactggggctggatcagacagcctcctggcaaaggactggaatggatcggccacatctactacagcggcgtgacctactacaaccccagcctgaagtccagagtgaccatcagcgtggacaccagccggaaccagttctccctgaagctgtctagcgtgacagccgccgataccgccgtgtactactgcaccagagaggacagcagcaactggcggagtagaggccagggaacactggtcacagttagctctggatccggcggaggcggaagtggaggcggaggatctggcggcggaggctctttcgaagaggtgcaggtgctggaaagtggcggaggactggtgcagcctggcggctctctgagactgtcttgtgccgccagcggcttcaccttcagcagctacgccatgagctgggtgcgccaggcccctggaaaaggactggaatgggtgtccgccatcagcggctctggcgggtctaccaactacgccgatagcgtgaagggccggttcaccatcagccgggacaacagcaagaacaccctgtacctccagatgaacagcctgcgggccgaggacaccgccgtgtattattgtgccggcagcagcgggtggagcgagtattggggacagggcaccctcgtgaccgtgtcctctacgcgtgaggacctgaagaacgtgttcccacctgaggtggccgtgttcgagcctagcgaggccgagatcagccacacccagaaagccaccctcgtgtgcctggctaccggcttctaccccgaccatgtggaactgtcttggtgggtcaacggcaaagaggtgcacagcggcgtgtgtaccgacccccagccactgaaagaacagcccgccctgaacgacagccggtactgcctgagcagcagactgagagtgtccgccaccttctggcagaacccccggaaccacttcagatgccaggtgcagttctacggcctgagcgagaacgacgagtggacccaggacagagccaagcccgtgacccagatcgtgtctgccgaagcctggggcagagccgatgatgtgattaagatccactggcaggaaaagaagtccaacaccatcctgggcagccaggaaggcaacaccatgaagaccaacgacacctacatgaagttcagctggctgaccgtgcccgagaagtccctggacaaagaacacagatgcatcgtgcggcacgaaaacaacaagaacggcgtggaccaggaaatcatcttcccacccatcaagaccgatgtgattacaatggaccccaaggacaactgctccaaggacgccaacgataccctgctgctccagctgaccaacaccagcgcctactacatgtacttgttgctgctgctgaagtccgtggtgtacttcgccatcatcacatgctgcctgctgcggagaaccgccttctgctgcaacggcgagaagtct

SEQ ID NO: 7911 - DNA, 2994 bp, synthetic construct
  source 1..2994: mol_type = other DNA
atggccttaccagtgaccgccttgctcctgccgctggccttgctgctccacgccgccaggccggaagtgcagctggttgaatctggcggaggactggttcagcctggcggatctctgagactgtcttgtgccgccagcggcttcagcttcagcgacttttggatgagctgggtccgacaggcccctggcaaaggacttgaatgggtcgccacaatcagccaggccggcagcgagaaggactacgtggactctgtgaagggcagattcaccatcagccgggacaacgccaagaagtccctgtacctccagatgaacagcctgagagccgaggacaccgccgtgtactattgtgcctctggcgtgtacagcttcgactacagaggccagggcaccctggtcacagtctcttctggtaccggcggaggcggatctggcggcggaggtagcggtggcggaggatctgaattcgacgagatccagctggtgcagagcggagccgaagtgaagaagcctggcgagagcctgcggatcagctgcaagggcagcggcttcaacatcgaggactactacatccactgggtgcgccagatgcccggcaagggcctggaatggatgggcagaatcgaccccgagaacgacgagactaagtacggccccatcttccagggccacgtgaccatcagcgccgacaccagcatcaacaccgtgtacctccagtggtccagcctgaaggccagcgacaccgccatgtactactgcgcctttagaggcggcgtgtactggggccagggcaccacagtgacagtgtctagcctcgagatccagaaccctgatcctgccgtgtaccagctgcgggatagcaagagcagcgacaagagcgtgtgtctgttcaccgacttcgacagccagaccaacgtgtcccagagcaaggactccgacgtgtacatcaccgataagtgcgtgctggacatgcggagcatggacttcaagagcaactccgccgtggcctggtccaacaagtccgatttcgcctgcgccaacgccttcaacaacagcattatccccgaggacacattcttcccaagccccgagagcagcgactccaccgaccacgtgaagcccaaagagacagagaacaccaagcagcccagcaagagctgccacaagcccaaggccatcgtgcacaccgagaaagtgaacatgatgagcctgaccgtgctgggcctgcggatgctgttcgccaaaaccgtggccgtgaacttcctgctgaccgccaagctgttcttcctccgcgccaagagaagcggatctggcgtgaagcagaccctgaatttcgacctgctgaagctggctggcgacgtggaatccaacccaggccctactagtatggactggatttggcgcatccttttccttgtcggcgctgctaccggcgcgcattccgggccccagctccagctgcaagagtctggacctggcctggtcaagcctagcgagacactgagcctgacctgtaccgtgtccggcgatagcatcagcagcggcgattactactggggctggatcagacagcctcctggcaaaggactggaatggatcggccacatctactacagcggcgtgacctactacaaccccagcctgaagtccagagtgaccatcagcgtggacaccagccggaaccagttctccctgaagctgtctagcgtgacagccgccgataccgccgtgtactactgcaccagagaggacagcagcaactggcggagtagaggccagggaacactggtcacagttagctctggatccggcggaggcggaagtggaggcggaggatctggcggcggaggctctttcgaagatgtcgtgatgacccagagccccgacagcctggctgtgtctctgggagagagagccaccatcaactgcaagtccagccagtccctgctggacagcgacggcaagacctacctgaactggctccagcagaagcccggccagccccccaagagactgatctccctggtgtccaagctggactccggcgtgcccgatagattttccggctctggcagcggcaccgacttcaccctgacaatcagctcccttcaggccgaggacgtggccgtgtactattgctggcagggcacacacttccccggcacctttggcggaggcaccaaggtggaaatcaagacgcgtgaggacctgaagaacgtgttcccacctgaggtggccgtgttcgagcctagcgaggccgagatcagccacacccagaaagccaccctcgtgtgcctggctaccggcttctaccccgaccatgtggaactgtcttggtgggtcaacggcaaagaggtgcacagcggcgtgtgtaccgacccccagccactgaaagaacagcccgccctgaacgacagccggtactgcctgagcagcagactgagagtgtccgccaccttctggcagaacccccggaaccacttcagatgccaggtgcagttctacggcctgagcgagaacgacgagtggacccaggacagagccaagcccgtgacccagatcgtgtctgccgaagcctggggcagagccgatgatgtgattaagatccactggcaggaaaagaagtccaacaccatcctgggcagccaggaaggcaacaccatgaagaccaacgacacctacatgaagttcagctggctgaccgtgcccgagaagtccctggacaaagaacacagatgcatcgtgcggcacgaaaacaacaagaacggcgtggaccaggaaatcatcttcccacccatcaagaccgatgtgattacaatggaccccaaggacaactgctccaaggacgccaacgataccctgctgctccagctgaccaacaccagcgcctactacatgtacttgttgctgctgctgaagtccgtggtgtacttcgccatcatcacatgctgcctgctgcggagaaccgccttctgctgcaacggcgagaagtct

SEQ ID NO: 7912 - DNA, 3015 bp, synthetic construct
  source 1..3015: mol_type = other DNA
atggccttaccagtgaccgccttgctcctgccgctggccttgctgctccacgccgccaggccggaagtgcagctggttgaatctggcggaggactggttcagcctggcggatctctgagactgtcttgtgccgccagcggcttcagcttcagcgacttttggatgagctgggtccgacaggcccctggcaaaggacttgaatgggtcgccacaatcagccaggccggcagcgagaaggactacgtggactctgtgaagggcagattcaccatcagccgggacaacgccaagaagtccctgtacctccagatgaacagcctgagagccgaggacaccgccgtgtactattgtgcctctggcgtgtacagcttcgactacagaggccagggcaccctggtcacagtctcttctggtaccggcggaggcggatctggcggcggaggtagcggtggcggaggatctgaattcgacgagcttgtgatgacccagagccccagcagcctgacagtgacagccggcgagaaagtgaccatgagctgcaagagcagccagagcctgctgaacagcggcaaccagaagaactacctgacctggtatcagcagaagcccggccagccccccaagctgctgatctactgggccagcaccagagaaagcggcgtgcccgatagattcaccggctctggcagcggcaccgacttcaccctgacaatcagcagcgtgcaggccgaggacctggccgtgtactactgccagaacgactacagctaccccctgaccttcggagccggcaccaagctggaaatcaagctcgagatccagaaccctgatcctgccgtgtaccagctgcgggatagcaagagcagcgacaagagcgtgtgtctgttcaccgacttcgacagccagaccaacgtgtcccagagcaaggactccgacgtgtacatcaccgataagtgcgtgctggacatgcggagcatggacttcaagagcaactccgccgtggcctggtccaacaagtccgatttcgcctgcgccaacgccttcaacaacagcattatccccgaggacacattcttcccaagccccgagagcagcgactccaccgaccacgtgaagcccaaagagacagagaacaccaagcagcccagcaagagctgccacaagcccaaggccatcgtgcacaccgagaaagtgaacatgatgagcctgaccgtgctgggcctgcggatgctgttcgccaaaaccgtggccgtgaacttcctgctgaccgccaagctgttcttcctccgcgccaagagaagcggatctggcgtgaagcagaccctgaatttcgacctgctgaagctggctggcgacgtggaatccaacccaggccctactagtatggactggatttggcgcatccttttccttgtcggcgctgctaccggcgcgcattccgggccccagctccagctgcaagagtctggacctggcctggtcaagcctagcgagacactgagcctgacctgtaccgtgtccggcgatagcatcagcagcggcgattactactggggctggatcagacagcctcctggcaaaggactggaatggatcggccacatctactacagcggcgtgacctactacaaccccagcctgaagtccagagtgaccatcagcgtggacaccagccggaaccagttctccctgaagctgtctagcgtgacagccgccgataccgccgtgtactactgcaccagagaggacagcagcaactggcggagtagaggccagggaacactggtcacagttagctctggatccggcggaggcggaagtggaggcggaggatctggcggcggaggctctttcgaagaagtgcagctgctggaacagtctggcgccgaacttgtgcggcctggcaccagcgtgaagatcagctgtaaagccagcggctacgccttcaccaactactggctgggctgggtcaagcagaggcctggacacggcctggaatggatcggcgacatctttcccggctccggcaacatccactacaacgagaagttcaagggcaaggccaccctgaccgccgacaagtctagcagcaccgcctacatgcagctgtccagcctgacctttgaggacagcgccgtgtatttctgtgcccggctgcggaactgggacgagcccatggattattggggccagggcaccaccgtgaccgtgtctagtacgcgtgaggacctgaagaacgtgttcccacctgaggtggccgtgttcgagcctagcgaggccgagatcagccacacccagaaagccaccctcgtgtgcctggctaccggcttctaccccgaccatgtggaactgtcttggtgggtcaacggcaaagaggtgcacagcggcgtgtgtaccgacccccagccactgaaagaacagcccgccctgaacgacagccggtactgcctgagcagcagactgagagtgtccgccaccttctggcagaacccccggaaccacttcagatgccaggtgcagttctacggcctgagcgagaacgacgagtggacccaggacagagccaagcccgtgacccagatcgtgtctgccgaagcctggggcagagccgatgatgtgattaagatccactggcaggaaaagaagtccaacaccatcctgggcagccaggaaggcaacaccatgaagaccaacgacacctacatgaagttcagctggctgaccgtgcccgagaagtccctggacaaagaacacagatgcatcgtgcggcacgaaaacaacaagaacggcgtggaccaggaaatcatcttcccacccatcaagaccgatgtgattacaatggaccccaaggacaactgctccaaggacgccaacgataccctgctgctccagctgaccaacaccagcgcctactacatgtacttgttgctgctgctgaagtccgtggtgtacttcgccatcatcacatgctgcctgctgcggagaaccgccttctgctgcaacggcgagaagtct

SEQ ID NO: 7913 - DNA, 3018 bp, synthetic construct
  source 1..3018: mol_type = other DNA
atggccttaccagtgaccgccttgctcctgccgctggccttgctgctccacgccgccaggccggaagtgcagctggttgaatctggcggaggactggttcagcctggcggatctctgagactgtcttgtgccgccagcggcttcagcttcagcgacttttggatgagctgggtccgacaggcccctggcaaaggacttgaatgggtcgccacaatcagccaggccggcagcgagaaggactacgtggactctgtgaagggcagattcaccatcagccgggacaacgccaagaagtccctgtacctccagatgaacagcctgagagccgaggacaccgccgtgtactattgtgcctctggcgtgtacagcttcgactacagaggccagggcaccctggtcacagtctcttctggtaccggcggaggcggatctggcggcggaggtagcggtggcggaggatctgaattcgacgagctgcagatgacccagagccctagcagcctgtctgccagcgtgggcgacagagtgaccatcacctgtagagccagccagagcatcagcagctacctgaactggtatcagcagaagcccggccagccccccaaactgctgatctactgggccagcaccagagaaagcggcgtgcccgatagattcagcggcagcgagagcggcaccaactacaccctgaccatcagctccctgcagcccgaggacttcgccacctacttttgccagcagagcgacagcctgcccatcacctttggacagggcacccggctggacattcagctcgagatccagaaccctgatcctgccgtgtaccagctgcgggatagcaagagcagcgacaagagcgtgtgtctgttcaccgacttcgacagccagaccaacgtgtcccagagcaaggactccgacgtgtacatcaccgataagtgcgtgctggacatgcggagcatggacttcaagagcaactccgccgtggcctggtccaacaagtccgatttcgcctgcgccaacgccttcaacaacagcattatccccgaggacacattcttcccaagccccgagagcagcgactccaccgaccacgtgaagcccaaagagacagagaacaccaagcagcccagcaagagctgccacaagcccaaggccatcgtgcacaccgagaaagtgaacatgatgagcctgaccgtgctgggcctgcggatgctgttcgccaaaaccgtggccgtgaacttcctgctgaccgccaagctgttcttcctccgcgccaagagaagcggatctggcgtgaagcagaccctgaatttcgacctgctgaagctggctggcgacgtggaatccaacccaggccctactagtatggactggatttggcgcatccttttccttgtcggcgctgctaccggcgcgcattccgggccccagctccagctgcaagagtctggacctggcctggtcaagcctagcgagacactgagcctgacctgtaccgtgtccggcgatagcatcagcagcggcgattactactggggctggatcagacagcctcctggcaaaggactggaatggatcggccacatctactacagcggcgtgacctactacaaccccagcctgaagtccagagtgaccatcagcgtggacaccagccggaaccagttctccctgaagctgtctagcgtgacagccgccgataccgccgtgtactactgcaccagagaggacagcagcaactggcggagtagaggccagggaacactggtcacagttagctctggatccggcggaggcggaagtggaggcggaggatctggcggcggaggctctttcgaagaggtgcaactgctggaatctgggggcggagtggtgcagcctggcagaagcctgagactgagctgtgccgccagcggcttcaccttcagctcctacggaatgcactgggtgcgccaggcccctggcaaaggactggaatgggtggccgtgatctcctacgacggcagcaacaagtactacgccgacagcgtgaagggccggttcaccatcagccgggacaacagcaagaacaccctgtacctgcagatgaacagcctgcgggccgaggacaccgccgtgtactactgcgccaaggatatgggctggggcagcggctggcggccttactactactacggcatggacgtgtggggccagggcaccaccgtgacagtgtcatctacgcgtgaggacctgaagaacgtgttcccacctgaggtggccgtgttcgagcctagcgaggccgagatcagccacacccagaaagccaccctcgtgtgcctggctaccggcttctaccccgaccatgtggaactgtcttggtgggtcaacggcaaagaggtgcacagcggcgtgtgtaccgacccccagccactgaaagaacagcccgccctgaacgacagccggtactgcctgagcagcagactgagagtgtccgccaccttctggcagaacccccggaaccacttcagatgccaggtgcagttctacggcctgagcgagaacgacgagtggacccaggacagagccaagcccgtgacccagatcgtgtctgccgaagcctggggcagagccgatgatgtgattaagatccactggcaggaaaagaagtccaacaccatcctgggcagccaggaaggcaacaccatgaagaccaacgacacctacatgaagttcagctggctgaccgtgcccgagaagtccctggacaaagaacacagatgcatcgtgcggcacgaaaacaacaagaacggcgtggaccaggaaatcatcttcccacccatcaagaccgatgtgattacaatggaccccaaggacaactgctccaaggacgccaacgataccctgctgctccagctgaccaacaccagcgcctactacatgtacttgttgctgctgctgaagtccgtggtgtacttcgccatcatcacatgctgcctgctgcggagaaccgccttctgctgcaacggcgagaagtct

SEQ ID NO: 7914 - DNA, 3009 bp, synthetic construct
  source 1..3009: mol_type = other DNA
atggccttaccagtgaccgccttgctcctgccgctggccttgctgctccacgccgccaggccggaagtgcagctggttgaatctggcggaggactggttcagcctggcggatctctgagactgtcttgtgccgccagcggcttcagcttcagcgacttttggatgagctgggtccgacaggcccctggcaaaggacttgaatgggtcgccacaatcagccaggccggcagcgagaaggactacgtggactctgtgaagggcagattcaccatcagccgggacaacgccaagaagtccctgtacctccagatgaacagcctgagagccgaggacaccgccgtgtactattgtgcctctggcgtgtacagcttcgactacagaggccagggcaccctggtcacagtctcttctggtaccggcggaggcggatctggcggcggaggtagcggtggcggaggatctgaattcgacgacatccaaatgacacagagtccttctagtttgagtgcgagcgtgggggacagggtgaccattacctgcagggccagccagagcataagctcataccttaattggtaccagcaaaaaccaggtaaggcccctaagctcctgatctacgcggcctcttcacttcaatctggggtcccttcccgcttcagtggctccggcagcggcaccgacttcacgctcactatatcaagtctgcagcctgaggatctcgccacctattactgtcaacaaagttattccacccctttcacctttggaccgggcacgaaagtggatattaagctcgagatccagaaccctgatcctgccgtgtaccagctgcgggatagcaagagcagcgacaagagcgtgtgtctgttcaccgacttcgacagccagaccaacgtgtcccagagcaaggactccgacgtgtacatcaccgataagtgcgtgctggacatgcggagcatggacttcaagagcaactccgccgtggcctggtccaacaagtccgatttcgcctgcgccaacgccttcaacaacagcattatccccgaggacacattcttcccaagccccgagagcagcgactccaccgaccacgtgaagcccaaagagacagagaacaccaagcagcccagcaagagctgccacaagcccaaggccatcgtgcacaccgagaaagtgaacatgatgagcctgaccgtgctgggcctgcggatgctgttcgccaaaaccgtggccgtgaacttcctgctgaccgccaagctgttcttcctccgcgccaagagaagcggatctggcgtgaagcagaccctgaatttcgacctgctgaagctggctggcgacgtggaatccaacccaggccctactagtatggactggatttggcgcatccttttccttgtcggcgctgctaccggcgcgcattccgggccccagctccagctgcaagagtctggacctggcctggtcaagcctagcgagacactgagcctgacctgtaccgtgtccggcgatagcatcagcagcggcgattactactggggctggatcagacagcctcctggcaaaggactggaatggatcggccacatctactacagcggcgtgacctactacaaccccagcctgaagtccagagtgaccatcagcgtggacaccagccggaaccagttctccctgaagctgtctagcgtgacagccgccgataccgccgtgtactactgcaccagagaggacagcagcaactggcggagtagaggccagggaacactggtcacagttagctctggatccggcggaggcggaagtggaggcggaggatctggcggcggaggctctttcgaagtgcacgaggtccagcttgtgcagtccggggcagaggtcaagaagcctggttctagcgtaaaagtgagttgcaaagcctcaggtgggacattttcatcctacgcgatcagttgggttagacaggctcctggtcaagggctggaatggatgggcggaattattccaatcttcggaacagcgaattacgcgcagaagttccagggtagagtaaccatcactgctgacaagtccacctccaccgcatacatggaattgtctagtctccggagcgaggatacggcggtgtattattgtgctacgttcgccctgtttggcttccgcgaacaggctttcgacatctgggggcagggcacgacagtcacggttagtagtacgcgtgaggacctgaagaacgtgttcccacctgaggtggccgtgttcgagcctagcgaggccgagatcagccacacccagaaagccaccctcgtgtgcctggctaccggcttctaccccgaccatgtggaactgtcttggtgggtcaacggcaaagaggtgcacagcggcgtgtgtaccgacccccagccactgaaagaacagcccgccctgaacgacagccggtactgcctgagcagcagactgagagtgtccgccaccttctggcagaacccccggaaccacttcagatgccaggtgcagttctacggcctgagcgagaacgacgagtggacccaggacagagccaagcccgtgacccagatcgtgtctgccgaagcctggggcagagccgatgatgtgattaagatccactggcaggaaaagaagtccaacaccatcctgggcagccaggaaggcaacaccatgaagaccaacgacacctacatgaagttcagctggctgaccgtgcccgagaagtccctggacaaagaacacagatgcatcgtgcggcacgaaaacaacaagaacggcgtggaccaggaaatcatcttcccacccatcaagaccgatgtgattacaatggaccccaaggacaactgctccaaggacgccaacgataccctgctgctccagctgaccaacaccagcgcctactacatgtacttgttgctgctgctgaagtccgtggtgtacttcgccatcatcacatgctgcctgctgcggagaaccgccttctgctgcaacggcgagaagtct

SEQ ID NO: 7915 - DNA, 3003 bp, synthetic construct
  source 1..3003: mol_type = other DNA
atggccttaccagtgaccgccttgctcctgccgctggccttgctgctccacgccgccaggccggaagtgcagctggttgaatctggcggaggactggttcagcctggcggatctctgagactgtcttgtgccgccagcggcttcagcttcagcgacttttggatgagctgggtccgacaggcccctggcaaaggacttgaatgggtcgccacaatcagccaggccggcagcgagaaggactacgtggactctgtgaagggcagattcaccatcagccgggacaacgccaagaagtccctgtacctccagatgaacagcctgagagccgaggacaccgccgtgtactattgtgcctctggcgtgtacagcttcgactacagaggccagggcaccctggtcacagtctcttctggtaccggcggaggcggatctggcggcggaggtagcggtggcggaggatctgaattcgacatcgtgctgacccagagccctctgagcctggccgtgtctctgggacagcctgccatcatcagctgcaaggccagccagagcgtgtcctttgccggcacctctctgatgcactggtatcaccagaagcccggccagcagcccagactgctgatctacagagccagcaacctggaagccggcgtgcccgatagattttccggcagcggcagcaagaccgacttcaccctgaccatcagccccgtggaagccgaagatgccgccacctactactgccagcagagcagagagtacccctacaccttcggcggaggcaccaagctggaaatcaagaggctcgagatccagaaccctgatcctgccgtgtaccagctgcgggatagcaagagcagcgacaagagcgtgtgtctgttcaccgacttcgacagccagaccaacgtgtcccagagcaaggactccgacgtgtacatcaccgataagtgcgtgctggacatgcggagcatggacttcaagagcaactccgccgtggcctggtccaacaagtccgatttcgcctgcgccaacgccttcaacaacagcattatccccgaggacacattcttcccaagccccgagagcagcgactccaccgaccacgtgaagcccaaagagacagagaacaccaagcagcccagcaagagctgccacaagcccaaggccatcgtgcacaccgagaaagtgaacatgatgagcctgaccgtgctgggcctgcggatgctgttcgccaaaaccgtggccgtgaacttcctgctgaccgccaagctgttcttcctccgcgccaagagaagcggatctggcgtgaagcagaccctgaatttcgacctgctgaagctggctggcgacgtggaatccaacccaggccctactagtatggactggatttggcgcatccttttccttgtcggcgctgctaccggcgcgcattccgggccccagctccagctgcaagagtctggacctggcctggtcaagcctagcgagacactgagcctgacctgtaccgtgtccggcgatagcatcagcagcggcgattactactggggctggatcagacagcctcctggcaaaggactggaatggatcggccacatctactacagcggcgtgacctactacaaccccagcctgaagtccagagtgaccatcagcgtggacaccagccggaaccagttctccctgaagctgtctagcgtgacagccgccgataccgccgtgtactactgcaccagagaggacagcagcaactggcggagtagaggccagggaacactggtcacagttagctctggatccggcggaggcggaagtggaggcggaggatctggcggcggaggctctttcgaacaggtccaactggtgcagagcggagccgaggtcgtgaagcctggcgcttccgtgaagattagctgcaaagccagcggctacacctttaccggctactttatgaactgggtcaagcagagccctggccagagcctggaatggatcggcagaatccacccctacgacggcgacaccttctacaaccagaagttccagggcaaggccaccctgacagtggacaagagcagcaacaccgcccacatggaactgctgagcctgaccagcgaggacttcgccgtgtactactgcaccagatacgacggcagccgggctatggactattggggccagggcaccaccgtgaccgtgtctagtacgcgtgaggacctgaagaacgtgttcccacctgaggtggccgtgttcgagcctagcgaggccgagatcagccacacccagaaagccaccctcgtgtgcctggctaccggcttctaccccgaccatgtggaactgtcttggtgggtcaacggcaaagaggtgcacagcggcgtgtgtaccgacccccagccactgaaagaacagcccgccctgaacgacagccggtactgcctgagcagcagactgagagtgtccgccaccttctggcagaacccccggaaccacttcagatgccaggtgcagttctacggcctgagcgagaacgacgagtggacccaggacagagccaagcccgtgacccagatcgtgtctgccgaagcctggggcagagccgatgatgtgattaagatccactggcaggaaaagaagtccaacaccatcctgggcagccaggaaggcaacaccatgaagaccaacgacacctacatgaagttcagctggctgaccgtgcccgagaagtccctggacaaagaacacagatgcatcgtgcggcacgaaaacaacaagaacggcgtggaccaggaaatcatcttcccacccatcaagaccgatgtgattacaatggaccccaaggacaactgctccaaggacgccaacgataccctgctgctccagctgaccaacaccagcgcctactacatgtacttgttgctgctgctgaagtccgtggtgtacttcgccatcatcacatgctgcctgctgcggagaaccgccttctgctgcaacggcgagaagtct

SEQ ID NO: 7916 - DNA, 2994 bp, synthetic construct
  source 1..2994: mol_type = other DNA
atggccttaccagtgaccgccttgctcctgccgctggccttgctgctccacgccgccaggccggaagtgcagctggttgaatctggcggaggactggttcagcctggcggatctctgagactgtcttgtgccgccagcggcttcagcttcagcgacttttggatgagctgggtccgacaggcccctggcaaaggacttgaatgggtcgccacaatcagccaggccggcagcgagaaggactacgtggactctgtgaagggcagattcaccatcagccgggacaacgccaagaagtccctgtacctccagatgaacagcctgagagccgaggacaccgccgtgtactattgtgcctctggcgtgtacagcttcgactacagaggccagggcaccctggtcacagtctcttctggtaccggcggaggcggatctggcggcggaggtagcggtggcggaggatctgaattcgacgacgttgtgatgacccagacccccctgagcctgcctgtgacacctggcgaacctgccagcatcagctgtcggagcagccagagcctggtgcacagaaacggcaacacctacctgcactggtatctccagaagcccggccagagccccaagctgctgatccacaaggtgtccaacagattcagcggcgtgcccgacagattctccggcagcggctctggcaccgacttcaccctgaagatcagccgggtggaagccgaggacctgggcgtgtacttctgtagccagagcacccatgtgccccccctgacatttggagccggcaccaagctggaactgaagctcgagatccagaaccctgatcctgccgtgtaccagctgcgggatagcaagagcagcgacaagagcgtgtgtctgttcaccgacttcgacagccagaccaacgtgtcccagagcaaggactccgacgtgtacatcaccgataagtgcgtgctggacatgcggagcatggacttcaagagcaactccgccgtggcctggtccaacaagtccgatttcgcctgcgccaacgccttcaacaacagcattatccccgaggacacattcttcccaagccccgagagcagcgactccaccgaccacgtgaagcccaaagagacagagaacaccaagcagcccagcaagagctgccacaagcccaaggccatcgtgcacaccgagaaagtgaacatgatgagcctgaccgtgctgggcctgcggatgctgttcgccaaaaccgtggccgtgaacttcctgctgaccgccaagctgttcttcctccgcgccaagagaagcggatctggcgtgaagcagaccctgaatttcgacctgctgaagctggctggcgacgtggaatccaacccaggccctactagtatggactggatttggcgcatccttttccttgtcggcgctgctaccggcgcgcattccgggccccagctccagctgcaagagtctggacctggcctggtcaagcctagcgagacactgagcctgacctgtaccgtgtccggcgatagcatcagcagcggcgattactactggggctggatcagacagcctcctggcaaaggactggaatggatcggccacatctactacagcggcgtgacctactacaaccccagcctgaagtccagagtgaccatcagcgtggacaccagccggaaccagttctccctgaagctgtctagcgtgacagccgccgataccgccgtgtactactgcaccagagaggacagcagcaactggcggagtagaggccagggaacactggtcacagttagctctggatccggcggaggcggaagtggaggcggaggatctggcggcggaggctctttcgaagaagtgcagctggtgcagtctggcgctgaggtggaaaagcctggggccagcgtgaagattagctgcaaggccagcggcagcagcttcaccggctacaacatgaactgggtgcgccagaacatcggcaagagcctggaatggatcggagccatcgacccctactacggcggcaccagctacaaccagaagttcaagggcagagccaccctgaccgtggacaagagcaccagcaccgcctacatgcacctgaagtccctgcggagcgaggacaccgccgtgtactactgtgtgtccggcatggaatattggggccagggcaccagcgtgaccgtgtctagtacgcgtgaggacctgaagaacgtgttcccacctgaggtggccgtgttcgagcctagcgaggccgagatcagccacacccagaaagccaccctcgtgtgcctggctaccggcttctaccccgaccatgtggaactgtcttggtgggtcaacggcaaagaggtgcacagcggcgtgtgtaccgacccccagccactgaaagaacagcccgccctgaacgacagccggtactgcctgagcagcagactgagagtgtccgccaccttctggcagaacccccggaaccacttcagatgccaggtgcagttctacggcctgagcgagaacgacgagtggacccaggacagagccaagcccgtgacccagatcgtgtctgccgaagcctggggcagagccgatgatgtgattaagatccactggcaggaaaagaagtccaacaccatcctgggcagccaggaaggcaacaccatgaagaccaacgacacctacatgaagttcagctggctgaccgtgcccgagaagtccctggacaaagaacacagatgcatcgtgcggcacgaaaacaacaagaacggcgtggaccaggaaatcatcttcccacccatcaagaccgatgtgattacaatggaccccaaggacaactgctccaaggacgccaacgataccctgctgctccagctgaccaacaccagcgcctactacatgtacttgttgctgctgctgaagtccgtggtgtacttcgccatcatcacatgctgcctgctgcggagaaccgccttctgctgcaacggcgagaagtct

SEQ ID NO: 7917 - DNA, 2988 bp, synthetic construct
  source 1..2988: mol_type = other DNA
atggccttaccagtgaccgccttgctcctgccgctggccttgctgctccacgccgccaggccggaagtgcagctggttgaatctggcggaggactggttcagcctggcggatctctgagactgtcttgtgccgccagcggcttcagcttcagcgacttttggatgagctgggtccgacaggcccctggcaaaggacttgaatgggtcgccacaatcagccaggccggcagcgagaaggactacgtggactctgtgaagggcagattcaccatcagccgggacaacgccaagaagtccctgtacctccagatgaacagcctgagagccgaggacaccgccgtgtactattgtgcctctggcgtgtacagcttcgactacagaggccagggcaccctggtcacagtctcttctggtaccggcggaggcggatctggcggcggaggtagcggtggcggaggatctgaattcgacgagatcgtgatgacccagacccctgccaccctgtctgtgtctgccggcgagagagtgaccattacctgcaaggccagccagagcgtgtccaacgacgtgacctggtatcagcagaagcccggccaggcccccagactgctgatctacagcgccagcaacagatacagcggcgtgcccgccagattttccggcagcggctacggcaccgagttcaccttcaccatcagcagcgtgcagagcgaggacttcgccgtgtacttctgtcagcaagactacagcagcttcggccagggcaccaagctggaaatcaagaggctcgagatccagaaccctgatcctgccgtgtaccagctgcgggatagcaagagcagcgacaagagcgtgtgtctgttcaccgacttcgacagccagaccaacgtgtcccagagcaaggactccgacgtgtacatcaccgataagtgcgtgctggacatgcggagcatggacttcaagagcaactccgccgtggcctggtccaacaagtccgatttcgcctgcgccaacgccttcaacaacagcattatccccgaggacacattcttcccaagccccgagagcagcgactccaccgaccacgtgaagcccaaagagacagagaacaccaagcagcccagcaagagctgccacaagcccaaggccatcgtgcacaccgagaaagtgaacatgatgagcctgaccgtgctgggcctgcggatgctgttcgccaaaaccgtggccgtgaacttcctgctgaccgccaagctgttcttcctccgcgccaagagaagcggatctggcgtgaagcagaccctgaatttcgacctgctgaagctggctggcgacgtggaatccaacccaggccctactagtatggactggatttggcgcatccttttccttgtcggcgctgctaccggcgcgcattccgggccccagctccagctgcaagagtctggacctggcctggtcaagcctagcgagacactgagcctgacctgtaccgtgtccggcgatagcatcagcagcggcgattactactggggctggatcagacagcctcctggcaaaggactggaatggatcggccacatctactacagcggcgtgacctactacaaccccagcctgaagtccagagtgaccatcagcgtggacaccagccggaaccagttctccctgaagctgtctagcgtgacagccgccgataccgccgtgtactactgcaccagagaggacagcagcaactggcggagtagaggccagggaacactggtcacagttagctctggatccggcggaggcggaagtggaggcggaggatctggcggcggaggctctttcgaacaggtgcagctggtggaatctggacctggcgtggtgcagcctggcagaagcctgagaatcagctgtgccgtgtccggcttcagcgtgaccaactacggcgtgcactgggtgcgccagccacctggaaaaggactggaatggctgggcgtgatctgggctggcggcatcaccaactacaacagcgccttcatgtcccggctgaccatctccaaggacaacagcaagaacaccgtgtacctccagatgaacagcctgcgggccgaggacaccgccatgtactactgtgcttccagaggcggccactacggctacgccctggattattggggccagggaaccctcgtgaccgtgtcctctacgcgtgaggacctgaagaacgtgttcccacctgaggtggccgtgttcgagcctagcgaggccgagatcagccacacccagaaagccaccctcgtgtgcctggctaccggcttctaccccgaccatgtggaactgtcttggtgggtcaacggcaaagaggtgcacagcggcgtgtgtaccgacccccagccactgaaagaacagcccgccctgaacgacagccggtactgcctgagcagcagactgagagtgtccgccaccttctggcagaacccccggaaccacttcagatgccaggtgcagttctacggcctgagcgagaacgacgagtggacccaggacagagccaagcccgtgacccagatcgtgtctgccgaagcctggggcagagccgatgatgtgattaagatccactggcaggaaaagaagtccaacaccatcctgggcagccaggaaggcaacaccatgaagaccaacgacacctacatgaagttcagctggctgaccgtgcccgagaagtccctggacaaagaacacagatgcatcgtgcggcacgaaaacaacaagaacggcgtggaccaggaaatcatcttcccacccatcaagaccgatgtgattacaatggaccccaaggacaactgctccaaggacgccaacgataccctgctgctccagctgaccaacaccagcgcctactacatgtacttgttgctgctgctgaagtccgtggtgtacttcgccatcatcacatgctgcctgctgcggagaaccgccttctgctgcaacggcgagaagtct

SEQ ID NO: 7918 - DNA, 2994 bp, synthetic construct
  source 1..2994: mol_type = other DNA
atggccttaccagtgaccgccttgctcctgccgctggccttgctgctccacgccgccaggccggaagtgcagctggttgaatctggcggaggactggttcagcctggcggatctctgagactgtcttgtgccgccagcggcttcagcttcagcgacttttggatgagctgggtccgacaggcccctggcaaaggacttgaatgggtcgccacaatcagccaggccggcagcgagaaggactacgtggactctgtgaagggcagattcaccatcagccgggacaacgccaagaagtccctgtacctccagatgaacagcctgagagccgaggacaccgccgtgtactattgtgcctctggcgtgtacagcttcgactacagaggccagggcaccctggtcacagtctcttctggtaccggcggaggcggatctggcggcggaggtagcggtggcggaggatctgaattcgacatccagatgacccagaccgccagcagcctgcctgcctctctgggcgacagagtgaccatctcctgtagcgccagccaggacatcagcaactacctgaactggtatcagcagaaacccgacggcaccgtgaagctgctgatcttctacagcagcaacctgcacagcggcgtgcccagcagattttctggcggcggaagcggcaccgactacagcctgaccatcagcaatctggaacccgaggacattgccacctacttttgccaccagtacagcaagctgccctggacctttggcggaggcaccaagctggaaatcaagagactcgagatccagaaccctgatcctgccgtgtaccagctgcgggatagcaagagcagcgacaagagcgtgtgtctgttcaccgacttcgacagccagaccaacgtgtcccagagcaaggactccgacgtgtacatcaccgataagtgcgtgctggacatgcggagcatggacttcaagagcaactccgccgtggcctggtccaacaagtccgatttcgcctgcgccaacgccttcaacaacagcattatccccgaggacacattcttcccaagccccgagagcagcgactccaccgaccacgtgaagcccaaagagacagagaacaccaagcagcccagcaagagctgccacaagcccaaggccatcgtgcacaccgagaaagtgaacatgatgagcctgaccgtgctgggcctgcggatgctgttcgccaaaaccgtggccgtgaacttcctgctgaccgccaagctgttcttcctccgcgccaagagaagcggatctggcgtgaagcagaccctgaatttcgacctgctgaagctggctggcgacgtggaatccaacccaggccctactagtatggactggatttggcgcatccttttccttgtcggcgctgctaccggcgcgcattccgggccccagctccagctgcaagagtctggacctggcctggtcaagcctagcgagacactgagcctgacctgtaccgtgtccggcgatagcatcagcagcggcgattactactggggctggatcagacagcctcctggcaaaggactggaatggatcggccacatctactacagcggcgtgacctactacaaccccagcctgaagtccagagtgaccatcagcgtggacaccagccggaaccagttctccctgaagctgtctagcgtgacagccgccgataccgccgtgtactactgcaccagagaggacagcagcaactggcggagtagaggccagggaacactggtcacagttagctctggatccggcggaggcggaagtggaggcggaggatctggcggcggaggctctttcgaagaagtgaccctggtggaaagcggcggagacttcgtgaagcctggcggctctctgaaggtgtcctgtgccgccagcggcttcgcctttagccactacgccatgagctgggtgcgccagacccctgccaagagactggaatgggtggcctacatcagcagcggcggctccggcacctactactccgatagcgtgaagggccggttcaccatcagccgggacaacgccaagaacaccctgtacctccagatgcggagcctgcggagcgaggacagcgccatgtatttctgcaccagagtgaagctgggcacctattacttcgactcttggggccagggcaccaccctgaccgtgtcatctacgcgtgaggacctgaagaacgtgttcccacctgaggtggccgtgttcgagcctagcgaggccgagatcagccacacccagaaagccaccctcgtgtgcctggctaccggcttctaccccgaccatgtggaactgtcttggtgggtcaacggcaaagaggtgcacagcggcgtgtgtaccgacccccagccactgaaagaacagcccgccctgaacgacagccggtactgcctgagcagcagactgagagtgtccgccaccttctggcagaacccccggaaccacttcagatgccaggtgcagttctacggcctgagcgagaacgacgagtggacccaggacagagccaagcccgtgacccagatcgtgtctgccgaagcctggggcagagccgatgatgtgattaagatccactggcaggaaaagaagtccaacaccatcctgggcagccaggaaggcaacaccatgaagaccaacgacacctacatgaagttcagctggctgaccgtgcccgagaagtccctggacaaagaacacagatgcatcgtgcggcacgaaaacaacaagaacggcgtggaccaggaaatcatcttcccacccatcaagaccgatgtgattacaatggaccccaaggacaactgctccaaggacgccaacgataccctgctgctccagctgaccaacaccagcgcctactacatgtacttgttgctgctgctgaagtccgtggtgtacttcgccatcatcacatgctgcctgctgcggagaaccgccttctgctgcaacggcgagaagtct

SEQ ID NO: 7919 - DNA, 3000 bp, synthetic construct
  source 1..3000: mol_type = other DNA
atggccttaccagtgaccgccttgctcctgccgctggccttgctgctccacgccgccaggccggaagtgcagctggttgaatctggcggaggactggttcagcctggcggatctctgagactgtcttgtgccgccagcggcttcagcttcagcgacttttggatgagctgggtccgacaggcccctggcaaaggacttgaatgggtcgccacaatcagccaggccggcagcgagaaggactacgtggactctgtgaagggcagattcaccatcagccgggacaacgccaagaagtccctgtacctccagatgaacagcctgagagccgaggacaccgccgtgtactattgtgcctctggcgtgtacagcttcgactacagaggccagggcaccctggtcacagtctcttctggtaccggcggaggcggatctggcggcggaggtagcggtggcggaggatctgaattccagttcgtgctgacccagagcccttctgcctctgctgccctgggagcctctgccaagctgacctgtacactgagcagcgcccacaagacctacaccatcgactggtatcagcagcagaagggaaaggcccccagatacctgatccaagtgaagtccgacggcacctacacaaaggccaccggcgtgcccgatagattcagcggcagtagcagcggagccgatagatacctgattatccccagcgtgcaggccgacgacgaggccgattactactgcggcaccgattacaccggcggctacgtgttcggcggaggcacacaactgaccgtgacactcgagatccagaaccctgatcctgccgtgtaccagctgcgggatagcaagagcagcgacaagagcgtgtgtctgttcaccgacttcgacagccagaccaacgtgtcccagagcaaggactccgacgtgtacatcaccgataagtgcgtgctggacatgcggagcatggacttcaagagcaactccgccgtggcctggtccaacaagtccgatttcgcctgcgccaacgccttcaacaacagcattatccccgaggacacattcttcccaagccccgagagcagcgactccaccgaccacgtgaagcccaaagagacagagaacaccaagcagcccagcaagagctgccacaagcccaaggccatcgtgcacaccgagaaagtgaacatgatgagcctgaccgtgctgggcctgcggatgctgttcgccaaaaccgtggccgtgaacttcctgctgaccgccaagctgttcttcctccgcgccaagagaagcggatctggcgtgaagcagaccctgaatttcgacctgctgaagctggctggcgacgtggaatccaacccaggccctactagtatggactggatttggcgcatccttttccttgtcggcgctgctaccggcgcgcattccgggccccagctccagctgcaagagtctggacctggcctggtcaagcctagcgagacactgagcctgacctgtaccgtgtccggcgatagcatcagcagcggcgattactactggggctggatcagacagcctcctggcaaaggactggaatggatcggccacatctactacagcggcgtgacctactacaaccccagcctgaagtccagagtgaccatcagcgtggacaccagccggaaccagttctccctgaagctgtctagcgtgacagccgccgataccgccgtgtactactgcaccagagaggacagcagcaactggcggagtagaggccagggaacactggtcacagttagctctggatccggcggaggcggaagtggaggcggaggatctggcggcggaggctctttcgaagagcaactgaaagagtctggcggcggactgttcaagcccaccgataccctgaccctgacctgcaccgtgtccggcttcagcctgagctactacggcgtgaactgggtgcgccaggcccctggcaatggcctggaatggatcggcacaatcggcggcagcggcgacacctactatgcctcttgggccaagtccagaagcaccatcatcagaaacaccaacgagaacaccgtgaccctgaagatgaccagcctgacagccgccgacaccgccacctacttttgcgtcagatacgccaacatcggctacgagtatttcaacgtgtggggacccggcaccctcgtgaccgtgtcatctacgcgtgaggacctgaagaacgtgttcccacctgaggtggccgtgttcgagcctagcgaggccgagatcagccacacccagaaagccaccctcgtgtgcctggctaccggcttctaccccgaccatgtggaactgtcttggtgggtcaacggcaaagaggtgcacagcggcgtgtgtaccgacccccagccactgaaagaacagcccgccctgaacgacagccggtactgcctgagcagcagactgagagtgtccgccaccttctggcagaacccccggaaccacttcagatgccaggtgcagttctacggcctgagcgagaacgacgagtggacccaggacagagccaagcccgtgacccagatcgtgtctgccgaagcctggggcagagccgatgatgtgattaagatccactggcaggaaaagaagtccaacaccatcctgggcagccaggaaggcaacaccatgaagaccaacgacacctacatgaagttcagctggctgaccgtgcccgagaagtccctggacaaagaacacagatgcatcgtgcggcacgaaaacaacaagaacggcgtggaccaggaaatcatcttcccacccatcaagaccgatgtgattacaatggaccccaaggacaactgctccaaggacgccaacgataccctgctgctccagctgaccaacaccagcgcctactacatgtacttgttgctgctgctgaagtccgtggtgtacttcgccatcatcacatgctgcctgctgcggagaaccgccttctgctgcaacggcgagaagtct

SEQ ID NO: 7920 - DNA, 3015 bp, synthetic construct
  source 1..3015: mol_type = other DNA
atggccttaccagtgaccgccttgctcctgccgctggccttgctgctccacgccgccaggccggaagtgcagctggttgaatctggcggaggactggttcagcctggcggatctctgagactgtcttgtgccgccagcggcttcagcttcagcgacttttggatgagctgggtccgacaggcccctggcaaaggacttgaatgggtcgccacaatcagccaggccggcagcgagaaggactacgtggactctgtgaagggcagattcaccatcagccgggacaacgccaagaagtccctgtacctccagatgaacagcctgagagccgaggacaccgccgtgtactattgtgcctctggcgtgtacagcttcgactacagaggccagggcaccctggtcacagtctcttctggtaccggcggaggcggatctggcggcggaggtagcggtggcggaggatctgaattccagttcgtgctgacccagagcccttctgtgtctgccgccctgggagcctctgccaagctgacctgtacactgagcagcgcccacaagacctacaccatcgactggtatcagcagcagcagggcgaggcccccagatacctgatgcaagtgaagtccgacggcagctacaccaagggcaccggcgtgcccgatagattcagcggcagtagcagcggagccgatagatacctgattatccccagcgtgcaggccgacgacgaggccggatatgtgtgcggcgctgacgacaatggcggctacgtgttcggcggaggcacccaactgacagtgacactcgagatccagaaccctgatcctgccgtgtaccagctgcgggatagcaagagcagcgacaagagcgtgtgtctgttcaccgacttcgacagccagaccaacgtgtcccagagcaaggactccgacgtgtacatcaccgataagtgcgtgctggacatgcggagcatggacttcaagagcaactccgccgtggcctggtccaacaagtccgatttcgcctgcgccaacgccttcaacaacagcattatccccgaggacacattcttcccaagccccgagagcagcgactccaccgaccacgtgaagcccaaagagacagagaacaccaagcagcccagcaagagctgccacaagcccaaggccatcgtgcacaccgagaaagtgaacatgatgagcctgaccgtgctgggcctgcggatgctgttcgccaaaaccgtggccgtgaacttcctgctgaccgccaagctgttcttcctccgcgccaagagaagcggatctggcgtgaagcagaccctgaatttcgacctgctgaagctggctggcgacgtggaatccaacccaggccctactagtatggactggatttggcgcatccttttccttgtcggcgctgctaccggcgcgcattccgggccccagctccagctgcaagagtctggacctggcctggtcaagcctagcgagacactgagcctgacctgtaccgtgtccggcgatagcatcagcagcggcgattactactggggctggatcagacagcctcctggcaaaggactggaatggatcggccacatctactacagcggcgtgacctactacaaccccagcctgaagtccagagtgaccatcagcgtggacaccagccggaaccagttctccctgaagctgtctagcgtgacagccgccgataccgccgtgtactactgcaccagagaggacagcagcaactggcggagtagaggccagggaacactggtcacagttagctctggatccggcggaggcggaagtggaggcggaggatctggcggcggaggctctttcgaacagagcgtgaaagagtctgagggcggcctgttcaagcccaccgataccctgaccctgacctgcaccgtgtccggcttcagcctgagcagacacgccctgacatgggtgcgccaggcccctggaaatggcctggaatggatcggagccatcgacaacgccggcaccacctactatgcctcttgggccaagtccagaagcaccatcacccggaacaccgacctgcacaccgtgaccctgaagatgaccagcctgaccgccagcgacaccgccacctacttttgcgccagagtgttctacgacatcaacagcggctactacctggacggcatggacctgtggggacctggcacacttgtgaccgtgtccagcacgcgtgaggacctgaagaacgtgttcccacctgaggtggccgtgttcgagcctagcgaggccgagatcagccacacccagaaagccaccctcgtgtgcctggctaccggcttctaccccgaccatgtggaactgtcttggtgggtcaacggcaaagaggtgcacagcggcgtgtgtaccgacccccagccactgaaagaacagcccgccctgaacgacagccggtactgcctgagcagcagactgagagtgtccgccaccttctggcagaacccccggaaccacttcagatgccaggtgcagttctacggcctgagcgagaacgacgagtggacccaggacagagccaagcccgtgacccagatcgtgtctgccgaagcctggggcagagccgatgatgtgattaagatccactggcaggaaaagaagtccaacaccatcctgggcagccaggaaggcaacaccatgaagaccaacgacacctacatgaagttcagctggctgaccgtgcccgagaagtccctggacaaagaacacagatgcatcgtgcggcacgaaaacaacaagaacggcgtggaccaggaaatcatcttcccacccatcaagaccgatgtgattacaatggaccccaaggacaactgctccaaggacgccaacgataccctgctgctccagctgaccaacaccagcgcctactacatgtacttgttgctgctgctgaagtccgtggtgtacttcgccatcatcacatgctgcctgctgcggagaaccgccttctgctgcaacggcgagaagtct

SEQ ID NO: 7921 - DNA, 2997 bp, synthetic construct
  source 1..2997: mol_type = other DNA
atggccttaccagtgaccgccttgctcctgccgctggccttgctgctccacgccgccaggccggaagtgcagctggttgaatctggcggaggactggttcagcctggcggatctctgagactgtcttgtgccgccagcggcttcagcttcagcgacttttggatgagctgggtccgacaggcccctggcaaaggacttgaatgggtcgccacaatcagccaggccggcagcgagaaggactacgtggactctgtgaagggcagattcaccatcagccgggacaacgccaagaagtccctgtacctccagatgaacagcctgagagccgaggacaccgccgtgtactattgtgcctctggcgtgtacagcttcgactacagaggccagggcaccctggtcacagtctcttctggtaccggcggaggcggatctggcggcggaggtagcggtggcggaggatctgaattcgacatccagatgacccagagccccagcagcctgtctgccagcgtgggcgacagagtgaccatcacctgtagagccagccagggcatcagctcttggctggcctggtatcagcagaagcccgagaaggcccccaagagcctgatctacgccgcctctagtctccagagcggcgtgcccagcagattttctggcagcggctccggcaccgacttcaccctgacaatcagctccctccagcccgaggacttcgccacctactactgccagcagtacaacagctacccccccacctttggcggaggcaccaaggtggaaatcaagctcgagatccagaaccctgatcctgccgtgtaccagctgcgggatagcaagagcagcgacaagagcgtgtgtctgttcaccgacttcgacagccagaccaacgtgtcccagagcaaggactccgacgtgtacatcaccgataagtgcgtgctggacatgcggagcatggacttcaagagcaactccgccgtggcctggtccaacaagtccgatttcgcctgcgccaacgccttcaacaacagcattatccccgaggacacattcttcccaagccccgagagcagcgactccaccgaccacgtgaagcccaaagagacagagaacaccaagcagcccagcaagagctgccacaagcccaaggccatcgtgcacaccgagaaagtgaacatgatgagcctgaccgtgctgggcctgcggatgctgttcgccaaaaccgtggccgtgaacttcctgctgaccgccaagctgttcttcctccgcgccaagagaagcggatctggcgtgaagcagaccctgaatttcgacctgctgaagctggctggcgacgtggaatccaacccaggccctactagtatggactggatttggcgcatccttttccttgtcggcgctgctaccggcgcgcattccgggccccagctccagctgcaagagtctggacctggcctggtcaagcctagcgagacactgagcctgacctgtaccgtgtccggcgatagcatcagcagcggcgattactactggggctggatcagacagcctcctggcaaaggactggaatggatcggccacatctactacagcggcgtgacctactacaaccccagcctgaagtccagagtgaccatcagcgtggacaccagccggaaccagttctccctgaagctgtctagcgtgacagccgccgataccgccgtgtactactgcaccagagaggacagcagcaactggcggagtagaggccagggaacactggtcacagttagctctggatccggcggaggcggaagtggaggcggaggatctggcggcggaggctctttcgaagaagtgcaactggtggaatcaggcggcggactggtgcagcctggcgagtctctgagactgagctgtgtggcctccggcttcaccttcagccggtacaagatgaactgggtgcgccaggcccctggcaagggactggaatgggtgtcctacatcagccgcagcggcagagacatctactacgccgacagcgtgaagggccggttcaccatcagcagagacaacgccaagaacagcctgtacctccagatgaactccctgcgggacgaggacaccgccgtgtactactgtgccggaaccgtgaccacctattactacttcggcatggacgtgtggggccacggcaccaccgtgacagtgtcatctacgcgtgaggacctgaagaacgtgttcccacctgaggtggccgtgttcgagcctagcgaggccgagatcagccacacccagaaagccaccctcgtgtgcctggctaccggcttctaccccgaccatgtggaactgtcttggtgggtcaacggcaaagaggtgcacagcggcgtgtgtaccgacccccagccactgaaagaacagcccgccctgaacgacagccggtactgcctgagcagcagactgagagtgtccgccaccttctggcagaacccccggaaccacttcagatgccaggtgcagttctacggcctgagcgagaacgacgagtggacccaggacagagccaagcccgtgacccagatcgtgtctgccgaagcctggggcagagccgatgatgtgattaagatccactggcaggaaaagaagtccaacaccatcctgggcagccaggaaggcaacaccatgaagaccaacgacacctacatgaagttcagctggctgaccgtgcccgagaagtccctggacaaagaacacagatgcatcgtgcggcacgaaaacaacaagaacggcgtggaccaggaaatcatcttcccacccatcaagaccgatgtgattacaatggaccccaaggacaactgctccaaggacgccaacgataccctgctgctccagctgaccaacaccagcgcctactacatgtacttgttgctgctgctgaagtccgtggtgtacttcgccatcatcacatgctgcctgctgcggagaaccgccttctgctgcaacggcgagaagtct

SEQ ID NO: 7922 - DNA, 3000 bp, synthetic construct
  source 1..3000: mol_type = other DNA
atggccttaccagtgaccgccttgctcctgccgctggccttgctgctccacgccgccaggccggaagtgcagctggttgaatctggcggaggactggttcagcctggcggatctctgagactgtcttgtgccgccagcggcttcagcttcagcgacttttggatgagctgggtccgacaggcccctggcaaaggacttgaatgggtcgccacaatcagccaggccggcagcgagaaggactacgtggactctgtgaagggcagattcaccatcagccgggacaacgccaagaagtccctgtacctccagatgaacagcctgagagccgaggacaccgccgtgtactattgtgcctctggcgtgtacagcttcgactacagaggccagggcaccctggtcacagtctcttctggtaccggcggaggcggatctggcggcggaggtagcggtggcggaggatctgaattcgacatccagatgacccagagccccagcagcctgtctgccagcgtgggcgacagagtgaccatcacctgtagagccagccagggcatcagctcttggctggcctggtatcagcagaagcccgagaaggcccccaagagcctgatctacgccgcctctagtctccagagcggcgtgcccagcagattttctggcagcggctccggcaccgacttcaccctgacaatcagctccctccagcccgaggacttcgccacctactactgccagcagtacaacagctaccctcccacctttggcggaggcaccaaggtggaaatcaagctcgagatccagaaccctgatcctgccgtgtaccagctgcgggatagcaagagcagcgacaagagcgtgtgtctgttcaccgacttcgacagccagaccaacgtgtcccagagcaaggactccgacgtgtacatcaccgataagtgcgtgctggacatgcggagcatggacttcaagagcaactccgccgtggcctggtccaacaagtccgatttcgcctgcgccaacgccttcaacaacagcattatccccgaggacacattcttcccaagccccgagagcagcgactccaccgaccacgtgaagcccaaagagacagagaacaccaagcagcccagcaagagctgccacaagcccaaggccatcgtgcacaccgagaaagtgaacatgatgagcctgaccgtgctgggcctgcggatgctgttcgccaaaaccgtggccgtgaacttcctgctgaccgccaagctgttcttcctccgcgccaagagaagcggatctggcgtgaagcagaccctgaatttcgacctgctgaagctggctggcgacgtggaatccaacccaggccctactagtatggactggatttggcgcatccttttccttgtcggcgctgctaccggcgcgcattccgggccccagctccagctgcaagagtctggacctggcctggtcaagcctagcgagacactgagcctgacctgtaccgtgtccggcgatagcatcagcagcggcgattactactggggctggatcagacagcctcctggcaaaggactggaatggatcggccacatctactacagcggcgtgacctactacaaccccagcctgaagtccagagtgaccatcagcgtggacaccagccggaaccagttctccctgaagctgtctagcgtgacagccgccgataccgccgtgtactactgcaccagagaggacagcagcaactggcggagtagaggccagggaacactggtcacagttagctctggatccggcggaggcggaagtggaggcggaggatctggcggcggaggctctttcgaagaagtgcaactggtggaatccgggggaggctctgtgcagcctggcgagtctctgagactgagctgtgtggcctccggcttcaccttcagccggtacaagatgaactgggtgcgccaggcccctggcaagggactggaatgggtgtcctacatcagccgcagcggcagagacatctactacgccgacagcgtgaagggccggttcaccatcagcagagacaacgccaagaacagcctgtacctccagatgaactccctgcgggacgaggacaccgccgtgtactactgtgccggaaccgtgaccacctattactacgacttcggcatggacgtgtggggccagggcacaaccgtgacagtgtctagcacgcgtgaggacctgaagaacgtgttcccacctgaggtggccgtgttcgagcctagcgaggccgagatcagccacacccagaaagccaccctcgtgtgcctggctaccggcttctaccccgaccatgtggaactgtcttggtgggtcaacggcaaagaggtgcacagcggcgtgtgtaccgacccccagccactgaaagaacagcccgccctgaacgacagccggtactgcctgagcagcagactgagagtgtccgccaccttctggcagaacccccggaaccacttcagatgccaggtgcagttctacggcctgagcgagaacgacgagtggacccaggacagagccaagcccgtgacccagatcgtgtctgccgaagcctggggcagagccgatgatgtgattaagatccactggcaggaaaagaagtccaacaccatcctgggcagccaggaaggcaacaccatgaagaccaacgacacctacatgaagttcagctggctgaccgtgcccgagaagtccctggacaaagaacacagatgcatcgtgcggcacgaaaacaacaagaacggcgtggaccaggaaatcatcttcccacccatcaagaccgatgtgattacaatggaccccaaggacaactgctccaaggacgccaacgataccctgctgctccagctgaccaacaccagcgcctactacatgtacttgttgctgctgctgaagtccgtggtgtacttcgccatcatcacatgctgcctgctgcggagaaccgccttctgctgcaacggcgagaagtct

SEQ ID NO: 7923 - DNA, 2994 bp, synthetic construct
  source 1..2994: mol_type = other DNA
atggccttaccagtgaccgccttgctcctgccgctggccttgctgctccacgccgccaggccggaagtgcagctggttgaatctggcggaggactggttcagcctggcggatctctgagactgtcttgtgccgccagcggcttcagcttcagcgacttttggatgagctgggtccgacaggcccctggcaaaggacttgaatgggtcgccacaatcagccaggccggcagcgagaaggactacgtggactctgtgaagggcagattcaccatcagccgggacaacgccaagaagtccctgtacctccagatgaacagcctgagagccgaggacaccgccgtgtactattgtgcctctggcgtgtacagcttcgactacagaggccagggcaccctggtcacagtctcttctggtaccggcggaggcggatctggcggcggaggtagcggtggcggaggatctgaattccagtctgtgctgacacagcctccatctgcctctggcacacctggacagagagtgaccatcagctgtagcggcagcagaagcaacgtcggcggcaactacgtgttctggtatcagcaggtcccaggcgctacccctaagctgctgatctacagaagcaatcagcggcctagcggcgtgcccgatagatttgccggaagcaagagcggcagctctgccagccttgccatctctggactgagaagcgaggacgaggccgactactactgtgccacctgggatgatagcctgagcggcttcgtgtttggcaccggcaccaaagtgacagtgcttggtctcgagatccagaaccctgatcctgccgtgtaccagctgcgggatagcaagagcagcgacaagagcgtgtgtctgttcaccgacttcgacagccagaccaacgtgtcccagagcaaggactccgacgtgtacatcaccgataagtgcgtgctggacatgcggagcatggacttcaagagcaactccgccgtggcctggtccaacaagtccgatttcgcctgcgccaacgccttcaacaacagcattatccccgaggacacattcttcccaagccccgagagcagcgactccaccgaccacgtgaagcccaaagagacagagaacaccaagcagcccagcaagagctgccacaagcccaaggccatcgtgcacaccgagaaagtgaacatgatgagcctgaccgtgctgggcctgcggatgctgttcgccaaaaccgtggccgtgaacttcctgctgaccgccaagctgttcttcctccgcgccaagagaagcggatctggcgtgaagcagaccctgaatttcgacctgctgaagctggctggcgacgtggaatccaacccaggccctactagtatggactggatttggcgcatccttttccttgtcggcgctgctaccggcgcgcattccgggccccagctccagctgcaagagtctggacctggcctggtcaagcctagcgagacactgagcctgacctgtaccgtgtccggcgatagcatcagcagcggcgattactactggggctggatcagacagcctcctggcaaaggactggaatggatcggccacatctactacagcggcgtgacctactacaaccccagcctgaagtccagagtgaccatcagcgtggacaccagccggaaccagttctccctgaagctgtctagcgtgacagccgccgataccgccgtgtactactgcaccagagaggacagcagcaactggcggagtagaggccagggaacactggtcacagttagctctggatccggcggaggcggaagtggaggcggaggatctggcggcggaggctctttcgaagttcagctggttgaatctggcggcggactggttaagcctggcggatctctgagactgtcttgtgccgccagcggcttcaccttcagcgattactacatgagctggatcagacaggcccctggcaaaggactggaatgggtgtcctacatcagcagcagcggctccaccatctactacgccgatagcgtgaagggcagattcaccatcagccgggacaacgccaagaacagcctgtacctccagatgaactccctgagagccgaggacaccgccgtgtactattgcgccagaggctacggcaaagcctacgatcaatggggccagggcacactggtcaccgtttcttctacgcgtgaggacctgaagaacgtgttcccacctgaggtggccgtgttcgagcctagcgaggccgagatcagccacacccagaaagccaccctcgtgtgcctggctaccggcttctaccccgaccatgtggaactgtcttggtgggtcaacggcaaagaggtgcacagcggcgtgtgtaccgacccccagccactgaaagaacagcccgccctgaacgacagccggtactgcctgagcagcagactgagagtgtccgccaccttctggcagaacccccggaaccacttcagatgccaggtgcagttctacggcctgagcgagaacgacgagtggacccaggacagagccaagcccgtgacccagatcgtgtctgccgaagcctggggcagagccgatgatgtgattaagatccactggcaggaaaagaagtccaacaccatcctgggcagccaggaaggcaacaccatgaagaccaacgacacctacatgaagttcagctggctgaccgtgcccgagaagtccctggacaaagaacacagatgcatcgtgcggcacgaaaacaacaagaacggcgtggaccaggaaatcatcttcccacccatcaagaccgatgtgattacaatggaccccaaggacaactgctccaaggacgccaacgataccctgctgctccagctgaccaacaccagcgcctactacatgtacttgttgctgctgctgaagtccgtggtgtacttcgccatcatcacatgctgcctgctgcggagaaccgccttctgctgcaacggcgagaagtct

SEQ ID NO: 7924 - DNA, 2991 bp, synthetic construct
  source 1..2991: mol_type = other DNA
atggccttaccagtgaccgccttgctcctgccgctggccttgctgctccacgccgccaggccggaagtgcagctggttgaatctggcggaggactggttcagcctggcggatctctgagactgtcttgtgccgccagcggcttcagcttcagcgacttttggatgagctgggtccgacaggcccctggcaaaggacttgaatgggtcgccacaatcagccaggccggcagcgagaaggactacgtggactctgtgaagggcagattcaccatcagccgggacaacgccaagaagtccctgtacctccagatgaacagcctgagagccgaggacaccgccgtgtactattgtgcctctggcgtgtacagcttcgactacagaggccagggcaccctggtcacagtctcttctggtaccggcggaggcggatctggcggcggaggtagcggtggcggaggatctgaattccagtctgtggtcacacagccacctagcatgtctgccgctccaggccagcaagtgaccatctcttgtagcggcggcaacagcaacatcgagcggaactacgtgtcctggtatctgcaactgcctggcacagcccctaagctggtcatcttcgacaacgacagacggcccagcggcatccccgatagattttctggcagcaagagcggcaccagcgccacactgggaattaccggacttcagacaggcgacgaggccgactactactgtggcacatgggactctagcctgagaggctgggttttcggcggaggcacaaagctgacagtgcttggtctcgagatccagaaccctgatcctgccgtgtaccagctgcgggatagcaagagcagcgacaagagcgtgtgtctgttcaccgacttcgacagccagaccaacgtgtcccagagcaaggactccgacgtgtacatcaccgataagtgcgtgctggacatgcggagcatggacttcaagagcaactccgccgtggcctggtccaacaagtccgatttcgcctgcgccaacgccttcaacaacagcattatccccgaggacacattcttcccaagccccgagagcagcgactccaccgaccacgtgaagcccaaagagacagagaacaccaagcagcccagcaagagctgccacaagcccaaggccatcgtgcacaccgagaaagtgaacatgatgagcctgaccgtgctgggcctgcggatgctgttcgccaaaaccgtggccgtgaacttcctgctgaccgccaagctgttcttcctccgcgccaagagaagcggatctggcgtgaagcagaccctgaatttcgacctgctgaagctggctggcgacgtggaatccaacccaggccctactagtatggactggatttggcgcatccttttccttgtcggcgctgctaccggcgcgcattccgggccccagctccagctgcaagagtctggacctggcctggtcaagcctagcgagacactgagcctgacctgtaccgtgtccggcgatagcatcagcagcggcgattactactggggctggatcagacagcctcctggcaaaggactggaatggatcggccacatctactacagcggcgtgacctactacaaccccagcctgaagtccagagtgaccatcagcgtggacaccagccggaaccagttctccctgaagctgtctagcgtgacagccgccgataccgccgtgtactactgcaccagagaggacagcagcaactggcggagtagaggccagggaacactggtcacagttagctctggatccggcggaggcggaagtggaggcggaggatctggcggcggaggctctttcgaagtgcagctcgttgagtctggcggcggactgattcaacctggcggaagcctgagactgagctgtgccgcttccggcttcaccttcagcaactacgccatgaactgggttcgacaggcccctggcaaaggactggaatgggtgtccaccatcaacggcagaggcagcagcaccatctacgccgattctgtgaagggcagattcaccatcagccgggacaacagcaagaacaccctgtacctccagatgaactccctgagagccgaggacaccgccacctattactgtgcccggtacatcagcagaggactgggcgattcttggggccagggcacactggttacagtgacgcgtgaggacctgaagaacgtgttcccacctgaggtggccgtgttcgagcctagcgaggccgagatcagccacacccagaaagccaccctcgtgtgcctggctaccggcttctaccccgaccatgtggaactgtcttggtgggtcaacggcaaagaggtgcacagcggcgtgtgtaccgacccccagccactgaaagaacagcccgccctgaacgacagccggtactgcctgagcagcagactgagagtgtccgccaccttctggcagaacccccggaaccacttcagatgccaggtgcagttctacggcctgagcgagaacgacgagtggacccaggacagagccaagcccgtgacccagatcgtgtctgccgaagcctggggcagagccgatgatgtgattaagatccactggcaggaaaagaagtccaacaccatcctgggcagccaggaaggcaacaccatgaagaccaacgacacctacatgaagttcagctggctgaccgtgcccgagaagtccctggacaaagaacacagatgcatcgtgcggcacgaaaacaacaagaacggcgtggaccaggaaatcatcttcccacccatcaagaccgatgtgattacaatggaccccaaggacaactgctccaaggacgccaacgataccctgctgctccagctgaccaacaccagcgcctactacatgtacttgttgctgctgctgaagtccgtggtgtacttcgccatcatcacatgctgcctgctgcggagaaccgccttctgctgcaacggcgagaagtct

SEQ ID NO: 7925 - DNA, 2994 bp, synthetic construct
  source 1..2994: mol_type = other DNA
atggccttaccagtgaccgccttgctcctgccgctggccttgctgctccacgccgccaggccggaagtgcagctggttgaatctggcggaggactggttcagcctggcggatctctgagactgtcttgtgccgccagcggcttcagcttcagcgacttttggatgagctgggtccgacaggcccctggcaaaggacttgaatgggtcgccacaatcagccaggccggcagcgagaaggactacgtggactctgtgaagggcagattcaccatcagccgggacaacgccaagaagtccctgtacctccagatgaacagcctgagagccgaggacaccgccgtgtactattgtgcctctggcgtgtacagcttcgactacagaggccagggcaccctggtcacagtctcttctggtaccggcggaggcggatctggcggcggaggtagcggtggcggaggatctgaattcgacgtcgtgatgacccagacccctctgagcctgcctgtgtccctgggcgatcaggccagcatcagctgtagaagcagccagagcctggtgcacagcaacggcaacacctacctgcactggtatctccagaagcccggccagagccccaagctgctgatctacaaggtgtccaacagattcagcggcgtgcccgacagattctccggcagcggctctggcaccgacttcaccctgaagatcagccgggtggaagccgaggacctgggcgtgtacttctgtagccagaacacccccgtgccccccaagtttggcagcggcaccaagctggaaatcaagctcgagatccagaaccctgatcctgccgtgtaccagctgcgggatagcaagagcagcgacaagagcgtgtgtctgttcaccgacttcgacagccagaccaacgtgtcccagagcaaggactccgacgtgtacatcaccgataagtgcgtgctggacatgcggagcatggacttcaagagcaactccgccgtggcctggtccaacaagtccgatttcgcctgcgccaacgccttcaacaacagcattatccccgaggacacattcttcccaagccccgagagcagcgactccaccgaccacgtgaagcccaaagagacagagaacaccaagcagcccagcaagagctgccacaagcccaaggccatcgtgcacaccgagaaagtgaacatgatgagcctgaccgtgctgggcctgcggatgctgttcgccaaaaccgtggccgtgaacttcctgctgaccgccaagctgttcttcctccgcgccaagagaagcggatctggcgtgaagcagaccctgaatttcgacctgctgaagctggctggcgacgtggaatccaacccaggccctactagtatggactggatttggcgcatccttttccttgtcggcgctgctaccggcgcgcattccgggccccagctccagctgcaagagtctggacctggcctggtcaagcctagcgagacactgagcctgacctgtaccgtgtccggcgatagcatcagcagcggcgattactactggggctggatcagacagcctcctggcaaaggactggaatggatcggccacatctactacagcggcgtgacctactacaaccccagcctgaagtccagagtgaccatcagcgtggacaccagccggaaccagttctccctgaagctgtctagcgtgacagccgccgataccgccgtgtactactgcaccagagaggacagcagcaactggcggagtagaggccagggaacactggtcacagttagctctggatccggcggaggcggaagtggaggcggaggatctggcggcggaggctctttcgaacaggtgcagctccagcagtctggcgctgaactcgtgcggcctggcgcttctgtgaagctgtcttgcaaggccagcggctacaccttcaacgactacgagatgcactgggtcaagcagacccctgtgcacggcctgaagtggatcggagccctggaacccaagaccggcgataccgcctacagccagaagttcaagggcaaggccaccctgaccgccgacaagagcagcagcacagcctacatggaactgcggagcctgaccagcgaggacagcgccgtgtactactgcaccagctgctactactacacctacagcggccagggcaccctcgtgacagtgtctgctacgcgtgaggacctgaagaacgtgttcccacctgaggtggccgtgttcgagcctagcgaggccgagatcagccacacccagaaagccaccctcgtgtgcctggctaccggcttctaccccgaccatgtggaactgtcttggtgggtcaacggcaaagaggtgcacagcggcgtgtgtaccgacccccagccactgaaagaacagcccgccctgaacgacagccggtactgcctgagcagcagactgagagtgtccgccaccttctggcagaacccccggaaccacttcagatgccaggtgcagttctacggcctgagcgagaacgacgagtggacccaggacagagccaagcccgtgacccagatcgtgtctgccgaagcctggggcagagccgatgatgtgattaagatccactggcaggaaaagaagtccaacaccatcctgggcagccaggaaggcaacaccatgaagaccaacgacacctacatgaagttcagctggctgaccgtgcccgagaagtccctggacaaagaacacagatgcatcgtgcggcacgaaaacaacaagaacggcgtggaccaggaaatcatcttcccacccatcaagaccgatgtgattacaatggaccccaaggacaactgctccaaggacgccaacgataccctgctgctccagctgaccaacaccagcgcctactacatgtacttgttgctgctgctgaagtccgtggtgtacttcgccatcatcacatgctgcctgctgcggagaaccgccttctgctgcaacggcgagaagtct

SEQ ID NO: 7926 - DNA, 2991 bp, synthetic construct
  source 1..2991: mol_type = other DNA
atggccttaccagtgaccgccttgctcctgccgctggccttgctgctccacgccgccaggccggaagtgcagctggttgaatctggcggaggactggttcagcctggcggatctctgagactgtcttgtgccgccagcggcttcagcttcagcgacttttggatgagctgggtccgacaggcccctggcaaaggacttgaatgggtcgccacaatcagccaggccggcagcgagaaggactacgtggactctgtgaagggcagattcaccatcagccgggacaacgccaagaagtccctgtacctccagatgaacagcctgagagccgaggacaccgccgtgtactattgtgcctctggcgtgtacagcttcgactacagaggccagggcaccctggtcacagtctcttctggtaccggcggaggcggatctggcggcggaggtagcggtggcggaggatctgaattcgacatccaactgacccagagccccagcagcctgtctgcctctgtgggcgacagagtgaccatcacctgtagagccagccagggcatcagaaacgacctgggctggtatcagcagaagcccggcaaggcccccaagcggctgatctatgctgccagctccctccagaatggcgtgcccagcagattttccggcagcggctctggcaccgagttcaccctgaccatcagctccctccagcccgaggacttcgccacctactactgcctccagcacaacacctaccccgccttcggccagggcaccaaggtggaaatcaagagactcgagatccagaaccctgatcctgccgtgtaccagctgcgggatagcaagagcagcgacaagagcgtgtgtctgttcaccgacttcgacagccagaccaacgtgtcccagagcaaggactccgacgtgtacatcaccgataagtgcgtgctggacatgcggagcatggacttcaagagcaactccgccgtggcctggtccaacaagtccgatttcgcctgcgccaacgccttcaacaacagcattatccccgaggacacattcttcccaagccccgagagcagcgactccaccgaccacgtgaagcccaaagagacagagaacaccaagcagcccagcaagagctgccacaagcccaaggccatcgtgcacaccgagaaagtgaacatgatgagcctgaccgtgctgggcctgcggatgctgttcgccaaaaccgtggccgtgaacttcctgctgaccgccaagctgttcttcctccgcgccaagagaagcggatctggcgtgaagcagaccctgaatttcgacctgctgaagctggctggcgacgtggaatccaacccaggccctactagtatggactggatttggcgcatccttttccttgtcggcgctgctaccggcgcgcattccgggccccagctccagctgcaagagtctggacctggcctggtcaagcctagcgagacactgagcctgacctgtaccgtgtccggcgatagcatcagcagcggcgattactactggggctggatcagacagcctcctggcaaaggactggaatggatcggccacatctactacagcggcgtgacctactacaaccccagcctgaagtccagagtgaccatcagcgtggacaccagccggaaccagttctccctgaagctgtctagcgtgacagccgccgataccgccgtgtactactgcaccagagaggacagcagcaactggcggagtagaggccagggaacactggtcacagttagctctggatccggcggaggcggaagtggaggcggaggatctggcggcggaggctctttcgaacaggtgcaactccaggaatctggccctggcctcgtgaagcctagccagaccctgagcctgacctgtaccgtgtctggcggcagcatcagcagcttcaactactactggtcctggatcagacaccaccctggcaagggcctggaatggatcggctacatctactacagcggcagcacctacagcaaccccagcctgaagtcccgcgtgaccatctccgtggacaccagcaagaaccagtttagcctgaccctgtccagcgtgacagccgccgataccgccgtgtactactgcgccagaggctacaactggaactacttcgactactggggccagggaaccctcgtgaccgtgtctagtacgcgtgaggacctgaagaacgtgttcccacctgaggtggccgtgttcgagcctagcgaggccgagatcagccacacccagaaagccaccctcgtgtgcctggctaccggcttctaccccgaccatgtggaactgtcttggtgggtcaacggcaaagaggtgcacagcggcgtgtgtaccgacccccagccactgaaagaacagcccgccctgaacgacagccggtactgcctgagcagcagactgagagtgtccgccaccttctggcagaacccccggaaccacttcagatgccaggtgcagttctacggcctgagcgagaacgacgagtggacccaggacagagccaagcccgtgacccagatcgtgtctgccgaagcctggggcagagccgatgatgtgattaagatccactggcaggaaaagaagtccaacaccatcctgggcagccaggaaggcaacaccatgaagaccaacgacacctacatgaagttcagctggctgaccgtgcccgagaagtccctggacaaagaacacagatgcatcgtgcggcacgaaaacaacaagaacggcgtggaccaggaaatcatcttcccacccatcaagaccgatgtgattacaatggaccccaaggacaactgctccaaggacgccaacgataccctgctgctccagctgaccaacaccagcgcctactacatgtacttgttgctgctgctgaagtccgtggtgtacttcgccatcatcacatgctgcctgctgcggagaaccgccttctgctgcaacggcgagaagtct

SEQ ID NO: 7927 - DNA, 2997 bp, synthetic construct
  source 1..2997: mol_type = other DNA
atggccttaccagtgaccgccttgctcctgccgctggccttgctgctccacgccgccaggccggaagtgcagctggttgaatctggcggaggactggttcagcctggcggatctctgagactgtcttgtgccgccagcggcttcagcttcagcgacttttggatgagctgggtccgacaggcccctggcaaaggacttgaatgggtcgccacaatcagccaggccggcagcgagaaggactacgtggactctgtgaagggcagattcaccatcagccgggacaacgccaagaagtccctgtacctccagatgaacagcctgagagccgaggacaccgccgtgtactattgtgcctctggcgtgtacagcttcgactacagaggccagggcaccctggtcacagtctcttctggtaccggcggaggcggatctggcggcggaggtagcggtggcggaggatctgaattcgacgacatcgtgctgacccagagccccgccagcctggccgtgagcctgggccagagcgtgaccatcagctgcagagccagcgagagcgtggagtactacggcaccagcctgatgcagtggtaccagcagaagcccggccagccccccaagctgctgatctacgccaccagcaacgtggagagcggcgtgcccgccagattcagcggcagcggcagcggcaccgacttcagcctgaacatccaccccgtggaggaggacgacatcgccatgtacttctgccagcagagcagaaagctgcccagcaccttcggcggcggcaccaagctggagatcaagctcgagatccagaaccctgatcctgccgtgtaccagctgcgggatagcaagagcagcgacaagagcgtgtgtctgttcaccgacttcgacagccagaccaacgtgtcccagagcaaggactccgacgtgtacatcaccgataagtgcgtgctggacatgcggagcatggacttcaagagcaactccgccgtggcctggtccaacaagtccgatttcgcctgcgccaacgccttcaacaacagcattatccccgaggacacattcttcccaagccccgagagcagcgactccaccgaccacgtgaagcccaaagagacagagaacaccaagcagcccagcaagagctgccacaagcccaaggccatcgtgcacaccgagaaagtgaacatgatgagcctgaccgtgctgggcctgcggatgctgttcgccaaaaccgtggccgtgaacttcctgctgaccgccaagctgttcttcctccgcgccaagagaagcggatctggcgtgaagcagaccctgaatttcgacctgctgaagctggctggcgacgtggaatccaacccaggccctactagtatggactggatttggcgcatccttttccttgtcggcgctgctaccggcgcgcattccgggccccagctccagctgcaagagtctggacctggcctggtcaagcctagcgagacactgagcctgacctgtaccgtgtccggcgatagcatcagcagcggcgattactactggggctggatcagacagcctcctggcaaaggactggaatggatcggccacatctactacagcggcgtgacctactacaaccccagcctgaagtccagagtgaccatcagcgtggacaccagccggaaccagttctccctgaagctgtctagcgtgacagccgccgataccgccgtgtactactgcaccagagaggacagcagcaactggcggagtagaggccagggaacactggtcacagttagctctggatccggcggaggcggaagtggaggcggaggatctggcggcggaggctctttcgaagacgtgagactgcaggagagcggccccggccaggtgaagcccagccagaccgtgagcctgacctgcagcgtgaccggctacagcatcaccaacggcaaccactggtggaactggatcagacaggtgagcggcagcaagctggagtggatcggctacatcagcagcagcggcagcaccgacagcaaccccagcctgaagagcagaatcagcatcaccagagacaccagcaagaaccagctgttcctgcagctgaacagcgtgaccaccgaggacatcgccacctactactgcgccagaggctactacttcgactactggggccagggcaccaccctgaccgtgagcagcacgcgtgaggacctgaagaacgtgttcccacctgaggtggccgtgttcgagcctagcgaggccgagatcagccacacccagaaagccaccctcgtgtgcctggctaccggcttctaccccgaccatgtggaactgtcttggtgggtcaacggcaaagaggtgcacagcggcgtgtgtaccgacccccagccactgaaagaacagcccgccctgaacgacagccggtactgcctgagcagcagactgagagtgtccgccaccttctggcagaacccccggaaccacttcagatgccaggtgcagttctacggcctgagcgagaacgacgagtggacccaggacagagccaagcccgtgacccagatcgtgtctgccgaagcctggggcagagccgatgatgtgattaagatccactggcaggaaaagaagtccaacaccatcctgggcagccaggaaggcaacaccatgaagaccaacgacacctacatgaagttcagctggctgaccgtgcccgagaagtccctggacaaagaacacagatgcatcgtgcggcacgaaaacaacaagaacggcgtggaccaggaaatcatcttcccacccatcaagaccgatgtgattacaatggaccccaaggacaactgctccaaggacgccaacgataccctgctgctccagctgaccaacaccagcgcctactacatgtacttgttgctgctgctgaagtccgtggtgtacttcgccatcatcacatgctgcctgctgcggagaaccgccttctgctgcaacggcgagaagtct

SEQ ID NO: 7928 - DNA, 2994 bp, synthetic construct
  source 1..2994: mol_type = other DNA
atggccttaccagtgaccgccttgctcctgccgctggccttgctgctccacgccgccaggccggaagtgcagctggttgaatctggcggaggactggttcagcctggcggatctctgagactgtcttgtgccgccagcggcttcagcttcagcgacttttggatgagctgggtccgacaggcccctggcaaaggacttgaatgggtcgccacaatcagccaggccggcagcgagaaggactacgtggactctgtgaagggcagattcaccatcagccgggacaacgccaagaagtccctgtacctccagatgaacagcctgagagccgaggacaccgccgtgtactattgtgcctctggcgtgtacagcttcgactacagaggccagggcaccctggtcacagtctcttctggtaccggcggaggcggatctggcggcggaggtagcggtggcggaggatctgaattcgacatccagatgacccagagccccagcagcctgtctgccagcgtgggcgacagagtgaccatcacctgtagagccagccaggacgtgaacaccgccgtggcctggtatcagcagaagcctggcaaggcccccaagctgctgatctacagcgccagcttcctggaaagcggcgtgcccagcagattcagcggaagcagaagcggcaccgacttcaccctgaccatcagctccctccagcccgaggacttcgccacctactactgccagcagcactacaccacccctcccaccttcggccagaccaaggtggaaatcaagagactcgagatccagaaccctgatcctgccgtgtaccagctgcgggatagcaagagcagcgacaagagcgtgtgtctgttcaccgacttcgacagccagaccaacgtgtcccagagcaaggactccgacgtgtacatcaccgataagtgcgtgctggacatgcggagcatggacttcaagagcaactccgccgtggcctggtccaacaagtccgatttcgcctgcgccaacgccttcaacaacagcattatccccgaggacacattcttcccaagccccgagagcagcgactccaccgaccacgtgaagcccaaagagacagagaacaccaagcagcccagcaagagctgccacaagcccaaggccatcgtgcacaccgagaaagtgaacatgatgagcctgaccgtgctgggcctgcggatgctgttcgccaaaaccgtggccgtgaacttcctgctgaccgccaagctgttcttcctccgcgccaagagaagcggatctggcgtgaagcagaccctgaatttcgacctgctgaagctggctggcgacgtggaatccaacccaggccctactagtatggactggatttggcgcatccttttccttgtcggcgctgctaccggcgcgcattccgggccccagctccagctgcaagagtctggacctggcctggtcaagcctagcgagacactgagcctgacctgtaccgtgtccggcgatagcatcagcagcggcgattactactggggctggatcagacagcctcctggcaaaggactggaatggatcggccacatctactacagcggcgtgacctactacaaccccagcctgaagtccagagtgaccatcagcgtggacaccagccggaaccagttctccctgaagctgtctagcgtgacagccgccgataccgccgtgtactactgcaccagagaggacagcagcaactggcggagtagaggccagggaacactggtcacagttagctctggatccggcggaggcggaagtggaggcggaggatctggcggcggaggctctttcgaagaagtgcaactggtggaatctggcggcggactggtgcagcctggcggatctctgagactgagctgtgccgccagcggcttcaacatcaaggacacctacatccactgggtgcgccaggcccctggaaagggactggaatgggtggcccggatctaccccaccaacggctacaccagatacgccgacagcgtgaagggccggttcaccatcagcgccgacaccagcaagaataccgcctacctccagatgaacagcctgcgggccgaggataccgccgtgtactactgctcaagatggggaggcgacggcttctacgctatggacgtgtggggccagggcacccttgtgaccgtgtcatctacgcgtgaggacctgaagaacgtgttcccacctgaggtggccgtgttcgagcctagcgaggccgagatcagccacacccagaaagccaccctcgtgtgcctggctaccggcttctaccccgaccatgtggaactgtcttggtgggtcaacggcaaagaggtgcacagcggcgtgtgtaccgacccccagccactgaaagaacagcccgccctgaacgacagccggtactgcctgagcagcagactgagagtgtccgccaccttctggcagaacccccggaaccacttcagatgccaggtgcagttctacggcctgagcgagaacgacgagtggacccaggacagagccaagcccgtgacccagatcgtgtctgccgaagcctggggcagagccgatgatgtgattaagatccactggcaggaaaagaagtccaacaccatcctgggcagccaggaaggcaacaccatgaagaccaacgacacctacatgaagttcagctggctgaccgtgcccgagaagtccctggacaaagaacacagatgcatcgtgcggcacgaaaacaacaagaacggcgtggaccaggaaatcatcttcccacccatcaagaccgatgtgattacaatggaccccaaggacaactgctccaaggacgccaacgataccctgctgctccagctgaccaacaccagcgcctactacatgtacttgttgctgctgctgaagtccgtggtgtacttcgccatcatcacatgctgcctgctgcggagaaccgccttctgctgcaacggcgagaagtct

SEQ ID NO: 7929 - DNA, 2991 bp, synthetic construct
  source 1..2991: mol_type = other DNA
atggccttaccagtgaccgccttgctcctgccgctggccttgctgctccacgccgccaggccggaagtgcagctggttgaatctggcggaggactggttcagcctggcggatctctgagactgtcttgtgccgccagcggcttcagcttcagcgacttttggatgagctgggtccgacaggcccctggcaaaggacttgaatgggtcgccacaatcagccaggccggcagcgagaaggactacgtggactctgtgaagggcagattcaccatcagccgggacaacgccaagaagtccctgtacctccagatgaacagcctgagagccgaggacaccgccgtgtactattgtgcctctggcgtgtacagcttcgactacagaggccagggcaccctggtcacagtctcttctggtaccggcggaggcggatctggcggcggaggtagcggtggcggaggatctgaattcgaccagagcgtgctgacacagcctcctagcgtgtcagtggcccctggcaagaccgccagaatcccctgcgagggcaactacatcggcagcagcaacgtgcactggtatcagcagaagcccggccaggctcccgtgctcgtgatccacttcgacagcgacagacccagcggcatccccgacagattcagcggcagcaacagcggcaacatggctaccctgaccatcagcagagtggaagccggggacgaggccgactactactgtcaagtgtgggagaaccacggctgggtgttcggcggaggcaccaagctgacagtgctgtctctcgagatccagaaccctgatcctgccgtgtaccagctgcgggatagcaagagcagcgacaagagcgtgtgtctgttcaccgacttcgacagccagaccaacgtgtcccagagcaaggactccgacgtgtacatcaccgataagtgcgtgctggacatgcggagcatggacttcaagagcaactccgccgtggcctggtccaacaagtccgatttcgcctgcgccaacgccttcaacaacagcattatccccgaggacacattcttcccaagccccgagagcagcgactccaccgaccacgtgaagcccaaagagacagagaacaccaagcagcccagcaagagctgccacaagcccaaggccatcgtgcacaccgagaaagtgaacatgatgagcctgaccgtgctgggcctgcggatgctgttcgccaaaaccgtggccgtgaacttcctgctgaccgccaagctgttcttcctccgcgccaagagaagcggatctggcgtgaagcagaccctgaatttcgacctgctgaagctggctggcgacgtggaatccaacccaggccctactagtatggactggatttggcgcatccttttccttgtcggcgctgctaccggcgcgcattccgggccccagctccagctgcaagagtctggacctggcctggtcaagcctagcgagacactgagcctgacctgtaccgtgtccggcgatagcatcagcagcggcgattactactggggctggatcagacagcctcctggcaaaggactggaatggatcggccacatctactacagcggcgtgacctactacaaccccagcctgaagtccagagtgaccatcagcgtggacaccagccggaaccagttctccctgaagctgtctagcgtgacagccgccgataccgccgtgtactactgcaccagagaggacagcagcaactggcggagtagaggccagggaacactggtcacagttagctctggatccggcggaggcggaagtggaggcggaggatctggcggcggaggctctttcgaagaggtgcaactggtggaaacaggcggcggactggtgcagcctggcgagtctctgagactgagctgtgccgccagcggcttcaccttcagcgactacgagatgaactgggtgcgccaggcccctggaaagggcctggaatgggtgtcctacatcagcagctccggcagcaccatctactacgccgacagcgtgaagggccggtttaccatctaccgggacaacgccaagaacagcctgtacctccagatgaactccctgcgggccgaggacaccgccctgtactattgtgccagagcctggggcgtgggaccccctgattattggggacagggcaccctcgtgaccgtgtcctctacgcgtgaggacctgaagaacgtgttcccacctgaggtggccgtgttcgagcctagcgaggccgagatcagccacacccagaaagccaccctcgtgtgcctggctaccggcttctaccccgaccatgtggaactgtcttggtgggtcaacggcaaagaggtgcacagcggcgtgtgtaccgacccccagccactgaaagaacagcccgccctgaacgacagccggtactgcctgagcagcagactgagagtgtccgccaccttctggcagaacccccggaaccacttcagatgccaggtgcagttctacggcctgagcgagaacgacgagtggacccaggacagagccaagcccgtgacccagatcgtgtctgccgaagcctggggcagagccgatgatgtgattaagatccactggcaggaaaagaagtccaacaccatcctgggcagccaggaaggcaacaccatgaagaccaacgacacctacatgaagttcagctggctgaccgtgcccgagaagtccctggacaaagaacacagatgcatcgtgcggcacgaaaacaacaagaacggcgtggaccaggaaatcatcttcccacccatcaagaccgatgtgattacaatggaccccaaggacaactgctccaaggacgccaacgataccctgctgctccagctgaccaacaccagcgcctactacatgtacttgttgctgctgctgaagtccgtggtgtacttcgccatcatcacatgctgcctgctgcggagaaccgccttctgctgcaacggcgagaagtct

SEQ ID NO: 7930 - DNA, 3015 bp, synthetic construct
  source 1..3015: mol_type = other DNA
atggccttaccagtgaccgccttgctcctgccgctggccttgctgctccacgccgccaggccggaagtgcagctggttgaatctggcggaggactggttcagcctggcggatctctgagactgtcttgtgccgccagcggcttcagcttcagcgacttttggatgagctgggtccgacaggcccctggcaaaggacttgaatgggtcgccacaatcagccaggccggcagcgagaaggactacgtggactctgtgaagggcagattcaccatcagccgggacaacgccaagaagtccctgtacctccagatgaacagcctgagagccgaggacaccgccgtgtactattgtgcctctggcgtgtacagcttcgactacagaggccagggcaccctggtcacagtctcttctggtaccggcggaggcggatctggcggcggaggtagcggtggcggaggatctgaattcgacatccagatgacccagagccccagcagcctgtctgccagcgtgggcgataccgtgaccatcacctgtcaggccaacggctacctgaactggtatcagcagcggagaggcaaggcccccaagctgctgatctacgacggcagcaagctggaaagaggcgtgcccagcagattcagcggcagaagatggggccaggagtacaacctgaccatcaacaacctccagcccgaggatattgccacatacttttgccaggtgtacgagttcgtggtgcccggcacacggctggacctgaagagaacagtggctgctcctctcgagatccagaaccctgatcctgccgtgtaccagctgcgggatagcaagagcagcgacaagagcgtgtgtctgttcaccgacttcgacagccagaccaacgtgtcccagagcaaggactccgacgtgtacatcaccgataagtgcgtgctggacatgcggagcatggacttcaagagcaactccgccgtggcctggtccaacaagtccgatttcgcctgcgccaacgccttcaacaacagcattatccccgaggacacattcttcccaagccccgagagcagcgactccaccgaccacgtgaagcccaaagagacagagaacaccaagcagcccagcaagagctgccacaagcccaaggccatcgtgcacaccgagaaagtgaacatgatgagcctgaccgtgctgggcctgcggatgctgttcgccaaaaccgtggccgtgaacttcctgctgaccgccaagctgttcttcctccgcgccaagagaagcggatctggcgtgaagcagaccctgaatttcgacctgctgaagctggctggcgacgtggaatccaacccaggccctactagtatggactggatttggcgcatccttttccttgtcggcgctgctaccggcgcgcattccgggccccagctccagctgcaagagtctggacctggcctggtcaagcctagcgagacactgagcctgacctgtaccgtgtccggcgatagcatcagcagcggcgattactactggggctggatcagacagcctcctggcaaaggactggaatggatcggccacatctactacagcggcgtgacctactacaaccccagcctgaagtccagagtgaccatcagcgtggacaccagccggaaccagttctccctgaagctgtctagcgtgacagccgccgataccgccgtgtactactgcaccagagaggacagcagcaactggcggagtagaggccagggaacactggtcacagttagctctggatccggcggaggcggaagtggaggcggaggatctggcggcggaggctctttcgaacaggtgcagctgctccagtctggcgctgccgtgacaaagcctggcgcttctgtgcgggtgtcctgtgaagccagcggctacaacatccgggactacttcatccactggtggcggcaggctccaggccagggactccagtgggtgggatggatcaaccccaagaccggccagcccaacaaccccagacagttccagggcagagtgtccctgaccagacacgccagctgggacttcgacaccttcagcttctacatggatctgaaggccctgcggagcgacgataccgccgtgtacttctgcgccagacagagaagcgactactgggatttcgacgtgtggggcagcggcacccaagtgacagtgtctagcgccagcaccaagggacccacgcgtgaggacctgaagaacgtgttcccacctgaggtggccgtgttcgagcctagcgaggccgagatcagccacacccagaaagccaccctcgtgtgcctggctaccggcttctaccccgaccatgtggaactgtcttggtgggtcaacggcaaagaggtgcacagcggcgtgtgtaccgacccccagccactgaaagaacagcccgccctgaacgacagccggtactgcctgagcagcagactgagagtgtccgccaccttctggcagaacccccggaaccacttcagatgccaggtgcagttctacggcctgagcgagaacgacgagtggacccaggacagagccaagcccgtgacccagatcgtgtctgccgaagcctggggcagagccgatgatgtgattaagatccactggcaggaaaagaagtccaacaccatcctgggcagccaggaaggcaacaccatgaagaccaacgacacctacatgaagttcagctggctgaccgtgcccgagaagtccctggacaaagaacacagatgcatcgtgcggcacgaaaacaacaagaacggcgtggaccaggaaatcatcttcccacccatcaagaccgatgtgattacaatggaccccaaggacaactgctccaaggacgccaacgataccctgctgctccagctgaccaacaccagcgcctactacatgtacttgttgctgctgctgaagtccgtggtgtacttcgccatcatcacatgctgcctgctgcggagaaccgccttctgctgcaacggcgagaagtct

SEQ ID NO: 7931 - DNA, 3033 bp, synthetic construct
  source 1..3033: mol_type = other DNA
atggccttaccagtgaccgccttgctcctgccgctggccttgctgctccacgccgccaggccggaagtgcagctggttgaatctggcggaggactggttcagcctggcggatctctgagactgtcttgtgccgccagcggcttcagcttcagcgacttttggatgagctgggtccgacaggcccctggcaaaggacttgaatgggtcgccacaatcagccaggccggcagcgagaaggactacgtggactctgtgaagggcagattcaccatcagccgggacaacgccaagaagtccctgtacctccagatgaacagcctgagagccgaggacaccgccgtgtactattgtgcctctggcgtgtacagcttcgactacagaggccagggcaccctggtcacagtctcttctggtaccggcggaggcggatctggcggcggaggtagcggtggcggaggatctgaattccagtctgccctgacacagcctcctagcgcctctggctctcccggccagagcatcaccatcagctgtaccggcaccagcaacaacttcgtgtcctggtatcagcagcacgccggcaaggcccccaagctcgtgatctacgacgtgaacaagcggcccagcggcgtgcccgatagattcagcggcagcaagagcggcaacaccgccagcctgacagtgtctggcctccagaccgatgacgaggccgtgtactactgcggcagcctcgtgggcaactgggacgtgatctttggcggaggcaccaagctgaccgtgctgctcgagatccagaaccctgatcctgccgtgtaccagctgcgggatagcaagagcagcgacaagagcgtgtgtctgttcaccgacttcgacagccagaccaacgtgtcccagagcaaggactccgacgtgtacatcaccgataagtgcgtgctggacatgcggagcatggacttcaagagcaactccgccgtggcctggtccaacaagtccgatttcgcctgcgccaacgccttcaacaacagcattatccccgaggacacattcttcccaagccccgagagcagcgactccaccgaccacgtgaagcccaaagagacagagaacaccaagcagcccagcaagagctgccacaagcccaaggccatcgtgcacaccgagaaagtgaacatgatgagcctgaccgtgctgggcctgcggatgctgttcgccaaaaccgtggccgtgaacttcctgctgaccgccaagctgttcttcctccgcgccaagagaagcggatctggcgtgaagcagaccctgaatttcgacctgctgaagctggctggcgacgtggaatccaacccaggccctactagtatggactggatttggcgcatccttttccttgtcggcgctgctaccggcgcgcattccgggccccagctccagctgcaagagtctggacctggcctggtcaagcctagcgagacactgagcctgacctgtaccgtgtccggcgatagcatcagcagcggcgattactactggggctggatcagacagcctcctggcaaaggactggaatggatcggccacatctactacagcggcgtgacctactacaaccccagcctgaagtccagagtgaccatcagcgtggacaccagccggaaccagttctccctgaagctgtctagcgtgacagccgccgataccgccgtgtactactgcaccagagaggacagcagcaactggcggagtagaggccagggaacactggtcacagttagctctggatccggcggaggcggaagtggaggcggaggatctggcggcggaggctctttcgaacagccccagctccaggaatctggccccacactggtggaagccagcgagacactgagcctgacctgtgccgtgtccggcgattctaccgccgcctgcaatagcttctggggctgggtgcgccagcctcctggaaagggactggaatgggtgggaagcctgagccactgcgccagctattggaaccggggctggacctaccacaaccccagcctgaagtccagactgaccctggccctggacacccccaagaacctggtgttcctgaagctgaacagcgtgacagccgccgacaccgccacctactactgtgccagatttggcggcgaggtgctgcggtacaccgactggcctaaacctgcctgggtggacctgtggggcagaggaacactcgtgaccgtgtccagcacgcgtgaggacctgaagaacgtgttcccacctgaggtggccgtgttcgagcctagcgaggccgagatcagccacacccagaaagccaccctcgtgtgcctggctaccggcttctaccccgaccatgtggaactgtcttggtgggtcaacggcaaagaggtgcacagcggcgtgtgtaccgacccccagccactgaaagaacagcccgccctgaacgacagccggtactgcctgagcagcagactgagagtgtccgccaccttctggcagaacccccggaaccacttcagatgccaggtgcagttctacggcctgagcgagaacgacgagtggacccaggacagagccaagcccgtgacccagatcgtgtctgccgaagcctggggcagagccgatgatgtgattaagatccactggcaggaaaagaagtccaacaccatcctgggcagccaggaaggcaacaccatgaagaccaacgacacctacatgaagttcagctggctgaccgtgcccgagaagtccctggacaaagaacacagatgcatcgtgcggcacgaaaacaacaagaacggcgtggaccaggaaatcatcttcccacccatcaagaccgatgtgattacaatggaccccaaggacaactgctccaaggacgccaacgataccctgctgctccagctgaccaacaccagcgcctactacatgtacttgttgctgctgctgaagtccgtggtgtacttcgccatcatcacatgctgcctgctgcggagaaccgccttctgctgcaacggcgagaagtct

SEQ ID NO: 7932 - DNA, 2988 bp, synthetic construct
  source 1..2988: mol_type = other DNA
atggccttaccagtgaccgccttgctcctgccgctggccttgctgctccacgccgccaggccggaagtgcagctggttgaatctggcggaggactggttcagcctggcggatctctgagactgtcttgtgccgccagcggcttcagcttcagcgacttttggatgagctgggtccgacaggcccctggcaaaggacttgaatgggtcgccacaatcagccaggccggcagcgagaaggactacgtggactctgtgaagggcagattcaccatcagccgggacaacgccaagaagtccctgtacctccagatgaacagcctgagagccgaggacaccgccgtgtactattgtgcctctggcgtgtacagcttcgactacagaggccagggcaccctggtcacagtctcttctggtaccggcggaggcggatctggcggcggaggtagcggtggcggaggatctgaattcgagatcgtgctgacacagagccctggcaccctgagcctgtctccaggcgagacagccatcatcagctgccggacaagccagtacggcagcctggcctggtatcagcagaggccaggacaggcccccagactcgtgatctacagcggcagcacaagagccgccggaatccccgatagattcagcggctccagatggggacccgactacaacctgaccatcagcaacctggaaagcggcgacttcggcgtgtactactgccagcagtacgagttcttcggccagggcaccaaggtgcaggtggacatcaaaagactcgagatccagaaccctgatcctgccgtgtaccagctgcgggatagcaagagcagcgacaagagcgtgtgtctgttcaccgacttcgacagccagaccaacgtgtcccagagcaaggactccgacgtgtacatcaccgataagtgcgtgctggacatgcggagcatggacttcaagagcaactccgccgtggcctggtccaacaagtccgatttcgcctgcgccaacgccttcaacaacagcattatccccgaggacacattcttcccaagccccgagagcagcgactccaccgaccacgtgaagcccaaagagacagagaacaccaagcagcccagcaagagctgccacaagcccaaggccatcgtgcacaccgagaaagtgaacatgatgagcctgaccgtgctgggcctgcggatgctgttcgccaaaaccgtggccgtgaacttcctgctgaccgccaagctgttcttcctccgcgccaagagaagcggatctggcgtgaagcagaccctgaatttcgacctgctgaagctggctggcgacgtggaatccaacccaggccctactagtatggactggatttggcgcatccttttccttgtcggcgctgctaccggcgcgcattccgggccccagctccagctgcaagagtctggacctggcctggtcaagcctagcgagacactgagcctgacctgtaccgtgtccggcgatagcatcagcagcggcgattactactggggctggatcagacagcctcctggcaaaggactggaatggatcggccacatctactacagcggcgtgacctactacaaccccagcctgaagtccagagtgaccatcagcgtggacaccagccggaaccagttctccctgaagctgtctagcgtgacagccgccgataccgccgtgtactactgcaccagagaggacagcagcaactggcggagtagaggccagggaacactggtcacagttagctctggatccggcggaggcggaagtggaggcggaggatctggcggcggaggctctttcgaacaggtgcagctggtgcagtctggcggccagatgaagaaacccggcgagagcatgagaatcagctgtcgggcctccggctacgagttcatcgactgcaccctgaactggatcagactggcccctggcaagcggcctgagtggatgggatggctgaagcctagaggcggagccgtgaactacgccagacctctccagggcagagtgaccatgaccagggacgtgtacagcgataccgccttcctggaactgcggagcctgaccgtggatgataccgccgtgtacttctgcaccagaggcaagaactgcgattacaactgggacttcgagcactggggcagaggcacccctgtgatcgtgtctagcacgcgtgaggacctgaagaacgtgttcccacctgaggtggccgtgttcgagcctagcgaggccgagatcagccacacccagaaagccaccctcgtgtgcctggctaccggcttctaccccgaccatgtggaactgtcttggtgggtcaacggcaaagaggtgcacagcggcgtgtgtaccgacccccagccactgaaagaacagcccgccctgaacgacagccggtactgcctgagcagcagactgagagtgtccgccaccttctggcagaacccccggaaccacttcagatgccaggtgcagttctacggcctgagcgagaacgacgagtggacccaggacagagccaagcccgtgacccagatcgtgtctgccgaagcctggggcagagccgatgatgtgattaagatccactggcaggaaaagaagtccaacaccatcctgggcagccaggaaggcaacaccatgaagaccaacgacacctacatgaagttcagctggctgaccgtgcccgagaagtccctggacaaagaacacagatgcatcgtgcggcacgaaaacaacaagaacggcgtggaccaggaaatcatcttcccacccatcaagaccgatgtgattacaatggaccccaaggacaactgctccaaggacgccaacgataccctgctgctccagctgaccaacaccagcgcctactacatgtacttgttgctgctgctgaagtccgtggtgtacttcgccatcatcacatgctgcctgctgcggagaaccgccttctgctgcaacggcgagaagtct

SEQ ID NO: 7933 - DNA, 3018 bp, synthetic construct
  source 1..3018: mol_type = other DNA
atggccttaccagtgaccgccttgctcctgccgctggccttgctgctccacgccgccaggccggaagtgcagctggttgaatctggcggaggactggttcagcctggcggatctctgagactgtcttgtgccgccagcggcttcagcttcagcgacttttggatgagctgggtccgacaggcccctggcaaaggacttgaatgggtcgccacaatcagccaggccggcagcgagaaggactacgtggactctgtgaagggcagattcaccatcagccgggacaacgccaagaagtccctgtacctccagatgaacagcctgagagccgaggacaccgccgtgtactattgtgcctctggcgtgtacagcttcgactacagaggccagggcaccctggtcacagtctcttctggtaccggcggaggcggatctggcggcggaggtagcggtggcggaggatctgaattcgagctggtgctgacacagagccctggcaccctgtctctgtctgccggcgaaagagccaccctgagctgtagagccagccagagcgtgtcctctggcagcctggcttggtatcagcagaagccaggccaggcccccagactgctgatctacggcgcttctaccagagccaccggcatccccgatagattcagcggctctggctccggcaccgacttcaccctgacaatcggcagactggaacccgaggacctggccgtgtactactgccagcagtacggcaccagcccctacacattcggccagggcaccaagctggaaatcctcgagatccagaaccctgatcctgccgtgtaccagctgcgggatagcaagagcagcgacaagagcgtgtgtctgttcaccgacttcgacagccagaccaacgtgtcccagagcaaggactccgacgtgtacatcaccgataagtgcgtgctggacatgcggagcatggacttcaagagcaactccgccgtggcctggtccaacaagtccgatttcgcctgcgccaacgccttcaacaacagcattatccccgaggacacattcttcccaagccccgagagcagcgactccaccgaccacgtgaagcccaaagagacagagaacaccaagcagcccagcaagagctgccacaagcccaaggccatcgtgcacaccgagaaagtgaacatgatgagcctgaccgtgctgggcctgcggatgctgttcgccaaaaccgtggccgtgaacttcctgctgaccgccaagctgttcttcctccgcgccaagagaagcggatctggcgtgaagcagaccctgaatttcgacctgctgaagctggctggcgacgtggaatccaacccaggccctactagtatggactggatttggcgcatccttttccttgtcggcgctgctaccggcgcgcattccgggccccagctccagctgcaagagtctggacctggcctggtcaagcctagcgagacactgagcctgacctgtaccgtgtccggcgatagcatcagcagcggcgattactactggggctggatcagacagcctcctggcaaaggactggaatggatcggccacatctactacagcggcgtgacctactacaaccccagcctgaagtccagagtgaccatcagcgtggacaccagccggaaccagttctccctgaagctgtctagcgtgacagccgccgataccgccgtgtactactgcaccagagaggacagcagcaactggcggagtagaggccagggaacactggtcacagttagctctggatccggcggaggcggaagtggaggcggaggatctggcggcggaggctctttcgaactggaacagagcggagccgaagtgaagaaacccggcagcagcgtgcaggtgtcctgcaaagcaagcggcggcaccttctctatgtacggcttcaactgggtgcgccaggctcctggacacggcctggaatggatgggcggcatcatccccatcttcggcacctccaactacgcccagaaattccggggcagagtgaccttcaccgccgaccaggccacaagcaccgcctacatggaactgaccaacctgcggagcgacgacaccgccgtgtattattgcgccagagacttcggccccgactgggaggatggcgacagctacgatggcagcggcagaggcttcttcgacttctggggccagggaacccttgtgaccgtgtcctcaacgcgtgaggacctgaagaacgtgttcccacctgaggtggccgtgttcgagcctagcgaggccgagatcagccacacccagaaagccaccctcgtgtgcctggctaccggcttctaccccgaccatgtggaactgtcttggtgggtcaacggcaaagaggtgcacagcggcgtgtgtaccgacccccagccactgaaagaacagcccgccctgaacgacagccggtactgcctgagcagcagactgagagtgtccgccaccttctggcagaacccccggaaccacttcagatgccaggtgcagttctacggcctgagcgagaacgacgagtggacccaggacagagccaagcccgtgacccagatcgtgtctgccgaagcctggggcagagccgatgatgtgattaagatccactggcaggaaaagaagtccaacaccatcctgggcagccaggaaggcaacaccatgaagaccaacgacacctacatgaagttcagctggctgaccgtgcccgagaagtccctggacaaagaacacagatgcatcgtgcggcacgaaaacaacaagaacggcgtggaccaggaaatcatcttcccacccatcaagaccgatgtgattacaatggaccccaaggacaactgctccaaggacgccaacgataccctgctgctccagctgaccaacaccagcgcctactacatgtacttgttgctgctgctgaagtccgtggtgtacttcgccatcatcacatgctgcctgctgcggagaaccgccttctgctgcaacggcgagaagtct

SEQ ID NO: 7934 - DNA, 2958 bp, synthetic construct
  source 1..2958: mol_type = other DNA
atggccttaccagtgaccgccttgctcctgccgctggccttgctgctccacgccgccaggccggaagtgcagctggttgaatctggcggaggactggttcagcctggcggatctctgagactgtcttgtgccgccagcggcttcagcttcagcgacttttggatgagctgggtccgacaggcccctggcaaaggacttgaatgggtcgccacaatcagccaggccggcagcgagaaggactacgtggactctgtgaagggcagattcaccatcagccgggacaacgccaagaagtccctgtacctccagatgaacagcctgagagccgaggacaccgccgtgtactattgtgcctctggcgtgtacagcttcgactacagaggccagggcaccctggtcacagtctcttctggtaccggcggaggcggatctggcggcggaggtagcggtggcggaggatctgaattcgacatccagatgacccagagccccagcagcctgtctgccagcgtgggcgacagagtgaccatcacctgtcaggccagccaggacatcaacaactacctgaactggtatcagcagaagcccggcaaggcccccaagctgctgatctacgacgccagcaatctgcagaccggcgtgcccagcagattttccggctctggcagcggcaccgacttcaccttcaccatcgaggacattgccacctactactgccagcagtacaccttcggccctggcaccaaggtggacatcaaactcgagatccagaaccctgatcctgccgtgtaccagctgcgggatagcaagagcagcgacaagagcgtgtgtctgttcaccgacttcgacagccagaccaacgtgtcccagagcaaggactccgacgtgtacatcaccgataagtgcgtgctggacatgcggagcatggacttcaagagcaactccgccgtggcctggtccaacaagtccgatttcgcctgcgccaacgccttcaacaacagcattatccccgaggacacattcttcccaagccccgagagcagcgactccaccgaccacgtgaagcccaaagagacagagaacaccaagcagcccagcaagagctgccacaagcccaaggccatcgtgcacaccgagaaagtgaacatgatgagcctgaccgtgctgggcctgcggatgctgttcgccaaaaccgtggccgtgaacttcctgctgaccgccaagctgttcttcctccgcgccaagagaagcggatctggcgtgaagcagaccctgaatttcgacctgctgaagctggctggcgacgtggaatccaacccaggccctactagtatggactggatttggcgcatccttttccttgtcggcgctgctaccggcgcgcattccgggccccagctccagctgcaagagtctggacctggcctggtcaagcctagcgagacactgagcctgacctgtaccgtgtccggcgatagcatcagcagcggcgattactactggggctggatcagacagcctcctggcaaaggactggaatggatcggccacatctactacagcggcgtgacctactacaaccccagcctgaagtccagagtgaccatcagcgtggacaccagccggaaccagttctccctgaagctgtctagcgtgacagccgccgataccgccgtgtactactgcaccagagaggacagcagcaactggcggagtagaggccagggaacactggtcacagttagctctggatccggcggaggcggaagtggaggcggaggatctggcggcggaggctctttcgaagaagtgcaactgctggaatctggcggcggactggtgcagcctggcggatctctgagactgagctgtgccgccagcggcttcacctttagctggtacagcatgacctgggtgcgccaggcccctggcaaaggactggaatgggtgtccagcatcgtgccctggggcgatttcacccagtacgccgatagcgtgaagggccggttcaccatcagccgggacaacagcaagaacaccctgtacctgcagatgaacagcctgcgggccgaggacaccgccgtgtactattgtgccaagggacctggctggggcagcttcgatctgtggggcagaggaacccttgtgaccgtgtccagcacgcgtgaggacctgaagaacgtgttcccacctgaggtggccgtgttcgagcctagcgaggccgagatcagccacacccagaaagccaccctcgtgtgcctggctaccggcttctaccccgaccatgtggaactgtcttggtgggtcaacggcaaagaggtgcacagcggcgtgtgtaccgacccccagccactgaaagaacagcccgccctgaacgacagccggtactgcctgagcagcagactgagagtgtccgccaccttctggcagaacccccggaaccacttcagatgccaggtgcagttctacggcctgagcgagaacgacgagtggacccaggacagagccaagcccgtgacccagatcgtgtctgccgaagcctggggcagagccgatgatgtgattaagatccactggcaggaaaagaagtccaacaccatcctgggcagccaggaaggcaacaccatgaagaccaacgacacctacatgaagttcagctggctgaccgtgcccgagaagtccctggacaaagaacacagatgcatcgtgcggcacgaaaacaacaagaacggcgtggaccaggaaatcatcttcccacccatcaagaccgatgtgattacaatggaccccaaggacaactgctccaaggacgccaacgataccctgctgctccagctgaccaacaccagcgcctactacatgtacttgttgctgctgctgaagtccgtggtgtacttcgccatcatcacatgctgcctgctgcggagaaccgccttctgctgcaacggcgagaagtct

SEQ ID NO: 7935 - DNA, 2988 bp, synthetic construct
  source 1..2988: mol_type = other DNA
atggccttaccagtgaccgccttgctcctgccgctggccttgctgctccacgccgccaggccggaagtgcagctggttgaatctggcggaggactggttcagcctggcggatctctgagactgtcttgtgccgccagcggcttcagcttcagcgacttttggatgagctgggtccgacaggcccctggcaaaggacttgaatgggtcgccacaatcagccaggccggcagcgagaaggactacgtggactctgtgaagggcagattcaccatcagccgggacaacgccaagaagtccctgtacctccagatgaacagcctgagagccgaggacaccgccgtgtactattgtgcctctggcgtgtacagcttcgactacagaggccagggcaccctggtcacagtctcttctggtaccggcggaggcggatctggcggcggaggtagcggtggcggaggatctgaattcgacatccagatgacccagagccccagcagcctgtctgccagcgtgggcgacagagtgaccatcacctgtaccgccagcctgagcgtgtccagcacctacctgcactggtatcagcagaagcccggcagcagccccaagctgtggatctacagcaccagcaacctggcctccggcgtgcccagcagattttctggcagcggctctggcaccagctacaccctgaccatcagctccctccagcccgaggacttcgccacctactactgccaccagtaccacagaagccccctgacctttggcggaggcaccaaggtggaaatcaagagactcgagatccagaaccctgatcctgccgtgtaccagctgcgggatagcaagagcagcgacaagagcgtgtgtctgttcaccgacttcgacagccagaccaacgtgtcccagagcaaggactccgacgtgtacatcaccgataagtgcgtgctggacatgcggagcatggacttcaagagcaactccgccgtggcctggtccaacaagtccgatttcgcctgcgccaacgccttcaacaacagcattatccccgaggacacattcttcccaagccccgagagcagcgactccaccgaccacgtgaagcccaaagagacagagaacaccaagcagcccagcaagagctgccacaagcccaaggccatcgtgcacaccgagaaagtgaacatgatgagcctgaccgtgctgggcctgcggatgctgttcgccaaaaccgtggccgtgaacttcctgctgaccgccaagctgttcttcctccgcgccaagagaagcggatctggcgtgaagcagaccctgaatttcgacctgctgaagctggctggcgacgtggaatccaacccaggccctactagtatggactggatttggcgcatccttttccttgtcggcgctgctaccggcgcgcattccgggccccagctccagctgcaagagtctggacctggcctggtcaagcctagcgagacactgagcctgacctgtaccgtgtccggcgatagcatcagcagcggcgattactactggggctggatcagacagcctcctggcaaaggactggaatggatcggccacatctactacagcggcgtgacctactacaaccccagcctgaagtccagagtgaccatcagcgtggacaccagccggaaccagttctccctgaagctgtctagcgtgacagccgccgataccgccgtgtactactgcaccagagaggacagcagcaactggcggagtagaggccagggaacactggtcacagttagctctggatccggcggaggcggaagtggaggcggaggatctggcggcggaggctctttcgaagaagtgcaactggtggaatctggcggcggactggtgcagcctggcggatctctgagactgagctgtgccgccagcggcttcagcctgaccaaatacggcgtgcactgggtgcgccaggcccctggaaaaggactggaatgggtgggagtgaagtgggctggcggctccaccgactacaacagcgccctgatgagccggttcaccatcagcaaggacaacgccaagaacagcctgtacctccagatgaactccctgcgggccgaggacaccgccgtgtactactgtgccagagatcaccgggacgctatggactactggggccagggaacactcgtgaccgtgtcctctacgcgtgaggacctgaagaacgtgttcccacctgaggtggccgtgttcgagcctagcgaggccgagatcagccacacccagaaagccaccctcgtgtgcctggctaccggcttctaccccgaccatgtggaactgtcttggtgggtcaacggcaaagaggtgcacagcggcgtgtgtaccgacccccagccactgaaagaacagcccgccctgaacgacagccggtactgcctgagcagcagactgagagtgtccgccaccttctggcagaacccccggaaccacttcagatgccaggtgcagttctacggcctgagcgagaacgacgagtggacccaggacagagccaagcccgtgacccagatcgtgtctgccgaagcctggggcagagccgatgatgtgattaagatccactggcaggaaaagaagtccaacaccatcctgggcagccaggaaggcaacaccatgaagaccaacgacacctacatgaagttcagctggctgaccgtgcccgagaagtccctggacaaagaacacagatgcatcgtgcggcacgaaaacaacaagaacggcgtggaccaggaaatcatcttcccacccatcaagaccgatgtgattacaatggaccccaaggacaactgctccaaggacgccaacgataccctgctgctccagctgaccaacaccagcgcctactacatgtacttgttgctgctgctgaagtccgtggtgtacttcgccatcatcacatgctgcctgctgcggagaaccgccttctgctgcaacggcgagaagtct

SEQ ID NO: 7936 - DNA, 3000 bp, synthetic construct
  source 1..3000: mol_type = other DNA
atggccttaccagtgaccgccttgctcctgccgctggccttgctgctccacgccgccaggccggaagtgcagctggttgaatctggcggaggactggttcagcctggcggatctctgagactgtcttgtgccgccagcggcttcagcttcagcgacttttggatgagctgggtccgacaggcccctggcaaaggacttgaatgggtcgccacaatcagccaggccggcagcgagaaggactacgtggactctgtgaagggcagattcaccatcagccgggacaacgccaagaagtccctgtacctccagatgaacagcctgagagccgaggacaccgccgtgtactattgtgcctctggcgtgtacagcttcgactacagaggccagggcaccctggtcacagtctcttctggtaccggcggaggcggatctggcggcggaggtagcggtggcggaggatctgaattcgacatccagatgacccagagccccagcagcctgtctgccagcgtgggcgacagagtgaccatcacatgcaaggccagccaggacgtgggaacagccgtggcctggtatcagcagaagcctggcaaggcccccaagctgctgatctacagcgccagctacagatccaccggcgtgcccagcagattttccggctctggcagcggcaccgacttcaccctgaccatctctagcctccagcccgaggacttcgccacctactactgccagcaccactactccgccccctggacatttggcggaggcaccaaggtggaaatcaagctcgagatccagaaccctgatcctgccgtgtaccagctgcgggatagcaagagcagcgacaagagcgtgtgtctgttcaccgacttcgacagccagaccaacgtgtcccagagcaaggactccgacgtgtacatcaccgataagtgcgtgctggacatgcggagcatggacttcaagagcaactccgccgtggcctggtccaacaagtccgatttcgcctgcgccaacgccttcaacaacagcattatccccgaggacacattcttcccaagccccgagagcagcgactccaccgaccacgtgaagcccaaagagacagagaacaccaagcagcccagcaagagctgccacaagcccaaggccatcgtgcacaccgagaaagtgaacatgatgagcctgaccgtgctgggcctgcggatgctgttcgccaaaaccgtggccgtgaacttcctgctgaccgccaagctgttcttcctccgcgccaagagaagcggatctggcgtgaagcagaccctgaatttcgacctgctgaagctggctggcgacgtggaatccaacccaggccctactagtatggactggatttggcgcatccttttccttgtcggcgctgctaccggcgcgcattccgggccccagctccagctgcaagagtctggacctggcctggtcaagcctagcgagacactgagcctgacctgtaccgtgtccggcgatagcatcagcagcggcgattactactggggctggatcagacagcctcctggcaaaggactggaatggatcggccacatctactacagcggcgtgacctactacaaccccagcctgaagtccagagtgaccatcagcgtggacaccagccggaaccagttctccctgaagctgtctagcgtgacagccgccgataccgccgtgtactactgcaccagagaggacagcagcaactggcggagtagaggccagggaacactggtcacagttagctctggatccggcggaggcggaagtggaggcggaggatctggcggcggaggctctttcgaagaagtgcaactggtggaatcaggcggcggactggtgcagcctggcggatctctgagactgagctgtgccgccagcggcttcaccttcagcagaaacggcatgagctgggtgcgccaggcccctggaaaaggactggaatgggtggcaaccgtgtccagcggcggcagctacatctactacgccgacagcgtgaagggccggttcaccatctccagagacaacgccaagaacagcctgtacctccagatgaactccctgcgggccgaggacaccgccgtgtactattgtgccagacagggcaccaccgccctggctaccagattcttcgatgtgtggggccagggcaccctcgtgaccgtgtcatctacgcgtgaggacctgaagaacgtgttcccacctgaggtggccgtgttcgagcctagcgaggccgagatcagccacacccagaaagccaccctcgtgtgcctggctaccggcttctaccccgaccatgtggaactgtcttggtgggtcaacggcaaagaggtgcacagcggcgtgtgtaccgacccccagccactgaaagaacagcccgccctgaacgacagccggtactgcctgagcagcagactgagagtgtccgccaccttctggcagaacccccggaaccacttcagatgccaggtgcagttctacggcctgagcgagaacgacgagtggacccaggacagagccaagcccgtgacccagatcgtgtctgccgaagcctggggcagagccgatgatgtgattaagatccactggcaggaaaagaagtccaacaccatcctgggcagccaggaaggcaacaccatgaagaccaacgacacctacatgaagttcagctggctgaccgtgcccgagaagtccctggacaaagaacacagatgcatcgtgcggcacgaaaacaacaagaacggcgtggaccaggaaatcatcttcccacccatcaagaccgatgtgattacaatggaccccaaggacaactgctccaaggacgccaacgataccctgctgctccagctgaccaacaccagcgcctactacatgtacttgttgctgctgctgaagtccgtggtgtacttcgccatcatcacatgctgcctgctgcggagaaccgccttctgctgcaacggcgagaagtct

SEQ ID NO: 7937 - DNA, 2988 bp, synthetic construct
  source 1..2988: mol_type = other DNA
atggccttaccagtgaccgccttgctcctgccgctggccttgctgctccacgccgccaggccggaagtgcagctggttgaatctggcggaggactggttcagcctggcggatctctgagactgtcttgtgccgccagcggcttcagcttcagcgacttttggatgagctgggtccgacaggcccctggcaaaggacttgaatgggtcgccacaatcagccaggccggcagcgagaaggactacgtggactctgtgaagggcagattcaccatcagccgggacaacgccaagaagtccctgtacctccagatgaacagcctgagagccgaggacaccgccgtgtactattgtgcctctggcgtgtacagcttcgactacagaggccagggcaccctggtcacagtctcttctggtaccggcggaggcggatctggcggcggaggtagcggtggcggaggatctgaattcgacatccagatgacccagagcccccctagcctgtctgcctctgtgggcggcaaagtgaccatcacatgcaaggccagccaggacatcgaccgctacatggcctggtatcaggacaagcccggcaagggacccaagctgctgatccacgataccagcaccctccagcccggcatccccagcagattttctggcagcggctccggcagagactacagcttcagcatcagcaacctggaacccgaggacattgccacctactactgcctccagtacgacaacctgtggaccttcggcggaggcaccaagctggaaatcaagagactcgagatccagaaccctgatcctgccgtgtaccagctgcgggatagcaagagcagcgacaagagcgtgtgtctgttcaccgacttcgacagccagaccaacgtgtcccagagcaaggactccgacgtgtacatcaccgataagtgcgtgctggacatgcggagcatggacttcaagagcaactccgccgtggcctggtccaacaagtccgatttcgcctgcgccaacgccttcaacaacagcattatccccgaggacacattcttcccaagccccgagagcagcgactccaccgaccacgtgaagcccaaagagacagagaacaccaagcagcccagcaagagctgccacaagcccaaggccatcgtgcacaccgagaaagtgaacatgatgagcctgaccgtgctgggcctgcggatgctgttcgccaaaaccgtggccgtgaacttcctgctgaccgccaagctgttcttcctccgcgccaagagaagcggatctggcgtgaagcagaccctgaatttcgacctgctgaagctggctggcgacgtggaatccaacccaggccctactagtatggactggatttggcgcatccttttccttgtcggcgctgctaccggcgcgcattccgggccccagctccagctgcaagagtctggacctggcctggtcaagcctagcgagacactgagcctgacctgtaccgtgtccggcgatagcatcagcagcggcgattactactggggctggatcagacagcctcctggcaaaggactggaatggatcggccacatctactacagcggcgtgacctactacaaccccagcctgaagtccagagtgaccatcagcgtggacaccagccggaaccagttctccctgaagctgtctagcgtgacagccgccgataccgccgtgtactactgcaccagagaggacagcagcaactggcggagtagaggccagggaacactggtcacagttagctctggatccggcggaggcggaagtggaggcggaggatctggcggcggaggctctttcgaacaggtgcaactggtgcagagcggagccgagcttgtgaagcctggcgcttccgtgaagatgagctgcaaagccagcggctacatcttcaccaactacaacatccactgggtcaagaagtccccaggccagggcctggaatggatcggagccatctaccccggaaacggcgacgccccttacagccagaagttccaggacagagccaccctgaccgccgacaccagcagcagcaccacctacatggaactgagcagcctgaccagcgaggacagcgccgtgtactattgcgtgcgggccaactgggatgtggccttcgcctattggggccagggcacactggtgtccgtgtcctctacgcgtgaggacctgaagaacgtgttcccacctgaggtggccgtgttcgagcctagcgaggccgagatcagccacacccagaaagccaccctcgtgtgcctggctaccggcttctaccccgaccatgtggaactgtcttggtgggtcaacggcaaagaggtgcacagcggcgtgtgtaccgacccccagccactgaaagaacagcccgccctgaacgacagccggtactgcctgagcagcagactgagagtgtccgccaccttctggcagaacccccggaaccacttcagatgccaggtgcagttctacggcctgagcgagaacgacgagtggacccaggacagagccaagcccgtgacccagatcgtgtctgccgaagcctggggcagagccgatgatgtgattaagatccactggcaggaaaagaagtccaacaccatcctgggcagccaggaaggcaacaccatgaagaccaacgacacctacatgaagttcagctggctgaccgtgcccgagaagtccctggacaaagaacacagatgcatcgtgcggcacgaaaacaacaagaacggcgtggaccaggaaatcatcttcccacccatcaagaccgatgtgattacaatggaccccaaggacaactgctccaaggacgccaacgataccctgctgctccagctgaccaacaccagcgcctactacatgtacttgttgctgctgctgaagtccgtggtgtacttcgccatcatcacatgctgcctgctgcggagaaccgccttctgctgcaacggcgagaagtct

SEQ ID NO: 7938 - DNA, 2991 bp, synthetic construct
  source 1..2991: mol_type = other DNA
atggccttaccagtgaccgccttgctcctgccgctggccttgctgctccacgccgccaggccggaagtgcagctggttgaatctggcggaggactggttcagcctggcggatctctgagactgtcttgtgccgccagcggcttcagcttcagcgacttttggatgagctgggtccgacaggcccctggcaaaggacttgaatgggtcgccacaatcagccaggccggcagcgagaaggactacgtggactctgtgaagggcagattcaccatcagccgggacaacgccaagaagtccctgtacctccagatgaacagcctgagagccgaggacaccgccgtgtactattgtgcctctggcgtgtacagcttcgactacagaggccagggcaccctggtcacagtctcttctggtaccggcggaggcggatctggcggcggaggtagcggtggcggaggatctgaattcgacatccagatgacccagagccctgccagcctgtctgcctctgtgggcgagacagtgaccatcacctgtcgggtgtccggcaacatccacaactacctggcctggtatcagcagaagcagggcaagagcccccaactgctggtgtacaacgccaagaccctggccgatggcgtgcccagcagattttctggctctggcagcggcacccagtacagcctgaagatcaacagcctccagcccgaggacttcggcagctactactgccagcacttctggtccaacccctacaccttcggcggaggcaccaagctggaaatcaagctcgagatccagaaccctgatcctgccgtgtaccagctgcgggatagcaagagcagcgacaagagcgtgtgtctgttcaccgacttcgacagccagaccaacgtgtcccagagcaaggactccgacgtgtacatcaccgataagtgcgtgctggacatgcggagcatggacttcaagagcaactccgccgtggcctggtccaacaagtccgatttcgcctgcgccaacgccttcaacaacagcattatccccgaggacacattcttcccaagccccgagagcagcgactccaccgaccacgtgaagcccaaagagacagagaacaccaagcagcccagcaagagctgccacaagcccaaggccatcgtgcacaccgagaaagtgaacatgatgagcctgaccgtgctgggcctgcggatgctgttcgccaaaaccgtggccgtgaacttcctgctgaccgccaagctgttcttcctccgcgccaagagaagcggatctggcgtgaagcagaccctgaatttcgacctgctgaagctggctggcgacgtggaatccaacccaggccctactagtatggactggatttggcgcatccttttccttgtcggcgctgctaccggcgcgcattccgggccccagctccagctgcaagagtctggacctggcctggtcaagcctagcgagacactgagcctgacctgtaccgtgtccggcgatagcatcagcagcggcgattactactggggctggatcagacagcctcctggcaaaggactggaatggatcggccacatctactacagcggcgtgacctactacaaccccagcctgaagtccagagtgaccatcagcgtggacaccagccggaaccagttctccctgaagctgtctagcgtgacagccgccgataccgccgtgtactactgcaccagagaggacagcagcaactggcggagtagaggccagggaacactggtcacagttagctctggatccggcggaggcggaagtggaggcggaggatctggcggcggaggctctttcgaacaggtgcaactccagcagtctggcgcttccgtgaaggtgtcctgcaaggccagcgaactcgtgcggcctggcacaggctacgccttcaccaattacctgatcgagtgggtcaagcagaggcccggacagggcctggaatggatcggagtgattaacccaggcagcggcggcaccaactacaacgagaagttcaagggcaaggccaccctgaccgccgacaagagcagcagcacagcctacatgcaactgagcagcctgaccagcgacgacagcgccgtgtacttctgcgcccggtacagaagctacgactggtacttcgacgtgtggggagccggcaccaccgtgacagtgtcatctacgcgtgaggacctgaagaacgtgttcccacctgaggtggccgtgttcgagcctagcgaggccgagatcagccacacccagaaagccaccctcgtgtgcctggctaccggcttctaccccgaccatgtggaactgtcttggtgggtcaacggcaaagaggtgcacagcggcgtgtgtaccgacccccagccactgaaagaacagcccgccctgaacgacagccggtactgcctgagcagcagactgagagtgtccgccaccttctggcagaacccccggaaccacttcagatgccaggtgcagttctacggcctgagcgagaacgacgagtggacccaggacagagccaagcccgtgacccagatcgtgtctgccgaagcctggggcagagccgatgatgtgattaagatccactggcaggaaaagaagtccaacaccatcctgggcagccaggaaggcaacaccatgaagaccaacgacacctacatgaagttcagctggctgaccgtgcccgagaagtccctggacaaagaacacagatgcatcgtgcggcacgaaaacaacaagaacggcgtggaccaggaaatcatcttcccacccatcaagaccgatgtgattacaatggaccccaaggacaactgctccaaggacgccaacgataccctgctgctccagctgaccaacaccagcgcctactacatgtacttgttgctgctgctgaagtccgtggtgtacttcgccatcatcacatgctgcctgctgcggagaaccgccttctgctgcaacggcgagaagtct

SEQ ID NO: 7939 - DNA, 2988 bp, synthetic construct
  source 1..2988: mol_type = other DNA
atggccttaccagtgaccgccttgctcctgccgctggccttgctgctccacgccgccaggccggaagtgcagctggttgaatctggcggaggactggttcagcctggcggatctctgagactgtcttgtgccgccagcggcttcagcttcagcgacttttggatgagctgggtccgacaggcccctggcaaaggacttgaatgggtcgccacaatcagccaggccggcagcgagaaggactacgtggactctgtgaagggcagattcaccatcagccgggacaacgccaagaagtccctgtacctccagatgaacagcctgagagccgaggacaccgccgtgtactattgtgcctctggcgtgtacagcttcgactacagaggccagggcaccctggtcacagtctcttctggtaccggcggaggcggatctggcggcggaggtagcggtggcggaggatctgaattcgacatccagatgacccagagcttcagcagcctgagcgccagcgtgggcgacagagtgaccatcacctgtagagccagccaggacatcagcaactacctgaactggtatcagcagaagcccggcaaggcccccaagctgctgatctactacaccagcagactgcacagcggcgtgcccagcagattttctggcagcggctccggcaccgactacaccctgacaatcagctccctgcagcccgaggacttcgctacctacttctgtcagcaaggcaacaccctgccctggacctttggcggaggcaccaagctggaaatcaagagactcgagatccagaaccctgatcctgccgtgtaccagctgcgggatagcaagagcagcgacaagagcgtgtgtctgttcaccgacttcgacagccagaccaacgtgtcccagagcaaggactccgacgtgtacatcaccgataagtgcgtgctggacatgcggagcatggacttcaagagcaactccgccgtggcctggtccaacaagtccgatttcgcctgcgccaacgccttcaacaacagcattatccccgaggacacattcttcccaagccccgagagcagcgactccaccgaccacgtgaagcccaaagagacagagaacaccaagcagcccagcaagagctgccacaagcccaaggccatcgtgcacaccgagaaagtgaacatgatgagcctgaccgtgctgggcctgcggatgctgttcgccaaaaccgtggccgtgaacttcctgctgaccgccaagctgttcttcctccgcgccaagagaagcggatctggcgtgaagcagaccctgaatttcgacctgctgaagctggctggcgacgtggaatccaacccaggccctactagtatggactggatttggcgcatccttttccttgtcggcgctgctaccggcgcgcattccgggccccagctccagctgcaagagtctggacctggcctggtcaagcctagcgagacactgagcctgacctgtaccgtgtccggcgatagcatcagcagcggcgattactactggggctggatcagacagcctcctggcaaaggactggaatggatcggccacatctactacagcggcgtgacctactacaaccccagcctgaagtccagagtgaccatcagcgtggacaccagccggaaccagttctccctgaagctgtctagcgtgacagccgccgataccgccgtgtactactgcaccagagaggacagcagcaactggcggagtagaggccagggaacactggtcacagttagctctggatccggcggaggcggaagtggaggcggaggatctggcggcggaggctctttcgaagaagtgcaactggtgcagtccggcggagggctggtgcagagcggaggatctctgagactgagctgcagagccagcggctacaccttcacccggtactggatgctgtgggtgcgccagaggccaggcaagggactggaatgggtggccgagatcaacccccggaacgaccggaccaactacaacgagaagttcaagacccggttcaccatcagcgtggacagaagcaagaacaccctgtacctgcagatggacagcctgcgggccgaggataccgccgtgtacttttgtgctctgggaggcggctacgctatggactactggggccagggaacccttgtgaccgtgtcctctacgcgtgaggacctgaagaacgtgttcccacctgaggtggccgtgttcgagcctagcgaggccgagatcagccacacccagaaagccaccctcgtgtgcctggctaccggcttctaccccgaccatgtggaactgtcttggtgggtcaacggcaaagaggtgcacagcggcgtgtgtaccgacccccagccactgaaagaacagcccgccctgaacgacagccggtactgcctgagcagcagactgagagtgtccgccaccttctggcagaacccccggaaccacttcagatgccaggtgcagttctacggcctgagcgagaacgacgagtggacccaggacagagccaagcccgtgacccagatcgtgtctgccgaagcctggggcagagccgatgatgtgattaagatccactggcaggaaaagaagtccaacaccatcctgggcagccaggaaggcaacaccatgaagaccaacgacacctacatgaagttcagctggctgaccgtgcccgagaagtccctggacaaagaacacagatgcatcgtgcggcacgaaaacaacaagaacggcgtggaccaggaaatcatcttcccacccatcaagaccgatgtgattacaatggaccccaaggacaactgctccaaggacgccaacgataccctgctgctccagctgaccaacaccagcgcctactacatgtacttgttgctgctgctgaagtccgtggtgtacttcgccatcatcacatgctgcctgctgcggagaaccgccttctgctgcaacggcgagaagtct

SEQ ID NO: 7940 - DNA, 2991 bp, synthetic construct
  source 1..2991: mol_type = other DNA
atggccttaccagtgaccgccttgctcctgccgctggccttgctgctccacgccgccaggccggaagtgcagctggttgaatctggcggaggactggttcagcctggcggatctctgagactgtcttgtgccgccagcggcttcagcttcagcgacttttggatgagctgggtccgacaggcccctggcaaaggacttgaatgggtcgccacaatcagccaggccggcagcgagaaggactacgtggactctgtgaagggcagattcaccatcagccgggacaacgccaagaagtccctgtacctccagatgaacagcctgagagccgaggacaccgccgtgtactattgtgcctctggcgtgtacagcttcgactacagaggccagggcaccctggtcacagtctcttctggtaccggcggaggcggatctggcggcggaggtagcggtggcggaggatctgaattcgacatccagatgacacagtctccggcgtcactgtccgcctccgtgggggagactgtgactattatttgtagggcatcagttaacatctactcttatttggcctggtaccagcagaagcaaggcaagagtcctcagctgctggtgtataatgcgaagatcctggcagagggcgtgccgagccggttctccggcagcggctcaggtacccaattttccctcaagatcaattcactgcagccagaggactttggcagttactattgtcaacaccactacggcacattcactttcgggtccggtacaaaattggagattaagcgactcgagatccagaaccctgatcctgccgtgtaccagctgcgggatagcaagagcagcgacaagagcgtgtgtctgttcaccgacttcgacagccagaccaacgtgtcccagagcaaggactccgacgtgtacatcaccgataagtgcgtgctggacatgcggagcatggacttcaagagcaactccgccgtggcctggtccaacaagtccgatttcgcctgcgccaacgccttcaacaacagcattatccccgaggacacattcttcccaagccccgagagcagcgactccaccgaccacgtgaagcccaaagagacagagaacaccaagcagcccagcaagagctgccacaagcccaaggccatcgtgcacaccgagaaagtgaacatgatgagcctgaccgtgctgggcctgcggatgctgttcgccaaaaccgtggccgtgaacttcctgctgaccgccaagctgttcttcctccgcgccaagagaagcggatctggcgtgaagcagaccctgaatttcgacctgctgaagctggctggcgacgtggaatccaacccaggccctactagtatggactggatttggcgcatccttttccttgtcggcgctgctaccggcgcgcattccgggccccagctccagctgcaagagtctggacctggcctggtcaagcctagcgagacactgagcctgacctgtaccgtgtccggcgatagcatcagcagcggcgattactactggggctggatcagacagcctcctggcaaaggactggaatggatcggccacatctactacagcggcgtgacctactacaaccccagcctgaagtccagagtgaccatcagcgtggacaccagccggaaccagttctccctgaagctgtctagcgtgacagccgccgataccgccgtgtactactgcaccagagaggacagcagcaactggcggagtagaggccagggaacactggtcacagttagctctggatccggcggaggcggaagtggaggcggaggatctggcggcggaggctctttcgaacaggtacagttgaaagaaagcgggcctggactggtagcgccttcccaatctctctccatcacgtgcaccatctctggcttctccctgacttcctatggagttcactgggtgaggcagccccccggcaagggactggaatggctggtcgtcatctggtccgacgggtccacaacctacaactccgctctgaaaagtcggctctctatttctaaagataatagcaagagccaggtgtttctgaaaatgaactctctgcagaccgatgatacggccatttactactgcgcttcacactatggctcaaccttggcattcgcttcctggggccacggaacactggtgaccgtttccgcagccacgcgtgaggacctgaagaacgtgttcccacctgaggtggccgtgttcgagcctagcgaggccgagatcagccacacccagaaagccaccctcgtgtgcctggctaccggcttctaccccgaccatgtggaactgtcttggtgggtcaacggcaaagaggtgcacagcggcgtgtgtaccgacccccagccactgaaagaacagcccgccctgaacgacagccggtactgcctgagcagcagactgagagtgtccgccaccttctggcagaacccccggaaccacttcagatgccaggtgcagttctacggcctgagcgagaacgacgagtggacccaggacagagccaagcccgtgacccagatcgtgtctgccgaagcctggggcagagccgatgatgtgattaagatccactggcaggaaaagaagtccaacaccatcctgggcagccaggaaggcaacaccatgaagaccaacgacacctacatgaagttcagctggctgaccgtgcccgagaagtccctggacaaagaacacagatgcatcgtgcggcacgaaaacaacaagaacggcgtggaccaggaaatcatcttcccacccatcaagaccgatgtgattacaatggaccccaaggacaactgctccaaggacgccaacgataccctgctgctccagctgaccaacaccagcgcctactacatgtacttgttgctgctgctgaagtccgtggtgtacttcgccatcatcacatgctgcctgctgcggagaaccgccttctgctgcaacggcgagaagtct

SEQ ID NO: 7941 - DNA, 3015 bp, synthetic construct
  source 1..3015: mol_type = other DNA
atggccttaccagtgaccgccttgctcctgccgctggccttgctgctccacgccgccaggccggaagtgcagctggttgaatctggcggaggactggttcagcctggcggatctctgagactgtcttgtgccgccagcggcttcagcttcagcgacttttggatgagctgggtccgacaggcccctggcaaaggacttgaatgggtcgccacaatcagccaggccggcagcgagaaggactacgtggactctgtgaagggcagattcaccatcagccgggacaacgccaagaagtccctgtacctccagatgaacagcctgagagccgaggacaccgccgtgtactattgtgcctctggcgtgtacagcttcgactacagaggccagggcaccctggtcacagtctcttctggtaccggcggaggcggatctggcggcggaggtagcggtggcggaggatctgaattcgacattgtgatgacccagtctcacaaattcatgtccacatcagtaggagacagggtcagcgtcacctgcaaggccagtcagaatgtgggtaataatgtagcctggtatcaacagaaaccagggcaatctcctaaagtactgatttactcggcatcctaccggtacagtggagtccctgatcgcttcacaggcagtggatctgggacagatttcactctcaccatcagtaatgtgcagtctgaagacttggcagagtatttctgtcagcaatataacacctatccattcacgttcggctcggggacaaagttggaaataaaactcgagatccagaaccctgatcctgccgtgtaccagctgcgggatagcaagagcagcgacaagagcgtgtgtctgttcaccgacttcgacagccagaccaacgtgtcccagagcaaggactccgacgtgtacatcaccgataagtgcgtgctggacatgcggagcatggacttcaagagcaactccgccgtggcctggtccaacaagtccgatttcgcctgcgccaacgccttcaacaacagcattatccccgaggacacattcttcccaagccccgagagcagcgactccaccgaccacgtgaagcccaaagagacagagaacaccaagcagcccagcaagagctgccacaagcccaaggccatcgtgcacaccgagaaagtgaacatgatgagcctgaccgtgctgggcctgcggatgctgttcgccaaaaccgtggccgtgaacttcctgctgaccgccaagctgttcttcctccgcgccaagagaagcggatctggcgtgaagcagaccctgaatttcgacctgctgaagctggctggcgacgtggaatccaacccaggccctactagtatggactggatttggcgcatccttttccttgtcggcgctgctaccggcgcgcattccgggccccagctccagctgcaagagtctggacctggcctggtcaagcctagcgagacactgagcctgacctgtaccgtgtccggcgatagcatcagcagcggcgattactactggggctggatcagacagcctcctggcaaaggactggaatggatcggccacatctactacagcggcgtgacctactacaaccccagcctgaagtccagagtgaccatcagcgtggacaccagccggaaccagttctccctgaagctgtctagcgtgacagccgccgataccgccgtgtactactgcaccagagaggacagcagcaactggcggagtagaggccagggaacactggtcacagttagctctggatccggcggaggcggaagtggaggcggaggatctggcggcggaggctctttcgaagaggtacagctggaggaaagcggtggaggactggtgcaacctggagggtctatgaagctctcttgcgtagcttctgggttcacgttctccaattactggatgaactgggtgcggcagtcccccgagaaaggcctggaatgggtagcagaaattcggttcaagtcccataactatgctacacactttgccgagtctgtcaaaggccggttcactattagtcgagacgacagcaagtcttcagtctacctgcagatgaataacttgcgggcagaggacacaggtatctactactgcaccaggagaatcggcaactccgactatgactggtggtactttgacgtctggggagcaggcaccagcgtgacggtgagttcagcctcaacgcgtgaggacctgaagaacgtgttcccacctgaggtggccgtgttcgagcctagcgaggccgagatcagccacacccagaaagccaccctcgtgtgcctggctaccggcttctaccccgaccatgtggaactgtcttggtgggtcaacggcaaagaggtgcacagcggcgtgtgtaccgacccccagccactgaaagaacagcccgccctgaacgacagccggtactgcctgagcagcagactgagagtgtccgccaccttctggcagaacccccggaaccacttcagatgccaggtgcagttctacggcctgagcgagaacgacgagtggacccaggacagagccaagcccgtgacccagatcgtgtctgccgaagcctggggcagagccgatgatgtgattaagatccactggcaggaaaagaagtccaacaccatcctgggcagccaggaaggcaacaccatgaagaccaacgacacctacatgaagttcagctggctgaccgtgcccgagaagtccctggacaaagaacacagatgcatcgtgcggcacgaaaacaacaagaacggcgtggaccaggaaatcatcttcccacccatcaagaccgatgtgattacaatggaccccaaggacaactgctccaaggacgccaacgataccctgctgctccagctgaccaacaccagcgcctactacatgtacttgttgctgctgctgaagtccgtggtgtacttcgccatcatcacatgctgcctgctgcggagaaccgccttctgctgcaacggcgagaagtct

SEQ ID NO: 7942 - DNA, 2994 bp, synthetic construct
  source 1..2994: mol_type = other DNA
atggccttaccagtgaccgccttgctcctgccgctggccttgctgctccacgccgccaggccggaagtgcagctggttgaatctggcggaggactggttcagcctggcggatctctgagactgtcttgtgccgccagcggcttcagcttcagcgacttttggatgagctgggtccgacaggcccctggcaaaggacttgaatgggtcgccacaatcagccaggccggcagcgagaaggactacgtggactctgtgaagggcagattcaccatcagccgggacaacgccaagaagtccctgtacctccagatgaacagcctgagagccgaggacaccgccgtgtactattgtgcctctggcgtgtacagcttcgactacagaggccagggcaccctggtcacagtctcttctggtaccggcggaggcggatctggcggcggaggtagcggtggcggaggatctgaattcgaccagatcgtgctgacccagtcccccgctattatgtccgcatcaccgggcgaaaaagtgacgatctcctgtagcgcttcatctagcgtctcctacatgtattggtatcaacagaaacctgggtctagcccaaagccgtggatctacagaaccagtaaccttgccagtggggtgccagcccgcttcagcggtagtggcagtggaacttcctatagcctcacaataagcaacatggaggctgaagatgccgctgcctattactgccagcagtaccacagttacccaaccacgttcggcgggggaactaagctcgaagtaaaactcgagatccagaaccctgatcctgccgtgtaccagctgcgggatagcaagagcagcgacaagagcgtgtgtctgttcaccgacttcgacagccagaccaacgtgtcccagagcaaggactccgacgtgtacatcaccgataagtgcgtgctggacatgcggagcatggacttcaagagcaactccgccgtggcctggtccaacaagtccgatttcgcctgcgccaacgccttcaacaacagcattatccccgaggacacattcttcccaagccccgagagcagcgactccaccgaccacgtgaagcccaaagagacagagaacaccaagcagcccagcaagagctgccacaagcccaaggccatcgtgcacaccgagaaagtgaacatgatgagcctgaccgtgctgggcctgcggatgctgttcgccaaaaccgtggccgtgaacttcctgctgaccgccaagctgttcttcctccgcgccaagagaagcggatctggcgtgaagcagaccctgaatttcgacctgctgaagctggctggcgacgtggaatccaacccaggccctactagtatggactggatttggcgcatccttttccttgtcggcgctgctaccggcgcgcattccgggccccagctccagctgcaagagtctggacctggcctggtcaagcctagcgagacactgagcctgacctgtaccgtgtccggcgatagcatcagcagcggcgattactactggggctggatcagacagcctcctggcaaaggactggaatggatcggccacatctactacagcggcgtgacctactacaaccccagcctgaagtccagagtgaccatcagcgtggacaccagccggaaccagttctccctgaagctgtctagcgtgacagccgccgataccgccgtgtactactgcaccagagaggacagcagcaactggcggagtagaggccagggaacactggtcacagttagctctggatccggcggaggcggaagtggaggcggaggatctggcggcggaggctctttcgaagaggtgcagctggtggaatctgggggcggcctggtccaacctaagggatcactcaagctctcttgtgcggccagcggattctctttcaatacctatgctatgaattgggtgagacaggcgcccggaaagggcctcgaatggatagcccatatccggtcaaaatcaaacaatttcgcaacctactatgcggactccgtgaaggaccgattttccatctcccgagatgcctccgagaatattctgttcctgcagatgaataacctcaagacagaggacaccgccatgtactactgtgtgcgccagggcggtgactttcccatggattactgggggcaggggaccagcgtgaccgtgagctctacgcgtgaggacctgaagaacgtgttcccacctgaggtggccgtgttcgagcctagcgaggccgagatcagccacacccagaaagccaccctcgtgtgcctggctaccggcttctaccccgaccatgtggaactgtcttggtgggtcaacggcaaagaggtgcacagcggcgtgtgtaccgacccccagccactgaaagaacagcccgccctgaacgacagccggtactgcctgagcagcagactgagagtgtccgccaccttctggcagaacccccggaaccacttcagatgccaggtgcagttctacggcctgagcgagaacgacgagtggacccaggacagagccaagcccgtgacccagatcgtgtctgccgaagcctggggcagagccgatgatgtgattaagatccactggcaggaaaagaagtccaacaccatcctgggcagccaggaaggcaacaccatgaagaccaacgacacctacatgaagttcagctggctgaccgtgcccgagaagtccctggacaaagaacacagatgcatcgtgcggcacgaaaacaacaagaacggcgtggaccaggaaatcatcttcccacccatcaagaccgatgtgattacaatggaccccaaggacaactgctccaaggacgccaacgataccctgctgctccagctgaccaacaccagcgcctactacatgtacttgttgctgctgctgaagtccgtggtgtacttcgccatcatcacatgctgcctgctgcggagaaccgccttctgctgcaacggcgagaagtct

SEQ ID NO: 7943 - DNA, 2991 bp, synthetic construct
  source 1..2991: mol_type = other DNA
atggccttaccagtgaccgccttgctcctgccgctggccttgctgctccacgccgccaggccggaagtgcagctggttgaatctggcggaggactggttcagcctggcggatctctgagactgtcttgtgccgccagcggcttcagcttcagcgacttttggatgagctgggtccgacaggcccctggcaaaggacttgaatgggtcgccacaatcagccaggccggcagcgagaaggactacgtggactctgtgaagggcagattcaccatcagccgggacaacgccaagaagtccctgtacctccagatgaacagcctgagagccgaggacaccgccgtgtactattgtgcctctggcgtgtacagcttcgactacagaggccagggcaccctggtcacagtctcttctggtaccggcggaggcggatctggcggcggaggtagcggtggcggaggatctgaattcgacgacatccagatgacccagagcagcagcagcttcagcgtgagcctgggcgacagagtgaccatcacctgcatggccagcgaggacatctacatcagactggcctggtaccagcagaagcccggcaacgcccccagactgctgatcagcgccgccaccagcctggagaccggcgtgcccagcagattcagcggcagcggcagcggcaaggactacaccctgagcatcaccagcctgcagaccgaggacgtgggcacctactactgccagcagtactggagcagcccctggaccttcggcggcggcaccaagctggagatcaacctcgagatccagaaccctgatcctgccgtgtaccagctgcgggatagcaagagcagcgacaagagcgtgtgtctgttcaccgacttcgacagccagaccaacgtgtcccagagcaaggactccgacgtgtacatcaccgataagtgcgtgctggacatgcggagcatggacttcaagagcaactccgccgtggcctggtccaacaagtccgatttcgcctgcgccaacgccttcaacaacagcattatccccgaggacacattcttcccaagccccgagagcagcgactccaccgaccacgtgaagcccaaagagacagagaacaccaagcagcccagcaagagctgccacaagcccaaggccatcgtgcacaccgagaaagtgaacatgatgagcctgaccgtgctgggcctgcggatgctgttcgccaaaaccgtggccgtgaacttcctgctgaccgccaagctgttcttcctccgcgccaagagaagcggatctggcgtgaagcagaccctgaatttcgacctgctgaagctggctggcgacgtggaatccaacccaggccctactagtatggactggatttggcgcatccttttccttgtcggcgctgctaccggcgcgcattccgggccccagctccagctgcaagagtctggacctggcctggtcaagcctagcgagacactgagcctgacctgtaccgtgtccggcgatagcatcagcagcggcgattactactggggctggatcagacagcctcctggcaaaggactggaatggatcggccacatctactacagcggcgtgacctactacaaccccagcctgaagtccagagtgaccatcagcgtggacaccagccggaaccagttctccctgaagctgtctagcgtgacagccgccgataccgccgtgtactactgcaccagagaggacagcagcaactggcggagtagaggccagggaacactggtcacagttagctctggatccggcggaggcggaagtggaggcggaggatctggcggcggaggctctttcgaagacgtgcagctgcaggagagcggccccggcctggtgaagcccagccagagcctgagcctgacctgcaccgtgaccggctacagcatcaccagcgactacacctggaactggatcagacagttccccggcaacaagctggagtggatgggctacatcacctacagcggcagcaccagctacaaccccagcctgaagagcagaaacagcatcaccagagacaccagcaagaaccagttcttcctgcagctgaacagcgtgaccaccgaggacaccgccacctactactgcgccagactgggcagaagatacacaatggactactggggccagggcaccagcgtgaccgtgagcagcacgcgtgaggacctgaagaacgtgttcccacctgaggtggccgtgttcgagcctagcgaggccgagatcagccacacccagaaagccaccctcgtgtgcctggctaccggcttctaccccgaccatgtggaactgtcttggtgggtcaacggcaaagaggtgcacagcggcgtgtgtaccgacccccagccactgaaagaacagcccgccctgaacgacagccggtactgcctgagcagcagactgagagtgtccgccaccttctggcagaacccccggaaccacttcagatgccaggtgcagttctacggcctgagcgagaacgacgagtggacccaggacagagccaagcccgtgacccagatcgtgtctgccgaagcctggggcagagccgatgatgtgattaagatccactggcaggaaaagaagtccaacaccatcctgggcagccaggaaggcaacaccatgaagaccaacgacacctacatgaagttcagctggctgaccgtgcccgagaagtccctggacaaagaacacagatgcatcgtgcggcacgaaaacaacaagaacggcgtggaccaggaaatcatcttcccacccatcaagaccgatgtgattacaatggaccccaaggacaactgctccaaggacgccaacgataccctgctgctccagctgaccaacaccagcgcctactacatgtacttgttgctgctgctgaagtccgtggtgtacttcgccatcatcacatgctgcctgctgcggagaaccgccttctgctgcaacggcgagaagtct

SEQ ID NO: 7944 - DNA, 3000 bp, synthetic construct
  source 1..3000: mol_type = other DNA
atggccttaccagtgaccgccttgctcctgccgctggccttgctgctccacgccgccaggccggaagtgcagctggttgaatctggcggaggactggttcagcctggcggatctctgagactgtcttgtgccgccagcggcttcagcttcagcgacttttggatgagctgggtccgacaggcccctggcaaaggacttgaatgggtcgccacaatcagccaggccggcagcgagaaggactacgtggactctgtgaagggcagattcaccatcagccgggacaacgccaagaagtccctgtacctccagatgaacagcctgagagccgaggacaccgccgtgtactattgtgcctctggcgtgtacagcttcgactacagaggccagggcaccctggtcacagtctcttctggtaccggcggaggcggatctggcggcggaggtagcggtggcggaggatctgaattcgacgacatccagatgacccagagccccagcagcctgtctgccagcgtgggcgacagagtgaccatcacctgtagagccagccagagcatcagcagctacctgaactggtatcagcagaagcccggcaaggcccccaaactgctgatctacgacgccagcaacctggaaaccggcgtgcccagcagattttccggcagcggctctggcaccgacttcaccttcaccatcagctccctccagcccgaggacattgccacctactactgccagcagtacgacaacctgcccctgacctttggcggaggcaccaaggtggacatcaagagactcgagatccagaaccctgatcctgccgtgtaccagctgcgggatagcaagagcagcgacaagagcgtgtgtctgttcaccgacttcgacagccagaccaacgtgtcccagagcaaggactccgacgtgtacatcaccgataagtgcgtgctggacatgcggagcatggacttcaagagcaactccgccgtggcctggtccaacaagtccgatttcgcctgcgccaacgccttcaacaacagcattatccccgaggacacattcttcccaagccccgagagcagcgactccaccgaccacgtgaagcccaaagagacagagaacaccaagcagcccagcaagagctgccacaagcccaaggccatcgtgcacaccgagaaagtgaacatgatgagcctgaccgtgctgggcctgcggatgctgttcgccaaaaccgtggccgtgaacttcctgctgaccgccaagctgttcttcctccgcgccaagagaagcggatctggcgtgaagcagaccctgaatttcgacctgctgaagctggctggcgacgtggaatccaacccaggccctactagtatggactggatttggcgcatccttttccttgtcggcgctgctaccggcgcgcattccgggccccagctccagctgcaagagtctggacctggcctggtcaagcctagcgagacactgagcctgacctgtaccgtgtccggcgatagcatcagcagcggcgattactactggggctggatcagacagcctcctggcaaaggactggaatggatcggccacatctactacagcggcgtgacctactacaaccccagcctgaagtccagagtgaccatcagcgtggacaccagccggaaccagttctccctgaagctgtctagcgtgacagccgccgataccgccgtgtactactgcaccagagaggacagcagcaactggcggagtagaggccagggaacactggtcacagttagctctggatccggcggaggcggaagtggaggcggaggatctggcggcggaggctctttcgaacaggtgcaactggtggaatctggcggcggagtggtgcagcctggcagaagcctgagactgagctgtgccgccagcggcttcacctttagcagctacgccatgcactgggtgcgccaggcccctggaaaaggcctggaatgggtggccgtgatctcctacgacggctccaacaagtattacgccgacagcgtgaagggccggttcaccatctccagagacaacagcaagaacaccctgtacctccagatgaacagcctgcgggccgaggacaccgccgtgtactattgtgccagggctcacaacagcagctcttggagcttcgactactggggccagggcaccctcgtgaccgtgtcatctacgcgtgaggacctgaagaacgtgttcccacctgaggtggccgtgttcgagcctagcgaggccgagatcagccacacccagaaagccaccctcgtgtgcctggctaccggcttctaccccgaccatgtggaactgtcttggtgggtcaacggcaaagaggtgcacagcggcgtgtgtaccgacccccagccactgaaagaacagcccgccctgaacgacagccggtactgcctgagcagcagactgagagtgtccgccaccttctggcagaacccccggaaccacttcagatgccaggtgcagttctacggcctgagcgagaacgacgagtggacccaggacagagccaagcccgtgacccagatcgtgtctgccgaagcctggggcagagccgatgatgtgattaagatccactggcaggaaaagaagtccaacaccatcctgggcagccaggaaggcaacaccatgaagaccaacgacacctacatgaagttcagctggctgaccgtgcccgagaagtccctggacaaagaacacagatgcatcgtgcggcacgaaaacaacaagaacggcgtggaccaggaaatcatcttcccacccatcaagaccgatgtgattacaatggaccccaaggacaactgctccaaggacgccaacgataccctgctgctccagctgaccaacaccagcgcctactacatgtacttgttgctgctgctgaagtccgtggtgtacttcgccatcatcacatgctgcctgctgcggagaaccgccttctgctgcaacggcgagaagtct

SEQ ID NO: 7945 - DNA, 3027 bp, synthetic construct
  source 1..3027: mol_type = other DNA
atggccttaccagtgaccgccttgctcctgccgctggccttgctgctccacgccgccaggccggaagtgcagctggttgaatctggcggaggactggttcagcctggcggatctctgagactgtcttgtgccgccagcggcttcagcttcagcgacttttggatgagctgggtccgacaggcccctggcaaaggacttgaatgggtcgccacaatcagccaggccggcagcgagaaggactacgtggactctgtgaagggcagattcaccatcagccgggacaacgccaagaagtccctgtacctccagatgaacagcctgagagccgaggacaccgccgtgtactattgtgcctctggcgtgtacagcttcgactacagaggccagggcaccctggtcacagtctcttctggtaccggcggaggcggatctggcggcggaggtagcggtggcggaggatctgaattcgacgacgtcgtgatgacccagagccctctgagcctgcctgtgtccctgggcgatcaggccagcatctcctgcagatccagccagagactggtgcacagcaacggcaacacctacctgcactggtatctgcagaagcccggccagagccccaagctgctgatctaccgggtgtccaacagattccccggcgtgcccgatagattcagcggctctggcagcggcaccgacttcaccctgaagatcagccgggtggaagccgaggacctgggcatctatttctgcagccagagcacccacgtgccctacacctttggcggaggcaccaagctggaaatcaagcggctcgagatccagaaccctgatcctgccgtgtaccagctgcgggatagcaagagcagcgacaagagcgtgtgtctgttcaccgacttcgacagccagaccaacgtgtcccagagcaaggactccgacgtgtacatcaccgataagtgcgtgctggacatgcggagcatggacttcaagagcaactccgccgtggcctggtccaacaagtccgatttcgcctgcgccaacgccttcaacaacagcattatccccgaggacacattcttcccaagccccgagagcagcgactccaccgaccacgtgaagcccaaagagacagagaacaccaagcagcccagcaagagctgccacaagcccaaggccatcgtgcacaccgagaaagtgaacatgatgagcctgaccgtgctgggcctgcggatgctgttcgccaaaaccgtggccgtgaacttcctgctgaccgccaagctgttcttcctccgcgccaagagaagcggatctggcgtgaagcagaccctgaatttcgacctgctgaagctggctggcgacgtggaatccaacccaggccctactagtatggactggatttggcgcatccttttccttgtcggcgctgctaccggcgcgcattccgggccccagctccagctgcaagagtctggacctggcctggtcaagcctagcgagacactgagcctgacctgtaccgtgtccggcgatagcatcagcagcggcgattactactggggctggatcagacagcctcctggcaaaggactggaatggatcggccacatctactacagcggcgtgacctactacaaccccagcctgaagtccagagtgaccatcagcgtggacaccagccggaaccagttctccctgaagctgtctagcgtgacagccgccgataccgccgtgtactactgcaccagagaggacagcagcaactggcggagtagaggccagggaacactggtcacagttagctctggatccggcggaggcggaagtggaggcggaggatctggcggcggaggctctttcgaagaagtgcggctgcagcagtctggccccgacctgattaagcctggggccagcgtgaagatgagctgcaaggccagcggctacaccttcaccggctacgtgatgcactgggtcaagcagaggccaggccagggcctggaatggatcggcttcatcaacccctacaacgacgacatccagagcaacgagcggttccggggcaaggccaccctgaccagcgataagagcagcaccaccgcctacatggaactgagcagcctgacctccgaggacagcgccgtgtactactgtgctaggggagccggctacaacttcgacggggcctacagattcttcgacttttggggccagggcaccacactgaccgtgtcctctacgcgtgaggacctgaagaacgtgttcccacctgaggtggccgtgttcgagcctagcgaggccgagatcagccacacccagaaagccaccctcgtgtgcctggctaccggcttctaccccgaccatgtggaactgtcttggtgggtcaacggcaaagaggtgcacagcggcgtgtgtaccgacccccagccactgaaagaacagcccgccctgaacgacagccggtactgcctgagcagcagactgagagtgtccgccaccttctggcagaacccccggaaccacttcagatgccaggtgcagttctacggcctgagcgagaacgacgagtggacccaggacagagccaagcccgtgacccagatcgtgtctgccgaagcctggggcagagccgatgatgtgattaagatccactggcaggaaaagaagtccaacaccatcctgggcagccaggaaggcaacaccatgaagaccaacgacacctacatgaagttcagctggctgaccgtgcccgagaagtccctggacaaagaacacagatgcatcgtgcggcacgaaaacaacaagaacggcgtggaccaggaaatcatcttcccacccatcaagaccgatgtgattacaatggaccccaaggacaactgctccaaggacgccaacgataccctgctgctccagctgaccaacaccagcgcctactacatgtacttgttgctgctgctgaagtccgtggtgtacttcgccatcatcacatgctgcctgctgcggagaaccgccttctgctgcaacggcgagaagtct

SEQ ID NO: 7946 - DNA, 3000 bp, synthetic construct
  source 1..3000: mol_type = other DNA
atggccttaccagtgaccgccttgctcctgccgctggccttgctgctccacgccgccaggccggaagtgcagctggttgaatctggcggaggactggttcagcctggcggatctctgagactgtcttgtgccgccagcggcttcagcttcagcgacttttggatgagctgggtccgacaggcccctggcaaaggacttgaatgggtcgccacaatcagccaggccggcagcgagaaggactacgtggactctgtgaagggcagattcaccatcagccgggacaacgccaagaagtccctgtacctccagatgaacagcctgagagccgaggacaccgccgtgtactattgtgcctctggcgtgtacagcttcgactacagaggccagggcaccctggtcacagtctcttctggtaccggcggaggcggatctggcggcggaggtagcggtggcggaggatctgaattcgacagctacgagctgacccagcctcctagcgtgtccgtgtctcctggacagaccgccaccatctcttgcagcggcgatcaactgggcgggaagtacggccactggtatcagaagaagcccggccagagccccgtgctggtgctgtaccaggacagaaaacggcctgccggcatccccgagagattcagcggaagcagcagcggcaacaccatcaccctgaccatcagcggcacccaggccgtggatgaggccgactactactgccaggcttgggacaccaatctgggcggcgtgttcggcggaggcaccaaagtgacagtgctgggacagctcgagatccagaaccctgatcctgccgtgtaccagctgcgggatagcaagagcagcgacaagagcgtgtgtctgttcaccgacttcgacagccagaccaacgtgtcccagagcaaggactccgacgtgtacatcaccgataagtgcgtgctggacatgcggagcatggacttcaagagcaactccgccgtggcctggtccaacaagtccgatttcgcctgcgccaacgccttcaacaacagcattatccccgaggacacattcttcccaagccccgagagcagcgactccaccgaccacgtgaagcccaaagagacagagaacaccaagcagcccagcaagagctgccacaagcccaaggccatcgtgcacaccgagaaagtgaacatgatgagcctgaccgtgctgggcctgcggatgctgttcgccaaaaccgtggccgtgaacttcctgctgaccgccaagctgttcttcctccgcgccaagagaagcggatctggcgtgaagcagaccctgaatttcgacctgctgaagctggctggcgacgtggaatccaacccaggccctactagtatggactggatttggcgcatccttttccttgtcggcgctgctaccggcgcgcattccgggccccagctccagctgcaagagtctggacctggcctggtcaagcctagcgagacactgagcctgacctgtaccgtgtccggcgatagcatcagcagcggcgattactactggggctggatcagacagcctcctggcaaaggactggaatggatcggccacatctactacagcggcgtgacctactacaaccccagcctgaagtccagagtgaccatcagcgtggacaccagccggaaccagttctccctgaagctgtctagcgtgacagccgccgataccgccgtgtactactgcaccagagaggacagcagcaactggcggagtagaggccagggaacactggtcacagttagctctggatccggcggaggcggaagtggaggcggaggatctggcggcggaggctctttcgaacaggtgcaactggtggaaagcggagccgaagtgaagaaacctggggccagcgtgaaggtgtcctgcaaggccagcggctacacctttaccggctactacatgcactgggtgcgccaggctccaggccagggactggaatggatgggccggatcaaccccaatagcggcggcaccaactacgcccagaaattccagggcagagtgaccatgaccagagacaccagcatcagcaccgcctacatggaactgagccggctgagaagcgacgacaccgccgtgtactactgcgccagccctagaggcagaggcagcgccttcgatatttggggccagggcacactcgtgaccgtgtcctctacgcgtgaggacctgaagaacgtgttcccacctgaggtggccgtgttcgagcctagcgaggccgagatcagccacacccagaaagccaccctcgtgtgcctggctaccggcttctaccccgaccatgtggaactgtcttggtgggtcaacggcaaagaggtgcacagcggcgtgtgtaccgacccccagccactgaaagaacagcccgccctgaacgacagccggtactgcctgagcagcagactgagagtgtccgccaccttctggcagaacccccggaaccacttcagatgccaggtgcagttctacggcctgagcgagaacgacgagtggacccaggacagagccaagcccgtgacccagatcgtgtctgccgaagcctggggcagagccgatgatgtgattaagatccactggcaggaaaagaagtccaacaccatcctgggcagccaggaaggcaacaccatgaagaccaacgacacctacatgaagttcagctggctgaccgtgcccgagaagtccctggacaaagaacacagatgcatcgtgcggcacgaaaacaacaagaacggcgtggaccaggaaatcatcttcccacccatcaagaccgatgtgattacaatggaccccaaggacaactgctccaaggacgccaacgataccctgctgctccagctgaccaacaccagcgcctactacatgtacttgttgctgctgctgaagtccgtggtgtacttcgccatcatcacatgctgcctgctgcggagaaccgccttctgctgcaacggcgagaagtct

SEQ ID NO: 7947 - DNA, 3009 bp, synthetic construct
  source 1..3009: mol_type = other DNA
atggccttaccagtgaccgccttgctcctgccgctggccttgctgctccacgccgccaggccggaagtgcagctggttgaatctggcggaggactggttcagcctggcggatctctgagactgtcttgtgccgccagcggcttcagcttcagcgacttttggatgagctgggtccgacaggcccctggcaaaggacttgaatgggtcgccacaatcagccaggccggcagcgagaaggactacgtggactctgtgaagggcagattcaccatcagccgggacaacgccaagaagtccctgtacctccagatgaacagcctgagagccgaggacaccgccgtgtactattgtgcctctggcgtgtacagcttcgactacagaggccagggcaccctggtcacagtctcttctggtaccggcggaggcggatctggcggcggaggtagcggtggcggaggatctgaattcgacaacttcatgctgacccagccccacagcgtgtccgagagccctggcaagaccgtgaccatctcctgcaccagaagcagcggctctatcgccagcaaatacgtgcagtggtatcagcagaggcccggcagcagccctaccaccgtgatctacgaggacaaccagaggcctagcggcgtgcccgatagattcagcggcagcatcgacaccagcagcaacagcgccagcctgaccatcagcggcctgagaacagaggacgaggccgactactactgccacagctacgacagcaacaaccactccgtgttcggcggaggcaccaaagtgacagtgctgggacagctcgagatccagaaccctgatcctgccgtgtaccagctgcgggatagcaagagcagcgacaagagcgtgtgtctgttcaccgacttcgacagccagaccaacgtgtcccagagcaaggactccgacgtgtacatcaccgataagtgcgtgctggacatgcggagcatggacttcaagagcaactccgccgtggcctggtccaacaagtccgatttcgcctgcgccaacgccttcaacaacagcattatccccgaggacacattcttcccaagccccgagagcagcgactccaccgaccacgtgaagcccaaagagacagagaacaccaagcagcccagcaagagctgccacaagcccaaggccatcgtgcacaccgagaaagtgaacatgatgagcctgaccgtgctgggcctgcggatgctgttcgccaaaaccgtggccgtgaacttcctgctgaccgccaagctgttcttcctccgcgccaagagaagcggatctggcgtgaagcagaccctgaatttcgacctgctgaagctggctggcgacgtggaatccaacccaggccctactagtatggactggatttggcgcatccttttccttgtcggcgctgctaccggcgcgcattccgggccccagctccagctgcaagagtctggacctggcctggtcaagcctagcgagacactgagcctgacctgtaccgtgtccggcgatagcatcagcagcggcgattactactggggctggatcagacagcctcctggcaaaggactggaatggatcggccacatctactacagcggcgtgacctactacaaccccagcctgaagtccagagtgaccatcagcgtggacaccagccggaaccagttctccctgaagctgtctagcgtgacagccgccgataccgccgtgtactactgcaccagagaggacagcagcaactggcggagtagaggccagggaacactggtcacagttagctctggatccggcggaggcggaagtggaggcggaggatctggcggcggaggctctttcgaagaagtgcaactggtggaaagcgggggaggcgtggtgcagccaggcggatctctgagactgagctgtgccgccagcggcttcaccttcagcagctacgccatgagctgggtgcgccaggcccctggaaaaggcctggaatgggtgtccgccatctctggctctggcggcagcacctactacgccgatagcgtgaagggccggttcagcatcagccgggacaacagcaagaacaccctgtacctccagatgaacagcctgcgggccgaggacaccgccgtgtactactgtgccagaaccagaagctccggggccttcgacatctggggccagggaacactcgtgaccgtgtcctctacgcgtgaggacctgaagaacgtgttcccacctgaggtggccgtgttcgagcctagcgaggccgagatcagccacacccagaaagccaccctcgtgtgcctggctaccggcttctaccccgaccatgtggaactgtcttggtgggtcaacggcaaagaggtgcacagcggcgtgtgtaccgacccccagccactgaaagaacagcccgccctgaacgacagccggtactgcctgagcagcagactgagagtgtccgccaccttctggcagaacccccggaaccacttcagatgccaggtgcagttctacggcctgagcgagaacgacgagtggacccaggacagagccaagcccgtgacccagatcgtgtctgccgaagcctggggcagagccgatgatgtgattaagatccactggcaggaaaagaagtccaacaccatcctgggcagccaggaaggcaacaccatgaagaccaacgacacctacatgaagttcagctggctgaccgtgcccgagaagtccctggacaaagaacacagatgcatcgtgcggcacgaaaacaacaagaacggcgtggaccaggaaatcatcttcccacccatcaagaccgatgtgattacaatggaccccaaggacaactgctccaaggacgccaacgataccctgctgctccagctgaccaacaccagcgcctactacatgtacttgttgctgctgctgaagtccgtggtgtacttcgccatcatcacatgctgcctgctgcggagaaccgccttctgctgcaacggcgagaagtct

SEQ ID NO: 7948 - DNA, 2994 bp, synthetic construct
  source 1..2994: mol_type = other DNA
atggccttaccagtgaccgccttgctcctgccgctggccttgctgctccacgccgccaggccggaagtgcagctggttgaatctggcggaggactggttcagcctggcggatctctgagactgtcttgtgccgccagcggcttcagcttcagcgacttttggatgagctgggtccgacaggcccctggcaaaggacttgaatgggtcgccacaatcagccaggccggcagcgagaaggactacgtggactctgtgaagggcagattcaccatcagccgggacaacgccaagaagtccctgtacctccagatgaacagcctgagagccgaggacaccgccgtgtactattgtgcctctggcgtgtacagcttcgactacagaggccagggcaccctggtcacagtctcttctggtaccggcggaggcggatctggcggcggaggtagcggtggcggaggatctgaattcgacatccagatgaaccagagccccagcagcctgagcgccagcctgggcgataccatcaccatcacctgtcacgccagccagaacatcaacgtgtggctgagctggtatcagcagaagcccggcaacatccccaagctgctgatctacaaggccagcaacctgcacaccggcgtgcccagcagattttctggcagcggctctggcaccggcttcaccattaccatcagctccctccagcccgaggacattgccacctactactgccagcagggccagagctacccctggacatttggcggaggcaccaagctggaaatcaagagactcgagatccagaaccctgatcctgccgtgtaccagctgcgggatagcaagagcagcgacaagagcgtgtgtctgttcaccgacttcgacagccagaccaacgtgtcccagagcaaggactccgacgtgtacatcaccgataagtgcgtgctggacatgcggagcatggacttcaagagcaactccgccgtggcctggtccaacaagtccgatttcgcctgcgccaacgccttcaacaacagcattatccccgaggacacattcttcccaagccccgagagcagcgactccaccgaccacgtgaagcccaaagagacagagaacaccaagcagcccagcaagagctgccacaagcccaaggccatcgtgcacaccgagaaagtgaacatgatgagcctgaccgtgctgggcctgcggatgctgttcgccaaaaccgtggccgtgaacttcctgctgaccgccaagctgttcttcctccgcgccaagagaagcggatctggcgtgaagcagaccctgaatttcgacctgctgaagctggctggcgacgtggaatccaacccaggccctactagtatggactggatttggcgcatccttttccttgtcggcgctgctaccggcgcgcattccgggccccagctccagctgcaagagtctggacctggcctggtcaagcctagcgagacactgagcctgacctgtaccgtgtccggcgatagcatcagcagcggcgattactactggggctggatcagacagcctcctggcaaaggactggaatggatcggccacatctactacagcggcgtgacctactacaaccccagcctgaagtccagagtgaccatcagcgtggacaccagccggaaccagttctccctgaagctgtctagcgtgacagccgccgataccgccgtgtactactgcaccagagaggacagcagcaactggcggagtagaggccagggaacactggtcacagttagctctggatccggcggaggcggaagtggaggcggaggatctggcggcggaggctctttcgaagaagtgcaactccagcagagcggcccagagcttgtgaagcctggcgcttccgtgaagattagctgcaaagccagcggctacagcttcaccggctacttcatgaactgggtcaagcagagccacggcaagagcctggagtacatcggcagattcaacccctacaacggcgagacactgtacaaccagaagttcaagggcaaggccaccctgaccgtggacaagagcagcagcaccgtgcacatggaactgctgagcgtgaccagcgaggacagcgccgtgtactactgtggcagaagcggcaacgacgacgctatggactattggggccagggcaccagcgtgaccgtgtctagtgctacgcgtgaggacctgaagaacgtgttcccacctgaggtggccgtgttcgagcctagcgaggccgagatcagccacacccagaaagccaccctcgtgtgcctggctaccggcttctaccccgaccatgtggaactgtcttggtgggtcaacggcaaagaggtgcacagcggcgtgtgtaccgacccccagccactgaaagaacagcccgccctgaacgacagccggtactgcctgagcagcagactgagagtgtccgccaccttctggcagaacccccggaaccacttcagatgccaggtgcagttctacggcctgagcgagaacgacgagtggacccaggacagagccaagcccgtgacccagatcgtgtctgccgaagcctggggcagagccgatgatgtgattaagatccactggcaggaaaagaagtccaacaccatcctgggcagccaggaaggcaacaccatgaagaccaacgacacctacatgaagttcagctggctgaccgtgcccgagaagtccctggacaaagaacacagatgcatcgtgcggcacgaaaacaacaagaacggcgtggaccaggaaatcatcttcccacccatcaagaccgatgtgattacaatggaccccaaggacaactgctccaaggacgccaacgataccctgctgctccagctgaccaacaccagcgcctactacatgtacttgttgctgctgctgaagtccgtggtgtacttcgccatcatcacatgctgcctgctgcggagaaccgccttctgctgcaacggcgagaagtct

SEQ ID NO: 7949 - DNA, 2997 bp, synthetic construct
  source 1..2997: mol_type = other DNA
atggccttaccagtgaccgccttgctcctgccgctggccttgctgctccacgccgccaggccggaagtgcagctggttgaatctggcggaggactggttcagcctggcggatctctgagactgtcttgtgccgccagcggcttcagcttcagcgacttttggatgagctgggtccgacaggcccctggcaaaggacttgaatgggtcgccacaatcagccaggccggcagcgagaaggactacgtggactctgtgaagggcagattcaccatcagccgggacaacgccaagaagtccctgtacctccagatgaacagcctgagagccgaggacaccgccgtgtactattgtgcctctggcgtgtacagcttcgactacagaggccagggcaccctggtcacagtctcttctggtaccggcggaggcggatctggcggcggaggtagcggtggcggaggatctgaattcgagatcgtgctgacacagagccctgccaccctgtctctgagccctggcgaaagagccaccctgagctgtagagccagccagagcgtgcggagctacctggcctggtatcagcagaagcctggacaggcccccagactgctgatctacgacgccagcaatcgggccacaggcatccccgccagattttctggctctggcagcggcaccgacttcaccctgacaatcagcagcctggaacccgaggacttcgccgtgtactactgccagcagcggagcaactggccccctacctttggacagggcaccaaggtggaaatcaagctcgagatccagaaccctgatcctgccgtgtaccagctgcgggatagcaagagcagcgacaagagcgtgtgtctgttcaccgacttcgacagccagaccaacgtgtcccagagcaaggactccgacgtgtacatcaccgataagtgcgtgctggacatgcggagcatggacttcaagagcaactccgccgtggcctggtccaacaagtccgatttcgcctgcgccaacgccttcaacaacagcattatccccgaggacacattcttcccaagccccgagagcagcgactccaccgaccacgtgaagcccaaagagacagagaacaccaagcagcccagcaagagctgccacaagcccaaggccatcgtgcacaccgagaaagtgaacatgatgagcctgaccgtgctgggcctgcggatgctgttcgccaaaaccgtggccgtgaacttcctgctgaccgccaagctgttcttcctccgcgccaagagaagcggatctggcgtgaagcagaccctgaatttcgacctgctgaagctggctggcgacgtggaatccaacccaggccctactagtatggactggatttggcgcatccttttccttgtcggcgctgctaccggcgcgcattccgggccccagctccagctgcaagagtctggacctggcctggtcaagcctagcgagacactgagcctgacctgtaccgtgtccggcgatagcatcagcagcggcgattactactggggctggatcagacagcctcctggcaaaggactggaatggatcggccacatctactacagcggcgtgacctactacaaccccagcctgaagtccagagtgaccatcagcgtggacaccagccggaaccagttctccctgaagctgtctagcgtgacagccgccgataccgccgtgtactactgcaccagagaggacagcagcaactggcggagtagaggccagggaacactggtcacagttagctctggatccggcggaggcggaagtggaggcggaggatctggcggcggaggctctttcgaacaactccaggtgcaggaatctggccccggactcgtgaagcccagcgagacactgagcctgacctgtaccgtgtccggcggcagcatcagcaacagctacttctcctggggctggatcagacagccccctggcaagggcctggaatggatcggcagcttctactacggcgagaaaacctactacaaccccagcctgaagtccagagccaccatcagcatcgacaccagcaagagccagttctccctgaagctgagcagcgtgacagccgccgacaccgccgtgtattattgccccagaggccccaccatgatccggggcgtgatcgactcttggggccagggaacactcgtgaccgtgtcctctacgcgtgaggacctgaagaacgtgttcccacctgaggtggccgtgttcgagcctagcgaggccgagatcagccacacccagaaagccaccctcgtgtgcctggctaccggcttctaccccgaccatgtggaactgtcttggtgggtcaacggcaaagaggtgcacagcggcgtgtgtaccgacccccagccactgaaagaacagcccgccctgaacgacagccggtactgcctgagcagcagactgagagtgtccgccaccttctggcagaacccccggaaccacttcagatgccaggtgcagttctacggcctgagcgagaacgacgagtggacccaggacagagccaagcccgtgacccagatcgtgtctgccgaagcctggggcagagccgatgatgtgattaagatccactggcaggaaaagaagtccaacaccatcctgggcagccaggaaggcaacaccatgaagaccaacgacacctacatgaagttcagctggctgaccgtgcccgagaagtccctggacaaagaacacagatgcatcgtgcggcacgaaaacaacaagaacggcgtggaccaggaaatcatcttcccacccatcaagaccgatgtgattacaatggaccccaaggacaactgctccaaggacgccaacgataccctgctgctccagctgaccaacaccagcgcctactacatgtacttgttgctgctgctgaagtccgtggtgtacttcgccatcatcacatgctgcctgctgcggagaaccgccttctgctgcaacggcgagaagtct

SEQ ID NO: 7950 - DNA, 3024 bp, synthetic construct
  source 1..3024: mol_type = other DNA
atggccttaccagtgaccgccttgctcctgccgctggccttgctgctccacgccgccaggccggaagtgcagctggttgaatctggcggaggactggttcagcctggcggatctctgagactgtcttgtgccgccagcggcttcagcttcagcgacttttggatgagctgggtccgacaggcccctggcaaaggacttgaatgggtcgccacaatcagccaggccggcagcgagaaggactacgtggactctgtgaagggcagattcaccatcagccgggacaacgccaagaagtccctgtacctccagatgaacagcctgagagccgaggacaccgccgtgtactattgtgcctctggcgtgtacagcttcgactacagaggccagggcaccctggtcacagtctcttctggtaccggcggaggcggatctggcggcggaggtagcggtggcggaggatctgaattcgacatcgtgatgacccagacccccctgagcctgcctgtgacacctggcgagcctgccagcatctcctgcagaagcagcagaagcctgctggacagcgacgacggcaacacctacctggactggtatctgcagaaacccggccagagcccccaactgctgatctacaccctgagctacagagccagcggcgtgcccgatagattttccggctctggcagcggcaccgacttcaccctgaagatcagccgggtggaagccgaggacgtgggcgtgtactactgtatgcagcgggtggaatttcccatcaccttcggccagggcaccagactggaaatcaagagactcgagatccagaaccctgatcctgccgtgtaccagctgcgggatagcaagagcagcgacaagagcgtgtgtctgttcaccgacttcgacagccagaccaacgtgtcccagagcaaggactccgacgtgtacatcaccgataagtgcgtgctggacatgcggagcatggacttcaagagcaactccgccgtggcctggtccaacaagtccgatttcgcctgcgccaacgccttcaacaacagcattatccccgaggacacattcttcccaagccccgagagcagcgactccaccgaccacgtgaagcccaaagagacagagaacaccaagcagcccagcaagagctgccacaagcccaaggccatcgtgcacaccgagaaagtgaacatgatgagcctgaccgtgctgggcctgcggatgctgttcgccaaaaccgtggccgtgaacttcctgctgaccgccaagctgttcttcctccgcgccaagagaagcggatctggcgtgaagcagaccctgaatttcgacctgctgaagctggctggcgacgtggaatccaacccaggccctactagtatggactggatttggcgcatccttttccttgtcggcgctgctaccggcgcgcattccgggccccagctccagctgcaagagtctggacctggcctggtcaagcctagcgagacactgagcctgacctgtaccgtgtccggcgatagcatcagcagcggcgattactactggggctggatcagacagcctcctggcaaaggactggaatggatcggccacatctactacagcggcgtgacctactacaaccccagcctgaagtccagagtgaccatcagcgtggacaccagccggaaccagttctccctgaagctgtctagcgtgacagccgccgataccgccgtgtactactgcaccagagaggacagcagcaactggcggagtagaggccagggaacactggtcacagttagctctggatccggcggaggcggaagtggaggcggaggatctggcggcggaggctctttcgaacaggtgcaactggtggaatctggcgggggagtggtgcagcctggcagatccctgagactgagctgtgccgccagcggcttcatcttcagcagatacggaatgcactgggtgcgccaggcccctggcaagggactgaaatgggtggccgtgatttggtacgacggcagcaacaagctgtacgccgacagcgtgaagggccggttcaccatcagcagagacaacagcaagaacaccctgtacctgcagatgaacagcctgcgggccgaggacaccgccgtgtactattgcgccagagactactacgacaacagccggcaccactggggcttcgactattggggccagggaacccttgtgaccgtgtcctctacgcgtgaggacctgaagaacgtgttcccacctgaggtggccgtgttcgagcctagcgaggccgagatcagccacacccagaaagccaccctcgtgtgcctggctaccggcttctaccccgaccatgtggaactgtcttggtgggtcaacggcaaagaggtgcacagcggcgtgtgtaccgacccccagccactgaaagaacagcccgccctgaacgacagccggtactgcctgagcagcagactgagagtgtccgccaccttctggcagaacccccggaaccacttcagatgccaggtgcagttctacggcctgagcgagaacgacgagtggacccaggacagagccaagcccgtgacccagatcgtgtctgccgaagcctggggcagagccgatgatgtgattaagatccactggcaggaaaagaagtccaacaccatcctgggcagccaggaaggcaacaccatgaagaccaacgacacctacatgaagttcagctggctgaccgtgcccgagaagtccctggacaaagaacacagatgcatcgtgcggcacgaaaacaacaagaacggcgtggaccaggaaatcatcttcccacccatcaagaccgatgtgattacaatggaccccaaggacaactgctccaaggacgccaacgataccctgctgctccagctgaccaacaccagcgcctactacatgtacttgttgctgctgctgaagtccgtggtgtacttcgccatcatcacatgctgcctgctgcggagaaccgccttctgctgcaacggcgagaagtct

SEQ ID NO: 7951 - DNA, 2994 bp, synthetic construct
  source 1..2994: mol_type = other DNA
atggccttaccagtgaccgccttgctcctgccgctggccttgctgctccacgccgccaggccggaagtgcagctggttgaatctggcggaggactggttcagcctggcggatctctgagactgtcttgtgccgccagcggcttcagcttcagcgacttttggatgagctgggtccgacaggcccctggcaaaggacttgaatgggtcgccacaatcagccaggccggcagcgagaaggactacgtggactctgtgaagggcagattcaccatcagccgggacaacgccaagaagtccctgtacctccagatgaacagcctgagagccgaggacaccgccgtgtactattgtgcctctggcgtgtacagcttcgactacagaggccagggcaccctggtcacagtctcttctggtaccggcggaggcggatctggcggcggaggtagcggtggcggaggatctgaattcgagatccagatgacccagagccccagcagcatgtctgccagcctgggcgacaccatcaccatcacatgccaggccacccaggacatcttcaagaacctgaactggtatcagcagaagcccggcaagccccccagcctgctgatctactatgccaccgaactggccgagggcgtgcccagcagattttctggcagcggcagcggctccgactacagcctgaccatcagcaacctggaaagcgaggacttcgccgcctactactgcctccagttcttcgagttcccattcaccttcggctccggcaccaagctggaaatgaagctcgagatccagaaccctgatcctgccgtgtaccagctgcgggatagcaagagcagcgacaagagcgtgtgtctgttcaccgacttcgacagccagaccaacgtgtcccagagcaaggactccgacgtgtacatcaccgataagtgcgtgctggacatgcggagcatggacttcaagagcaactccgccgtggcctggtccaacaagtccgatttcgcctgcgccaacgccttcaacaacagcattatccccgaggacacattcttcccaagccccgagagcagcgactccaccgaccacgtgaagcccaaagagacagagaacaccaagcagcccagcaagagctgccacaagcccaaggccatcgtgcacaccgagaaagtgaacatgatgagcctgaccgtgctgggcctgcggatgctgttcgccaaaaccgtggccgtgaacttcctgctgaccgccaagctgttcttcctccgcgccaagagaagcggatctggcgtgaagcagaccctgaatttcgacctgctgaagctggctggcgacgtggaatccaacccaggccctactagtatggactggatttggcgcatccttttccttgtcggcgctgctaccggcgcgcattccgggccccagctccagctgcaagagtctggacctggcctggtcaagcctagcgagacactgagcctgacctgtaccgtgtccggcgatagcatcagcagcggcgattactactggggctggatcagacagcctcctggcaaaggactggaatggatcggccacatctactacagcggcgtgacctactacaaccccagcctgaagtccagagtgaccatcagcgtggacaccagccggaaccagttctccctgaagctgtctagcgtgacagccgccgataccgccgtgtactactgcaccagagaggacagcagcaactggcggagtagaggccagggaacactggtcacagttagctctggatccggcggaggcggaagtggaggcggaggatctggcggcggaggctctttcgaacaggtgcaactccagcagtctggcgctgagcttgtgcggcctggcacctctgtgaaggtgtcctgtaaagccagcggctacgtgttcaccaactactggatcgagtggatcaagcagcggccaggccagggcctggaatggatcggcgtgatgaatccaggcagcggcgagacaacctacaacgagaagttcaagggcaaggccaccctgaccgccgacaagagcagcagcacagcctacatgcaactgtcctccctgaccagcgtggacagcgccgtgtacttctgcgccagggaccacgaccgggactactacgctatggactactggggccagggcaccagcgtgaccgtgtcatctacgcgtgaggacctgaagaacgtgttcccacctgaggtggccgtgttcgagcctagcgaggccgagatcagccacacccagaaagccaccctcgtgtgcctggctaccggcttctaccccgaccatgtggaactgtcttggtgggtcaacggcaaagaggtgcacagcggcgtgtgtaccgacccccagccactgaaagaacagcccgccctgaacgacagccggtactgcctgagcagcagactgagagtgtccgccaccttctggcagaacccccggaaccacttcagatgccaggtgcagttctacggcctgagcgagaacgacgagtggacccaggacagagccaagcccgtgacccagatcgtgtctgccgaagcctggggcagagccgatgatgtgattaagatccactggcaggaaaagaagtccaacaccatcctgggcagccaggaaggcaacaccatgaagaccaacgacacctacatgaagttcagctggctgaccgtgcccgagaagtccctggacaaagaacacagatgcatcgtgcggcacgaaaacaacaagaacggcgtggaccaggaaatcatcttcccacccatcaagaccgatgtgattacaatggaccccaaggacaactgctccaaggacgccaacgataccctgctgctccagctgaccaacaccagcgcctactacatgtacttgttgctgctgctgaagtccgtggtgtacttcgccatcatcacatgctgcctgctgcggagaaccgccttctgctgcaacggcgagaagtct

SEQ ID NO: 7952 - DNA, 2985 bp, synthetic construct
  source 1..2985: mol_type = other DNA
atggccttaccagtgaccgccttgctcctgccgctggccttgctgctccacgccgccaggccggaagtgcagctggttgaatctggcggaggactggttcagcctggcggatctctgagactgtcttgtgccgccagcggcttcagcttcagcgacttttggatgagctgggtccgacaggcccctggcaaaggacttgaatgggtcgccacaatcagccaggccggcagcgagaaggactacgtggactctgtgaagggcagattcaccatcagccgggacaacgccaagaagtccctgtacctccagatgaacagcctgagagccgaggacaccgccgtgtactattgtgcctctggcgtgtacagcttcgactacagaggccagggcaccctggtcacagtctcttctggtaccggcggaggcggatctggcggcggaggtagcggtggcggaggatctgaattcgacatcctgctgacacagagccccgccatcctgtccgtgtctccaggcgagagagtgtcctttagctgccgggccagccagaacatcggcaccagcatccactggtatcagcagcggaccaacggcagccccagactgctgattaagtacgccagcgagtccgtgtccggcatccccagcagattttctggcagcggctccggcaccgacttcaccctgagcatcaacagcgtggaaagcgaggacattgccgactactactgccagcacaccaatagctggcccaccacctttggcggaggcaccaagctggaaatcaagagactcgagatccagaaccctgatcctgccgtgtaccagctgcgggatagcaagagcagcgacaagagcgtgtgtctgttcaccgacttcgacagccagaccaacgtgtcccagagcaaggactccgacgtgtacatcaccgataagtgcgtgctggacatgcggagcatggacttcaagagcaactccgccgtggcctggtccaacaagtccgatttcgcctgcgccaacgccttcaacaacagcattatccccgaggacacattcttcccaagccccgagagcagcgactccaccgaccacgtgaagcccaaagagacagagaacaccaagcagcccagcaagagctgccacaagcccaaggccatcgtgcacaccgagaaagtgaacatgatgagcctgaccgtgctgggcctgcggatgctgttcgccaaaaccgtggccgtgaacttcctgctgaccgccaagctgttcttcctccgcgccaagagaagcggatctggcgtgaagcagaccctgaatttcgacctgctgaagctggctggcgacgtggaatccaacccaggccctactagtatggactggatttggcgcatccttttccttgtcggcgctgctaccggcgcgcattccgggccccagctccagctgcaagagtctggacctggcctggtcaagcctagcgagacactgagcctgacctgtaccgtgtccggcgatagcatcagcagcggcgattactactggggctggatcagacagcctcctggcaaaggactggaatggatcggccacatctactacagcggcgtgacctactacaaccccagcctgaagtccagagtgaccatcagcgtggacaccagccggaaccagttctccctgaagctgtctagcgtgacagccgccgataccgccgtgtactactgcaccagagaggacagcagcaactggcggagtagaggccagggaacactggtcacagttagctctggatccggcggaggcggaagtggaggcggaggatctggcggcggaggctctttcgaacaggtgcaactccagcagtccgacgccgagcttgtgaagcctggcgcttccgtgaagattagctgcaaggccagcggctacaccttcaccgaccacgccattcactgggtcaagcagaagcccgagcagggcctggaatggatcggctacttcagccccggcaacggcgacatcaagtacaacgagaagttcaagggcaaggccaccctgaccgccgacaagagcagcagcacagcctacatgcaactgaacagcctgaccagcgaggactccgccgtgtacttctgcaagcggagctacggcaactacgactactggggccagggcaccacactgaccgtgtctagtacgcgtgaggacctgaagaacgtgttcccacctgaggtggccgtgttcgagcctagcgaggccgagatcagccacacccagaaagccaccctcgtgtgcctggctaccggcttctaccccgaccatgtggaactgtcttggtgggtcaacggcaaagaggtgcacagcggcgtgtgtaccgacccccagccactgaaagaacagcccgccctgaacgacagccggtactgcctgagcagcagactgagagtgtccgccaccttctggcagaacccccggaaccacttcagatgccaggtgcagttctacggcctgagcgagaacgacgagtggacccaggacagagccaagcccgtgacccagatcgtgtctgccgaagcctggggcagagccgatgatgtgattaagatccactggcaggaaaagaagtccaacaccatcctgggcagccaggaaggcaacaccatgaagaccaacgacacctacatgaagttcagctggctgaccgtgcccgagaagtccctggacaaagaacacagatgcatcgtgcggcacgaaaacaacaagaacggcgtggaccaggaaatcatcttcccacccatcaagaccgatgtgattacaatggaccccaaggacaactgctccaaggacgccaacgataccctgctgctccagctgaccaacaccagcgcctactacatgtacttgttgctgctgctgaagtccgtggtgtacttcgccatcatcacatgctgcctgctgcggagaaccgccttctgctgcaacggcgagaagtct

SEQ ID NO: 7953 - DNA, 3000 bp, synthetic construct
  source 1..3000: mol_type = other DNA
atggccttaccagtgaccgccttgctcctgccgctggccttgctgctccacgccgccaggccggaagtgcagctggttgaatctggcggaggactggttcagcctggcggatctctgagactgtcttgtgccgccagcggcttcagcttcagcgacttttggatgagctgggtccgacaggcccctggcaaaggacttgaatgggtcgccacaatcagccaggccggcagcgagaaggactacgtggactctgtgaagggcagattcaccatcagccgggacaacgccaagaagtccctgtacctccagatgaacagcctgagagccgaggacaccgccgtgtactattgtgcctctggcgtgtacagcttcgactacagaggccagggcaccctggtcacagtctcttctggtaccggcggaggcggatctggcggcggaggtagcggtggcggaggatctgaattcgacatcgtgatgacccagagccccgatagcctggccgtgtctctgggagagagagccaccatcaactgcaagagcagccagagcctgctgaacagcggcgaccagaagaactacctgacctggtatcagcagaagcccggccagccccccaagctgctgatctactgggccagcaccagagaaagcggcgtgcccgatagattcagcggcagcggaagtggcaccgacttcaccctgaccatcagttctcttcaggccgaggacgtggccgtgtactactgccagaacgactacagctaccccctgaccttcggccagggcaccaaggtggaaatcaagctcgagatccagaaccctgatcctgccgtgtaccagctgcgggatagcaagagcagcgacaagagcgtgtgtctgttcaccgacttcgacagccagaccaacgtgtcccagagcaaggactccgacgtgtacatcaccgataagtgcgtgctggacatgcggagcatggacttcaagagcaactccgccgtggcctggtccaacaagtccgatttcgcctgcgccaacgccttcaacaacagcattatccccgaggacacattcttcccaagccccgagagcagcgactccaccgaccacgtgaagcccaaagagacagagaacaccaagcagcccagcaagagctgccacaagcccaaggccatcgtgcacaccgagaaagtgaacatgatgagcctgaccgtgctgggcctgcggatgctgttcgccaaaaccgtggccgtgaacttcctgctgaccgccaagctgttcttcctccgcgccaagagaagcggatctggcgtgaagcagaccctgaatttcgacctgctgaagctggctggcgacgtggaatccaacccaggccctactagtatggactggatttggcgcatccttttccttgtcggcgctgctaccggcgcgcattccgggccccagctccagctgcaagagtctggacctggcctggtcaagcctagcgagacactgagcctgacctgtaccgtgtccggcgatagcatcagcagcggcgattactactggggctggatcagacagcctcctggcaaaggactggaatggatcggccacatctactacagcggcgtgacctactacaaccccagcctgaagtccagagtgaccatcagcgtggacaccagccggaaccagttctccctgaagctgtctagcgtgacagccgccgataccgccgtgtactactgcaccagagaggacagcagcaactggcggagtagaggccagggaacactggtcacagttagctctggatccggcggaggcggaagtggaggcggaggatctggcggcggaggctctttcgaacaggtgcagctggtgcagtctggggccgaagtgaagaaaaccggcagcagcgtgaaggtgtcctgcaaggccagcggctacacctttaccgaccacgccattcacgtgtggcggcaggctccaggacaggccctggaatggatgggccacttcagccccggcaacaccgacatcaagtacaacgacaagttcaagggcagagtgaccctgaccgtggaccgcagcatgagcaccgcctacatggaactgagcagcctgcggagcgaggacaccgccatgtactattgcaagaccagcaccttctttttcgactactggggccagggaacaatggtcaccgtgtccagcacgcgtgaggacctgaagaacgtgttcccacctgaggtggccgtgttcgagcctagcgaggccgagatcagccacacccagaaagccaccctcgtgtgcctggctaccggcttctaccccgaccatgtggaactgtcttggtgggtcaacggcaaagaggtgcacagcggcgtgtgtaccgacccccagccactgaaagaacagcccgccctgaacgacagccggtactgcctgagcagcagactgagagtgtccgccaccttctggcagaacccccggaaccacttcagatgccaggtgcagttctacggcctgagcgagaacgacgagtggacccaggacagagccaagcccgtgacccagatcgtgtctgccgaagcctggggcagagccgatgatgtgattaagatccactggcaggaaaagaagtccaacaccatcctgggcagccaggaaggcaacaccatgaagaccaacgacacctacatgaagttcagctggctgaccgtgcccgagaagtccctggacaaagaacacagatgcatcgtgcggcacgaaaacaacaagaacggcgtggaccaggaaatcatcttcccacccatcaagaccgatgtgattacaatggaccccaaggacaactgctccaaggacgccaacgataccctgctgctccagctgaccaacaccagcgcctactacatgtacttgttgctgctgctgaagtccgtggtgtacttcgccatcatcacatgctgcctgctgcggagaaccgccttctgctgcaacggcgagaagtct

SEQ ID NO: 7954 - DNA, 2997 bp, synthetic construct
  source 1..2997: mol_type = other DNA
atggccttaccagtgaccgccttgctcctgccgctggccttgctgctccacgccgccaggccggaagtgcagctggttgaatctggcggaggactggttcagcctggcggatctctgagactgtcttgtgccgccagcggcttcagcttcagcgacttttggatgagctgggtccgacaggcccctggcaaaggacttgaatgggtcgccacaatcagccaggccggcagcgagaaggactacgtggactctgtgaagggcagattcaccatcagccgggacaacgccaagaagtccctgtacctccagatgaacagcctgagagccgaggacaccgccgtgtactattgtgcctctggcgtgtacagcttcgactacagaggccagggcaccctggtcacagtctcttctggtaccggcggaggcggatctggcggcggaggtagcggtggcggaggatctgaattcgacatccagatgacccagagccccagcagcctgtctgccagcgtgggcgacagagtgaccatcacatgcaaggccagccaggacgtgtccattgccgtggcctggtatcagcagaagcccggcaaggcccccaaggtgctgatctacagcgccagctacagatacaccggcgtgcccgacagattcagcggctctggcagcggcaccgacttcaccttcaccatcagctccctccagcccgaggatattgccgtgtactactgccagcagcactacatcacccccctgacctttggcggaggcaccaaggtggaaatcaagctcgagatccagaaccctgatcctgccgtgtaccagctgcgggatagcaagagcagcgacaagagcgtgtgtctgttcaccgacttcgacagccagaccaacgtgtcccagagcaaggactccgacgtgtacatcaccgataagtgcgtgctggacatgcggagcatggacttcaagagcaactccgccgtggcctggtccaacaagtccgatttcgcctgcgccaacgccttcaacaacagcattatccccgaggacacattcttcccaagccccgagagcagcgactccaccgaccacgtgaagcccaaagagacagagaacaccaagcagcccagcaagagctgccacaagcccaaggccatcgtgcacaccgagaaagtgaacatgatgagcctgaccgtgctgggcctgcggatgctgttcgccaaaaccgtggccgtgaacttcctgctgaccgccaagctgttcttcctccgcgccaagagaagcggatctggcgtgaagcagaccctgaatttcgacctgctgaagctggctggcgacgtggaatccaacccaggccctactagtatggactggatttggcgcatccttttccttgtcggcgctgctaccggcgcgcattccgggccccagctccagctgcaagagtctggacctggcctggtcaagcctagcgagacactgagcctgacctgtaccgtgtccggcgatagcatcagcagcggcgattactactggggctggatcagacagcctcctggcaaaggactggaatggatcggccacatctactacagcggcgtgacctactacaaccccagcctgaagtccagagtgaccatcagcgtggacaccagccggaaccagttctccctgaagctgtctagcgtgacagccgccgataccgccgtgtactactgcaccagagaggacagcagcaactggcggagtagaggccagggaacactggtcacagttagctctggatccggcggaggcggaagtggaggcggaggatctggcggcggaggctctttcgaacagatccaactggtgcagagcggccacgaagtgaagaaacctggggccagcgtgaaggtgtcctgcaaagccagcggctacacctttaccaactacggcatgaactgggtgcgccaggcccctggacagggcctggaatggatgggctggatcaacaccaagaccggcgagcccacctacgccgaagagttcaagggcagattcgtgttcagcctggaaaccagcgcctccaccgcctacctccagatcagctctctgaaggccgaggacaccgccatgtacttttgcggcagaggcggctacggcagcagctactggtacttcgatgtgtggggccagggcaccaccgtgaccgtgtcatctacgcgtgaggacctgaagaacgtgttcccacctgaggtggccgtgttcgagcctagcgaggccgagatcagccacacccagaaagccaccctcgtgtgcctggctaccggcttctaccccgaccatgtggaactgtcttggtgggtcaacggcaaagaggtgcacagcggcgtgtgtaccgacccccagccactgaaagaacagcccgccctgaacgacagccggtactgcctgagcagcagactgagagtgtccgccaccttctggcagaacccccggaaccacttcagatgccaggtgcagttctacggcctgagcgagaacgacgagtggacccaggacagagccaagcccgtgacccagatcgtgtctgccgaagcctggggcagagccgatgatgtgattaagatccactggcaggaaaagaagtccaacaccatcctgggcagccaggaaggcaacaccatgaagaccaacgacacctacatgaagttcagctggctgaccgtgcccgagaagtccctggacaaagaacacagatgcatcgtgcggcacgaaaacaacaagaacggcgtggaccaggaaatcatcttcccacccatcaagaccgatgtgattacaatggaccccaaggacaactgctccaaggacgccaacgataccctgctgctccagctgaccaacaccagcgcctactacatgtacttgttgctgctgctgaagtccgtggtgtacttcgccatcatcacatgctgcctgctgcggagaaccgccttctgctgcaacggcgagaagtct

SEQ ID NO: 7955 - DNA, 3003 bp, synthetic construct
  source 1..3003: mol_type = other DNA
atggccttaccagtgaccgccttgctcctgccgctggccttgctgctccacgccgccaggccggaagtgcagctggttgaatctggcggaggactggttcagcctggcggatctctgagactgtcttgtgccgccagcggcttcagcttcagcgacttttggatgagctgggtccgacaggcccctggcaaaggacttgaatgggtcgccacaatcagccaggccggcagcgagaaggactacgtggactctgtgaagggcagattcaccatcagccgggacaacgccaagaagtccctgtacctccagatgaacagcctgagagccgaggacaccgccgtgtactattgtgcctctggcgtgtacagcttcgactacagaggccagggcaccctggtcacagtctcttctggtaccggcggaggcggatctggcggcggaggtagcggtggcggaggatctgaattcgacatcgtgatgacccagagccccgatagcctggccgtgtctctgggagagagagccaccatcaactgccgggccagcaagagcgtgtccaccagcggctacagctacatgcactggtatcagcagaagcccggccagccccccaagctgctgatctacctggcctccaacctggaaagcggcgtgcccgatagattcagcggcagcggctctggcaccgacttcaccctgaccatcagttctcttcaggccgaggacgtggccgtgtactactgccagcacagcagagagctgccctacaccttcggccagggcaccaagctggaaatcaagctcgagatccagaaccctgatcctgccgtgtaccagctgcgggatagcaagagcagcgacaagagcgtgtgtctgttcaccgacttcgacagccagaccaacgtgtcccagagcaaggactccgacgtgtacatcaccgataagtgcgtgctggacatgcggagcatggacttcaagagcaactccgccgtggcctggtccaacaagtccgatttcgcctgcgccaacgccttcaacaacagcattatccccgaggacacattcttcccaagccccgagagcagcgactccaccgaccacgtgaagcccaaagagacagagaacaccaagcagcccagcaagagctgccacaagcccaaggccatcgtgcacaccgagaaagtgaacatgatgagcctgaccgtgctgggcctgcggatgctgttcgccaaaaccgtggccgtgaacttcctgctgaccgccaagctgttcttcctccgcgccaagagaagcggatctggcgtgaagcagaccctgaatttcgacctgctgaagctggctggcgacgtggaatccaacccaggccctactagtatggactggatttggcgcatccttttccttgtcggcgctgctaccggcgcgcattccgggccccagctccagctgcaagagtctggacctggcctggtcaagcctagcgagacactgagcctgacctgtaccgtgtccggcgatagcatcagcagcggcgattactactggggctggatcagacagcctcctggcaaaggactggaatggatcggccacatctactacagcggcgtgacctactacaaccccagcctgaagtccagagtgaccatcagcgtggacaccagccggaaccagttctccctgaagctgtctagcgtgacagccgccgataccgccgtgtactactgcaccagagaggacagcagcaactggcggagtagaggccagggaacactggtcacagttagctctggatccggcggaggcggaagtggaggcggaggatctggcggcggaggctctttcgaacaggtgcaactccaggaatctggccctggccttgtgaagcccagcgagacactgagcctgacctgtaccgtgtccggcggcagcatcagctcttacggcgtgcactggattcggcagcctccaggcaagggcctggaatggatcggcgtgatctggacctccggcgtgaccgactacaacagcgccctgatgggcagagtgaccatctccgtggacaccagcaagaaccagttcagcctgaagctgagcagcgtgacagccgccgataccgccgtgtattattgcgccagagatggcgactacgaccgctacacaatggactactggggccagggaacccttgtgaccgtgtcctctacgcgtgaggacctgaagaacgtgttcccacctgaggtggccgtgttcgagcctagcgaggccgagatcagccacacccagaaagccaccctcgtgtgcctggctaccggcttctaccccgaccatgtggaactgtcttggtgggtcaacggcaaagaggtgcacagcggcgtgtgtaccgacccccagccactgaaagaacagcccgccctgaacgacagccggtactgcctgagcagcagactgagagtgtccgccaccttctggcagaacccccggaaccacttcagatgccaggtgcagttctacggcctgagcgagaacgacgagtggacccaggacagagccaagcccgtgacccagatcgtgtctgccgaagcctggggcagagccgatgatgtgattaagatccactggcaggaaaagaagtccaacaccatcctgggcagccaggaaggcaacaccatgaagaccaacgacacctacatgaagttcagctggctgaccgtgcccgagaagtccctggacaaagaacacagatgcatcgtgcggcacgaaaacaacaagaacggcgtggaccaggaaatcatcttcccacccatcaagaccgatgtgattacaatggaccccaaggacaactgctccaaggacgccaacgataccctgctgctccagctgaccaacaccagcgcctactacatgtacttgttgctgctgctgaagtccgtggtgtacttcgccatcatcacatgctgcctgctgcggagaaccgccttctgctgcaacggcgagaagtct

SEQ ID NO: 7956 - DNA, 3003 bp, synthetic construct
  source 1..3003: mol_type = other DNA
atggccttaccagtgaccgccttgctcctgccgctggccttgctgctccacgccgccaggccggaagtgcagctggttgaatctggcggaggactggttcagcctggcggatctctgagactgtcttgtgccgccagcggcttcagcttcagcgacttttggatgagctgggtccgacaggcccctggcaaaggacttgaatgggtcgccacaatcagccaggccggcagcgagaaggactacgtggactctgtgaagggcagattcaccatcagccgggacaacgccaagaagtccctgtacctccagatgaacagcctgagagccgaggacaccgccgtgtactattgtgcctctggcgtgtacagcttcgactacagaggccagggcaccctggtcacagtctcttctggtaccggcggaggcggatctggcggcggaggtagcggtggcggaggatctgaattcgacatccagatgacccagagccccagcagcctgtctgccagcgtgggcgacagagtgaccatcacctgtagagccagccagagcatcggcaccagcctgcactggtatcagcagaagcctggcaaggcccccaagctgctgattaagttcgccagcagactgcagagcggcgtgcccagcagattttctggcagcggctccggcaccgacttcaccctgacaatcagctccctgcagcccgaggacttcgccacctactactgccagcagagccccggcttccctccaacctttggacagggcaccaagctggaaatcaagcggctcgagatccagaaccctgatcctgccgtgtaccagctgcgggatagcaagagcagcgacaagagcgtgtgtctgttcaccgacttcgacagccagaccaacgtgtcccagagcaaggactccgacgtgtacatcaccgataagtgcgtgctggacatgcggagcatggacttcaagagcaactccgccgtggcctggtccaacaagtccgatttcgcctgcgccaacgccttcaacaacagcattatccccgaggacacattcttcccaagccccgagagcagcgactccaccgaccacgtgaagcccaaagagacagagaacaccaagcagcccagcaagagctgccacaagcccaaggccatcgtgcacaccgagaaagtgaacatgatgagcctgaccgtgctgggcctgcggatgctgttcgccaaaaccgtggccgtgaacttcctgctgaccgccaagctgttcttcctccgcgccaagagaagcggatctggcgtgaagcagaccctgaatttcgacctgctgaagctggctggcgacgtggaatccaacccaggccctactagtatggactggatttggcgcatccttttccttgtcggcgctgctaccggcgcgcattccgggccccagctccagctgcaagagtctggacctggcctggtcaagcctagcgagacactgagcctgacctgtaccgtgtccggcgatagcatcagcagcggcgattactactggggctggatcagacagcctcctggcaaaggactggaatggatcggccacatctactacagcggcgtgacctactacaaccccagcctgaagtccagagtgaccatcagcgtggacaccagccggaaccagttctccctgaagctgtctagcgtgacagccgccgataccgccgtgtactactgcaccagagaggacagcagcaactggcggagtagaggccagggaacactggtcacagttagctctggatccggcggaggcggaagtggaggcggaggatctggcggcggaggctctttcgaacaggtgcaactggtggaatctggcggcggacttgtgaagccaggcggcagcctgagactgagctgtgccgccagcggcttcagcatcaccaccagcggctactactggacctggatcagacagttccccggcaagggcctggaatggatgggctacatcggctacaacagcaagacctactacaaccccgccctgaagtcccggatcaccatcagcagagacaacgccaagaacagcctgtacctgcagatgaactccctgagagccgaggataccgccgtgtactactgcgccagatccctgtacggcggctacaaggacgccttcgatagctggggccagggaacccttgtgaccgtgtctagcacgcgtgaggacctgaagaacgtgttcccacctgaggtggccgtgttcgagcctagcgaggccgagatcagccacacccagaaagccaccctcgtgtgcctggctaccggcttctaccccgaccatgtggaactgtcttggtgggtcaacggcaaagaggtgcacagcggcgtgtgtaccgacccccagccactgaaagaacagcccgccctgaacgacagccggtactgcctgagcagcagactgagagtgtccgccaccttctggcagaacccccggaaccacttcagatgccaggtgcagttctacggcctgagcgagaacgacgagtggacccaggacagagccaagcccgtgacccagatcgtgtctgccgaagcctggggcagagccgatgatgtgattaagatccactggcaggaaaagaagtccaacaccatcctgggcagccaggaaggcaacaccatgaagaccaacgacacctacatgaagttcagctggctgaccgtgcccgagaagtccctggacaaagaacacagatgcatcgtgcggcacgaaaacaacaagaacggcgtggaccaggaaatcatcttcccacccatcaagaccgatgtgattacaatggaccccaaggacaactgctccaaggacgccaacgataccctgctgctccagctgaccaacaccagcgcctactacatgtacttgttgctgctgctgaagtccgtggtgtacttcgccatcatcacatgctgcctgctgcggagaaccgccttctgctgcaacggcgagaagtct

SEQ ID NO: 7957 - DNA, 3018 bp, synthetic construct
  source 1..3018: mol_type = other DNA
atggccttaccagtgaccgccttgctcctgccgctggccttgctgctccacgccgccaggccggaagtgcagctggttgaatctggcggaggactggttcagcctggcggatctctgagactgtcttgtgccgccagcggcttcagcttcagcgacttttggatgagctgggtccgacaggcccctggcaaaggacttgaatgggtcgccacaatcagccaggccggcagcgagaaggactacgtggactctgtgaagggcagattcaccatcagccgggacaacgccaagaagtccctgtacctccagatgaacagcctgagagccgaggacaccgccgtgtactattgtgcctctggcgtgtacagcttcgactacagaggccagggcaccctggtcacagtctcttctggtaccggcggaggcggatctggcggcggaggtagcggtggcggaggatctgaattcgacgagatcgtgctgacccagagccctctgagcctgcctgtgacacctggcgagcctgccagcatctcctgtagaagcagccagagcctgctgcacagcatcggctacaactacctggactggtatctccagaagcccggccagagcccccaactgctgatctacctgggcagcaacagagccagcggcgtgcccgatagattttccggcagcggctccggcaccgacttcaccctgaagatcagccgggtggaagccgaggacgtgggcgtgtactactgtatgcaggccctccagacccccctgacctttggcggaggcaccaaggtggaaatcaagcggctcgagatccagaaccctgatcctgccgtgtaccagctgcgggatagcaagagcagcgacaagagcgtgtgtctgttcaccgacttcgacagccagaccaacgtgtcccagagcaaggactccgacgtgtacatcaccgataagtgcgtgctggacatgcggagcatggacttcaagagcaactccgccgtggcctggtccaacaagtccgatttcgcctgcgccaacgccttcaacaacagcattatccccgaggacacattcttcccaagccccgagagcagcgactccaccgaccacgtgaagcccaaagagacagagaacaccaagcagcccagcaagagctgccacaagcccaaggccatcgtgcacaccgagaaagtgaacatgatgagcctgaccgtgctgggcctgcggatgctgttcgccaaaaccgtggccgtgaacttcctgctgaccgccaagctgttcttcctccgcgccaagagaagcggatctggcgtgaagcagaccctgaatttcgacctgctgaagctggctggcgacgtggaatccaacccaggccctactagtatggactggatttggcgcatccttttccttgtcggcgctgctaccggcgcgcattccgggccccagctccagctgcaagagtctggacctggcctggtcaagcctagcgagacactgagcctgacctgtaccgtgtccggcgatagcatcagcagcggcgattactactggggctggatcagacagcctcctggcaaaggactggaatggatcggccacatctactacagcggcgtgacctactacaaccccagcctgaagtccagagtgaccatcagcgtggacaccagccggaaccagttctccctgaagctgtctagcgtgacagccgccgataccgccgtgtactactgcaccagagaggacagcagcaactggcggagtagaggccagggaacactggtcacagttagctctggatccggcggaggcggaagtggaggcggaggatctggcggcggaggctctttcgaagaagtgcaactggtggaaagcggaggcggcgtggtgcagcctggaagaagcctgagactgagctgtgccgccagcggcttcaccttccggtcctacggaatgcactgggtgcgccaggcccctggcaaaggactggaatgggtggccgtgatctcctacgacggctccaacaagtactacaccgacagcgtgaacggcagattcaccatcagcagagacaacagcaagaacaccctgtacctccagatgaacagcctgcgggccgaggacaccgccgtgtactattgtgctagaggcggaggctactacgagacaagcggccctgattactggggccagggcacactcgtgaccgtgtctagtacgcgtgaggacctgaagaacgtgttcccacctgaggtggccgtgttcgagcctagcgaggccgagatcagccacacccagaaagccaccctcgtgtgcctggctaccggcttctaccccgaccatgtggaactgtcttggtgggtcaacggcaaagaggtgcacagcggcgtgtgtaccgacccccagccactgaaagaacagcccgccctgaacgacagccggtactgcctgagcagcagactgagagtgtccgccaccttctggcagaacccccggaaccacttcagatgccaggtgcagttctacggcctgagcgagaacgacgagtggacccaggacagagccaagcccgtgacccagatcgtgtctgccgaagcctggggcagagccgatgatgtgattaagatccactggcaggaaaagaagtccaacaccatcctgggcagccaggaaggcaacaccatgaagaccaacgacacctacatgaagttcagctggctgaccgtgcccgagaagtccctggacaaagaacacagatgcatcgtgcggcacgaaaacaacaagaacggcgtggaccaggaaatcatcttcccacccatcaagaccgatgtgattacaatggaccccaaggacaactgctccaaggacgccaacgataccctgctgctccagctgaccaacaccagcgcctactacatgtacttgttgctgctgctgaagtccgtggtgtacttcgccatcatcacatgctgcctgctgcggagaaccgccttctgctgcaacggcgagaagtct

SEQ ID NO: 7958 - DNA, 3012 bp, synthetic construct
  source 1..3012: mol_type = other DNA
atggccttaccagtgaccgccttgctcctgccgctggccttgctgctccacgccgccaggccggaagtgcagctggttgaatctggcggaggactggttcagcctggcggatctctgagactgtcttgtgccgccagcggcttcagcttcagcgacttttggatgagctgggtccgacaggcccctggcaaaggacttgaatgggtcgccacaatcagccaggccggcagcgagaaggactacgtggactctgtgaagggcagattcaccatcagccgggacaacgccaagaagtccctgtacctccagatgaacagcctgagagccgaggacaccgccgtgtactattgtgcctctggcgtgtacagcttcgactacagaggccagggcaccctggtcacagtctcttctggtaccggcggaggcggatctggcggcggaggtagcggtggcggaggatctgaattcgacgacgtcgtgatgacccagagccctctgagcctgcctgtgacacctggcgagcctgccagcatctcctgtagaagcagccagagcctgctgcacagcatcggctacaactacctgcactggtttctccagaagcccggccagagcccccaactgctgatctacctgggcagcaacagagccagcggcgtgcccgatagattttccggcagcggctccggcaccgacttcaccctgaagatcagccgggtggaagccgaggacgtgggcgtgtactactgtatgcaggccctccagacccctcccacctttggacagggcaccagactggaaatcaagcggctcgagatccagaaccctgatcctgccgtgtaccagctgcgggatagcaagagcagcgacaagagcgtgtgtctgttcaccgacttcgacagccagaccaacgtgtcccagagcaaggactccgacgtgtacatcaccgataagtgcgtgctggacatgcggagcatggacttcaagagcaactccgccgtggcctggtccaacaagtccgatttcgcctgcgccaacgccttcaacaacagcattatccccgaggacacattcttcccaagccccgagagcagcgactccaccgaccacgtgaagcccaaagagacagagaacaccaagcagcccagcaagagctgccacaagcccaaggccatcgtgcacaccgagaaagtgaacatgatgagcctgaccgtgctgggcctgcggatgctgttcgccaaaaccgtggccgtgaacttcctgctgaccgccaagctgttcttcctccgcgccaagagaagcggatctggcgtgaagcagaccctgaatttcgacctgctgaagctggctggcgacgtggaatccaacccaggccctactagtatggactggatttggcgcatccttttccttgtcggcgctgctaccggcgcgcattccgggccccagctccagctgcaagagtctggacctggcctggtcaagcctagcgagacactgagcctgacctgtaccgtgtccggcgatagcatcagcagcggcgattactactggggctggatcagacagcctcctggcaaaggactggaatggatcggccacatctactacagcggcgtgacctactacaaccccagcctgaagtccagagtgaccatcagcgtggacaccagccggaaccagttctccctgaagctgtctagcgtgacagccgccgataccgccgtgtactactgcaccagagaggacagcagcaactggcggagtagaggccagggaacactggtcacagttagctctggatccggcggaggcggaagtggaggcggaggatctggcggcggaggctctttcgaacaactccaactccaggaaagcggccctggcctcgtgaagcctagcggcacactgagcctgacatgtgccgtgtctggcggcagcatcagcagcagcaactggtggtcttgggtgcgccagcctcctggcaagggcctggaatggatcggcgaaatctaccacagcggcagcaccaactacaaccccagcctgaagtccagagtgaccatcagcgtggacaagagcaagaaccagttctccctgaagctgagcagcgtgacagccgccgataccgccgtgtactattgcgtgggcagcccctacggcgactacgtgctggattattggggccagggcaccctcgtgaccgtgtctagtacgcgtgaggacctgaagaacgtgttcccacctgaggtggccgtgttcgagcctagcgaggccgagatcagccacacccagaaagccaccctcgtgtgcctggctaccggcttctaccccgaccatgtggaactgtcttggtgggtcaacggcaaagaggtgcacagcggcgtgtgtaccgacccccagccactgaaagaacagcccgccctgaacgacagccggtactgcctgagcagcagactgagagtgtccgccaccttctggcagaacccccggaaccacttcagatgccaggtgcagttctacggcctgagcgagaacgacgagtggacccaggacagagccaagcccgtgacccagatcgtgtctgccgaagcctggggcagagccgatgatgtgattaagatccactggcaggaaaagaagtccaacaccatcctgggcagccaggaaggcaacaccatgaagaccaacgacacctacatgaagttcagctggctgaccgtgcccgagaagtccctggacaaagaacacagatgcatcgtgcggcacgaaaacaacaagaacggcgtggaccaggaaatcatcttcccacccatcaagaccgatgtgattacaatggaccccaaggacaactgctccaaggacgccaacgataccctgctgctccagctgaccaacaccagcgcctactacatgtacttgttgctgctgctgaagtccgtggtgtacttcgccatcatcacatgctgcctgctgcggagaaccgccttctgctgcaacggcgagaagtct

SEQ ID NO: 7959 - DNA, 3006 bp, synthetic construct
  source 1..3006: mol_type = other DNA
atggccttaccagtgaccgccttgctcctgccgctggccttgctgctccacgccgccaggccggaagtgcagctggttgaatctggcggaggactggttcagcctggcggatctctgagactgtcttgtgccgccagcggcttcagcttcagcgacttttggatgagctgggtccgacaggcccctggcaaaggacttgaatgggtcgccacaatcagccaggccggcagcgagaaggactacgtggactctgtgaagggcagattcaccatcagccgggacaacgccaagaagtccctgtacctccagatgaacagcctgagagccgaggacaccgccgtgtactattgtgcctctggcgtgtacagcttcgactacagaggccagggcaccctggtcacagtctcttctggtaccggcggaggcggatctggcggcggaggtagcggtggcggaggatctgaattcgacgagatcgtgctgacacagagccctggcaccctgagcctgtctctgggagagagagccacactgagctgtcgggccagccagtctatcagcagcagcttcctggcctggtatcagcagaagcccggccaggcccctaagctgctgatctacgccgccagcacaagagccaccggcatccccgatagattcagcggctctggcagcggcaccgacttcaccctgaccatcagcagactggaacccgaggacttcgccgtgtactactgccagcagtacggcagaagcctgagcttcggcggaggcaccaaggtggaagtgaagctcgagatccagaaccctgatcctgccgtgtaccagctgcgggatagcaagagcagcgacaagagcgtgtgtctgttcaccgacttcgacagccagaccaacgtgtcccagagcaaggactccgacgtgtacatcaccgataagtgcgtgctggacatgcggagcatggacttcaagagcaactccgccgtggcctggtccaacaagtccgatttcgcctgcgccaacgccttcaacaacagcattatccccgaggacacattcttcccaagccccgagagcagcgactccaccgaccacgtgaagcccaaagagacagagaacaccaagcagcccagcaagagctgccacaagcccaaggccatcgtgcacaccgagaaagtgaacatgatgagcctgaccgtgctgggcctgcggatgctgttcgccaaaaccgtggccgtgaacttcctgctgaccgccaagctgttcttcctccgcgccaagagaagcggatctggcgtgaagcagaccctgaatttcgacctgctgaagctggctggcgacgtggaatccaacccaggccctactagtatggactggatttggcgcatccttttccttgtcggcgctgctaccggcgcgcattccgggccccagctccagctgcaagagtctggacctggcctggtcaagcctagcgagacactgagcctgacctgtaccgtgtccggcgatagcatcagcagcggcgattactactggggctggatcagacagcctcctggcaaaggactggaatggatcggccacatctactacagcggcgtgacctactacaaccccagcctgaagtccagagtgaccatcagcgtggacaccagccggaaccagttctccctgaagctgtctagcgtgacagccgccgataccgccgtgtactactgcaccagagaggacagcagcaactggcggagtagaggccagggaacactggtcacagttagctctggatccggcggaggcggaagtggaggcggaggatctggcggcggaggctctttcgaacaggtgcaactccagcagtctggccccggactcgtgaagcctagccagacactgagcctgacctgcgccatcagcggcgatagcgtgtccggcaatagcgccacctggaactggatcagacagagcccatctcggggcctggaatggctgggccggacctactaccgcagcaagtggaaccacgactacgccgagagcgtgaagtcccggatcaccatcaaccccgacaccagcaagaaccagttctccttgcaactgaacagcgtgacccccgaggacacagccgtgtattattgcgccagaggcgacagcagctcttggtacgccttcgactattggggccagggcaccctcgtgaccgtgtctagtacgcgtgaggacctgaagaacgtgttcccacctgaggtggccgtgttcgagcctagcgaggccgagatcagccacacccagaaagccaccctcgtgtgcctggctaccggcttctaccccgaccatgtggaactgtcttggtgggtcaacggcaaagaggtgcacagcggcgtgtgtaccgacccccagccactgaaagaacagcccgccctgaacgacagccggtactgcctgagcagcagactgagagtgtccgccaccttctggcagaacccccggaaccacttcagatgccaggtgcagttctacggcctgagcgagaacgacgagtggacccaggacagagccaagcccgtgacccagatcgtgtctgccgaagcctggggcagagccgatgatgtgattaagatccactggcaggaaaagaagtccaacaccatcctgggcagccaggaaggcaacaccatgaagaccaacgacacctacatgaagttcagctggctgaccgtgcccgagaagtccctggacaaagaacacagatgcatcgtgcggcacgaaaacaacaagaacggcgtggaccaggaaatcatcttcccacccatcaagaccgatgtgattacaatggaccccaaggacaactgctccaaggacgccaacgataccctgctgctccagctgaccaacaccagcgcctactacatgtacttgttgctgctgctgaagtccgtggtgtacttcgccatcatcacatgctgcctgctgcggagaaccgccttctgctgcaacggcgagaagtct

SEQ ID NO: 7960 - DNA, 3003 bp, synthetic construct
  source 1..3003: mol_type = other DNA
atggccttaccagtgaccgccttgctcctgccgctggccttgctgctccacgccgccaggccggaagtgcagctggttgaatctggcggaggactggttcagcctggcggatctctgagactgtcttgtgccgccagcggcttcagcttcagcgacttttggatgagctgggtccgacaggcccctggcaaaggacttgaatgggtcgccacaatcagccaggccggcagcgagaaggactacgtggactctgtgaagggcagattcaccatcagccgggacaacgccaagaagtccctgtacctccagatgaacagcctgagagccgaggacaccgccgtgtactattgtgcctctggcgtgtacagcttcgactacagaggccagggcaccctggtcacagtctcttctggtaccggcggaggcggatctggcggcggaggtagcggtggcggaggatctgaattcgaccagagcgtcgtgacacagcctcctagcgtgtcagtggcccctggcaagaccgccagaatcacctgtggccggaacaacatcggcagcaagagcgtgcactggtatcagcagaagcccggccaggctcctgtgctggtggtgtacgacgacagcgacagacccagcggcatccccgagagattcagcggcagcaactccggcaataccgccaccctgaccatcagcagagtggaagccggcgacgaggccgactactactgccaagtgtgggacagcagcagcgatcacgtggtgtttggcggaggcaccaagctgacagtgctgggtctcgagatccagaaccctgatcctgccgtgtaccagctgcgggatagcaagagcagcgacaagagcgtgtgtctgttcaccgacttcgacagccagaccaacgtgtcccagagcaaggactccgacgtgtacatcaccgataagtgcgtgctggacatgcggagcatggacttcaagagcaactccgccgtggcctggtccaacaagtccgatttcgcctgcgccaacgccttcaacaacagcattatccccgaggacacattcttcccaagccccgagagcagcgactccaccgaccacgtgaagcccaaagagacagagaacaccaagcagcccagcaagagctgccacaagcccaaggccatcgtgcacaccgagaaagtgaacatgatgagcctgaccgtgctgggcctgcggatgctgttcgccaaaaccgtggccgtgaacttcctgctgaccgccaagctgttcttcctccgcgccaagagaagcggatctggcgtgaagcagaccctgaatttcgacctgctgaagctggctggcgacgtggaatccaacccaggccctactagtatggactggatttggcgcatccttttccttgtcggcgctgctaccggcgcgcattccgggccccagctccagctgcaagagtctggacctggcctggtcaagcctagcgagacactgagcctgacctgtaccgtgtccggcgatagcatcagcagcggcgattactactggggctggatcagacagcctcctggcaaaggactggaatggatcggccacatctactacagcggcgtgacctactacaaccccagcctgaagtccagagtgaccatcagcgtggacaccagccggaaccagttctccctgaagctgtctagcgtgacagccgccgataccgccgtgtactactgcaccagagaggacagcagcaactggcggagtagaggccagggaacactggtcacagttagctctggatccggcggaggcggaagtggaggcggaggatctggcggcggaggctctttcgaagtgcaactggtgcagtctggcggaggggtcatgcggcctggcggatctctgagactgtcttgtgccgccagcggcttcaccttcgacgactacggcatgagctgggtgcgccaggcccctggaaaaggcctggaatgggtgtccggcatcaactggaatggcggcagcaccggctacgccgattctgtgcggggcagattcaccatcagccgggacaacgccaagaacagcctgtacctgcagatgaactccctgcgggccgaggacaccgccctgtactattgcgccagagagcggggctacggctaccacgaccctcacgattattggggccagggcacccttgttaccgtgtcctctacgcgtgaggacctgaagaacgtgttcccacctgaggtggccgtgttcgagcctagcgaggccgagatcagccacacccagaaagccaccctcgtgtgcctggctaccggcttctaccccgaccatgtggaactgtcttggtgggtcaacggcaaagaggtgcacagcggcgtgtgtaccgacccccagccactgaaagaacagcccgccctgaacgacagccggtactgcctgagcagcagactgagagtgtccgccaccttctggcagaacccccggaaccacttcagatgccaggtgcagttctacggcctgagcgagaacgacgagtggacccaggacagagccaagcccgtgacccagatcgtgtctgccgaagcctggggcagagccgatgatgtgattaagatccactggcaggaaaagaagtccaacaccatcctgggcagccaggaaggcaacaccatgaagaccaacgacacctacatgaagttcagctggctgaccgtgcccgagaagtccctggacaaagaacacagatgcatcgtgcggcacgaaaacaacaagaacggcgtggaccaggaaatcatcttcccacccatcaagaccgatgtgattacaatggaccccaaggacaactgctccaaggacgccaacgataccctgctgctccagctgaccaacaccagcgcctactacatgtacttgttgctgctgctgaagtccgtggtgtacttcgccatcatcacatgctgcctgctgcggagaaccgccttctgctgcaacggcgagaagtct

SEQ ID NO: 7961 - DNA, 3042 bp, synthetic construct
  source 1..3042: mol_type = other DNA
atggccttaccagtgaccgccttgctcctgccgctggccttgctgctccacgccgccaggccggaagtgcagctggttgaatctggcggaggactggttcagcctggcggatctctgagactgtcttgtgccgccagcggcttcagcttcagcgacttttggatgagctgggtccgacaggcccctggcaaaggacttgaatgggtcgccacaatcagccaggccggcagcgagaaggactacgtggactctgtgaagggcagattcaccatcagccgggacaacgccaagaagtccctgtacctccagatgaacagcctgagagccgaggacaccgccgtgtactattgtgcctctggcgtgtacagcttcgactacagaggccagggcaccctggtcacagtctcttctggtaccggcggaggcggatctggcggcggaggtagcggtggcggaggatctgaattcgaacagaaactcatcagtgaagaagacctggaattccaggctgtcgtgacacagcctcctagcgcctctggcacaccaggccagagagtgaccatctcctgtagcggcagcagcagcaacatcggcagcaacaccgtgaactggtatcagcaggtgcccggcaccgctcccaagctgctgatctacagcaacaaccagcggcccagcggcgtgcccgatagattttctggcagcaagagcggcaccagcgccagcctggctatctctggactccagtccgaggacgaggccgactactattgcgccgcctgggacgatagcctgaacggctgggtgttcggcggaggcaccaagctgacagtgctgctcgagatccagaaccctgatcctgccgtgtaccagctgcgggatagcaagagcagcgacaagagcgtgtgtctgttcaccgacttcgacagccagaccaacgtgtcccagagcaaggactccgacgtgtacatcaccgataagtgcgtgctggacatgcggagcatggacttcaagagcaactccgccgtggcctggtccaacaagtccgatttcgcctgcgccaacgccttcaacaacagcattatccccgaggacacattcttcccaagccccgagagcagcgactccaccgaccacgtgaagcccaaagagacagagaacaccaagcagcccagcaagagctgccacaagcccaaggccatcgtgcacaccgagaaagtgaacatgatgagcctgaccgtgctgggcctgcggatgctgttcgccaaaaccgtggccgtgaacttcctgctgaccgccaagctgttcttcctccgcgccaagagaagcggatctggcgtgaagcagaccctgaatttcgacctgctgaagctggctggcgacgtggaatccaacccaggccctactagtatggactggatttggcgcatccttttccttgtcggcgctgctaccggcgcgcattccgggccccagctccagctgcaagagtctggacctggcctggtcaagcctagcgagacactgagcctgacctgtaccgtgtccggcgatagcatcagcagcggcgattactactggggctggatcagacagcctcctggcaaaggactggaatggatcggccacatctactacagcggcgtgacctactacaaccccagcctgaagtccagagtgaccatcagcgtggacaccagccggaaccagttctccctgaagctgtctagcgtgacagccgccgataccgccgtgtactactgcaccagagaggacagcagcaactggcggagtagaggccagggaacactggtcacagttagctctggatccggcggaggcggaagtggaggcggaggatctggcggcggaggctctttcgaacagatgcaactggtgcagagcggagccgaagtgaaagagcctggcgagagcctgcggatctcctgcaagggcagcggctacagcttcaccaatttctggatctcttgggtgcgccagatgcccggcaagggcctggaatggatgggcagagtggaccccggctactcctacagcacctacagccctagcttccagggccacgtgaccatcagcgccgacaagagcaccagcaccgcctacctccagtggaacagcctgaaggccagcgacaccgccatgtactactgcgccagagtgcagtacagcggctattacgattggttcgacccctggggccagggcacactcgtgacagtgtcaagcacgcgtgaggacctgaagaacgtgttcccacctgaggtggccgtgttcgagcctagcgaggccgagatcagccacacccagaaagccaccctcgtgtgcctggctaccggcttctaccccgaccatgtggaactgtcttggtgggtcaacggcaaagaggtgcacagcggcgtgtgtaccgacccccagccactgaaagaacagcccgccctgaacgacagccggtactgcctgagcagcagactgagagtgtccgccaccttctggcagaacccccggaaccacttcagatgccaggtgcagttctacggcctgagcgagaacgacgagtggacccaggacagagccaagcccgtgacccagatcgtgtctgccgaagcctggggcagagccgatgatgtgattaagatccactggcaggaaaagaagtccaacaccatcctgggcagccaggaaggcaacaccatgaagaccaacgacacctacatgaagttcagctggctgaccgtgcccgagaagtccctggacaaagaacacagatgcatcgtgcggcacgaaaacaacaagaacggcgtggaccaggaaatcatcttcccacccatcaagaccgatgtgattacaatggaccccaaggacaactgctccaaggacgccaacgataccctgctgctccagctgaccaacaccagcgcctactacatgtacttgttgctgctgctgaagtccgtggtgtacttcgccatcatcacatgctgcctgctgcggagaaccgccttctgctgcaacggcgagaagtct

SEQ ID NO: 7962 - DNA, 3024 bp, synthetic construct
  source 1..3024: mol_type = other DNA
atggccttaccagtgaccgccttgctcctgccgctggccttgctgctccacgccgccaggccggaagtgcagctggttgaatctggcggaggactggttcagcctggcggatctctgagactgtcttgtgccgccagcggcttcagcttcagcgacttttggatgagctgggtccgacaggcccctggcaaaggacttgaatgggtcgccacaatcagccaggccggcagcgagaaggactacgtggactctgtgaagggcagattcaccatcagccgggacaacgccaagaagtccctgtacctccagatgaacagcctgagagccgaggacaccgccgtgtactattgtgcctctggcgtgtacagcttcgactacagaggccagggcaccctggtcacagtctcttctggtaccggcggaggcggatctggcggcggaggtagcggtggcggaggatctgaattcgaacagaaactcatcagtgaagaagacctggaattcgacatccagatgacccagagccccagcacactgagcgccagcgtgggcgacagagtgaccatcacctgtcgggccagccagaacatcaacaagtggctggcctggtatcagcagaggcccggaaaagccccccagctgctgatctacaaggccagcagcctggaaagcggcgtgcccagcagattttctggcagcggctctggcaccgagtacaccctgaccatcagctccctccagcccgacgacttcgccacctactactgccagcagtacaacagctacgccaccttcggccagggcaccaaggtggaaatcaagagactcgagatccagaaccctgatcctgccgtgtaccagctgcgggatagcaagagcagcgacaagagcgtgtgtctgttcaccgacttcgacagccagaccaacgtgtcccagagcaaggactccgacgtgtacatcaccgataagtgcgtgctggacatgcggagcatggacttcaagagcaactccgccgtggcctggtccaacaagtccgatttcgcctgcgccaacgccttcaacaacagcattatccccgaggacacattcttcccaagccccgagagcagcgactccaccgaccacgtgaagcccaaagagacagagaacaccaagcagcccagcaagagctgccacaagcccaaggccatcgtgcacaccgagaaagtgaacatgatgagcctgaccgtgctgggcctgcggatgctgttcgccaaaaccgtggccgtgaacttcctgctgaccgccaagctgttcttcctccgcgccaagagaagcggatctggcgtgaagcagaccctgaatttcgacctgctgaagctggctggcgacgtggaatccaacccaggccctactagtatggactggatttggcgcatccttttccttgtcggcgctgctaccggcgcgcattccgggccccagctccagctgcaagagtctggacctggcctggtcaagcctagcgagacactgagcctgacctgtaccgtgtccggcgatagcatcagcagcggcgattactactggggctggatcagacagcctcctggcaaaggactggaatggatcggccacatctactacagcggcgtgacctactacaaccccagcctgaagtccagagtgaccatcagcgtggacaccagccggaaccagttctccctgaagctgtctagcgtgacagccgccgataccgccgtgtactactgcaccagagaggacagcagcaactggcggagtagaggccagggaacactggtcacagttagctctggatccggcggaggcggaagtggaggcggaggatctggcggcggaggctctttcgaacaggtgcagctggtgcagtctggggccgaagtgaagaagcctggcgagagcctgaagatcagctgcaagggctccggctacaacttctctaacaagtggatcggctgggtgcgccagctgcctggcagaggactggaatggatcgccatcatctaccccggctacagcgacatcacctacagccccagcttccagggccgcgtgacaatcagcgccgacaccagcatcaacaccgcctacctgcactggcacagcctgaaggccagcgacaccgccatgtactactgcgtgcggcatacagccctggctggcttcgattattggggcctgggcaccctcgtgaccgtgtctagtacgcgtgaggacctgaagaacgtgttcccacctgaggtggccgtgttcgagcctagcgaggccgagatcagccacacccagaaagccaccctcgtgtgcctggctaccggcttctaccccgaccatgtggaactgtcttggtgggtcaacggcaaagaggtgcacagcggcgtgtgtaccgacccccagccactgaaagaacagcccgccctgaacgacagccggtactgcctgagcagcagactgagagtgtccgccaccttctggcagaacccccggaaccacttcagatgccaggtgcagttctacggcctgagcgagaacgacgagtggacccaggacagagccaagcccgtgacccagatcgtgtctgccgaagcctggggcagagccgatgatgtgattaagatccactggcaggaaaagaagtccaacaccatcctgggcagccaggaaggcaacaccatgaagaccaacgacacctacatgaagttcagctggctgaccgtgcccgagaagtccctggacaaagaacacagatgcatcgtgcggcacgaaaacaacaagaacggcgtggaccaggaaatcatcttcccacccatcaagaccgatgtgattacaatggaccccaaggacaactgctccaaggacgccaacgataccctgctgctccagctgaccaacaccagcgcctactacatgtacttgttgctgctgctgaagtccgtggtgtacttcgccatcatcacatgctgcctgctgcggagaaccgccttctgctgcaacggcgagaagtct

SEQ ID NO: 7963 - DNA, 3000 bp, synthetic construct
  source 1..3000: mol_type = other DNA
atggccttaccagtgaccgccttgctcctgccgctggccttgctgctccacgccgccaggccggaagtgcagctggttgaatctggcggaggactggttcagcctggcggatctctgagactgtcttgtgccgccagcggcttcagcttcagcgacttttggatgagctgggtccgacaggcccctggcaaaggacttgaatgggtcgccacaatcagccaggccggcagcgagaaggactacgtggactctgtgaagggcagattcaccatcagccgggacaacgccaagaagtccctgtacctccagatgaacagcctgagagccgaggacaccgccgtgtactattgtgcctctggcgtgtacagcttcgactacagaggccagggcaccctggtcacagtctcttctggtaccggcggaggcggatctggcggcggaggtagcggtggcggaggatctgaattcgacatcgtgctgacacagagccctgcttctctggccgtgtctctgggacagagagccaccatcagctgtagagccagcgagagcgtggacaactacggcaacaccttcatgcactggtatcagcagaagcccggccagcctcctaagctgctgatctacagagccagcaacctggaaagcggcatccccgccagattttctggcagcggcagcagaaccgacttcaccctgaccatcaatcccgtggaagccgacgacgtggcaacctactactgccagcagagcaacgaggaccctcctacatttggagccggcaccaagctggaactgaaactcgagatccagaaccctgatcctgccgtgtaccagctgcgggatagcaagagcagcgacaagagcgtgtgtctgttcaccgacttcgacagccagaccaacgtgtcccagagcaaggactccgacgtgtacatcaccgataagtgcgtgctggacatgcggagcatggacttcaagagcaactccgccgtggcctggtccaacaagtccgatttcgcctgcgccaacgccttcaacaacagcattatccccgaggacacattcttcccaagccccgagagcagcgactccaccgaccacgtgaagcccaaagagacagagaacaccaagcagcccagcaagagctgccacaagcccaaggccatcgtgcacaccgagaaagtgaacatgatgagcctgaccgtgctgggcctgcggatgctgttcgccaaaaccgtggccgtgaacttcctgctgaccgccaagctgttcttcctccgcgccaagagaagcggatctggcgtgaagcagaccctgaatttcgacctgctgaagctggctggcgacgtggaatccaacccaggccctactagtatggactggatttggcgcatccttttccttgtcggcgctgctaccggcgcgcattccgggccccagctccagctgcaagagtctggacctggcctggtcaagcctagcgagacactgagcctgacctgtaccgtgtccggcgatagcatcagcagcggcgattactactggggctggatcagacagcctcctggcaaaggactggaatggatcggccacatctactacagcggcgtgacctactacaaccccagcctgaagtccagagtgaccatcagcgtggacaccagccggaaccagttctccctgaagctgtctagcgtgacagccgccgataccgccgtgtactactgcaccagagaggacagcagcaactggcggagtagaggccagggaacactggtcacagttagctctggatccggcggaggcggaagtggaggcggaggatctggcggcggaggctctttcgaacagattcagctggtgcagtctggccccgagctgaagaaacctggcgagacagtgaagatcagctgcaaggccagcggctacatcttcaccaattacggcatgaactgggtcaagcaggcccctggcaagagcttcaagtggatgggctggatcaacacctacaccggcgagagcacatacagcgccgacttcaagggcagattcgccttcagcctggaaaccagcgccagcacagcctacctgcacatcaacgacctgaagaacgaggacaccgccacctacttttgcgccagaagcggcggctacgaccctatggattattggggccagggcaccagcgtgaccgtttcttctacgcgtgaggacctgaagaacgtgttcccacctgaggtggccgtgttcgagcctagcgaggccgagatcagccacacccagaaagccaccctcgtgtgcctggctaccggcttctaccccgaccatgtggaactgtcttggtgggtcaacggcaaagaggtgcacagcggcgtgtgtaccgacccccagccactgaaagaacagcccgccctgaacgacagccggtactgcctgagcagcagactgagagtgtccgccaccttctggcagaacccccggaaccacttcagatgccaggtgcagttctacggcctgagcgagaacgacgagtggacccaggacagagccaagcccgtgacccagatcgtgtctgccgaagcctggggcagagccgatgatgtgattaagatccactggcaggaaaagaagtccaacaccatcctgggcagccaggaaggcaacaccatgaagaccaacgacacctacatgaagttcagctggctgaccgtgcccgagaagtccctggacaaagaacacagatgcatcgtgcggcacgaaaacaacaagaacggcgtggaccaggaaatcatcttcccacccatcaagaccgatgtgattacaatggaccccaaggacaactgctccaaggacgccaacgataccctgctgctccagctgaccaacaccagcgcctactacatgtacttgttgctgctgctgaagtccgtggtgtacttcgccatcatcacatgctgcctgctgcggagaaccgccttctgctgcaacggcgagaagtct

SEQ ID NO: 7964 - DNA, 2997 bp, synthetic construct
  source 1..2997: mol_type = other DNA
atggccttaccagtgaccgccttgctcctgccgctggccttgctgctccacgccgccaggccggaagtgcagctggttgaatctggcggaggactggttcagcctggcggatctctgagactgtcttgtgccgccagcggcttcagcttcagcgacttttggatgagctgggtccgacaggcccctggcaaaggacttgaatgggtcgccacaatcagccaggccggcagcgagaaggactacgtggactctgtgaagggcagattcaccatcagccgggacaacgccaagaagtccctgtacctccagatgaacagcctgagagccgaggacaccgccgtgtactattgtgcctctggcgtgtacagcttcgactacagaggccagggcaccctggtcacagtctcttctggtaccggcggaggcggatctggcggcggaggtagcggtggcggaggatctgaattcgacgagatcgtgctgacacagagccctggcaccctgagcctgtctccaggcgaaagagccacactgagctgtcgggccagccagagcgtgtccaatacctacctggcctggtatcaccagaggcccggacaggctccccggctgctgatctatggcgcttctagcagagccaccggcatccccgatagattcagcggctctggcagcggcaccgacttcgccctgacaatcagctccctggaacccgaggacttcgccgtgtactactgccagcagtacagcaactcctggaccttcggccagggcaccaaggtggaaatcaagagactcgagatccagaaccctgatcctgccgtgtaccagctgcgggatagcaagagcagcgacaagagcgtgtgtctgttcaccgacttcgacagccagaccaacgtgtcccagagcaaggactccgacgtgtacatcaccgataagtgcgtgctggacatgcggagcatggacttcaagagcaactccgccgtggcctggtccaacaagtccgatttcgcctgcgccaacgccttcaacaacagcattatccccgaggacacattcttcccaagccccgagagcagcgactccaccgaccacgtgaagcccaaagagacagagaacaccaagcagcccagcaagagctgccacaagcccaaggccatcgtgcacaccgagaaagtgaacatgatgagcctgaccgtgctgggcctgcggatgctgttcgccaaaaccgtggccgtgaacttcctgctgaccgccaagctgttcttcctccgcgccaagagaagcggatctggcgtgaagcagaccctgaatttcgacctgctgaagctggctggcgacgtggaatccaacccaggccctactagtatggactggatttggcgcatccttttccttgtcggcgctgctaccggcgcgcattccgggccccagctccagctgcaagagtctggacctggcctggtcaagcctagcgagacactgagcctgacctgtaccgtgtccggcgatagcatcagcagcggcgattactactggggctggatcagacagcctcctggcaaaggactggaatggatcggccacatctactacagcggcgtgacctactacaaccccagcctgaagtccagagtgaccatcagcgtggacaccagccggaaccagttctccctgaagctgtctagcgtgacagccgccgataccgccgtgtactactgcaccagagaggacagcagcaactggcggagtagaggccagggaacactggtcacagttagctctggatccggcggaggcggaagtggaggcggaggatctggcggcggaggctctttcgaacaggtgcaactggtggaatctggcgggggagtggtgcagcctggcagaagcctgagactgtcttgtgccgccagcggcttcaccttcagcagctacgacatgcactgggtgcgccaggcccctggcaaaggactggaatgggtggccgtgatctcctacgacggcaccaacgagtattacgccgacagcgtgaagggccggttcaccatctccagagacaccagcaagaacaccctgtacctccagatgaacagcctgcgggccgaggacacagccgtgtattattgcgccagagagcggtacttcgactggtccttcgactactggggccagggaaccctggtgtccgtgtctagtacgcgtgaggacctgaagaacgtgttcccacctgaggtggccgtgttcgagcctagcgaggccgagatcagccacacccagaaagccaccctcgtgtgcctggctaccggcttctaccccgaccatgtggaactgtcttggtgggtcaacggcaaagaggtgcacagcggcgtgtgtaccgacccccagccactgaaagaacagcccgccctgaacgacagccggtactgcctgagcagcagactgagagtgtccgccaccttctggcagaacccccggaaccacttcagatgccaggtgcagttctacggcctgagcgagaacgacgagtggacccaggacagagccaagcccgtgacccagatcgtgtctgccgaagcctggggcagagccgatgatgtgattaagatccactggcaggaaaagaagtccaacaccatcctgggcagccaggaaggcaacaccatgaagaccaacgacacctacatgaagttcagctggctgaccgtgcccgagaagtccctggacaaagaacacagatgcatcgtgcggcacgaaaacaacaagaacggcgtggaccaggaaatcatcttcccacccatcaagaccgatgtgattacaatggaccccaaggacaactgctccaaggacgccaacgataccctgctgctccagctgaccaacaccagcgcctactacatgtacttgttgctgctgctgaagtccgtggtgtacttcgccatcatcacatgctgcctgctgcggagaaccgccttctgctgcaacggcgagaagtct

SEQ ID NO: 7965 - DNA, 2994 bp, synthetic construct
  source 1..2994: mol_type = other DNA
atggccttaccagtgaccgccttgctcctgccgctggccttgctgctccacgccgccaggccggaagtgcagctggttgaatctggcggaggactggttcagcctggcggatctctgagactgtcttgtgccgccagcggcttcagcttcagcgacttttggatgagctgggtccgacaggcccctggcaaaggacttgaatgggtcgccacaatcagccaggccggcagcgagaaggactacgtggactctgtgaagggcagattcaccatcagccgggacaacgccaagaagtccctgtacctccagatgaacagcctgagagccgaggacaccgccgtgtactattgtgcctctggcgtgtacagcttcgactacagaggccagggcaccctggtcacagtctcttctggtaccggcggaggcggatctggcggcggaggtagcggtggcggaggatctgaattcgacgagctgacacaggaccctgctgtgtctgttgccctgggccagacagtgcggattacctgtcaaggcgacagcctgagaagcaactacgccaactggtatcagcagaagcccggacaggctcccgtgctggttatctacggccagaacaacagacccagcggcatccccgatagattcagcggctctagctctggcaataccgccagcctgacaatcactggcgctcaggctgccgatgaggccgactactactgcgatagcagagtgtccaccggcaatcacgtggtgtttggcggcggaacaaagctgacagtgctcggacaactcgagatccagaaccctgatcctgccgtgtaccagctgcgggatagcaagagcagcgacaagagcgtgtgtctgttcaccgacttcgacagccagaccaacgtgtcccagagcaaggactccgacgtgtacatcaccgataagtgcgtgctggacatgcggagcatggacttcaagagcaactccgccgtggcctggtccaacaagtccgatttcgcctgcgccaacgccttcaacaacagcattatccccgaggacacattcttcccaagccccgagagcagcgactccaccgaccacgtgaagcccaaagagacagagaacaccaagcagcccagcaagagctgccacaagcccaaggccatcgtgcacaccgagaaagtgaacatgatgagcctgaccgtgctgggcctgcggatgctgttcgccaaaaccgtggccgtgaacttcctgctgaccgccaagctgttcttcctccgcgccaagagaagcggatctggcgtgaagcagaccctgaatttcgacctgctgaagctggctggcgacgtggaatccaacccaggccctactagtatggactggatttggcgcatccttttccttgtcggcgctgctaccggcgcgcattccgggccccagctccagctgcaagagtctggacctggcctggtcaagcctagcgagacactgagcctgacctgtaccgtgtccggcgatagcatcagcagcggcgattactactggggctggatcagacagcctcctggcaaaggactggaatggatcggccacatctactacagcggcgtgacctactacaaccccagcctgaagtccagagtgaccatcagcgtggacaccagccggaaccagttctccctgaagctgtctagcgtgacagccgccgataccgccgtgtactactgcaccagagaggacagcagcaactggcggagtagaggccagggaacactggtcacagttagctctggatccggcggaggcggaagtggaggcggaggatctggcggcggaggctctttcgaagaagttcagctggtgcagagcggagccgaagtgaagaaacctggggcctctgtgaaggtgtcctgcaaggcttccggctacacctttaccagctacgccatgcactgggtccgacaggcacctggacaacggcttgaatggatgggctggatcaacgccggcaacggcaacaccaagtacagccagaaattccagggccgcgtgaccatcaccagagatacaagcgccagcaccgcctacatggaactgtctagcctgagatccgaggacaccgccgtgtactactgtgccagagacatcagctacggcagcttcgactattggggccagggcacactggtcaccgttagctctacgcgtgaggacctgaagaacgtgttcccacctgaggtggccgtgttcgagcctagcgaggccgagatcagccacacccagaaagccaccctcgtgtgcctggctaccggcttctaccccgaccatgtggaactgtcttggtgggtcaacggcaaagaggtgcacagcggcgtgtgtaccgacccccagccactgaaagaacagcccgccctgaacgacagccggtactgcctgagcagcagactgagagtgtccgccaccttctggcagaacccccggaaccacttcagatgccaggtgcagttctacggcctgagcgagaacgacgagtggacccaggacagagccaagcccgtgacccagatcgtgtctgccgaagcctggggcagagccgatgatgtgattaagatccactggcaggaaaagaagtccaacaccatcctgggcagccaggaaggcaacaccatgaagaccaacgacacctacatgaagttcagctggctgaccgtgcccgagaagtccctggacaaagaacacagatgcatcgtgcggcacgaaaacaacaagaacggcgtggaccaggaaatcatcttcccacccatcaagaccgatgtgattacaatggaccccaaggacaactgctccaaggacgccaacgataccctgctgctccagctgaccaacaccagcgcctactacatgtacttgttgctgctgctgaagtccgtggtgtacttcgccatcatcacatgctgcctgctgcggagaaccgccttctgctgcaacggcgagaagtct

SEQ ID NO: 7966 - DNA, 3000 bp, synthetic construct
  source 1..3000: mol_type = other DNA
atggccttaccagtgaccgccttgctcctgccgctggccttgctgctccacgccgccaggccggaagtgcagctggttgaatctggcggaggactggttcagcctggcggatctctgagactgtcttgtgccgccagcggcttcagcttcagcgacttttggatgagctgggtccgacaggcccctggcaaaggacttgaatgggtcgccacaatcagccaggccggcagcgagaaggactacgtggactctgtgaagggcagattcaccatcagccgggacaacgccaagaagtccctgtacctccagatgaacagcctgagagccgaggacaccgccgtgtactattgtgcctctggcgtgtacagcttcgactacagaggccagggcaccctggtcacagtctcttctggtaccggcggaggcggatctggcggcggaggtagcggtggcggaggatctgaattcgacgacatcgtgctgacacagacaccagccacactgagcgtgacacctggcgattctgtgtccctgagctgtagagccagccagagcatcagcaacaacctgcactggtatcagcagaagtcccacgagagccccagactgctgattaagaacgccagccagtctatcagcggcatccccagcaagtttagcggctctggcagcggcaccgacttcaccctgagaatcaacagcgtggaaaccgaggacttcgggatgtacttctgccagcagagcaatagctggccctacacatttggctccggcaccaagctggaaatcaaactcgagatccagaaccctgatcctgccgtgtaccagctgcgggatagcaagagcagcgacaagagcgtgtgtctgttcaccgacttcgacagccagaccaacgtgtcccagagcaaggactccgacgtgtacatcaccgataagtgcgtgctggacatgcggagcatggacttcaagagcaactccgccgtggcctggtccaacaagtccgatttcgcctgcgccaacgccttcaacaacagcattatccccgaggacacattcttcccaagccccgagagcagcgactccaccgaccacgtgaagcccaaagagacagagaacaccaagcagcccagcaagagctgccacaagcccaaggccatcgtgcacaccgagaaagtgaacatgatgagcctgaccgtgctgggcctgcggatgctgttcgccaaaaccgtggccgtgaacttcctgctgaccgccaagctgttcttcctccgcgccaagagaagcggatctggcgtgaagcagaccctgaatttcgacctgctgaagctggctggcgacgtggaatccaacccaggccctactagtatggactggatttggcgcatccttttccttgtcggcgctgctaccggcgcgcattccgggccccagctccagctgcaagagtctggacctggcctggtcaagcctagcgagacactgagcctgacctgtaccgtgtccggcgatagcatcagcagcggcgattactactggggctggatcagacagcctcctggcaaaggactggaatggatcggccacatctactacagcggcgtgacctactacaaccccagcctgaagtccagagtgaccatcagcgtggacaccagccggaaccagttctccctgaagctgtctagcgtgacagccgccgataccgccgtgtactactgcaccagagaggacagcagcaactggcggagtagaggccagggaacactggtcacagttagctctggatccggcggaggcggaagtggaggcggaggatctggcggcggaggctctttcgaacaagtgaagctgcaacagagcggacccgagctggttaagccaggcgcttccgtgaagattagctgcaaggccagcggctacagcttcaccggctactacatgcactgggtcaagcagagccacggcaacatcctggactggatcggctacatctacccctacaacggcgtgtccagctacaaccagaagttcaagggcaaagccactctgaccgtggacaagagcagcagcaccgcctacatggaactgagaagcctgaccagcgaggacagcgccgtgtactattgtgccagagagcggggcctgtaccagctcagagcaatggattattggggccagggcaccagcgtgaccgtttcttctacgcgtgaggacctgaagaacgtgttcccacctgaggtggccgtgttcgagcctagcgaggccgagatcagccacacccagaaagccaccctcgtgtgcctggctaccggcttctaccccgaccatgtggaactgtcttggtgggtcaacggcaaagaggtgcacagcggcgtgtgtaccgacccccagccactgaaagaacagcccgccctgaacgacagccggtactgcctgagcagcagactgagagtgtccgccaccttctggcagaacccccggaaccacttcagatgccaggtgcagttctacggcctgagcgagaacgacgagtggacccaggacagagccaagcccgtgacccagatcgtgtctgccgaagcctggggcagagccgatgatgtgattaagatccactggcaggaaaagaagtccaacaccatcctgggcagccaggaaggcaacaccatgaagaccaacgacacctacatgaagttcagctggctgaccgtgcccgagaagtccctggacaaagaacacagatgcatcgtgcggcacgaaaacaacaagaacggcgtggaccaggaaatcatcttcccacccatcaagaccgatgtgattacaatggaccccaaggacaactgctccaaggacgccaacgataccctgctgctccagctgaccaacaccagcgcctactacatgtacttgttgctgctgctgaagtccgtggtgtacttcgccatcatcacatgctgcctgctgcggagaaccgccttctgctgcaacggcgagaagtct

SEQ ID NO: 7967 - DNA, 2973 bp, synthetic construct
  source 1..2973: mol_type = other DNA
atggccttaccagtgaccgccttgctcctgccgctggccttgctgctccacgccgccaggccggaagtgcagctggttgaatctggcggaggactggttcagcctggcggatctctgagactgtcttgtgccgccagcggcttcagcttcagcgacttttggatgagctgggtccgacaggcccctggcaaaggacttgaatgggtcgccacaatcagccaggccggcagcgagaaggactacgtggactctgtgaagggcagattcaccatcagccgggacaacgccaagaagtccctgtacctccagatgaacagcctgagagccgaggacaccgccgtgtactattgtgcctctggcgtgtacagcttcgactacagaggccagggcaccctggtcacagtctcttctggtaccggcggaggcggatctggcggcggaggtagcggtggcggaggatctgaattcgacgacatcgtgatgacacagacccctgccatcatgagcgcctctccaggccagaaagtgaccatcacatgtagcgccagcagcagcgtgaactacatgcactggtatcagcagaagctgggcagcagccccaagctgtggatctacgataccagcaaactggcccctggcgtgccagccagattttctggttctggcagcggcaccagctacagcctgacaatcagcagcatggaagccgaggatgccgccagctacttctgccatcagtggtctagctacccctacacctttggctccggcaccaagctggaaatcaaactcgagatccagaaccctgatcctgccgtgtaccagctgcgggatagcaagagcagcgacaagagcgtgtgtctgttcaccgacttcgacagccagaccaacgtgtcccagagcaaggactccgacgtgtacatcaccgataagtgcgtgctggacatgcggagcatggacttcaagagcaactccgccgtggcctggtccaacaagtccgatttcgcctgcgccaacgccttcaacaacagcattatccccgaggacacattcttcccaagccccgagagcagcgactccaccgaccacgtgaagcccaaagagacagagaacaccaagcagcccagcaagagctgccacaagcccaaggccatcgtgcacaccgagaaagtgaacatgatgagcctgaccgtgctgggcctgcggatgctgttcgccaaaaccgtggccgtgaacttcctgctgaccgccaagctgttcttcctccgcgccaagagaagcggatctggcgtgaagcagaccctgaatttcgacctgctgaagctggctggcgacgtggaatccaacccaggccctactagtatggactggatttggcgcatccttttccttgtcggcgctgctaccggcgcgcattccgggccccagctccagctgcaagagtctggacctggcctggtcaagcctagcgagacactgagcctgacctgtaccgtgtccggcgatagcatcagcagcggcgattactactggggctggatcagacagcctcctggcaaaggactggaatggatcggccacatctactacagcggcgtgacctactacaaccccagcctgaagtccagagtgaccatcagcgtggacaccagccggaaccagttctccctgaagctgtctagcgtgacagccgccgataccgccgtgtactactgcaccagagaggacagcagcaactggcggagtagaggccagggaacactggtcacagttagctctggatccggcggaggcggaagtggaggcggaggatctggcggcggaggctctttcgaagaagttcagctccaagagtctggccccgacctggtcaagcctagccaaagcctgagcctgacctgtaccgtgaccggctacagcatcacaagcggctatggatggcactggatcagacagttccccggcaacaaactggaatggatgggctacatccactacagcggcagcaccacctacaatcccagcctgaagtcccggatcagcatcagcagagacaccagcaagaaccagttcttcctgcaactgaacagcgtgaccaccgaggacaccgccacctactattgtgctcggagcctgagatattggggccagggcacaaccctgaccgtgtcatctacgcgtgaggacctgaagaacgtgttcccacctgaggtggccgtgttcgagcctagcgaggccgagatcagccacacccagaaagccaccctcgtgtgcctggctaccggcttctaccccgaccatgtggaactgtcttggtgggtcaacggcaaagaggtgcacagcggcgtgtgtaccgacccccagccactgaaagaacagcccgccctgaacgacagccggtactgcctgagcagcagactgagagtgtccgccaccttctggcagaacccccggaaccacttcagatgccaggtgcagttctacggcctgagcgagaacgacgagtggacccaggacagagccaagcccgtgacccagatcgtgtctgccgaagcctggggcagagccgatgatgtgattaagatccactggcaggaaaagaagtccaacaccatcctgggcagccaggaaggcaacaccatgaagaccaacgacacctacatgaagttcagctggctgaccgtgcccgagaagtccctggacaaagaacacagatgcatcgtgcggcacgaaaacaacaagaacggcgtggaccaggaaatcatcttcccacccatcaagaccgatgtgattacaatggaccccaaggacaactgctccaaggacgccaacgataccctgctgctccagctgaccaacaccagcgcctactacatgtacttgttgctgctgctgaagtccgtggtgtacttcgccatcatcacatgctgcctgctgcggagaaccgccttctgctgcaacggcgagaagtct

SEQ ID NO: 7968 - DNA, 2982 bp, synthetic construct
  source 1..2982: mol_type = other DNA
atggccttaccagtgaccgccttgctcctgccgctggccttgctgctccacgccgccaggccggaagtgcagctggttgaatctggcggaggactggttcagcctggcggatctctgagactgtcttgtgccgccagcggcttcagcttcagcgacttttggatgagctgggtccgacaggcccctggcaaaggacttgaatgggtcgccacaatcagccaggccggcagcgagaaggactacgtggactctgtgaagggcagattcaccatcagccgggacaacgccaagaagtccctgtacctccagatgaacagcctgagagccgaggacaccgccgtgtactattgtgcctctggcgtgtacagcttcgactacagaggccagggcaccctggtcacagtctcttctggtaccggcggaggcggatctggcggcggaggtagcggtggcggaggatctgaattcgacgacatccagatgacacagagccctagcagcctgtctgccagcgtgggagacagagtgaccatcacctgtagcgccaccagcagcatcagctacatgcactggtatcagcagaagcccggcaaggcccctaaaggctggatctacgataccagcaaactggcccacggcgtgcccagcagattttctggttctggcagcggcaccgacttcaccctgacaatatctagcctccagcctgaggacttcgccacctactactgccaccagagaagaagctaccccttcaccttcggccagggcaccaaggtggaaatcaaactcgagatccagaaccctgatcctgccgtgtaccagctgcgggatagcaagagcagcgacaagagcgtgtgtctgttcaccgacttcgacagccagaccaacgtgtcccagagcaaggactccgacgtgtacatcaccgataagtgcgtgctggacatgcggagcatggacttcaagagcaactccgccgtggcctggtccaacaagtccgatttcgcctgcgccaacgccttcaacaacagcattatccccgaggacacattcttcccaagccccgagagcagcgactccaccgaccacgtgaagcccaaagagacagagaacaccaagcagcccagcaagagctgccacaagcccaaggccatcgtgcacaccgagaaagtgaacatgatgagcctgaccgtgctgggcctgcggatgctgttcgccaaaaccgtggccgtgaacttcctgctgaccgccaagctgttcttcctccgcgccaagagaagcggatctggcgtgaagcagaccctgaatttcgacctgctgaagctggctggcgacgtggaatccaacccaggccctactagtatggactggatttggcgcatccttttccttgtcggcgctgctaccggcgcgcattccgggccccagctccagctgcaagagtctggacctggcctggtcaagcctagcgagacactgagcctgacctgtaccgtgtccggcgatagcatcagcagcggcgattactactggggctggatcagacagcctcctggcaaaggactggaatggatcggccacatctactacagcggcgtgacctactacaaccccagcctgaagtccagagtgaccatcagcgtggacaccagccggaaccagttctccctgaagctgtctagcgtgacagccgccgataccgccgtgtactactgcaccagagaggacagcagcaactggcggagtagaggccagggaacactggtcacagttagctctggatccggcggaggcggaagtggaggcggaggatctggcggcggaggctctttcgaagaagtgcaactggttcagagcggagccgaagtgaagaaacctggggcctctgtgaaggtgtcctgcaaggcttccggctacacctttaccaatttctggattcactgggtccgacaggctccaggccaaggactggaatggatcggagagatcgaccccagcgacagctacaccaactacaaccagaaattcaaaggccgggtcaccatcaccagagacaccagcacaagcaccgcctacctggaactgagcagcctgagaagcgaggacaccgccgtgtactactgcgccagggaaatcaccaccgtggattattggggccagggaaccctggtcaccgtgtcatctacgcgtgaggacctgaagaacgtgttcccacctgaggtggccgtgttcgagcctagcgaggccgagatcagccacacccagaaagccaccctcgtgtgcctggctaccggcttctaccccgaccatgtggaactgtcttggtgggtcaacggcaaagaggtgcacagcggcgtgtgtaccgacccccagccactgaaagaacagcccgccctgaacgacagccggtactgcctgagcagcagactgagagtgtccgccaccttctggcagaacccccggaaccacttcagatgccaggtgcagttctacggcctgagcgagaacgacgagtggacccaggacagagccaagcccgtgacccagatcgtgtctgccgaagcctggggcagagccgatgatgtgattaagatccactggcaggaaaagaagtccaacaccatcctgggcagccaggaaggcaacaccatgaagaccaacgacacctacatgaagttcagctggctgaccgtgcccgagaagtccctggacaaagaacacagatgcatcgtgcggcacgaaaacaacaagaacggcgtggaccaggaaatcatcttcccacccatcaagaccgatgtgattacaatggaccccaaggacaactgctccaaggacgccaacgataccctgctgctccagctgaccaacaccagcgcctactacatgtacttgttgctgctgctgaagtccgtggtgtacttcgccatcatcacatgctgcctgctgcggagaaccgccttctgctgcaacggcgagaagtct

SEQ ID NO: 7969 - DNA, 3003 bp, synthetic construct
  source 1..3003: mol_type = other DNA
atggccttaccagtgaccgccttgctcctgccgctggccttgctgctccacgccgccaggccggaagtgcagctggttgaatctggcggaggactggttcagcctggcggatctctgagactgtcttgtgccgccagcggcttcagcttcagcgacttttggatgagctgggtccgacaggcccctggcaaaggacttgaatgggtcgccacaatcagccaggccggcagcgagaaggactacgtggactctgtgaagggcagattcaccatcagccgggacaacgccaagaagtccctgtacctccagatgaacagcctgagagccgaggacaccgccgtgtactattgtgcctctggcgtgtacagcttcgactacagaggccagggcaccctggtcacagtctcttctggtaccggcggaggcggatctggcggcggaggtagcggtggcggaggatctgaattcgacgacatccagatgacacagagccctagcagcctgtctgccagcgtgggagacagagtgaccatcacatgcaaggccagccagggcttcaacaaatacgtggcctggtatcagcagaagcccggcaaggctcctaagctgctgatctactacaccagcacactccagcctggcgtgcccagcagattttctggctctggcagcggcagagactacaccctgacaatatccagcctccagccagaggacttcgccacctactactgtctccagtacggcaacctgctgtacgcctttggacagggcaccaaggtggaaatcaagagactcgagatccagaaccctgatcctgccgtgtaccagctgcgggatagcaagagcagcgacaagagcgtgtgtctgttcaccgacttcgacagccagaccaacgtgtcccagagcaaggactccgacgtgtacatcaccgataagtgcgtgctggacatgcggagcatggacttcaagagcaactccgccgtggcctggtccaacaagtccgatttcgcctgcgccaacgccttcaacaacagcattatccccgaggacacattcttcccaagccccgagagcagcgactccaccgaccacgtgaagcccaaagagacagagaacaccaagcagcccagcaagagctgccacaagcccaaggccatcgtgcacaccgagaaagtgaacatgatgagcctgaccgtgctgggcctgcggatgctgttcgccaaaaccgtggccgtgaacttcctgctgaccgccaagctgttcttcctccgcgccaagagaagcggatctggcgtgaagcagaccctgaatttcgacctgctgaagctggctggcgacgtggaatccaacccaggccctactagtatggactggatttggcgcatccttttccttgtcggcgctgctaccggcgcgcattccgggccccagctccagctgcaagagtctggacctggcctggtcaagcctagcgagacactgagcctgacctgtaccgtgtccggcgatagcatcagcagcggcgattactactggggctggatcagacagcctcctggcaaaggactggaatggatcggccacatctactacagcggcgtgacctactacaaccccagcctgaagtccagagtgaccatcagcgtggacaccagccggaaccagttctccctgaagctgtctagcgtgacagccgccgataccgccgtgtactactgcaccagagaggacagcagcaactggcggagtagaggccagggaacactggtcacagttagctctggatccggcggaggcggaagtggaggcggaggatctggcggcggaggctctttcgaagaagttcagcttgtgcagagcggagccgaagtgaagaaacctggggcctctgtgaaggtgtcctgcaaagccagcggctacacctttaccagctactggatcggctgggtccgacaggctcctggacaaggactggaatggatcggcgacatctatcccggcggaggctacaccaactacaacgagaagttcaagggccgcgtgacaatcaccagagacacctctacaagcaccgcctacctggaactgagcagcctgagaagcgaggacaccgccgtgtactactgcgccagactggatggcagcagctacagaggcgctatggattcttggggccagggcacactggtcaccgtttcttctacgcgtgaggacctgaagaacgtgttcccacctgaggtggccgtgttcgagcctagcgaggccgagatcagccacacccagaaagccaccctcgtgtgcctggctaccggcttctaccccgaccatgtggaactgtcttggtgggtcaacggcaaagaggtgcacagcggcgtgtgtaccgacccccagccactgaaagaacagcccgccctgaacgacagccggtactgcctgagcagcagactgagagtgtccgccaccttctggcagaacccccggaaccacttcagatgccaggtgcagttctacggcctgagcgagaacgacgagtggacccaggacagagccaagcccgtgacccagatcgtgtctgccgaagcctggggcagagccgatgatgtgattaagatccactggcaggaaaagaagtccaacaccatcctgggcagccaggaaggcaacaccatgaagaccaacgacacctacatgaagttcagctggctgaccgtgcccgagaagtccctggacaaagaacacagatgcatcgtgcggcacgaaaacaacaagaacggcgtggaccaggaaatcatcttcccacccatcaagaccgatgtgattacaatggaccccaaggacaactgctccaaggacgccaacgataccctgctgctccagctgaccaacaccagcgcctactacatgtacttgttgctgctgctgaagtccgtggtgtacttcgccatcatcacatgctgcctgctgcggagaaccgccttctgctgcaacggcgagaagtct

SEQ ID NO: 7970 - DNA, 2991 bp, synthetic construct
  source 1..2991: mol_type = other DNA
atggccttaccagtgaccgccttgctcctgccgctggccttgctgctccacgccgccaggccggaagtgcagctggttgaatctggcggaggactggttcagcctggcggatctctgagactgtcttgtgccgccagcggcttcagcttcagcgacttttggatgagctgggtccgacaggcccctggcaaaggacttgaatgggtcgccacaatcagccaggccggcagcgagaaggactacgtggactctgtgaagggcagattcaccatcagccgggacaacgccaagaagtccctgtacctccagatgaacagcctgagagccgaggacaccgccgtgtactattgtgcctctggcgtgtacagcttcgactacagaggccagggcaccctggtcacagtctcttctggtaccggcggaggcggatctggcggcggaggtagcggtggcggaggatctgaattcgacgacatccagatgacacagagccctagcagcctgtctgccagcgtgggagacagagtgaccatcacctgtagagccagccaggacatccggtactacctgaactggtatcagcagaagcccggcaaggcccctaagctgctgatctatgtggcctccagcctccagagcggagtgccttctagattttctggcagcggctccggcaccgagtttaccctgacagtgtctagcttgcagcccgaggacttcgccacctactactgcctgcaagtgtacagcacccctcggacctttggacagggcaccaaggtggaaatcaaactcgagatccagaaccctgatcctgccgtgtaccagctgcgggatagcaagagcagcgacaagagcgtgtgtctgttcaccgacttcgacagccagaccaacgtgtcccagagcaaggactccgacgtgtacatcaccgataagtgcgtgctggacatgcggagcatggacttcaagagcaactccgccgtggcctggtccaacaagtccgatttcgcctgcgccaacgccttcaacaacagcattatccccgaggacacattcttcccaagccccgagagcagcgactccaccgaccacgtgaagcccaaagagacagagaacaccaagcagcccagcaagagctgccacaagcccaaggccatcgtgcacaccgagaaagtgaacatgatgagcctgaccgtgctgggcctgcggatgctgttcgccaaaaccgtggccgtgaacttcctgctgaccgccaagctgttcttcctccgcgccaagagaagcggatctggcgtgaagcagaccctgaatttcgacctgctgaagctggctggcgacgtggaatccaacccaggccctactagtatggactggatttggcgcatccttttccttgtcggcgctgctaccggcgcgcattccgggccccagctccagctgcaagagtctggacctggcctggtcaagcctagcgagacactgagcctgacctgtaccgtgtccggcgatagcatcagcagcggcgattactactggggctggatcagacagcctcctggcaaaggactggaatggatcggccacatctactacagcggcgtgacctactacaaccccagcctgaagtccagagtgaccatcagcgtggacaccagccggaaccagttctccctgaagctgtctagcgtgacagccgccgataccgccgtgtactactgcaccagagaggacagcagcaactggcggagtagaggccagggaacactggtcacagttagctctggatccggcggaggcggaagtggaggcggaggatctggcggcggaggctctttcgaagaagtgcagcttgttgaatctggcggcggactggctaagcctggcggatctctgagactgtcttgtgccgccagcggcttccggttcaccttcaacaactactacatggactgggtccgacaggcccctggacaaggacttgaatgggtgtccagaatcagcagcagcggcgaccctacttggtacgccgattctgtgaagggcagattcaccatcagcagagagaacgccaagaacaccctgttcctccagatgaactccctgagagccgaggacaccgccgtgtactattgtgcctctctgaccaccggcagcgattcttggggacagggcgtgctggttaccgtgtcatctacgcgtgaggacctgaagaacgtgttcccacctgaggtggccgtgttcgagcctagcgaggccgagatcagccacacccagaaagccaccctcgtgtgcctggctaccggcttctaccccgaccatgtggaactgtcttggtgggtcaacggcaaagaggtgcacagcggcgtgtgtaccgacccccagccactgaaagaacagcccgccctgaacgacagccggtactgcctgagcagcagactgagagtgtccgccaccttctggcagaacccccggaaccacttcagatgccaggtgcagttctacggcctgagcgagaacgacgagtggacccaggacagagccaagcccgtgacccagatcgtgtctgccgaagcctggggcagagccgatgatgtgattaagatccactggcaggaaaagaagtccaacaccatcctgggcagccaggaaggcaacaccatgaagaccaacgacacctacatgaagttcagctggctgaccgtgcccgagaagtccctggacaaagaacacagatgcatcgtgcggcacgaaaacaacaagaacggcgtggaccaggaaatcatcttcccacccatcaagaccgatgtgattacaatggaccccaaggacaactgctccaaggacgccaacgataccctgctgctccagctgaccaacaccagcgcctactacatgtacttgttgctgctgctgaagtccgtggtgtacttcgccatcatcacatgctgcctgctgcggagaaccgccttctgctgcaacggcgagaagtct

SEQ ID NO: 7971 - DNA, 2991 bp, synthetic construct
  source 1..2991: mol_type = other DNA
atggccttaccagtgaccgccttgctcctgccgctggccttgctgctccacgccgccaggccggaagtgcagctggttgaatctggcggaggactggttcagcctggcggatctctgagactgtcttgtgccgccagcggcttcagcttcagcgacttttggatgagctgggtccgacaggcccctggcaaaggacttgaatgggtcgccacaatcagccaggccggcagcgagaaggactacgtggactctgtgaagggcagattcaccatcagccgggacaacgccaagaagtccctgtacctccagatgaacagcctgagagccgaggacaccgccgtgtactattgtgcctctggcgtgtacagcttcgactacagaggccagggcaccctggtcacagtctcttctggtaccggcggaggcggatctggcggcggaggtagcggtggcggaggatctgaattcgagatcgtgatgacacagagccccgccacactgagtgtgtctccaggcgaaagagccacactgtcctgtagagccagccagagcgtgtccagaaacctggcctggtatcagcagaagcctggacaggctccccggctgttgatctacggcgcttctacaagagccaccggcattcccgccagattttctggctctggcagcggcaccgagttcaccctgacaatcggaagcctccagagcgaggacttcgccgtgtactactgccagcagtacaagacctggcctcggacctttggacagggcaccaacgtggaaatcaaactcgagatccagaaccctgatcctgccgtgtaccagctgcgggatagcaagagcagcgacaagagcgtgtgtctgttcaccgacttcgacagccagaccaacgtgtcccagagcaaggactccgacgtgtacatcaccgataagtgcgtgctggacatgcggagcatggacttcaagagcaactccgccgtggcctggtccaacaagtccgatttcgcctgcgccaacgccttcaacaacagcattatccccgaggacacattcttcccaagccccgagagcagcgactccaccgaccacgtgaagcccaaagagacagagaacaccaagcagcccagcaagagctgccacaagcccaaggccatcgtgcacaccgagaaagtgaacatgatgagcctgaccgtgctgggcctgcggatgctgttcgccaaaaccgtggccgtgaacttcctgctgaccgccaagctgttcttcctccgcgccaagagaagcggatctggcgtgaagcagaccctgaatttcgacctgctgaagctggctggcgacgtggaatccaacccaggccctactagtatggactggatttggcgcatccttttccttgtcggcgctgctaccggcgcgcattccgggccccagctccagctgcaagagtctggacctggcctggtcaagcctagcgagacactgagcctgacctgtaccgtgtccggcgatagcatcagcagcggcgattactactggggctggatcagacagcctcctggcaaaggactggaatggatcggccacatctactacagcggcgtgacctactacaaccccagcctgaagtccagagtgaccatcagcgtggacaccagccggaaccagttctccctgaagctgtctagcgtgacagccgccgataccgccgtgtactactgcaccagagaggacagcagcaactggcggagtagaggccagggaacactggtcacagttagctctggatccggcggaggcggaagtggaggcggaggatctggcggcggaggctctttcgaacaagttcagctgcaacaatggggagccggcctgctgaagcctagcgaaacactgtctctgacctgcgccgtgttcggcggctctttcagcggctactactggtcctggatcagacagcctcctggcaaaggactggaatggatcggcgagatcaaccaccggggcaacaccaacgacaaccccagcctgaaaagcagagtgaccatcagcgtggacaccagcaagaaccagttcgccctgaagctgagcagcgtgacagccgctgataccgccgtgtattattgcgccagagagcggggctacacctacggcaatttcgatcactggggccagggcaccctggtcacagtttcttctacgcgtgaggacctgaagaacgtgttcccacctgaggtggccgtgttcgagcctagcgaggccgagatcagccacacccagaaagccaccctcgtgtgcctggctaccggcttctaccccgaccatgtggaactgtcttggtgggtcaacggcaaagaggtgcacagcggcgtgtgtaccgacccccagccactgaaagaacagcccgccctgaacgacagccggtactgcctgagcagcagactgagagtgtccgccaccttctggcagaacccccggaaccacttcagatgccaggtgcagttctacggcctgagcgagaacgacgagtggacccaggacagagccaagcccgtgacccagatcgtgtctgccgaagcctggggcagagccgatgatgtgattaagatccactggcaggaaaagaagtccaacaccatcctgggcagccaggaaggcaacaccatgaagaccaacgacacctacatgaagttcagctggctgaccgtgcccgagaagtccctggacaaagaacacagatgcatcgtgcggcacgaaaacaacaagaacggcgtggaccaggaaatcatcttcccacccatcaagaccgatgtgattacaatggaccccaaggacaactgctccaaggacgccaacgataccctgctgctccagctgaccaacaccagcgcctactacatgtacttgttgctgctgctgaagtccgtggtgtacttcgccatcatcacatgctgcctgctgcggagaaccgccttctgctgcaacggcgagaagtct

SEQ ID NO: 7972 - DNA, 2994 bp, synthetic construct
  source 1..2994: mol_type = other DNA
atggccttaccagtgaccgccttgctcctgccgctggccttgctgctccacgccgccaggccggaagtgcagctggttgaatctggcggaggactggttcagcctggcggatctctgagactgtcttgtgccgccagcggcttcagcttcagcgacttttggatgagctgggtccgacaggcccctggcaaaggacttgaatgggtcgccacaatcagccaggccggcagcgagaaggactacgtggactctgtgaagggcagattcaccatcagccgggacaacgccaagaagtccctgtacctccagatgaacagcctgagagccgaggacaccgccgtgtactattgtgcctctggcgtgtacagcttcgactacagaggccagggcaccctggtcacagtctcttctggtaccggcggaggcggatctggcggcggaggtagcggtggcggaggatctgaattcgagatcgtgatgacccctagcagcgccacactgagtgtgtctccaggcgaaagagccacactgtcctgtagagccagccagagcgtgtccagaaacctggcctggtatcagcagaagcctggacaggctccccggctgttgatctacggcgcttctacaagagccaccggcattcccgccagattttctggctctggcagcggcaccgagttcaccctgacaatctctagcctccagagcgaggacttcgccgtgtactactgccaccagtacagcaactggatgtgcagcttcggccagggcaccaagctggaaatcaaactcgagatccagaaccctgatcctgccgtgtaccagctgcgggatagcaagagcagcgacaagagcgtgtgtctgttcaccgacttcgacagccagaccaacgtgtcccagagcaaggactccgacgtgtacatcaccgataagtgcgtgctggacatgcggagcatggacttcaagagcaactccgccgtggcctggtccaacaagtccgatttcgcctgcgccaacgccttcaacaacagcattatccccgaggacacattcttcccaagccccgagagcagcgactccaccgaccacgtgaagcccaaagagacagagaacaccaagcagcccagcaagagctgccacaagcccaaggccatcgtgcacaccgagaaagtgaacatgatgagcctgaccgtgctgggcctgcggatgctgttcgccaaaaccgtggccgtgaacttcctgctgaccgccaagctgttcttcctccgcgccaagagaagcggatctggcgtgaagcagaccctgaatttcgacctgctgaagctggctggcgacgtggaatccaacccaggccctactagtatggactggatttggcgcatccttttccttgtcggcgctgctaccggcgcgcattccgggccccagctccagctgcaagagtctggacctggcctggtcaagcctagcgagacactgagcctgacctgtaccgtgtccggcgatagcatcagcagcggcgattactactggggctggatcagacagcctcctggcaaaggactggaatggatcggccacatctactacagcggcgtgacctactacaaccccagcctgaagtccagagtgaccatcagcgtggacaccagccggaaccagttctccctgaagctgtctagcgtgacagccgccgataccgccgtgtactactgcaccagagaggacagcagcaactggcggagtagaggccagggaacactggtcacagttagctctggatccggcggaggcggaagtggaggcggaggatctggcggcggaggctctttcgaagaagttcagctccttgagtcaggtggcggcctggttcaacctggcggatctctgagactgagctgtgccgccagcggcttcacctttagcagatacgccatgaactgggtccgacaggcccctggcaaaggactggaatgggtgtccggcatctctggaagcggcggcagaacctactacgccgattctgtgaagggcagattcaccatcagccgggacaacagcaagaacaccctgtacctccagatgaacagcctgagagccgaggacacagccgtgtattattgcgccaaggaccgggacttttggagcggcccttttgactattggggccagggaaccctggtcaccgttagctctacgcgtgaggacctgaagaacgtgttcccacctgaggtggccgtgttcgagcctagcgaggccgagatcagccacacccagaaagccaccctcgtgtgcctggctaccggcttctaccccgaccatgtggaactgtcttggtgggtcaacggcaaagaggtgcacagcggcgtgtgtaccgacccccagccactgaaagaacagcccgccctgaacgacagccggtactgcctgagcagcagactgagagtgtccgccaccttctggcagaacccccggaaccacttcagatgccaggtgcagttctacggcctgagcgagaacgacgagtggacccaggacagagccaagcccgtgacccagatcgtgtctgccgaagcctggggcagagccgatgatgtgattaagatccactggcaggaaaagaagtccaacaccatcctgggcagccaggaaggcaacaccatgaagaccaacgacacctacatgaagttcagctggctgaccgtgcccgagaagtccctggacaaagaacacagatgcatcgtgcggcacgaaaacaacaagaacggcgtggaccaggaaatcatcttcccacccatcaagaccgatgtgattacaatggaccccaaggacaactgctccaaggacgccaacgataccctgctgctccagctgaccaacaccagcgcctactacatgtacttgttgctgctgctgaagtccgtggtgtacttcgccatcatcacatgctgcctgctgcggagaaccgccttctgctgcaacggcgagaagtct

SEQ ID NO: 7973 - DNA, 3009 bp, synthetic construct
  source 1..3009: mol_type = other DNA
atggccttaccagtgaccgccttgctcctgccgctggccttgctgctccacgccgccaggccggaagtgcagctggttgaatctggcggaggactggttcagcctggcggatctctgagactgtcttgtgccgccagcggcttcagcttcagcgacttttggatgagctgggtccgacaggcccctggcaaaggacttgaatgggtcgccacaatcagccaggccggcagcgagaaggactacgtggactctgtgaagggcagattcaccatcagccgggacaacgccaagaagtccctgtacctccagatgaacagcctgagagccgaggacaccgccgtgtactattgtgcctctggcgtgtacagcttcgactacagaggccagggcaccctggtcacagtctcttctggtaccggcggaggcggatctggcggcggaggtagcggtggcggaggatctgaattcgacatccagatgacccagagccccagcagcctgtctgccagcgtgggcgacagagtgaccatcacatgcaaggccagcaagaacatcagaagctacctggcctggtatcagcagaagcccggcaaggcccccaagctgctgatctacagcggcagcacactgcacagcggcgtgcccagcagattttccggctctggcagcggcaccgacttcaccctgaccatctctagcctccagcccgaggacttcgccacctactactgccagcagcaccacgagtaccccctgacattcggccagggcaccaaggtggaaatcaagagactcgagatccagaaccctgatcctgccgtgtaccagctgcgggatagcaagagcagcgacaagagcgtgtgtctgttcaccgacttcgacagccagaccaacgtgtcccagagcaaggactccgacgtgtacatcaccgataagtgcgtgctggacatgcggagcatggacttcaagagcaactccgccgtggcctggtccaacaagtccgatttcgcctgcgccaacgccttcaacaacagcattatccccgaggacacattcttcccaagccccgagagcagcgactccaccgaccacgtgaagcccaaagagacagagaacaccaagcagcccagcaagagctgccacaagcccaaggccatcgtgcacaccgagaaagtgaacatgatgagcctgaccgtgctgggcctgcggatgctgttcgccaaaaccgtggccgtgaacttcctgctgaccgccaagctgttcttcctccgcgccaagagaagcggatctggcgtgaagcagaccctgaatttcgacctgctgaagctggctggcgacgtggaatccaacccaggccctactagtatggactggatttggcgcatccttttccttgtcggcgctgctaccggcgcgcattccgggccccagctccagctgcaagagtctggacctggcctggtcaagcctagcgagacactgagcctgacctgtaccgtgtccggcgatagcatcagcagcggcgattactactggggctggatcagacagcctcctggcaaaggactggaatggatcggccacatctactacagcggcgtgacctactacaaccccagcctgaagtccagagtgaccatcagcgtggacaccagccggaaccagttctccctgaagctgtctagcgtgacagccgccgataccgccgtgtactactgcaccagagaggacagcagcaactggcggagtagaggccagggaacactggtcacagttagctctggatccggcggaggcggaagtggaggcggaggatctggcggcggaggctctttcgaacaggtgcaactccaggaatctggccccggactcgtgaagcccagcgagacactgagcctgacctgtaccgtgtccggctacaccatcaccagcggctacgactggtcctggatcagacagcctcctggcaagggcctggaatggatcggctacatcaactacggcggctccaccaactacaagcccagcctgggaagccgcgtgacaatcagcgtggacacctccaagaaccagttcagcctgaagctgagcagcgtgacagccgccgataccgccgtgtactactgcgcccggtacaacgagtacaagagctacatctacgattggtacttcgacttctggggccagggaaccctcgtgaccgtgtctagtacgcgtgaggacctgaagaacgtgttcccacctgaggtggccgtgttcgagcctagcgaggccgagatcagccacacccagaaagccaccctcgtgtgcctggctaccggcttctaccccgaccatgtggaactgtcttggtgggtcaacggcaaagaggtgcacagcggcgtgtgtaccgacccccagccactgaaagaacagcccgccctgaacgacagccggtactgcctgagcagcagactgagagtgtccgccaccttctggcagaacccccggaaccacttcagatgccaggtgcagttctacggcctgagcgagaacgacgagtggacccaggacagagccaagcccgtgacccagatcgtgtctgccgaagcctggggcagagccgatgatgtgattaagatccactggcaggaaaagaagtccaacaccatcctgggcagccaggaaggcaacaccatgaagaccaacgacacctacatgaagttcagctggctgaccgtgcccgagaagtccctggacaaagaacacagatgcatcgtgcggcacgaaaacaacaagaacggcgtggaccaggaaatcatcttcccacccatcaagaccgatgtgattacaatggaccccaaggacaactgctccaaggacgccaacgataccctgctgctccagctgaccaacaccagcgcctactacatgtacttgttgctgctgctgaagtccgtggtgtacttcgccatcatcacatgctgcctgctgcggagaaccgccttctgctgcaacggcgagaagtct

SEQ ID NO: 7974 - DNA, 3015 bp, synthetic construct
  source 1..3015: mol_type = other DNA
atggccttaccagtgaccgccttgctcctgccgctggccttgctgctccacgccgccaggccggaagtgcagctggttgaatctggcggaggactggttcagcctggcggatctctgagactgtcttgtgccgccagcggcttcagcttcagcgacttttggatgagctgggtccgacaggcccctggcaaaggacttgaatgggtcgccacaatcagccaggccggcagcgagaaggactacgtggactctgtgaagggcagattcaccatcagccgggacaacgccaagaagtccctgtacctccagatgaacagcctgagagccgaggacaccgccgtgtactattgtgcctctggcgtgtacagcttcgactacagaggccagggcaccctggtcacagtctcttctggtaccggcggaggcggatctggcggcggaggtagcggtggcggaggatctgaattccagtctgtggtcacacagcctccatccgtgtctgctgcccctggacagaaagtgaccatctcctgtagcggcagcagcagcaacatcggcaacaactacgtgtcctggtatcagcagctccccggcacagctcccaaactgctgatctacgacaacaacaagcggcccagcggcatccccgatagattttctggcagcaagagcggcaccagcgccacactgggaattaccggacttcagacaggcgacgaggccgactactactgtggcacatgggatggcagcctgtacaccatgcttttcggcggaggcaccaagctgacagtgcttctcgagatccagaaccctgatcctgccgtgtaccagctgcgggatagcaagagcagcgacaagagcgtgtgtctgttcaccgacttcgacagccagaccaacgtgtcccagagcaaggactccgacgtgtacatcaccgataagtgcgtgctggacatgcggagcatggacttcaagagcaactccgccgtggcctggtccaacaagtccgatttcgcctgcgccaacgccttcaacaacagcattatccccgaggacacattcttcccaagccccgagagcagcgactccaccgaccacgtgaagcccaaagagacagagaacaccaagcagcccagcaagagctgccacaagcccaaggccatcgtgcacaccgagaaagtgaacatgatgagcctgaccgtgctgggcctgcggatgctgttcgccaaaaccgtggccgtgaacttcctgctgaccgccaagctgttcttcctccgcgccaagagaagcggatctggcgtgaagcagaccctgaatttcgacctgctgaagctggctggcgacgtggaatccaacccaggccctactagtatggactggatttggcgcatccttttccttgtcggcgctgctaccggcgcgcattccgggccccagctccagctgcaagagtctggacctggcctggtcaagcctagcgagacactgagcctgacctgtaccgtgtccggcgatagcatcagcagcggcgattactactggggctggatcagacagcctcctggcaaaggactggaatggatcggccacatctactacagcggcgtgacctactacaaccccagcctgaagtccagagtgaccatcagcgtggacaccagccggaaccagttctccctgaagctgtctagcgtgacagccgccgataccgccgtgtactactgcaccagagaggacagcagcaactggcggagtagaggccagggaacactggtcacagttagctctggatccggcggaggcggaagtggaggcggaggatctggcggcggaggctctttcgaagaagtgcaactggtggaatctggcggcggactggttaagcctggcggatctctgagactgtcttgtgccgccagcggcttcaccttcagcaatgcctggatgagctgggttcgacaggcccctggaaaaggactggaatgggtcggattcatccggtccaaagcctacggcggcaccacagaatatgccgcctctgtgaagggcagattcaccatcagccgggacgacagcaagtctatcgcctacctccagatgaacaacctgaaaaccgaggacaccgccgtgtactactgcgccagagatggcctgtacagcagctcttggtacgacagcgattactggggccagggcacactggtcacagtgtcatctacgcgtgaggacctgaagaacgtgttcccacctgaggtggccgtgttcgagcctagcgaggccgagatcagccacacccagaaagccaccctcgtgtgcctggctaccggcttctaccccgaccatgtggaactgtcttggtgggtcaacggcaaagaggtgcacagcggcgtgtgtaccgacccccagccactgaaagaacagcccgccctgaacgacagccggtactgcctgagcagcagactgagagtgtccgccaccttctggcagaacccccggaaccacttcagatgccaggtgcagttctacggcctgagcgagaacgacgagtggacccaggacagagccaagcccgtgacccagatcgtgtctgccgaagcctggggcagagccgatgatgtgattaagatccactggcaggaaaagaagtccaacaccatcctgggcagccaggaaggcaacaccatgaagaccaacgacacctacatgaagttcagctggctgaccgtgcccgagaagtccctggacaaagaacacagatgcatcgtgcggcacgaaaacaacaagaacggcgtggaccaggaaatcatcttcccacccatcaagaccgatgtgattacaatggaccccaaggacaactgctccaaggacgccaacgataccctgctgctccagctgaccaacaccagcgcctactacatgtacttgttgctgctgctgaagtccgtggtgtacttcgccatcatcacatgctgcctgctgcggagaaccgccttctgctgcaacggcgagaagtct

SEQ ID NO: 7975 - DNA, 3030 bp, synthetic construct
  source 1..3030: mol_type = other DNA
atggccttaccagtgaccgccttgctcctgccgctggccttgctgctccacgccgccaggccggaagtgcagctggttgaatctggcggaggactggttcagcctggcggatctctgagactgtcttgtgccgccagcggcttcagcttcagcgacttttggatgagctgggtccgacaggcccctggcaaaggacttgaatgggtcgccacaatcagccaggccggcagcgagaaggactacgtggactctgtgaagggcagattcaccatcagccgggacaacgccaagaagtccctgtacctccagatgaacagcctgagagccgaggacaccgccgtgtactattgtgcctctggcgtgtacagcttcgactacagaggccagggcaccctggtcacagtctcttctggtaccggcggaggcggatctggcggcggaggtagcggtggcggaggatctgaattccagtctgtgctgacacagcctcctagtgtgtctggcgctcctggacagagagtgaccatctcttgtaccggcagcagcagcaatatcggagccggctatgacgtgcactggtatcagcagctccctggcacagcccctaaactgctgatcttcggcaacagcaacagacccagcggcgtgcccgatagattcagcggctttaagagcggcacaagcgccagcctggctatcactggactgcaagccgaggacgaggccgactacttctgccagagctacgatagcagcctgagcggcagcggagtgtttggcacaggcaccaaagtgacagtgcttggcctcgagatccagaaccctgatcctgccgtgtaccagctgcgggatagcaagagcagcgacaagagcgtgtgtctgttcaccgacttcgacagccagaccaacgtgtcccagagcaaggactccgacgtgtacatcaccgataagtgcgtgctggacatgcggagcatggacttcaagagcaactccgccgtggcctggtccaacaagtccgatttcgcctgcgccaacgccttcaacaacagcattatccccgaggacacattcttcccaagccccgagagcagcgactccaccgaccacgtgaagcccaaagagacagagaacaccaagcagcccagcaagagctgccacaagcccaaggccatcgtgcacaccgagaaagtgaacatgatgagcctgaccgtgctgggcctgcggatgctgttcgccaaaaccgtggccgtgaacttcctgctgaccgccaagctgttcttcctccgcgccaagagaagcggatctggcgtgaagcagaccctgaatttcgacctgctgaagctggctggcgacgtggaatccaacccaggccctactagtatggactggatttggcgcatccttttccttgtcggcgctgctaccggcgcgcattccgggccccagctccagctgcaagagtctggacctggcctggtcaagcctagcgagacactgagcctgacctgtaccgtgtccggcgatagcatcagcagcggcgattactactggggctggatcagacagcctcctggcaaaggactggaatggatcggccacatctactacagcggcgtgacctactacaaccccagcctgaagtccagagtgaccatcagcgtggacaccagccggaaccagttctccctgaagctgtctagcgtgacagccgccgataccgccgtgtactactgcaccagagaggacagcagcaactggcggagtagaggccagggaacactggtcacagttagctctggatccggcggaggcggaagtggaggcggaggatctggcggcggaggctctttcgaacaaatgcaactggttcaaagcggcggtggcctggtgcaacctggaagaagtctgagactgagctgtgccgccagcggcttcaccttcgatgattacgccatgcactgggtccgacaggcccctggaaaaggactggaatgggtgtccggcatctcctggaatagcggctctatcggctacgccgacagcgtgaagggcagattcaccatcagccgggacaacgccaagaacagcctgtacctccagatgaactccctgagagccgaggatacagccctgtactactgcgccaaggacatccacagcggcagctactacggcctgctgtactacgctatggacgtgtggggccagggcacaaccgtgacagtttcttctacgcgtgaggacctgaagaacgtgttcccacctgaggtggccgtgttcgagcctagcgaggccgagatcagccacacccagaaagccaccctcgtgtgcctggctaccggcttctaccccgaccatgtggaactgtcttggtgggtcaacggcaaagaggtgcacagcggcgtgtgtaccgacccccagccactgaaagaacagcccgccctgaacgacagccggtactgcctgagcagcagactgagagtgtccgccaccttctggcagaacccccggaaccacttcagatgccaggtgcagttctacggcctgagcgagaacgacgagtggacccaggacagagccaagcccgtgacccagatcgtgtctgccgaagcctggggcagagccgatgatgtgattaagatccactggcaggaaaagaagtccaacaccatcctgggcagccaggaaggcaacaccatgaagaccaacgacacctacatgaagttcagctggctgaccgtgcccgagaagtccctggacaaagaacacagatgcatcgtgcggcacgaaaacaacaagaacggcgtggaccaggaaatcatcttcccacccatcaagaccgatgtgattacaatggaccccaaggacaactgctccaaggacgccaacgataccctgctgctccagctgaccaacaccagcgcctactacatgtacttgttgctgctgctgaagtccgtggtgtacttcgccatcatcacatgctgcctgctgcggagaaccgccttctgctgcaacggcgagaagtct

SEQ ID NO: 7976 - DNA, 3030 bp, synthetic construct
  source 1..3030: mol_type = other DNA
atggccttaccagtgaccgccttgctcctgccgctggccttgctgctccacgccgccaggccggaagtgcagctggttgaatctggcggaggactggttcagcctggcggatctctgagactgtcttgtgccgccagcggcttcagcttcagcgacttttggatgagctgggtccgacaggcccctggcaaaggacttgaatgggtcgccacaatcagccaggccggcagcgagaaggactacgtggactctgtgaagggcagattcaccatcagccgggacaacgccaagaagtccctgtacctccagatgaacagcctgagagccgaggacaccgccgtgtactattgtgcctctggcgtgtacagcttcgactacagaggccagggcaccctggtcacagtctcttctggtaccggcggaggcggatctggcggcggaggtagcggtggcggaggatctgaattcctgcctgttctgacacagcctccatctgcctctggcacacctggacagagagtgaccatcagctgtagcggcagaagcagcaacatcggcagcaacagcgtgaactggtacagacagcttcctggcgctgcccctaagctgctgatctacagcaacaaccagcggcctcctggcgtgccagtcagattttctggcagcaagagcggcacaagcgccagcctggctatttctggactccagtctgaggacgaggccacctactactgtgccacctgggacgacaacctgaacgtgcactacgtgttcggcaccggcaccaaagtgacagtgcttggaagtagactcgagatccagaaccctgatcctgccgtgtaccagctgcgggatagcaagagcagcgacaagagcgtgtgtctgttcaccgacttcgacagccagaccaacgtgtcccagagcaaggactccgacgtgtacatcaccgataagtgcgtgctggacatgcggagcatggacttcaagagcaactccgccgtggcctggtccaacaagtccgatttcgcctgcgccaacgccttcaacaacagcattatccccgaggacacattcttcccaagccccgagagcagcgactccaccgaccacgtgaagcccaaagagacagagaacaccaagcagcccagcaagagctgccacaagcccaaggccatcgtgcacaccgagaaagtgaacatgatgagcctgaccgtgctgggcctgcggatgctgttcgccaaaaccgtggccgtgaacttcctgctgaccgccaagctgttcttcctccgcgccaagagaagcggatctggcgtgaagcagaccctgaatttcgacctgctgaagctggctggcgacgtggaatccaacccaggccctactagtatggactggatttggcgcatccttttccttgtcggcgctgctaccggcgcgcattccgggccccagctccagctgcaagagtctggacctggcctggtcaagcctagcgagacactgagcctgacctgtaccgtgtccggcgatagcatcagcagcggcgattactactggggctggatcagacagcctcctggcaaaggactggaatggatcggccacatctactacagcggcgtgacctactacaaccccagcctgaagtccagagtgaccatcagcgtggacaccagccggaaccagttctccctgaagctgtctagcgtgacagccgccgataccgccgtgtactactgcaccagagaggacagcagcaactggcggagtagaggccagggaacactggtcacagttagctctggatccggcggaggcggaagtggaggcggaggatctggcggcggaggctctttcgaacttgaaatggctcaggtgcagctggtgcagagcggagccgaagtgaagaaacctggcagcagcgtgaaggtgtcctgcaaagcttctggcggcaccttcagcagctacgccatctcttgggttcgacaggcccctggacaaggactggaatggatgggcagaatcatccccatcctgggaatcgccaactacgcccagaaattccagggcagagtgacaatcaccgccgacaagagcaccagcaccgcctacatggaactgagcagcctgagaagcgaggacaccgccgtgtactattgtgcaagaggcggctactacagccacgacatgtggagcgaagattggggccagggcacactggtcacagtgtcatctacgcgtgaggacctgaagaacgtgttcccacctgaggtggccgtgttcgagcctagcgaggccgagatcagccacacccagaaagccaccctcgtgtgcctggctaccggcttctaccccgaccatgtggaactgtcttggtgggtcaacggcaaagaggtgcacagcggcgtgtgtaccgacccccagccactgaaagaacagcccgccctgaacgacagccggtactgcctgagcagcagactgagagtgtccgccaccttctggcagaacccccggaaccacttcagatgccaggtgcagttctacggcctgagcgagaacgacgagtggacccaggacagagccaagcccgtgacccagatcgtgtctgccgaagcctggggcagagccgatgatgtgattaagatccactggcaggaaaagaagtccaacaccatcctgggcagccaggaaggcaacaccatgaagaccaacgacacctacatgaagttcagctggctgaccgtgcccgagaagtccctggacaaagaacacagatgcatcgtgcggcacgaaaacaacaagaacggcgtggaccaggaaatcatcttcccacccatcaagaccgatgtgattacaatggaccccaaggacaactgctccaaggacgccaacgataccctgctgctccagctgaccaacaccagcgcctactacatgtacttgttgctgctgctgaagtccgtggtgtacttcgccatcatcacatgctgcctgctgcggagaaccgccttctgctgcaacggcgagaagtct

SEQ ID NO: 7977 - DNA, 3012 bp, synthetic construct
  source 1..3012: mol_type = other DNA
atggccttaccagtgaccgccttgctcctgccgctggccttgctgctccacgccgccaggccggaagtgcagctggttgaatctggcggaggactggttcagcctggcggatctctgagactgtcttgtgccgccagcggcttcagcttcagcgacttttggatgagctgggtccgacaggcccctggcaaaggacttgaatgggtcgccacaatcagccaggccggcagcgagaaggactacgtggactctgtgaagggcagattcaccatcagccgggacaacgccaagaagtccctgtacctccagatgaacagcctgagagccgaggacaccgccgtgtactattgtgcctctggcgtgtacagcttcgactacagaggccagggcaccctggtcacagtctcttctggtaccggcggaggcggatctggcggcggaggtagcggtggcggaggatctgaattcgacttcgtgatgacacagagccctgatagcctggccgtgtctctcggcgagcgagtgaccatgagctgcaagtctagccagagcctgctgaacagcggcaaccagaagaactacctgacctggtatcagcagaagcccggccagcctcctaagctgctgatctactgggccagcaccagagaaagcggcgtgcccgatagattttctggctctggcagcggcaccgacttcaccctgacaatttctagcctgcaagccgaggacgtggccgtgtactactgccagaacgactacagctacccctacaccttcggccagggcaccaagctggaaatcaaactcgagatccagaaccctgatcctgccgtgtaccagctgcgggatagcaagagcagcgacaagagcgtgtgtctgttcaccgacttcgacagccagaccaacgtgtcccagagcaaggactccgacgtgtacatcaccgataagtgcgtgctggacatgcggagcatggacttcaagagcaactccgccgtggcctggtccaacaagtccgatttcgcctgcgccaacgccttcaacaacagcattatccccgaggacacattcttcccaagccccgagagcagcgactccaccgaccacgtgaagcccaaagagacagagaacaccaagcagcccagcaagagctgccacaagcccaaggccatcgtgcacaccgagaaagtgaacatgatgagcctgaccgtgctgggcctgcggatgctgttcgccaaaaccgtggccgtgaacttcctgctgaccgccaagctgttcttcctccgcgccaagagaagcggatctggcgtgaagcagaccctgaatttcgacctgctgaagctggctggcgacgtggaatccaacccaggccctactagtatggactggatttggcgcatccttttccttgtcggcgctgctaccggcgcgcattccgggccccagctccagctgcaagagtctggacctggcctggtcaagcctagcgagacactgagcctgacctgtaccgtgtccggcgatagcatcagcagcggcgattactactggggctggatcagacagcctcctggcaaaggactggaatggatcggccacatctactacagcggcgtgacctactacaaccccagcctgaagtccagagtgaccatcagcgtggacaccagccggaaccagttctccctgaagctgtctagcgtgacagccgccgataccgccgtgtactactgcaccagagaggacagcagcaactggcggagtagaggccagggaacactggtcacagttagctctggatccggcggaggcggaagtggaggcggaggatctggcggcggaggctctttcgaagaagtgcaactggttcagagcggagccgagctgaagaaacctggggccagcgtgaaggtgtcctgtaaagccagcggctacacctttaccgactactacatgaaatgggtccgacaggccccaggccagggactcgaatggatcggcgatattatccccagcaacggggccaccttctacaaccagaaattcaagggccgcgtgaccatcaccgtggacaagagcacaagcaccgcctacatggaactgagcagcctgagaagcgaggacaccgccgtgtattattgcgccagaagccatctgctgcgggccagttggttcgcctattggggacagggaaccctggtcaccgttagctctacgcgtgaggacctgaagaacgtgttcccacctgaggtggccgtgttcgagcctagcgaggccgagatcagccacacccagaaagccaccctcgtgtgcctggctaccggcttctaccccgaccatgtggaactgtcttggtgggtcaacggcaaagaggtgcacagcggcgtgtgtaccgacccccagccactgaaagaacagcccgccctgaacgacagccggtactgcctgagcagcagactgagagtgtccgccaccttctggcagaacccccggaaccacttcagatgccaggtgcagttctacggcctgagcgagaacgacgagtggacccaggacagagccaagcccgtgacccagatcgtgtctgccgaagcctggggcagagccgatgatgtgattaagatccactggcaggaaaagaagtccaacaccatcctgggcagccaggaaggcaacaccatgaagaccaacgacacctacatgaagttcagctggctgaccgtgcccgagaagtccctggacaaagaacacagatgcatcgtgcggcacgaaaacaacaagaacggcgtggaccaggaaatcatcttcccacccatcaagaccgatgtgattacaatggaccccaaggacaactgctccaaggacgccaacgataccctgctgctccagctgaccaacaccagcgcctactacatgtacttgttgctgctgctgaagtccgtggtgtacttcgccatcatcacatgctgcctgctgcggagaaccgccttctgctgcaacggcgagaagtct

SEQ ID NO: 7978 - DNA, 3012 bp, synthetic construct
  source 1..3012: mol_type = other DNA
atggccttaccagtgaccgccttgctcctgccgctggccttgctgctccacgccgccaggccggaagtgcagctggttgaatctggcggaggactggttcagcctggcggatctctgagactgtcttgtgccgccagcggcttcagcttcagcgacttttggatgagctgggtccgacaggcccctggcaaaggacttgaatgggtcgccacaatcagccaggccggcagcgagaaggactacgtggactctgtgaagggcagattcaccatcagccgggacaacgccaagaagtccctgtacctccagatgaacagcctgagagccgaggacaccgccgtgtactattgtgcctctggcgtgtacagcttcgactacagaggccagggcaccctggtcacagtctcttctggtaccggcggaggcggatctggcggcggaggtagcggtggcggaggatctgaattcgacttcgtgatgacacagagccctgatagcctggccgtgtctctcggcgagcgagtgaccatgagctgcaagtctagccagagcctgctgaacagcggcaaccagaagaactacctgacctggtatcagcagaagcccggccagcctcctaagctgctgatctactgggccagcaccagagaaagcggcgtgcccgatagattttctggctctggcagcggcaccgacttcaccctgacaatttctagcctgcaagccgaggacgtggccgtgtactactgccagaacgactacagctacccctacaccttcggccagggcaccaagctggaaatcaaactcgagatccagaaccctgatcctgccgtgtaccagctgcgggatagcaagagcagcgacaagagcgtgtgtctgttcaccgacttcgacagccagaccaacgtgtcccagagcaaggactccgacgtgtacatcaccgataagtgcgtgctggacatgcggagcatggacttcaagagcaactccgccgtggcctggtccaacaagtccgatttcgcctgcgccaacgccttcaacaacagcattatccccgaggacacattcttcccaagccccgagagcagcgactccaccgaccacgtgaagcccaaagagacagagaacaccaagcagcccagcaagagctgccacaagcccaaggccatcgtgcacaccgagaaagtgaacatgatgagcctgaccgtgctgggcctgcggatgctgttcgccaaaaccgtggccgtgaacttcctgctgaccgccaagctgttcttcctccgcgccaagagaagcggatctggcgtgaagcagaccctgaatttcgacctgctgaagctggctggcgacgtggaatccaacccaggccctactagtatggactggatttggcgcatccttttccttgtcggcgctgctaccggcgcgcattccgggccccagctccagctgcaagagtctggacctggcctggtcaagcctagcgagacactgagcctgacctgtaccgtgtccggcgatagcatcagcagcggcgattactactggggctggatcagacagcctcctggcaaaggactggaatggatcggccacatctactacagcggcgtgacctactacaaccccagcctgaagtccagagtgaccatcagcgtggacaccagccggaaccagttctccctgaagctgtctagcgtgacagccgccgataccgccgtgtactactgcaccagagaggacagcagcaactggcggagtagaggccagggaacactggtcacagttagctctggatccggcggaggcggaagtggaggcggaggatctggcggcggaggctctttcgaacaagtgcaactggttcagagcggagccgagctgaagaaacctggggccagcgtgaaggtgtcctgtaaagccagcggctacacctttaccgactactacatgaaatgggtccgacaggccccaggccagggactcgaatggatcggcgatattatccccagcaacggggccaccttctacaaccagaaattcaagggccgcgtgaccatcaccgtggacaagagcacaagcaccgcctacatggaactgagcagcctgagaagcgaggacaccgccgtgtattattgcgccagaagccatctgctgcgggccagttggttcgcctattggggacagggaaccctggtcaccgttagctctacgcgtgaggacctgaagaacgtgttcccacctgaggtggccgtgttcgagcctagcgaggccgagatcagccacacccagaaagccaccctcgtgtgcctggctaccggcttctaccccgaccatgtggaactgtcttggtgggtcaacggcaaagaggtgcacagcggcgtgtgtaccgacccccagccactgaaagaacagcccgccctgaacgacagccggtactgcctgagcagcagactgagagtgtccgccaccttctggcagaacccccggaaccacttcagatgccaggtgcagttctacggcctgagcgagaacgacgagtggacccaggacagagccaagcccgtgacccagatcgtgtctgccgaagcctggggcagagccgatgatgtgattaagatccactggcaggaaaagaagtccaacaccatcctgggcagccaggaaggcaacaccatgaagaccaacgacacctacatgaagttcagctggctgaccgtgcccgagaagtccctggacaaagaacacagatgcatcgtgcggcacgaaaacaacaagaacggcgtggaccaggaaatcatcttcccacccatcaagaccgatgtgattacaatggaccccaaggacaactgctccaaggacgccaacgataccctgctgctccagctgaccaacaccagcgcctactacatgtacttgttgctgctgctgaagtccgtggtgtacttcgccatcatcacatgctgcctgctgcggagaaccgccttctgctgcaacggcgagaagtct

SEQ ID NO: 7979 - DNA, 2982 bp, synthetic construct
  source 1..2982: mol_type = other DNA
atggccttaccagtgaccgccttgctcctgccgctggccttgctgctccacgccgccaggccggaagtgcagctggttgaatctggcggaggactggttcagcctggcggatctctgagactgtcttgtgccgccagcggcttcagcttcagcgacttttggatgagctgggtccgacaggcccctggcaaaggacttgaatgggtcgccacaatcagccaggccggcagcgagaaggactacgtggactctgtgaagggcagattcaccatcagccgggacaacgccaagaagtccctgtacctccagatgaacagcctgagagccgaggacaccgccgtgtactattgtgcctctggcgtgtacagcttcgactacagaggccagggcaccctggtcacagtctcttctggtaccggcggaggcggatctggcggcggaggtagcggtggcggaggatctgaattcgacgtgcagatcacacagagccctagctacctggctgcctctcctggcgagacaatcaccatcaactgtcgggccagcaagagcatcagcaaggacctggcctggtatcaagagaagcccggcaagaccaacaagctgctgatctacagcggcagcacactccagtctggcatccccagcagattttccggctctggcagcggcaccgatttcaccctgaccataagcagcctggaacctgaggacttcgccatgtactactgccagcagcacaacaagtacccctacacctttggcggaggcaccaagctggaaatcaagagactcgagatccagaaccctgatcctgccgtgtaccagctgcgggatagcaagagcagcgacaagagcgtgtgtctgttcaccgacttcgacagccagaccaacgtgtcccagagcaaggactccgacgtgtacatcaccgataagtgcgtgctggacatgcggagcatggacttcaagagcaactccgccgtggcctggtccaacaagtccgatttcgcctgcgccaacgccttcaacaacagcattatccccgaggacacattcttcccaagccccgagagcagcgactccaccgaccacgtgaagcccaaagagacagagaacaccaagcagcccagcaagagctgccacaagcccaaggccatcgtgcacaccgagaaagtgaacatgatgagcctgaccgtgctgggcctgcggatgctgttcgccaaaaccgtggccgtgaacttcctgctgaccgccaagctgttcttcctccgcgccaagagaagcggatctggcgtgaagcagaccctgaatttcgacctgctgaagctggctggcgacgtggaatccaacccaggccctactagtatggactggatttggcgcatccttttccttgtcggcgctgctaccggcgcgcattccgggccccagctccagctgcaagagtctggacctggcctggtcaagcctagcgagacactgagcctgacctgtaccgtgtccggcgatagcatcagcagcggcgattactactggggctggatcagacagcctcctggcaaaggactggaatggatcggccacatctactacagcggcgtgacctactacaaccccagcctgaagtccagagtgaccatcagcgtggacaccagccggaaccagttctccctgaagctgtctagcgtgacagccgccgataccgccgtgtactactgcaccagagaggacagcagcaactggcggagtagaggccagggaacactggtcacagttagctctggatccggcggaggcggaagtggaggcggaggatctggcggcggaggctctttcgaacaagttcaactgcaacagcctggggccgagcttgttagacctggcgcttctgtgaagctgagctgcaaggccagcggctacaccttcaccagctactggatgaactgggtcaagcagcggcctgaccagggcctcgaatggatcggcagaatcgacccctacgacagcgagacacactacaaccagaagttcaaggacaaggccatcctgaccgtggacaagagcagctccaccgcctacatgcaactgagcagcctgacctctgaggatagcgccgtgtactattgcgccagaggcaactgggacgactattggggccagggcacaaccctgacagtgtctagtacgcgtgaggacctgaagaacgtgttcccacctgaggtggccgtgttcgagcctagcgaggccgagatcagccacacccagaaagccaccctcgtgtgcctggctaccggcttctaccccgaccatgtggaactgtcttggtgggtcaacggcaaagaggtgcacagcggcgtgtgtaccgacccccagccactgaaagaacagcccgccctgaacgacagccggtactgcctgagcagcagactgagagtgtccgccaccttctggcagaacccccggaaccacttcagatgccaggtgcagttctacggcctgagcgagaacgacgagtggacccaggacagagccaagcccgtgacccagatcgtgtctgccgaagcctggggcagagccgatgatgtgattaagatccactggcaggaaaagaagtccaacaccatcctgggcagccaggaaggcaacaccatgaagaccaacgacacctacatgaagttcagctggctgaccgtgcccgagaagtccctggacaaagaacacagatgcatcgtgcggcacgaaaacaacaagaacggcgtggaccaggaaatcatcttcccacccatcaagaccgatgtgattacaatggaccccaaggacaactgctccaaggacgccaacgataccctgctgctccagctgaccaacaccagcgcctactacatgtacttgttgctgctgctgaagtccgtggtgtacttcgccatcatcacatgctgcctgctgcggagaaccgccttctgctgcaacggcgagaagtct

SEQ ID NO: 7980 - DNA, 2988 bp, synthetic construct
  source 1..2988: mol_type = other DNA
atggccttaccagtgaccgccttgctcctgccgctggccttgctgctccacgccgccaggccggaagtgcagctggttgaatctggcggaggactggttcagcctggcggatctctgagactgtcttgtgccgccagcggcttcagcttcagcgacttttggatgagctgggtccgacaggcccctggcaaaggacttgaatgggtcgccacaatcagccaggccggcagcgagaaggactacgtggactctgtgaagggcagattcaccatcagccgggacaacgccaagaagtccctgtacctccagatgaacagcctgagagccgaggacaccgccgtgtactattgtgcctctggcgtgtacagcttcgactacagaggccagggcaccctggtcacagtctcttctggtaccggcggaggcggatctggcggcggaggtagcggtggcggaggatctgaattcgagatcgtgctgacacagagccctaccagcatgacagcctctccaggcgagcaagtgaccatcacctgtagagccagcagcagcatcaactacatgcactggtatcagcagaagcctggcgcaagccccagaccttggatctacgagacaagcaagctggcctccggcgtgcccgatagattttctggatctgccagcggcaccagctacagcctgaccatcaacaacatggaagccgaggacgccgccacctactactgccagcagtggaattacccctcctggacctttggcggaggcaccaagctggaacttaaactcgagatccagaaccctgatcctgccgtgtaccagctgcgggatagcaagagcagcgacaagagcgtgtgtctgttcaccgacttcgacagccagaccaacgtgtcccagagcaaggactccgacgtgtacatcaccgataagtgcgtgctggacatgcggagcatggacttcaagagcaactccgccgtggcctggtccaacaagtccgatttcgcctgcgccaacgccttcaacaacagcattatccccgaggacacattcttcccaagccccgagagcagcgactccaccgaccacgtgaagcccaaagagacagagaacaccaagcagcccagcaagagctgccacaagcccaaggccatcgtgcacaccgagaaagtgaacatgatgagcctgaccgtgctgggcctgcggatgctgttcgccaaaaccgtggccgtgaacttcctgctgaccgccaagctgttcttcctccgcgccaagagaagcggatctggcgtgaagcagaccctgaatttcgacctgctgaagctggctggcgacgtggaatccaacccaggccctactagtatggactggatttggcgcatccttttccttgtcggcgctgctaccggcgcgcattccgggccccagctccagctgcaagagtctggacctggcctggtcaagcctagcgagacactgagcctgacctgtaccgtgtccggcgatagcatcagcagcggcgattactactggggctggatcagacagcctcctggcaaaggactggaatggatcggccacatctactacagcggcgtgacctactacaaccccagcctgaagtccagagtgaccatcagcgtggacaccagccggaaccagttctccctgaagctgtctagcgtgacagccgccgataccgccgtgtactactgcaccagagaggacagcagcaactggcggagtagaggccagggaacactggtcacagttagctctggatccggcggaggcggaagtggaggcggaggatctggcggcggaggctctttcgaagaagtgcagctcgttgagtctggtggcggactggttcagcctggaagaagcctgaagctgagctgtgccgccagcggcttcaccttcagcgactacaatatggcctgggtccgacaggcccctaagaaaggactggaatgggtcgccaccatcctgtacgatggcggcagaacctactaccggggcagcgtgaagggcagattcaccatcagcagagacaacgccaagagcaccctgtacctgcggatggactctctgagaagcgaggataccgccacatattactgtgccacacacagccggggcaccgactactttgattattggggccagggcgtgatggttaccgtgtctagtacgcgtgaggacctgaagaacgtgttcccacctgaggtggccgtgttcgagcctagcgaggccgagatcagccacacccagaaagccaccctcgtgtgcctggctaccggcttctaccccgaccatgtggaactgtcttggtgggtcaacggcaaagaggtgcacagcggcgtgtgtaccgacccccagccactgaaagaacagcccgccctgaacgacagccggtactgcctgagcagcagactgagagtgtccgccaccttctggcagaacccccggaaccacttcagatgccaggtgcagttctacggcctgagcgagaacgacgagtggacccaggacagagccaagcccgtgacccagatcgtgtctgccgaagcctggggcagagccgatgatgtgattaagatccactggcaggaaaagaagtccaacaccatcctgggcagccaggaaggcaacaccatgaagaccaacgacacctacatgaagttcagctggctgaccgtgcccgagaagtccctggacaaagaacacagatgcatcgtgcggcacgaaaacaacaagaacggcgtggaccaggaaatcatcttcccacccatcaagaccgatgtgattacaatggaccccaaggacaactgctccaaggacgccaacgataccctgctgctccagctgaccaacaccagcgcctactacatgtacttgttgctgctgctgaagtccgtggtgtacttcgccatcatcacatgctgcctgctgcggagaaccgccttctgctgcaacggcgagaagtct

SEQ ID NO: 7981 - DNA, 3015 bp, synthetic construct
  source 1..3015: mol_type = other DNA
atggccttaccagtgaccgccttgctcctgccgctggccttgctgctccacgccgccaggccggaagtgcagctggttgaatctggcggaggactggttcagcctggcggatctctgagactgtcttgtgccgccagcggcttcagcttcagcgacttttggatgagctgggtccgacaggcccctggcaaaggacttgaatgggtcgccacaatcagccaggccggcagcgagaaggactacgtggactctgtgaagggcagattcaccatcagccgggacaacgccaagaagtccctgtacctccagatgaacagcctgagagccgaggacaccgccgtgtactattgtgcctctggcgtgtacagcttcgactacagaggccagggcaccctggtcacagtctcttctggtaccggcggaggcggatctggcggcggaggtagcggtggcggaggatctgaattcgacatcgtgatgacacagagcccttctagcctggccgtgtctgagggcgagacagtgaccatcaactgcaagagcagccagagcttcctgtctagcggcgacggcaagaattacgtggcctggtatcagtacaagcccggacagagccccaagctgctgatctactgggccagcacaagacagagcggcgtgcccgatagattcatcggctctggcagcggcaccgacttcaccctgacaatctctacagtgcaggccgaggacctggctatctactactgccagcagtattacgacacccctctgacctttggctccggcaccaagctggaaatcaaactcgagatccagaaccctgatcctgccgtgtaccagctgcgggatagcaagagcagcgacaagagcgtgtgtctgttcaccgacttcgacagccagaccaacgtgtcccagagcaaggactccgacgtgtacatcaccgataagtgcgtgctggacatgcggagcatggacttcaagagcaactccgccgtggcctggtccaacaagtccgatttcgcctgcgccaacgccttcaacaacagcattatccccgaggacacattcttcccaagccccgagagcagcgactccaccgaccacgtgaagcccaaagagacagagaacaccaagcagcccagcaagagctgccacaagcccaaggccatcgtgcacaccgagaaagtgaacatgatgagcctgaccgtgctgggcctgcggatgctgttcgccaaaaccgtggccgtgaacttcctgctgaccgccaagctgttcttcctccgcgccaagagaagcggatctggcgtgaagcagaccctgaatttcgacctgctgaagctggctggcgacgtggaatccaacccaggccctactagtatggactggatttggcgcatccttttccttgtcggcgctgctaccggcgcgcattccgggccccagctccagctgcaagagtctggacctggcctggtcaagcctagcgagacactgagcctgacctgtaccgtgtccggcgatagcatcagcagcggcgattactactggggctggatcagacagcctcctggcaaaggactggaatggatcggccacatctactacagcggcgtgacctactacaaccccagcctgaagtccagagtgaccatcagcgtggacaccagccggaaccagttctccctgaagctgtctagcgtgacagccgccgataccgccgtgtactactgcaccagagaggacagcagcaactggcggagtagaggccagggaacactggtcacagttagctctggatccggcggaggcggaagtggaggcggaggatctggcggcggaggctctttcgaagaagtgaagctgcaagagtctggccccagcctggtgcagagtagccaaacactgagcctgacctgtaccgtgtccggctttagcctgaccagctaccacatccactgggtccgacagacccctggcaaaggactggaatggatgggcgtgatgtggagcgacggcgacaccagctataacagcgccctgaagtcccggctgagcatcagcagagatacaagccagagccaggtgttcctgaagatgaacagcctccagaccgaggacaccgccacctactattgtgccagaggctactacagcagctacctgtacctttggttcgcctattggggccagggcaccctggttacagtcagctctacgcgtgaggacctgaagaacgtgttcccacctgaggtggccgtgttcgagcctagcgaggccgagatcagccacacccagaaagccaccctcgtgtgcctggctaccggcttctaccccgaccatgtggaactgtcttggtgggtcaacggcaaagaggtgcacagcggcgtgtgtaccgacccccagccactgaaagaacagcccgccctgaacgacagccggtactgcctgagcagcagactgagagtgtccgccaccttctggcagaacccccggaaccacttcagatgccaggtgcagttctacggcctgagcgagaacgacgagtggacccaggacagagccaagcccgtgacccagatcgtgtctgccgaagcctggggcagagccgatgatgtgattaagatccactggcaggaaaagaagtccaacaccatcctgggcagccaggaaggcaacaccatgaagaccaacgacacctacatgaagttcagctggctgaccgtgcccgagaagtccctggacaaagaacacagatgcatcgtgcggcacgaaaacaacaagaacggcgtggaccaggaaatcatcttcccacccatcaagaccgatgtgattacaatggaccccaaggacaactgctccaaggacgccaacgataccctgctgctccagctgaccaacaccagcgcctactacatgtacttgttgctgctgctgaagtccgtggtgtacttcgccatcatcacatgctgcctgctgcggagaaccgccttctgctgcaacggcgagaagtct

SEQ ID NO: 7982 - DNA, 3027 bp, synthetic construct
  source 1..3027: mol_type = other DNA
atggccttaccagtgaccgccttgctcctgccgctggccttgctgctccacgccgccaggccggaagtgcagctggttgaatctggcggaggactggttcagcctggcggatctctgagactgtcttgtgccgccagcggcttcagcttcagcgacttttggatgagctgggtccgacaggcccctggcaaaggacttgaatgggtcgccacaatcagccaggccggcagcgagaaggactacgtggactctgtgaagggcagattcaccatcagccgggacaacgccaagaagtccctgtacctccagatgaacagcctgagagccgaggacaccgccgtgtactattgtgcctctggcgtgtacagcttcgactacagaggccagggcaccctggtcacagtctcttctggtaccggcggaggcggatctggcggcggaggtagcggtggcggaggatctgaattcgacgtgctgatgacccagacacctgtgtctctgccagtgtctctcggaggccaggtgtccatctcctgtagaagcagccagagcctggtgcactccgacggcgatacctacctgcactggtatctccagaagcctggacagagccctcagctcctgatctaccgggtgtccaacagattcagcggcgtgcccgatagattttccggcagcggctctggcaccgacttcaccctgaagatcagcagagtggaacccgaggacctgggcctgtactactgtctccagaccacacacttcccaccttggacctttggcggaggcaccaagctggaaatgaaactcgagatccagaaccctgatcctgccgtgtaccagctgcgggatagcaagagcagcgacaagagcgtgtgtctgttcaccgacttcgacagccagaccaacgtgtcccagagcaaggactccgacgtgtacatcaccgataagtgcgtgctggacatgcggagcatggacttcaagagcaactccgccgtggcctggtccaacaagtccgatttcgcctgcgccaacgccttcaacaacagcattatccccgaggacacattcttcccaagccccgagagcagcgactccaccgaccacgtgaagcccaaagagacagagaacaccaagcagcccagcaagagctgccacaagcccaaggccatcgtgcacaccgagaaagtgaacatgatgagcctgaccgtgctgggcctgcggatgctgttcgccaaaaccgtggccgtgaacttcctgctgaccgccaagctgttcttcctccgcgccaagagaagcggatctggcgtgaagcagaccctgaatttcgacctgctgaagctggctggcgacgtggaatccaacccaggccctactagtatggactggatttggcgcatccttttccttgtcggcgctgctaccggcgcgcattccgggccccagctccagctgcaagagtctggacctggcctggtcaagcctagcgagacactgagcctgacctgtaccgtgtccggcgatagcatcagcagcggcgattactactggggctggatcagacagcctcctggcaaaggactggaatggatcggccacatctactacagcggcgtgacctactacaaccccagcctgaagtccagagtgaccatcagcgtggacaccagccggaaccagttctccctgaagctgtctagcgtgacagccgccgataccgccgtgtactactgcaccagagaggacagcagcaactggcggagtagaggccagggaacactggtcacagttagctctggatccggcggaggcggaagtggaggcggaggatctggcggcggaggctctttcgaacaggttcagctccagcagtctggacccgagcttagaaggccaggatctagcgtcagactgagctgcaaggccagcggctaccggatcaaggacttcctgatccactggattaagaacagacccgagcacggcctggaatggatcggatggattgaccctgaggacggcgagactaagtacgcccagaagttccagaccaaggccacactgaccgccgacacctctagcaacaccgcctacatgcaactgagcagcctgaccagcgaggacaccgccacctacttttgtgctagatggggcgacgtgtactacggcctgatgagaggccatgtgatggatgcctggggccagggaacaagcgtgacagtctcttctacgcgtgaggacctgaagaacgtgttcccacctgaggtggccgtgttcgagcctagcgaggccgagatcagccacacccagaaagccaccctcgtgtgcctggctaccggcttctaccccgaccatgtggaactgtcttggtgggtcaacggcaaagaggtgcacagcggcgtgtgtaccgacccccagccactgaaagaacagcccgccctgaacgacagccggtactgcctgagcagcagactgagagtgtccgccaccttctggcagaacccccggaaccacttcagatgccaggtgcagttctacggcctgagcgagaacgacgagtggacccaggacagagccaagcccgtgacccagatcgtgtctgccgaagcctggggcagagccgatgatgtgattaagatccactggcaggaaaagaagtccaacaccatcctgggcagccaggaaggcaacaccatgaagaccaacgacacctacatgaagttcagctggctgaccgtgcccgagaagtccctggacaaagaacacagatgcatcgtgcggcacgaaaacaacaagaacggcgtggaccaggaaatcatcttcccacccatcaagaccgatgtgattacaatggaccccaaggacaactgctccaaggacgccaacgataccctgctgctccagctgaccaacaccagcgcctactacatgtacttgttgctgctgctgaagtccgtggtgtacttcgccatcatcacatgctgcctgctgcggagaaccgccttctgctgcaacggcgagaagtct

SEQ ID NO: 7983 - DNA, 3012 bp, synthetic construct
  source 1..3012: mol_type = other DNA
atggccttaccagtgaccgccttgctcctgccgctggccttgctgctccacgccgccaggccggaagtgcagctggttgaatctggcggaggactggttcagcctggcggatctctgagactgtcttgtgccgccagcggcttcagcttcagcgacttttggatgagctgggtccgacaggcccctggcaaaggacttgaatgggtcgccacaatcagccaggccggcagcgagaaggactacgtggactctgtgaagggcagattcaccatcagccgggacaacgccaagaagtccctgtacctccagatgaacagcctgagagccgaggacaccgccgtgtactattgtgcctctggcgtgtacagcttcgactacagaggccagggcaccctggtcacagtctcttctggtaccggcggaggcggatctggcggcggaggtagcggtggcggaggatctgaattcgacatcgtgatgacacagagccccgccacactgtcactgtctccaggcgaaagagccacactgagctgtcggagcagcaagagcctccagaacgtgaacggcaacacctacctgtactggttccagcagaagcccggccagtctcctcagctcctgatctacagaatgagcaacctgaacagcggcgtgcccgacagattttctggcagcggaagcggcaccgagttcaccctgaccataagcagcctggaacctgaggacttcgccgtgtactactgtatgcagcacctggaataccccatcaccttcggagccggcaccaagctggaaatcaaactcgagatccagaaccctgatcctgccgtgtaccagctgcgggatagcaagagcagcgacaagagcgtgtgtctgttcaccgacttcgacagccagaccaacgtgtcccagagcaaggactccgacgtgtacatcaccgataagtgcgtgctggacatgcggagcatggacttcaagagcaactccgccgtggcctggtccaacaagtccgatttcgcctgcgccaacgccttcaacaacagcattatccccgaggacacattcttcccaagccccgagagcagcgactccaccgaccacgtgaagcccaaagagacagagaacaccaagcagcccagcaagagctgccacaagcccaaggccatcgtgcacaccgagaaagtgaacatgatgagcctgaccgtgctgggcctgcggatgctgttcgccaaaaccgtggccgtgaacttcctgctgaccgccaagctgttcttcctccgcgccaagagaagcggatctggcgtgaagcagaccctgaatttcgacctgctgaagctggctggcgacgtggaatccaacccaggccctactagtatggactggatttggcgcatccttttccttgtcggcgctgctaccggcgcgcattccgggccccagctccagctgcaagagtctggacctggcctggtcaagcctagcgagacactgagcctgacctgtaccgtgtccggcgatagcatcagcagcggcgattactactggggctggatcagacagcctcctggcaaaggactggaatggatcggccacatctactacagcggcgtgacctactacaaccccagcctgaagtccagagtgaccatcagcgtggacaccagccggaaccagttctccctgaagctgtctagcgtgacagccgccgataccgccgtgtactactgcaccagagaggacagcagcaactggcggagtagaggccagggaacactggtcacagttagctctggatccggcggaggcggaagtggaggcggaggatctggcggcggaggctctttcgaagaagtgcaactggttgaatctggcggcggactggttaagcctggcggatctctgaagctgagctgtgccgccagcggctacacctttaccagctacgtgatgcactgggtccgacaggcccctggcaaaggacttgagtggatcggctacatcaacccctacaacgatggcaccaagtacaacgagaagttccagggcagagtgaccatcagctccgacaagagcatcagcaccgcctacatggaactgagcagcctgagaagcgaggataccgccatgtactattgcgccagaggcacctactactacggcaccagagtgttcgactactggggccagggaaccctggtcacagtctcttctacgcgtgaggacctgaagaacgtgttcccacctgaggtggccgtgttcgagcctagcgaggccgagatcagccacacccagaaagccaccctcgtgtgcctggctaccggcttctaccccgaccatgtggaactgtcttggtgggtcaacggcaaagaggtgcacagcggcgtgtgtaccgacccccagccactgaaagaacagcccgccctgaacgacagccggtactgcctgagcagcagactgagagtgtccgccaccttctggcagaacccccggaaccacttcagatgccaggtgcagttctacggcctgagcgagaacgacgagtggacccaggacagagccaagcccgtgacccagatcgtgtctgccgaagcctggggcagagccgatgatgtgattaagatccactggcaggaaaagaagtccaacaccatcctgggcagccaggaaggcaacaccatgaagaccaacgacacctacatgaagttcagctggctgaccgtgcccgagaagtccctggacaaagaacacagatgcatcgtgcggcacgaaaacaacaagaacggcgtggaccaggaaatcatcttcccacccatcaagaccgatgtgattacaatggaccccaaggacaactgctccaaggacgccaacgataccctgctgctccagctgaccaacaccagcgcctactacatgtacttgttgctgctgctgaagtccgtggtgtacttcgccatcatcacatgctgcctgctgcggagaaccgccttctgctgcaacggcgagaagtct

SEQ ID NO: 7984 - DNA, 3000 bp, synthetic construct
  source 1..3000: mol_type = other DNA
atggccttaccagtgaccgccttgctcctgccgctggccttgctgctccacgccgccaggccggaagtgcagctggttgaatctggcggaggactggttcagcctggcggatctctgagactgtcttgtgccgccagcggcttcagcttcagcgacttttggatgagctgggtccgacaggcccctggcaaaggacttgaatgggtcgccacaatcagccaggccggcagcgagaaggactacgtggactctgtgaagggcagattcaccatcagccgggacaacgccaagaagtccctgtacctccagatgaacagcctgagagccgaggacaccgccgtgtactattgtgcctctggcgtgtacagcttcgactacagaggccagggcaccctggtcacagtctcttctggtaccggcggaggcggatctggcggcggaggtagcggtggcggaggatctgaattcgacatccagatgacacagagccctagcagcctgtctgccagcgtgggagacagagtgaccatcacatgcaaggccagcgaccacatcaacaactggctggcctggtatcagcagaagcctggacaggcccctaagctgctgatctacggcgctaccacactggaaacaggcgtgcccagcagattttctggcagcggctctggcaccgactacaccctgacaatatccagcctccagcctgaggacttcgccacctactactgtcagcagagctggaacaccccttggacattcggccagggcaccaagctggaaatcaagagactcgagatccagaaccctgatcctgccgtgtaccagctgcgggatagcaagagcagcgacaagagcgtgtgtctgttcaccgacttcgacagccagaccaacgtgtcccagagcaaggactccgacgtgtacatcaccgataagtgcgtgctggacatgcggagcatggacttcaagagcaactccgccgtggcctggtccaacaagtccgatttcgcctgcgccaacgccttcaacaacagcattatccccgaggacacattcttcccaagccccgagagcagcgactccaccgaccacgtgaagcccaaagagacagagaacaccaagcagcccagcaagagctgccacaagcccaaggccatcgtgcacaccgagaaagtgaacatgatgagcctgaccgtgctgggcctgcggatgctgttcgccaaaaccgtggccgtgaacttcctgctgaccgccaagctgttcttcctccgcgccaagagaagcggatctggcgtgaagcagaccctgaatttcgacctgctgaagctggctggcgacgtggaatccaacccaggccctactagtatggactggatttggcgcatccttttccttgtcggcgctgctaccggcgcgcattccgggccccagctccagctgcaagagtctggacctggcctggtcaagcctagcgagacactgagcctgacctgtaccgtgtccggcgatagcatcagcagcggcgattactactggggctggatcagacagcctcctggcaaaggactggaatggatcggccacatctactacagcggcgtgacctactacaaccccagcctgaagtccagagtgaccatcagcgtggacaccagccggaaccagttctccctgaagctgtctagcgtgacagccgccgataccgccgtgtactactgcaccagagaggacagcagcaactggcggagtagaggccagggaacactggtcacagttagctctggatccggcggaggcggaagtggaggcggaggatctggcggcggaggctctttcgaacaagttcagcttcaacagcctggcgctgagctggtcaaacctggcgcttctgtgaagatgagctgcaaagccagcggctacgccttcagcagctactggatcaactggatgaagcagaaacccggccagggactcgaatggatcggccaaatctatcccggcgacggcgacaccaactacaacggcaagttcaagggcagagccacactgaccgccgatacctctagcagcacagcctacatgcagctgagcagcctgaccagcgaagatagcgccgtgtacttctgtgcccggtccatcacaacagtcgtgggctgcgctatggactattggggccagggaacaagcgtgaccgtgtctagtacgcgtgaggacctgaagaacgtgttcccacctgaggtggccgtgttcgagcctagcgaggccgagatcagccacacccagaaagccaccctcgtgtgcctggctaccggcttctaccccgaccatgtggaactgtcttggtgggtcaacggcaaagaggtgcacagcggcgtgtgtaccgacccccagccactgaaagaacagcccgccctgaacgacagccggtactgcctgagcagcagactgagagtgtccgccaccttctggcagaacccccggaaccacttcagatgccaggtgcagttctacggcctgagcgagaacgacgagtggacccaggacagagccaagcccgtgacccagatcgtgtctgccgaagcctggggcagagccgatgatgtgattaagatccactggcaggaaaagaagtccaacaccatcctgggcagccaggaaggcaacaccatgaagaccaacgacacctacatgaagttcagctggctgaccgtgcccgagaagtccctggacaaagaacacagatgcatcgtgcggcacgaaaacaacaagaacggcgtggaccaggaaatcatcttcccacccatcaagaccgatgtgattacaatggaccccaaggacaactgctccaaggacgccaacgataccctgctgctccagctgaccaacaccagcgcctactacatgtacttgttgctgctgctgaagtccgtggtgtacttcgccatcatcacatgctgcctgctgcggagaaccgccttctgctgcaacggcgagaagtct

SEQ ID NO: 7985 - DNA, 3006 bp, synthetic construct
  source 1..3006: mol_type = other DNA
atggccttaccagtgaccgccttgctcctgccgctggccttgctgctccacgccgccaggccggaagtgcagctggttgaatctggcggaggactggttcagcctggcggatctctgagactgtcttgtgccgccagcggcttcagcttcagcgacttttggatgagctgggtccgacaggcccctggcaaaggacttgaatgggtcgccacaatcagccaggccggcagcgagaaggactacgtggactctgtgaagggcagattcaccatcagccgggacaacgccaagaagtccctgtacctccagatgaacagcctgagagccgaggacaccgccgtgtactattgtgcctctggcgtgtacagcttcgactacagaggccagggcaccctggtcacagtctcttctggtaccggcggaggcggatctggcggcggaggtagcggtggcggaggatctgaattccagatcgtgctgtctcagtctcctgccatcctgagcgcttccccaggcgagaaagtgaccatgacctgtagagccagcagcagcgtgtcctacatgcactggtatcagcagaagcccggcagcagccctaagccttggatctacgccaccagcaatctggcctctggcgtgccagccagattttctggctctggcagcggcaccagctacagcttcacaatcagcagagtggaagccgaggacgccgccacctactattgtcagcagtggaccttcaatcctcctaccttcggcggaggcacccggctggaaatcaaaagaacagtggctgctctcgagatccagaaccctgatcctgccgtgtaccagctgcgggatagcaagagcagcgacaagagcgtgtgtctgttcaccgacttcgacagccagaccaacgtgtcccagagcaaggactccgacgtgtacatcaccgataagtgcgtgctggacatgcggagcatggacttcaagagcaactccgccgtggcctggtccaacaagtccgatttcgcctgcgccaacgccttcaacaacagcattatccccgaggacacattcttcccaagccccgagagcagcgactccaccgaccacgtgaagcccaaagagacagagaacaccaagcagcccagcaagagctgccacaagcccaaggccatcgtgcacaccgagaaagtgaacatgatgagcctgaccgtgctgggcctgcggatgctgttcgccaaaaccgtggccgtgaacttcctgctgaccgccaagctgttcttcctccgcgccaagagaagcggatctggcgtgaagcagaccctgaatttcgacctgctgaagctggctggcgacgtggaatccaacccaggccctactagtatggactggatttggcgcatccttttccttgtcggcgctgctaccggcgcgcattccgggccccagctccagctgcaagagtctggacctggcctggtcaagcctagcgagacactgagcctgacctgtaccgtgtccggcgatagcatcagcagcggcgattactactggggctggatcagacagcctcctggcaaaggactggaatggatcggccacatctactacagcggcgtgacctactacaaccccagcctgaagtccagagtgaccatcagcgtggacaccagccggaaccagttctccctgaagctgtctagcgtgacagccgccgataccgccgtgtactactgcaccagagaggacagcagcaactggcggagtagaggccagggaacactggtcacagttagctctggatccggcggaggcggaagtggaggcggaggatctggcggcggaggctctttcgaacaggcttatctgcaacagagcggagccgaactcgtcagacctggcgcttctgtgaagatgagctgcaaggccagcggctacaccttcaccagctataatatgcactgggtcaagcagacccctcggcagggactcgaatggatcggcggaatctatcccggcaacggcgacacctcctacaaccagaagttcaagggcaaagccacactgaccgtgggcaagagcagcagcaccgcctatatgcagctcagcagcctgaccagcgaggacagcgccgtgtacttctgcgccagatacgactacaactacgctatggactactggggccagggcaccagcgtgacagttagctctgccagcacgcgtgaggacctgaagaacgtgttcccacctgaggtggccgtgttcgagcctagcgaggccgagatcagccacacccagaaagccaccctcgtgtgcctggctaccggcttctaccccgaccatgtggaactgtcttggtgggtcaacggcaaagaggtgcacagcggcgtgtgtaccgacccccagccactgaaagaacagcccgccctgaacgacagccggtactgcctgagcagcagactgagagtgtccgccaccttctggcagaacccccggaaccacttcagatgccaggtgcagttctacggcctgagcgagaacgacgagtggacccaggacagagccaagcccgtgacccagatcgtgtctgccgaagcctggggcagagccgatgatgtgattaagatccactggcaggaaaagaagtccaacaccatcctgggcagccaggaaggcaacaccatgaagaccaacgacacctacatgaagttcagctggctgaccgtgcccgagaagtccctggacaaagaacacagatgcatcgtgcggcacgaaaacaacaagaacggcgtggaccaggaaatcatcttcccacccatcaagaccgatgtgattacaatggaccccaaggacaactgctccaaggacgccaacgataccctgctgctccagctgaccaacaccagcgcctactacatgtacttgttgctgctgctgaagtccgtggtgtacttcgccatcatcacatgctgcctgctgcggagaaccgccttctgctgcaacggcgagaagtct

SEQ ID NO: 7986 - DNA, 3000 bp, synthetic construct
  source 1..3000: mol_type = other DNA
atggccttaccagtgaccgccttgctcctgccgctggccttgctgctccacgccgccaggccggaagtgcagctggttgaatctggcggaggactggttcagcctggcggatctctgagactgtcttgtgccgccagcggcttcagcttcagcgacttttggatgagctgggtccgacaggcccctggcaaaggacttgaatgggtcgccacaatcagccaggccggcagcgagaaggactacgtggactctgtgaagggcagattcaccatcagccgggacaacgccaagaagtccctgtacctccagatgaacagcctgagagccgaggacaccgccgtgtactattgtgcctctggcgtgtacagcttcgactacagaggccagggcaccctggtcacagtctcttctggtaccggcggaggcggatctggcggcggaggtagcggtggcggaggatctgaattcgagatcgtgctgacacagagccctgccaccctgtctctgagccctggcgaaagagccaccctgagctgtagagccagccagagcgtgtccagctacctggcctggtatcagcagaagcccggccaggctccccggctgctgatctacgatgccagcaatagagccaccggcatccccgccagattttccggctctggcagcggcaccgacttcaccctgaccatcagctccctggaacccgaggacttcgccgtgtactactgccagcagcggagcaactggcccatcacattcggccagggcacccggctggaaatcaaactcgagatccagaaccctgatcctgccgtgtaccagctgcgggatagcaagagcagcgacaagagcgtgtgtctgttcaccgacttcgacagccagaccaacgtgtcccagagcaaggactccgacgtgtacatcaccgataagtgcgtgctggacatgcggagcatggacttcaagagcaactccgccgtggcctggtccaacaagtccgatttcgcctgcgccaacgccttcaacaacagcattatccccgaggacacattcttcccaagccccgagagcagcgactccaccgaccacgtgaagcccaaagagacagagaacaccaagcagcccagcaagagctgccacaagcccaaggccatcgtgcacaccgagaaagtgaacatgatgagcctgaccgtgctgggcctgcggatgctgttcgccaaaaccgtggccgtgaacttcctgctgaccgccaagctgttcttcctccgcgccaagagaagcggatctggcgtgaagcagaccctgaatttcgacctgctgaagctggctggcgacgtggaatccaacccaggccctactagtatggactggatttggcgcatccttttccttgtcggcgctgctaccggcgcgcattccgggccccagctccagctgcaagagtctggacctggcctggtcaagcctagcgagacactgagcctgacctgtaccgtgtccggcgatagcatcagcagcggcgattactactggggctggatcagacagcctcctggcaaaggactggaatggatcggccacatctactacagcggcgtgacctactacaaccccagcctgaagtccagagtgaccatcagcgtggacaccagccggaaccagttctccctgaagctgtctagcgtgacagccgccgataccgccgtgtactactgcaccagagaggacagcagcaactggcggagtagaggccagggaacactggtcacagttagctctggatccggcggaggcggaagtggaggcggaggatctggcggcggaggctctttcgaagaggtgcagcttgttgagtctggcggaggactggtgcagcccgatagaagcctgagactgtcttgtgccgccagcggcttcaccttccacgattatgccatgcactgggtccgacaggcccctggcaaaggacttgaatgggtgtccaccatctcttggaacagcggcacaatcggctacgccgactctgtgaagggcagattcaccatcagccgggacaacgccaagaacagcctgtacctccagatgaactccctgagagccgaggacacagccctgtactactgcgccaaggacatccagtacggcaactactactacggcatggacgtgtggggccagggcacaacagtgacagtctcttctacgcgtgaggacctgaagaacgtgttcccacctgaggtggccgtgttcgagcctagcgaggccgagatcagccacacccagaaagccaccctcgtgtgcctggctaccggcttctaccccgaccatgtggaactgtcttggtgggtcaacggcaaagaggtgcacagcggcgtgtgtaccgacccccagccactgaaagaacagcccgccctgaacgacagccggtactgcctgagcagcagactgagagtgtccgccaccttctggcagaacccccggaaccacttcagatgccaggtgcagttctacggcctgagcgagaacgacgagtggacccaggacagagccaagcccgtgacccagatcgtgtctgccgaagcctggggcagagccgatgatgtgattaagatccactggcaggaaaagaagtccaacaccatcctgggcagccaggaaggcaacaccatgaagaccaacgacacctacatgaagttcagctggctgaccgtgcccgagaagtccctggacaaagaacacagatgcatcgtgcggcacgaaaacaacaagaacggcgtggaccaggaaatcatcttcccacccatcaagaccgatgtgattacaatggaccccaaggacaactgctccaaggacgccaacgataccctgctgctccagctgaccaacaccagcgcctactacatgtacttgttgctgctgctgaagtccgtggtgtacttcgccatcatcacatgctgcctgctgcggagaaccgccttctgctgcaacggcgagaagtct

SEQ ID NO: 7987 - DNA, 2985 bp, synthetic construct
  source 1..2985: mol_type = other DNA
atggccttaccagtgaccgccttgctcctgccgctggccttgctgctccacgccgccaggccggaagtgcagctggttgaatctggcggaggactggttcagcctggcggatctctgagactgtcttgtgccgccagcggcttcagcttcagcgacttttggatgagctgggtccgacaggcccctggcaaaggacttgaatgggtcgccacaatcagccaggccggcagcgagaaggactacgtggactctgtgaagggcagattcaccatcagccgggacaacgccaagaagtccctgtacctccagatgaacagcctgagagccgaggacaccgccgtgtactattgtgcctctggcgtgtacagcttcgactacagaggccagggcaccctggtcacagtctcttctggtaccggcggaggcggatctggcggcggaggtagcggtggcggaggatctgaattcgacatccagatgacacagagccctagcagcctgtctgccagcgtgggagatagagtgaccatcaactgcaaggccagccaggacatcaacagctacctgagctggttccagcagaagcctggcaaggcccctaagacactgatctaccgggccaacagactggtggatggcgtgccaagcagattttctggcagcggcagcggccaggattacaccctgacaatatccagcctccagcctgaggacttcgccacctactactgcctccagtacgacgagttccctctgacctttggcggaggcaccaaggtggaaatcaaactcgagatccagaaccctgatcctgccgtgtaccagctgcgggatagcaagagcagcgacaagagcgtgtgtctgttcaccgacttcgacagccagaccaacgtgtcccagagcaaggactccgacgtgtacatcaccgataagtgcgtgctggacatgcggagcatggacttcaagagcaactccgccgtggcctggtccaacaagtccgatttcgcctgcgccaacgccttcaacaacagcattatccccgaggacacattcttcccaagccccgagagcagcgactccaccgaccacgtgaagcccaaagagacagagaacaccaagcagcccagcaagagctgccacaagcccaaggccatcgtgcacaccgagaaagtgaacatgatgagcctgaccgtgctgggcctgcggatgctgttcgccaaaaccgtggccgtgaacttcctgctgaccgccaagctgttcttcctccgcgccaagagaagcggatctggcgtgaagcagaccctgaatttcgacctgctgaagctggctggcgacgtggaatccaacccaggccctactagtatggactggatttggcgcatccttttccttgtcggcgctgctaccggcgcgcattccgggccccagctccagctgcaagagtctggacctggcctggtcaagcctagcgagacactgagcctgacctgtaccgtgtccggcgatagcatcagcagcggcgattactactggggctggatcagacagcctcctggcaaaggactggaatggatcggccacatctactacagcggcgtgacctactacaaccccagcctgaagtccagagtgaccatcagcgtggacaccagccggaaccagttctccctgaagctgtctagcgtgacagccgccgataccgccgtgtactactgcaccagagaggacagcagcaactggcggagtagaggccagggaacactggtcacagttagctctggatccggcggaggcggaagtggaggcggaggatctggcggcggaggctctttcgaacaggtgcaactggtgcagtctggggccgaagtgaagaaacctggggcctctgtgaaggtgtcctgcaaagccagcggctacacctttaccaactacgacatcaactgggtccgacaggctccaggccaaggactggaatggatcggctggatctatcctggcgacggcagcaccaagtacaacgagaagttcaaggccaaggccacactgaccgccgataccagcacaagcaccgcctacatggaactgcggagcctgagaagcgacgacaccgccgtgtactattgtgcctccggctacgaggacgctatggactattggggccagggcaccaccgtgacagtgtctagtacgcgtgaggacctgaagaacgtgttcccacctgaggtggccgtgttcgagcctagcgaggccgagatcagccacacccagaaagccaccctcgtgtgcctggctaccggcttctaccccgaccatgtggaactgtcttggtgggtcaacggcaaagaggtgcacagcggcgtgtgtaccgacccccagccactgaaagaacagcccgccctgaacgacagccggtactgcctgagcagcagactgagagtgtccgccaccttctggcagaacccccggaaccacttcagatgccaggtgcagttctacggcctgagcgagaacgacgagtggacccaggacagagccaagcccgtgacccagatcgtgtctgccgaagcctggggcagagccgatgatgtgattaagatccactggcaggaaaagaagtccaacaccatcctgggcagccaggaaggcaacaccatgaagaccaacgacacctacatgaagttcagctggctgaccgtgcccgagaagtccctggacaaagaacacagatgcatcgtgcggcacgaaaacaacaagaacggcgtggaccaggaaatcatcttcccacccatcaagaccgatgtgattacaatggaccccaaggacaactgctccaaggacgccaacgataccctgctgctccagctgaccaacaccagcgcctactacatgtacttgttgctgctgctgaagtccgtggtgtacttcgccatcatcacatgctgcctgctgcggagaaccgccttctgctgcaacggcgagaagtct

SEQ ID NO: 7988 - DNA, 2991 bp, synthetic construct
  source 1..2991: mol_type = other DNA
atggccttaccagtgaccgccttgctcctgccgctggccttgctgctccacgccgccaggccggaagtgcagctggttgaatctggcggaggactggttcagcctggcggatctctgagactgtcttgtgccgccagcggcttcagcttcagcgacttttggatgagctgggtccgacaggcccctggcaaaggacttgaatgggtcgccacaatcagccaggccggcagcgagaaggactacgtggactctgtgaagggcagattcaccatcagccgggacaacgccaagaagtccctgtacctccagatgaacagcctgagagccgaggacaccgccgtgtactattgtgcctctggcgtgtacagcttcgactacagaggccagggcaccctggtcacagtctcttctggtaccggcggaggcggatctggcggcggaggtagcggtggcggaggatctgaattcgacatcgtgatgacccagacacctctgagcctgagcgtgacacctggacagcctgccagcattagctgcaagagcagccagtctctgctggacggcgacggcaagacctacctgaattggctgctccagaagcctggacagagccctcagcggctgatctacctggtgtccaagctggatagcggcgtgcccgatagattttctggcagcggctctggcaccgacttcaccctgaagatcagcagagtggaagccgaggacgtgggcgtgtactactgttggcagggcacacacttccccagaacattcggccagggcacaaagctggaaatcaaactcgagatccagaaccctgatcctgccgtgtaccagctgcgggatagcaagagcagcgacaagagcgtgtgtctgttcaccgacttcgacagccagaccaacgtgtcccagagcaaggactccgacgtgtacatcaccgataagtgcgtgctggacatgcggagcatggacttcaagagcaactccgccgtggcctggtccaacaagtccgatttcgcctgcgccaacgccttcaacaacagcattatccccgaggacacattcttcccaagccccgagagcagcgactccaccgaccacgtgaagcccaaagagacagagaacaccaagcagcccagcaagagctgccacaagcccaaggccatcgtgcacaccgagaaagtgaacatgatgagcctgaccgtgctgggcctgcggatgctgttcgccaaaaccgtggccgtgaacttcctgctgaccgccaagctgttcttcctccgcgccaagagaagcggatctggcgtgaagcagaccctgaatttcgacctgctgaagctggctggcgacgtggaatccaacccaggccctactagtatggactggatttggcgcatccttttccttgtcggcgctgctaccggcgcgcattccgggccccagctccagctgcaagagtctggacctggcctggtcaagcctagcgagacactgagcctgacctgtaccgtgtccggcgatagcatcagcagcggcgattactactggggctggatcagacagcctcctggcaaaggactggaatggatcggccacatctactacagcggcgtgacctactacaaccccagcctgaagtccagagtgaccatcagcgtggacaccagccggaaccagttctccctgaagctgtctagcgtgacagccgccgataccgccgtgtactactgcaccagagaggacagcagcaactggcggagtagaggccagggaacactggtcacagttagctctggatccggcggaggcggaagtggaggcggaggatctggcggcggaggctctttcgaacaagtgcaactggttcagagcggagccgaagtgaagaaacctggggcctctgtgaaggtgtcctgcaaggccagcggctacaccttcaaggacacctacatccactgggtccgacaggcccctggacaaggacttgagtggatgggcagaatcgaccccgccaacggcaacaccaaatacgaccccaagttccagggcagagtgaccatgaccagagacaccagcatcagcaccgcctacatggaactgagccggctgagatccgatgacaccgccgtgtactattgcgctagaagaggcggagtggattggggccagggaacactggttaccgtgtctagtacgcgtgaggacctgaagaacgtgttcccacctgaggtggccgtgttcgagcctagcgaggccgagatcagccacacccagaaagccaccctcgtgtgcctggctaccggcttctaccccgaccatgtggaactgtcttggtgggtcaacggcaaagaggtgcacagcggcgtgtgtaccgacccccagccactgaaagaacagcccgccctgaacgacagccggtactgcctgagcagcagactgagagtgtccgccaccttctggcagaacccccggaaccacttcagatgccaggtgcagttctacggcctgagcgagaacgacgagtggacccaggacagagccaagcccgtgacccagatcgtgtctgccgaagcctggggcagagccgatgatgtgattaagatccactggcaggaaaagaagtccaacaccatcctgggcagccaggaaggcaacaccatgaagaccaacgacacctacatgaagttcagctggctgaccgtgcccgagaagtccctggacaaagaacacagatgcatcgtgcggcacgaaaacaacaagaacggcgtggaccaggaaatcatcttcccacccatcaagaccgatgtgattacaatggaccccaaggacaactgctccaaggacgccaacgataccctgctgctccagctgaccaacaccagcgcctactacatgtacttgttgctgctgctgaagtccgtggtgtacttcgccatcatcacatgctgcctgctgcggagaaccgccttctgctgcaacggcgagaagtct

SEQ ID NO: 7989 - DNA, 2994 bp, synthetic construct
  source 1..2994: mol_type = other DNA
atggccttaccagtgaccgccttgctcctgccgctggccttgctgctccacgccgccaggccggaagtgcagctggttgaatctggcggaggactggttcagcctggcggatctctgagactgtcttgtgccgccagcggcttcagcttcagcgacttttggatgagctgggtccgacaggcccctggcaaaggacttgaatgggtcgccacaatcagccaggccggcagcgagaaggactacgtggactctgtgaagggcagattcaccatcagccgggacaacgccaagaagtccctgtacctccagatgaacagcctgagagccgaggacaccgccgtgtactattgtgcctctggcgtgtacagcttcgactacagaggccagggcaccctggtcacagtctcttctggtaccggcggaggcggatctggcggcggaggtagcggtggcggaggatctgaattcgacatccagatgacacagagccctagcagcctgtctgccagcgtgggagacagagtgaccatcacatgcaaggccagccaggatgtgtctacagccgtggcctggttccagcagaagcctggaaaagcccctaagctgctgatctacagccccagctacagatacaccggcgtgcccagcagattttctggcagcggctctggcaccgacttcaccctgacaatatccagcctccagcctgaggacttcacctactactgccagcagctctacagcaccccttacacattcggccagggcaccaaggtggaaatcaaactcgagatccagaaccctgatcctgccgtgtaccagctgcgggatagcaagagcagcgacaagagcgtgtgtctgttcaccgacttcgacagccagaccaacgtgtcccagagcaaggactccgacgtgtacatcaccgataagtgcgtgctggacatgcggagcatggacttcaagagcaactccgccgtggcctggtccaacaagtccgatttcgcctgcgccaacgccttcaacaacagcattatccccgaggacacattcttcccaagccccgagagcagcgactccaccgaccacgtgaagcccaaagagacagagaacaccaagcagcccagcaagagctgccacaagcccaaggccatcgtgcacaccgagaaagtgaacatgatgagcctgaccgtgctgggcctgcggatgctgttcgccaaaaccgtggccgtgaacttcctgctgaccgccaagctgttcttcctccgcgccaagagaagcggatctggcgtgaagcagaccctgaatttcgacctgctgaagctggctggcgacgtggaatccaacccaggccctactagtatggactggatttggcgcatccttttccttgtcggcgctgctaccggcgcgcattccgggccccagctccagctgcaagagtctggacctggcctggtcaagcctagcgagacactgagcctgacctgtaccgtgtccggcgatagcatcagcagcggcgattactactggggctggatcagacagcctcctggcaaaggactggaatggatcggccacatctactacagcggcgtgacctactacaaccccagcctgaagtccagagtgaccatcagcgtggacaccagccggaaccagttctccctgaagctgtctagcgtgacagccgccgataccgccgtgtactactgcaccagagaggacagcagcaactggcggagtagaggccagggaacactggtcacagttagctctggatccggcggaggcggaagtggaggcggaggatctggcggcggaggctctttcgaagaagtgcaactggttcagagcggagccgaagtgaagaaacctggggcctctgtgaaggtgtcctgcaaagccagcggctacacctttaccgactactacctggacgtggtcgtgcggcaagctcctggacaaggactggaatggatcggcagagtgaacccctacaacggcggcaccatctacaaccagaaattcaagggaagagtgaccctgaccagagacaccagcacctccacagcctacctggaactgagcagcctgagaagcgaagataccgccgtgtactactgcgccagggaccactacagatatgaccctctgctggactactggggccagggaaccctggttacagtgtctagtacgcgtgaggacctgaagaacgtgttcccacctgaggtggccgtgttcgagcctagcgaggccgagatcagccacacccagaaagccaccctcgtgtgcctggctaccggcttctaccccgaccatgtggaactgtcttggtgggtcaacggcaaagaggtgcacagcggcgtgtgtaccgacccccagccactgaaagaacagcccgccctgaacgacagccggtactgcctgagcagcagactgagagtgtccgccaccttctggcagaacccccggaaccacttcagatgccaggtgcagttctacggcctgagcgagaacgacgagtggacccaggacagagccaagcccgtgacccagatcgtgtctgccgaagcctggggcagagccgatgatgtgattaagatccactggcaggaaaagaagtccaacaccatcctgggcagccaggaaggcaacaccatgaagaccaacgacacctacatgaagttcagctggctgaccgtgcccgagaagtccctggacaaagaacacagatgcatcgtgcggcacgaaaacaacaagaacggcgtggaccaggaaatcatcttcccacccatcaagaccgatgtgattacaatggaccccaaggacaactgctccaaggacgccaacgataccctgctgctccagctgaccaacaccagcgcctactacatgtacttgttgctgctgctgaagtccgtggtgtacttcgccatcatcacatgctgcctgctgcggagaaccgccttctgctgcaacggcgagaagtct

SEQ ID NO: 7990 - DNA, 3012 bp, synthetic construct
  source 1..3012: mol_type = other DNA
atggccttaccagtgaccgccttgctcctgccgctggccttgctgctccacgccgccaggccggaagtgcagctggttgaatctggcggaggactggttcagcctggcggatctctgagactgtcttgtgccgccagcggcttcagcttcagcgacttttggatgagctgggtccgacaggcccctggcaaaggacttgaatgggtcgccacaatcagccaggccggcagcgagaaggactacgtggactctgtgaagggcagattcaccatcagccgggacaacgccaagaagtccctgtacctccagatgaacagcctgagagccgaggacaccgccgtgtactattgtgcctctggcgtgtacagcttcgactacagaggccagggcaccctggtcacagtctcttctggtaccggcggaggcggatctggcggcggaggtagcggtggcggaggatctgaattcgacatccagatgacacagagccctagcagcctgtctgccagcgtgggagacagagtgaccatcacctgtagagccagccagagcgtgtccaccagcagctacaactacatgcactggtatcagcagaagcccggcaagcctcctaagctgctgattaagtacgccagcaacctggaaagcggcgtgcccagcagattttctggcagcggctctggcaccgacttcaccctgacaatatccagcctccagcctgaggacttcgccacctactactgtcagcactcctgggagatccctctgacattcggccagggcaccaaggtggaaatcaaactcgagatccagaaccctgatcctgccgtgtaccagctgcgggatagcaagagcagcgacaagagcgtgtgtctgttcaccgacttcgacagccagaccaacgtgtcccagagcaaggactccgacgtgtacatcaccgataagtgcgtgctggacatgcggagcatggacttcaagagcaactccgccgtggcctggtccaacaagtccgatttcgcctgcgccaacgccttcaacaacagcattatccccgaggacacattcttcccaagccccgagagcagcgactccaccgaccacgtgaagcccaaagagacagagaacaccaagcagcccagcaagagctgccacaagcccaaggccatcgtgcacaccgagaaagtgaacatgatgagcctgaccgtgctgggcctgcggatgctgttcgccaaaaccgtggccgtgaacttcctgctgaccgccaagctgttcttcctccgcgccaagagaagcggatctggcgtgaagcagaccctgaatttcgacctgctgaagctggctggcgacgtggaatccaacccaggccctactagtatggactggatttggcgcatccttttccttgtcggcgctgctaccggcgcgcattccgggccccagctccagctgcaagagtctggacctggcctggtcaagcctagcgagacactgagcctgacctgtaccgtgtccggcgatagcatcagcagcggcgattactactggggctggatcagacagcctcctggcaaaggactggaatggatcggccacatctactacagcggcgtgacctactacaaccccagcctgaagtccagagtgaccatcagcgtggacaccagccggaaccagttctccctgaagctgtctagcgtgacagccgccgataccgccgtgtactactgcaccagagaggacagcagcaactggcggagtagaggccagggaacactggtcacagttagctctggatccggcggaggcggaagtggaggcggaggatctggcggcggaggctctttcgaagaagtgcaactggttcagagcggagccgaagtgaagaaacctggggcctctgtgaaggtgtcctgcaaggccagcggctacagcttcaccgactattatatgcactgggtccgacaggctccaggccagggacttgagtggatcggcagaatcaacccctacaacggcgctgccttctacagccagaacttcaaggatagagtgaccctgaccgtggacaccagcaccagcacagcctacctggaactgagcagcctgagaagcgaggacaccgccgtgtactactgcgccattgagagaggcgctgacctggaaggctacgctatggattattggggccagggaaccctggtcaccgtgtcatctacgcgtgaggacctgaagaacgtgttcccacctgaggtggccgtgttcgagcctagcgaggccgagatcagccacacccagaaagccaccctcgtgtgcctggctaccggcttctaccccgaccatgtggaactgtcttggtgggtcaacggcaaagaggtgcacagcggcgtgtgtaccgacccccagccactgaaagaacagcccgccctgaacgacagccggtactgcctgagcagcagactgagagtgtccgccaccttctggcagaacccccggaaccacttcagatgccaggtgcagttctacggcctgagcgagaacgacgagtggacccaggacagagccaagcccgtgacccagatcgtgtctgccgaagcctggggcagagccgatgatgtgattaagatccactggcaggaaaagaagtccaacaccatcctgggcagccaggaaggcaacaccatgaagaccaacgacacctacatgaagttcagctggctgaccgtgcccgagaagtccctggacaaagaacacagatgcatcgtgcggcacgaaaacaacaagaacggcgtggaccaggaaatcatcttcccacccatcaagaccgatgtgattacaatggaccccaaggacaactgctccaaggacgccaacgataccctgctgctccagctgaccaacaccagcgcctactacatgtacttgttgctgctgctgaagtccgtggtgtacttcgccatcatcacatgctgcctgctgcggagaaccgccttctgctgcaacggcgagaagtct

SEQ ID NO: 7991 - DNA, 3006 bp, synthetic construct
  source 1..3006: mol_type = other DNA
atggccttaccagtgaccgccttgctcctgccgctggccttgctgctccacgccgccaggccggaagtgcagctggttgaatctggcggaggactggttcagcctggcggatctctgagactgtcttgtgccgccagcggcttcagcttcagcgacttttggatgagctgggtccgacaggcccctggcaaaggacttgaatgggtcgccacaatcagccaggccggcagcgagaaggactacgtggactctgtgaagggcagattcaccatcagccgggacaacgccaagaagtccctgtacctccagatgaacagcctgagagccgaggacaccgccgtgtactattgtgcctctggcgtgtacagcttcgactacagaggccagggcaccctggtcacagtctcttctggtaccggcggaggcggatctggcggcggaggtagcggtggcggaggatctgaattcgagatcgtgctgacacagtctccagccacactgagcgcttctccaggcgagagagtgaccctgacctgtagagccagcagcaacgtgatctccagctacgtgcactggtatcagcagaagcctggcagcagccccagactgtttctgtacagcaccagcaatctggcctccggcgtgccaagcagattttctggctctggcagcggcaccgacttcacctttaccatctctagcctggaagccgaggacgccgccacctactactgtcagcagtacagcggctaccctctgaccttcggccagggcacaagactggaaatcaaactcgagatccagaaccctgatcctgccgtgtaccagctgcgggatagcaagagcagcgacaagagcgtgtgtctgttcaccgacttcgacagccagaccaacgtgtcccagagcaaggactccgacgtgtacatcaccgataagtgcgtgctggacatgcggagcatggacttcaagagcaactccgccgtggcctggtccaacaagtccgatttcgcctgcgccaacgccttcaacaacagcattatccccgaggacacattcttcccaagccccgagagcagcgactccaccgaccacgtgaagcccaaagagacagagaacaccaagcagcccagcaagagctgccacaagcccaaggccatcgtgcacaccgagaaagtgaacatgatgagcctgaccgtgctgggcctgcggatgctgttcgccaaaaccgtggccgtgaacttcctgctgaccgccaagctgttcttcctccgcgccaagagaagcggatctggcgtgaagcagaccctgaatttcgacctgctgaagctggctggcgacgtggaatccaacccaggccctactagtatggactggatttggcgcatccttttccttgtcggcgctgctaccggcgcgcattccgggccccagctccagctgcaagagtctggacctggcctggtcaagcctagcgagacactgagcctgacctgtaccgtgtccggcgatagcatcagcagcggcgattactactggggctggatcagacagcctcctggcaaaggactggaatggatcggccacatctactacagcggcgtgacctactacaaccccagcctgaagtccagagtgaccatcagcgtggacaccagccggaaccagttctccctgaagctgtctagcgtgacagccgccgataccgccgtgtactactgcaccagagaggacagcagcaactggcggagtagaggccagggaacactggtcacagttagctctggatccggcggaggcggaagtggaggcggaggatctggcggcggaggctctttcgaacaagttcagctgcaagagtctggccctggcctggtcaagcctagcgaaacactgagcctgacctgcgccgtgtctggctactctatcaccagcgcctactattggaactggatcagacagcctcctggcaaaggactggaatggatcggctacatcagctacgacggcagaaacaactacaaccccagcctgaagaaccggatcaccatcaatcccgacaccagcaagaaccagttcagcctccagctgaacagcgtgacccctgaggataccgccgtgtactactgtgccagagaaggcgactacgacgtgggcaactactacgctatggactactggggccagggaaccctggtcacagtctcttctacgcgtgaggacctgaagaacgtgttcccacctgaggtggccgtgttcgagcctagcgaggccgagatcagccacacccagaaagccaccctcgtgtgcctggctaccggcttctaccccgaccatgtggaactgtcttggtgggtcaacggcaaagaggtgcacagcggcgtgtgtaccgacccccagccactgaaagaacagcccgccctgaacgacagccggtactgcctgagcagcagactgagagtgtccgccaccttctggcagaacccccggaaccacttcagatgccaggtgcagttctacggcctgagcgagaacgacgagtggacccaggacagagccaagcccgtgacccagatcgtgtctgccgaagcctggggcagagccgatgatgtgattaagatccactggcaggaaaagaagtccaacaccatcctgggcagccaggaaggcaacaccatgaagaccaacgacacctacatgaagttcagctggctgaccgtgcccgagaagtccctggacaaagaacacagatgcatcgtgcggcacgaaaacaacaagaacggcgtggaccaggaaatcatcttcccacccatcaagaccgatgtgattacaatggaccccaaggacaactgctccaaggacgccaacgataccctgctgctccagctgaccaacaccagcgcctactacatgtacttgttgctgctgctgaagtccgtggtgtacttcgccatcatcacatgctgcctgctgcggagaaccgccttctgctgcaacggcgagaagtct

SEQ ID NO: 7992 - DNA, 3006 bp, synthetic construct
  source 1..3006: mol_type = other DNA
atggccttaccagtgaccgccttgctcctgccgctggccttgctgctccacgccgccaggccggaagtgcagctggttgaatctggcggaggactggttcagcctggcggatctctgagactgtcttgtgccgccagcggcttcagcttcagcgacttttggatgagctgggtccgacaggcccctggcaaaggacttgaatgggtcgccacaatcagccaggccggcagcgagaaggactacgtggactctgtgaagggcagattcaccatcagccgggacaacgccaagaagtccctgtacctccagatgaacagcctgagagccgaggacaccgccgtgtactattgtgcctctggcgtgtacagcttcgactacagaggccagggcaccctggtcacagtctcttctggtaccggcggaggcggatctggcggcggaggtagcggtggcggaggatctgaattcgagatcgtgctgacacagtctcccgccacactgtcactgtctccaggcgaaagagccacactgagctgtagagccagcagcaacgtgatctccagctacgtgcactggtatcagcagaagcctggacaggcccctcggctgctgatctacagcacaagcaatctggcctctggcatccccgccagattttctggctctggaagcggcaccgacttcaccctgaccataagcagcctggaacctgaggacttcgccgtgtactactgccagcagtatagcggctaccctctgaccttcggccagggcacaagactggaaatcaaactcgagatccagaaccctgatcctgccgtgtaccagctgcgggatagcaagagcagcgacaagagcgtgtgtctgttcaccgacttcgacagccagaccaacgtgtcccagagcaaggactccgacgtgtacatcaccgataagtgcgtgctggacatgcggagcatggacttcaagagcaactccgccgtggcctggtccaacaagtccgatttcgcctgcgccaacgccttcaacaacagcattatccccgaggacacattcttcccaagccccgagagcagcgactccaccgaccacgtgaagcccaaagagacagagaacaccaagcagcccagcaagagctgccacaagcccaaggccatcgtgcacaccgagaaagtgaacatgatgagcctgaccgtgctgggcctgcggatgctgttcgccaaaaccgtggccgtgaacttcctgctgaccgccaagctgttcttcctccgcgccaagagaagcggatctggcgtgaagcagaccctgaatttcgacctgctgaagctggctggcgacgtggaatccaacccaggccctactagtatggactggatttggcgcatccttttccttgtcggcgctgctaccggcgcgcattccgggccccagctccagctgcaagagtctggacctggcctggtcaagcctagcgagacactgagcctgacctgtaccgtgtccggcgatagcatcagcagcggcgattactactggggctggatcagacagcctcctggcaaaggactggaatggatcggccacatctactacagcggcgtgacctactacaaccccagcctgaagtccagagtgaccatcagcgtggacaccagccggaaccagttctccctgaagctgtctagcgtgacagccgccgataccgccgtgtactactgcaccagagaggacagcagcaactggcggagtagaggccagggaacactggtcacagttagctctggatccggcggaggcggaagtggaggcggaggatctggcggcggaggctctttcgaagaagtgcaactggtggaaagtggcggcggactggtgcaacctggaagaagcctgagactgtcctgtgccgccagcggctactctatcacaagcgcctactactggaactgggtccgacaggctcctggcaaaggactggaatgggtgtcctacatcagctacgacggcagaaacaactacaaccccagcctgaagaaccgcttcaccatcagccgggacaacgccaagaagtccctgtacctccagatgaacagcctgagagccgaggacacagccctgtactattgcgccaaagagggcgactacgacgtcggcaactactacgctatggactactggggccagggaaccaccgtgactgtctcttctacgcgtgaggacctgaagaacgtgttcccacctgaggtggccgtgttcgagcctagcgaggccgagatcagccacacccagaaagccaccctcgtgtgcctggctaccggcttctaccccgaccatgtggaactgtcttggtgggtcaacggcaaagaggtgcacagcggcgtgtgtaccgacccccagccactgaaagaacagcccgccctgaacgacagccggtactgcctgagcagcagactgagagtgtccgccaccttctggcagaacccccggaaccacttcagatgccaggtgcagttctacggcctgagcgagaacgacgagtggacccaggacagagccaagcccgtgacccagatcgtgtctgccgaagcctggggcagagccgatgatgtgattaagatccactggcaggaaaagaagtccaacaccatcctgggcagccaggaaggcaacaccatgaagaccaacgacacctacatgaagttcagctggctgaccgtgcccgagaagtccctggacaaagaacacagatgcatcgtgcggcacgaaaacaacaagaacggcgtggaccaggaaatcatcttcccacccatcaagaccgatgtgattacaatggaccccaaggacaactgctccaaggacgccaacgataccctgctgctccagctgaccaacaccagcgcctactacatgtacttgttgctgctgctgaagtccgtggtgtacttcgccatcatcacatgctgcctgctgcggagaaccgccttctgctgcaacggcgagaagtct

SEQ ID NO: 7993 - DNA, 3003 bp, synthetic construct
  source 1..3003: mol_type = other DNA
atggccttaccagtgaccgccttgctcctgccgctggccttgctgctccacgccgccaggccggaagtgcagctggttgaatctggcggaggactggttcagcctggcggatctctgagactgtcttgtgccgccagcggcttcagcttcagcgacttttggatgagctgggtccgacaggcccctggcaaaggacttgaatgggtcgccacaatcagccaggccggcagcgagaaggactacgtggactctgtgaagggcagattcaccatcagccgggacaacgccaagaagtccctgtacctccagatgaacagcctgagagccgaggacaccgccgtgtactattgtgcctctggcgtgtacagcttcgactacagaggccagggcaccctggtcacagtctcttctggtaccggcggaggcggatctggcggcggaggtagcggtggcggaggatctgaattcgacgtggtcatgacacagaccccactgagcctgcctgtgtctctgggagatcaggccagcatctcctgtagaagcagccagagcctggtgcacagcaacggcaacacctacctgcggtggtatctccagaagcctggacagagccccaaggtgctgatctacaaggtgtccaacagagtgtccggcgtgcccgatagattttctggcagcggctctggcaccgacttcaccctgaagatcaatagagtggaagccgaggacctgggcgtgtacttctgtagccagagcacccatgtgccttggacctttggcggaggcaccaagctggaaatcaagctcgagatccagaaccctgatcctgccgtgtaccagctgcgggatagcaagagcagcgacaagagcgtgtgtctgttcaccgacttcgacagccagaccaacgtgtcccagagcaaggactccgacgtgtacatcaccgataagtgcgtgctggacatgcggagcatggacttcaagagcaactccgccgtggcctggtccaacaagtccgatttcgcctgcgccaacgccttcaacaacagcattatccccgaggacacattcttcccaagccccgagagcagcgactccaccgaccacgtgaagcccaaagagacagagaacaccaagcagcccagcaagagctgccacaagcccaaggccatcgtgcacaccgagaaagtgaacatgatgagcctgaccgtgctgggcctgcggatgctgttcgccaaaaccgtggccgtgaacttcctgctgaccgccaagctgttcttcctccgcgccaagagaagcggatctggcgtgaagcagaccctgaatttcgacctgctgaagctggctggcgacgtggaatccaacccaggccctactagtatggactggatttggcgcatccttttccttgtcggcgctgctaccggcgcgcattccgggccccagctccagctgcaagagtctggacctggcctggtcaagcctagcgagacactgagcctgacctgtaccgtgtccggcgatagcatcagcagcggcgattactactggggctggatcagacagcctcctggcaaaggactggaatggatcggccacatctactacagcggcgtgacctactacaaccccagcctgaagtccagagtgaccatcagcgtggacaccagccggaaccagttctccctgaagctgtctagcgtgacagccgccgataccgccgtgtactactgcaccagagaggacagcagcaactggcggagtagaggccagggaacactggtcacagttagctctggatccggcggaggcggaagtggaggcggaggatctggcggcggaggctctttcgaaggcgtgaagctggacgagacaggcggaggacttgttcaacctggcggagccatgaagctgagctgtgtgaccagcggctttaccttcggccactactggatgaactgggtccgacagtcccctgagaaaggactggaatgggtcgcccagttcagaaacaagccctacaactacgaaacctactacagcgacagcgtgaagggcagattcaccatcagccgggacgacagcaagtccagcgtgtacctccagatgaacaacctgcgcgtggaagataccggcatctactactgtaccggggccagctacggcatggaatatctcggccagggcaccagcgtgaccgtgtctacaacgcgtgaggacctgaagaacgtgttcccacctgaggtggccgtgttcgagcctagcgaggccgagatcagccacacccagaaagccaccctcgtgtgcctggctaccggcttctaccccgaccatgtggaactgtcttggtgggtcaacggcaaagaggtgcacagcggcgtgtgtaccgacccccagccactgaaagaacagcccgccctgaacgacagccggtactgcctgagcagcagactgagagtgtccgccaccttctggcagaacccccggaaccacttcagatgccaggtgcagttctacggcctgagcgagaacgacgagtggacccaggacagagccaagcccgtgacccagatcgtgtctgccgaagcctggggcagagccgatgatgtgattaagatccactggcaggaaaagaagtccaacaccatcctgggcagccaggaaggcaacaccatgaagaccaacgacacctacatgaagttcagctggctgaccgtgcccgagaagtccctggacaaagaacacagatgcatcgtgcggcacgaaaacaacaagaacggcgtggaccaggaaatcatcttcccacccatcaagaccgatgtgattacaatggaccccaaggacaactgctccaaggacgccaacgataccctgctgctccagctgaccaacaccagcgcctactacatgtacttgttgctgctgctgaagtccgtggtgtacttcgccatcatcacatgctgcctgctgcggagaaccgccttctgctgcaacggcgagaagtct

SEQ ID NO: 7994 - DNA, 3021 bp, synthetic construct
  source 1..3021: mol_type = other DNA
atggccttaccagtgaccgccttgctcctgccgctggccttgctgctccacgccgccaggccggaagtgcagctggttgaatctggcggaggactggttcagcctggcggatctctgagactgtcttgtgccgccagcggcttcagcttcagcgacttttggatgagctgggtccgacaggcccctggcaaaggacttgaatgggtcgccacaatcagccaggccggcagcgagaaggactacgtggactctgtgaagggcagattcaccatcagccgggacaacgccaagaagtccctgtacctccagatgaacagcctgagagccgaggacaccgccgtgtactattgtgcctctggcgtgtacagcttcgactacagaggccagggcaccctggtcacagtctcttctggtaccggcggaggcggatctggcggcggaggtagcggtggcggaggatctgaattccaggtgcaactggtggaatctggcggcaatctggttcagcctggcggctctctgagactgtcttgtgccgccagcggcttcaccttcggcagcttttctatgagctgggtccgacaagctcctggcggaggacttgaatgggtggcaggactgtctgccagaagcagcctgacacactacgccgactctgtgaagggcagattcaccatcagccgggacaacgccaagaacagcgtgtacctccagatgaacagcctgagagtggaagataccgccgtgtactactgcgccagaagaagctacgacagcagcggctactggggccacttctacagctacatggatgtgtggggccagggcaccctggttacagtttctctcgagatccagaaccctgatcctgccgtgtaccagctgcgggatagcaagagcagcgacaagagcgtgtgtctgttcaccgacttcgacagccagaccaacgtgtcccagagcaaggactccgacgtgtacatcaccgataagtgcgtgctggacatgcggagcatggacttcaagagcaactccgccgtggcctggtccaacaagtccgatttcgcctgcgccaacgccttcaacaacagcattatccccgaggacacattcttcccaagccccgagagcagcgactccaccgaccacgtgaagcccaaagagacagagaacaccaagcagcccagcaagagctgccacaagcccaaggccatcgtgcacaccgagaaagtgaacatgatgagcctgaccgtgctgggcctgcggatgctgttcgccaaaaccgtggccgtgaacttcctgctgaccgccaagctgttcttcctccgcgccaagagaagcggatctggcgtgaagcagaccctgaatttcgacctgctgaagctggctggcgacgtggaatccaacccaggccctactagtatggactggatttggcgcatccttttccttgtcggcgctgctaccggcgcgcattccgggccccagctccagctgcaagagtctggacctggcctggtcaagcctagcgagacactgagcctgacctgtaccgtgtccggcgatagcatcagcagcggcgattactactggggctggatcagacagcctcctggcaaaggactggaatggatcggccacatctactacagcggcgtgacctactacaaccccagcctgaagtccagagtgaccatcagcgtggacaccagccggaaccagttctccctgaagctgtctagcgtgacagccgccgataccgccgtgtactactgcaccagagaggacagcagcaactggcggagtagaggccagggaacactggtcacagttagctctggatccggcggaggcggaagtggaggcggaggatctggcggcggaggctctttcgaatctgtgctgacccagcctagctccgtgtctgctgctcctggacagaaagtgaccatctcctgtagcggcagcaccagcaacatcggcaacaactacgtgtcctggtatcagcagcaccccggcaaggcccctaagctgatgatctacgacgtgtccaagaggcccagcggcgtgccagatagattttccggcagcaagagcggcaacagcgccagcctggatattagcggactccagtctgaggacgaggccgactactattgcgccgcctgggatgatagcctgagcgagtttctgtttggcaccggcaccaagctgacagtgcttggaacgcgtgaggacctgaagaacgtgttcccacctgaggtggccgtgttcgagcctagcgaggccgagatcagccacacccagaaagccaccctcgtgtgcctggctaccggcttctaccccgaccatgtggaactgtcttggtgggtcaacggcaaagaggtgcacagcggcgtgtgtaccgacccccagccactgaaagaacagcccgccctgaacgacagccggtactgcctgagcagcagactgagagtgtccgccaccttctggcagaacccccggaaccacttcagatgccaggtgcagttctacggcctgagcgagaacgacgagtggacccaggacagagccaagcccgtgacccagatcgtgtctgccgaagcctggggcagagccgatgatgtgattaagatccactggcaggaaaagaagtccaacaccatcctgggcagccaggaaggcaacaccatgaagaccaacgacacctacatgaagttcagctggctgaccgtgcccgagaagtccctggacaaagaacacagatgcatcgtgcggcacgaaaacaacaagaacggcgtggaccaggaaatcatcttcccacccatcaagaccgatgtgattacaatggaccccaaggacaactgctccaaggacgccaacgataccctgctgctccagctgaccaacaccagcgcctactacatgtacttgttgctgctgctgaagtccgtggtgtacttcgccatcatcacatgctgcctgctgcggagaaccgccttctgctgcaacggcgagaagtct

SEQ ID NO: 7995 - DNA, 3006 bp, synthetic construct
  source 1..3006: mol_type = other DNA
atggccttaccagtgaccgccttgctcctgccgctggccttgctgctccacgccgccaggccggaagtgcagctggttgaatctggcggaggactggttcagcctggcggatctctgagactgtcttgtgccgccagcggcttcagcttcagcgacttttggatgagctgggtccgacaggcccctggcaaaggacttgaatgggtcgccacaatcagccaggccggcagcgagaaggactacgtggactctgtgaagggcagattcaccatcagccgggacaacgccaagaagtccctgtacctccagatgaacagcctgagagccgaggacaccgccgtgtactattgtgcctctggcgtgtacagcttcgactacagaggccagggcaccctggtcacagtctcttctggtaccggcggaggcggatctggcggcggaggtagcggtggcggaggatctgaattcgacgtggtcatgacacagagcccttctagcctgtctgccagcgtgggcgacagagtgacaatcacctgtcagagcagcctggacatcagccactacctgaactggtatcagcagaagcccggcaaggcccctaagctgctgatctacgacgccagcaatctggaaaccggcgtgcccagcagattttctggcagcggaagcggcacccacttcaccttcacaatatccagcctccagcctgaggacttcgccacctactactgccagcagtacgacaacctgcctctgacctttggcggaggcaccaagctggaaatcaagagactcgagatccagaaccctgatcctgccgtgtaccagctgcgggatagcaagagcagcgacaagagcgtgtgtctgttcaccgacttcgacagccagaccaacgtgtcccagagcaaggactccgacgtgtacatcaccgataagtgcgtgctggacatgcggagcatggacttcaagagcaactccgccgtggcctggtccaacaagtccgatttcgcctgcgccaacgccttcaacaacagcattatccccgaggacacattcttcccaagccccgagagcagcgactccaccgaccacgtgaagcccaaagagacagagaacaccaagcagcccagcaagagctgccacaagcccaaggccatcgtgcacaccgagaaagtgaacatgatgagcctgaccgtgctgggcctgcggatgctgttcgccaaaaccgtggccgtgaacttcctgctgaccgccaagctgttcttcctccgcgccaagagaagcggatctggcgtgaagcagaccctgaatttcgacctgctgaagctggctggcgacgtggaatccaacccaggccctactagtatggactggatttggcgcatccttttccttgtcggcgctgctaccggcgcgcattccgggccccagctccagctgcaagagtctggacctggcctggtcaagcctagcgagacactgagcctgacctgtaccgtgtccggcgatagcatcagcagcggcgattactactggggctggatcagacagcctcctggcaaaggactggaatggatcggccacatctactacagcggcgtgacctactacaaccccagcctgaagtccagagtgaccatcagcgtggacaccagccggaaccagttctccctgaagctgtctagcgtgacagccgccgataccgccgtgtactactgcaccagagaggacagcagcaactggcggagtagaggccagggaacactggtcacagttagctctggatccggcggaggcggaagtggaggcggaggatctggcggcggaggctctttcgaacaagttcaactggttcaatcaggcggaggcgtggtgcaacctggtggctctctgagagtgtcttgtgctgcctctggcgtgaccctgagcgactatggaatgcactgggtccgacaggcccctggcaaaggacttgagtgggtcgccttcatcagaaacgacggcagcgacaagtattacgccgacagcgtgaagggcagattcaccatcagccgggacaacagcgagaaaaccgtgtctctccagatgtctagcctgagagccgaggacaccgccgtgtactactgtgccaagaatggcgagagcggccctctggactactggtatctggatctgtggggcagaggcaccctggtcacagtctcttctacgcgtgaggacctgaagaacgtgttcccacctgaggtggccgtgttcgagcctagcgaggccgagatcagccacacccagaaagccaccctcgtgtgcctggctaccggcttctaccccgaccatgtggaactgtcttggtgggtcaacggcaaagaggtgcacagcggcgtgtgtaccgacccccagccactgaaagaacagcccgccctgaacgacagccggtactgcctgagcagcagactgagagtgtccgccaccttctggcagaacccccggaaccacttcagatgccaggtgcagttctacggcctgagcgagaacgacgagtggacccaggacagagccaagcccgtgacccagatcgtgtctgccgaagcctggggcagagccgatgatgtgattaagatccactggcaggaaaagaagtccaacaccatcctgggcagccaggaaggcaacaccatgaagaccaacgacacctacatgaagttcagctggctgaccgtgcccgagaagtccctggacaaagaacacagatgcatcgtgcggcacgaaaacaacaagaacggcgtggaccaggaaatcatcttcccacccatcaagaccgatgtgattacaatggaccccaaggacaactgctccaaggacgccaacgataccctgctgctccagctgaccaacaccagcgcctactacatgtacttgttgctgctgctgaagtccgtggtgtacttcgccatcatcacatgctgcctgctgcggagaaccgccttctgctgcaacggcgagaagtct

SEQ ID NO: 7996 - DNA, 3018 bp, synthetic construct
  source 1..3018: mol_type = other DNA
atggccttaccagtgaccgccttgctcctgccgctggccttgctgctccacgccgccaggccggaagtgcagctggttgaatctggcggaggactggttcagcctggcggatctctgagactgtcttgtgccgccagcggcttcagcttcagcgacttttggatgagctgggtccgacaggcccctggcaaaggacttgaatgggtcgccacaatcagccaggccggcagcgagaaggactacgtggactctgtgaagggcagattcaccatcagccgggacaacgccaagaagtccctgtacctccagatgaacagcctgagagccgaggacaccgccgtgtactattgtgcctctggcgtgtacagcttcgactacagaggccagggcaccctggtcacagtctcttctggtaccggcggaggcggatctggcggcggaggtagcggtggcggaggatctgaattcagctacgagctgacacagcctccatccgtgtctggcacacctggacagagagtggctatctcctgtagcggcagcagcagcaacatcggcaccagaatggtcacctggtatcagcacgtgccaggcacagcccctaagctgctgatcttcaacaacaaccagcggcctagcggcgtgcccgatagattttctgccagcaagagcggcacaagcgccagcctggctatcatcggactccagtctgacgacgaggccgactactactgtgccacctgggacgacaacgtgaagtcctacgtgttcggcaccggcaccaaagtgacagtgcttggaagtagactcgagatccagaaccctgatcctgccgtgtaccagctgcgggatagcaagagcagcgacaagagcgtgtgtctgttcaccgacttcgacagccagaccaacgtgtcccagagcaaggactccgacgtgtacatcaccgataagtgcgtgctggacatgcggagcatggacttcaagagcaactccgccgtggcctggtccaacaagtccgatttcgcctgcgccaacgccttcaacaacagcattatccccgaggacacattcttcccaagccccgagagcagcgactccaccgaccacgtgaagcccaaagagacagagaacaccaagcagcccagcaagagctgccacaagcccaaggccatcgtgcacaccgagaaagtgaacatgatgagcctgaccgtgctgggcctgcggatgctgttcgccaaaaccgtggccgtgaacttcctgctgaccgccaagctgttcttcctccgcgccaagagaagcggatctggcgtgaagcagaccctgaatttcgacctgctgaagctggctggcgacgtggaatccaacccaggccctactagtatggactggatttggcgcatccttttccttgtcggcgctgctaccggcgcgcattccgggccccagctccagctgcaagagtctggacctggcctggtcaagcctagcgagacactgagcctgacctgtaccgtgtccggcgatagcatcagcagcggcgattactactggggctggatcagacagcctcctggcaaaggactggaatggatcggccacatctactacagcggcgtgacctactacaaccccagcctgaagtccagagtgaccatcagcgtggacaccagccggaaccagttctccctgaagctgtctagcgtgacagccgccgataccgccgtgtactactgcaccagagaggacagcagcaactggcggagtagaggccagggaacactggtcacagttagctctggatccggcggaggcggaagtggaggcggaggatctggcggcggaggctctttcgaacttgaaatggcccaggttcagctccagcagtggggagctggactgctgaagcctagcgagacactgagcctgacctgtgctgtgtacggcggcagcttcagcggctactactggtcctggatcagacagcctcctggcaaaggactggaatggatcggcgagatcaaccacagcggctccaccaactacaaccccagcctgaagtccagagtgaccatcagcgtggacaccagcaagaaccagttctccctgaagctgagcagcgtgacagccgctgataccgccgtgtactattgcgctagagcccctcagtcttggtacgtgggagatgtgtggggccagggcacactggttacagtgtcatctacgcgtgaggacctgaagaacgtgttcccacctgaggtggccgtgttcgagcctagcgaggccgagatcagccacacccagaaagccaccctcgtgtgcctggctaccggcttctaccccgaccatgtggaactgtcttggtgggtcaacggcaaagaggtgcacagcggcgtgtgtaccgacccccagccactgaaagaacagcccgccctgaacgacagccggtactgcctgagcagcagactgagagtgtccgccaccttctggcagaacccccggaaccacttcagatgccaggtgcagttctacggcctgagcgagaacgacgagtggacccaggacagagccaagcccgtgacccagatcgtgtctgccgaagcctggggcagagccgatgatgtgattaagatccactggcaggaaaagaagtccaacaccatcctgggcagccaggaaggcaacaccatgaagaccaacgacacctacatgaagttcagctggctgaccgtgcccgagaagtccctggacaaagaacacagatgcatcgtgcggcacgaaaacaacaagaacggcgtggaccaggaaatcatcttcccacccatcaagaccgatgtgattacaatggaccccaaggacaactgctccaaggacgccaacgataccctgctgctccagctgaccaacaccagcgcctactacatgtacttgttgctgctgctgaagtccgtggtgtacttcgccatcatcacatgctgcctgctgcggagaaccgccttctgctgcaacggcgagaagtct

SEQ ID NO: 7997 - DNA, 3009 bp, synthetic construct
  source 1..3009: mol_type = other DNA
atggccttaccagtgaccgccttgctcctgccgctggccttgctgctccacgccgccaggccggaagtgcagctggttgaatctggcggaggactggttcagcctggcggatctctgagactgtcttgtgccgccagcggcttcagcttcagcgacttttggatgagctgggtccgacaggcccctggcaaaggacttgaatgggtcgccacaatcagccaggccggcagcgagaaggactacgtggactctgtgaagggcagattcaccatcagccgggacaacgccaagaagtccctgtacctccagatgaacagcctgagagccgaggacaccgccgtgtactattgtgcctctggcgtgtacagcttcgactacagaggccagggcaccctggtcacagtctcttctggtaccggcggaggcggatctggcggcggaggtagcggtggcggaggatctgaattccagtctgtgctgacacagcctcctagcctgtctgtggcccctggaaagacagccagcatcacatgcggcggcaacaacatcggcatgaagtccgtgcactggtatcagcagaggccaggacaggctcctgtgctggtcatctactacgacagcgacagaccctctggcatccccggcagattttccggcagcaactctggcaataccgccacactgaccatctccagagtggaagctggcgacgaggccgactactactgccaagtgtgggataccaccggcgatcaccctggctatgtgtttggcaccggcaccaaagtgacagtgcttctcgagatccagaaccctgatcctgccgtgtaccagctgcgggatagcaagagcagcgacaagagcgtgtgtctgttcaccgacttcgacagccagaccaacgtgtcccagagcaaggactccgacgtgtacatcaccgataagtgcgtgctggacatgcggagcatggacttcaagagcaactccgccgtggcctggtccaacaagtccgatttcgcctgcgccaacgccttcaacaacagcattatccccgaggacacattcttcccaagccccgagagcagcgactccaccgaccacgtgaagcccaaagagacagagaacaccaagcagcccagcaagagctgccacaagcccaaggccatcgtgcacaccgagaaagtgaacatgatgagcctgaccgtgctgggcctgcggatgctgttcgccaaaaccgtggccgtgaacttcctgctgaccgccaagctgttcttcctccgcgccaagagaagcggatctggcgtgaagcagaccctgaatttcgacctgctgaagctggctggcgacgtggaatccaacccaggccctactagtatggactggatttggcgcatccttttccttgtcggcgctgctaccggcgcgcattccgggccccagctccagctgcaagagtctggacctggcctggtcaagcctagcgagacactgagcctgacctgtaccgtgtccggcgatagcatcagcagcggcgattactactggggctggatcagacagcctcctggcaaaggactggaatggatcggccacatctactacagcggcgtgacctactacaaccccagcctgaagtccagagtgaccatcagcgtggacaccagccggaaccagttctccctgaagctgtctagcgtgacagccgccgataccgccgtgtactactgcaccagagaggacagcagcaactggcggagtagaggccagggaacactggtcacagttagctctggatccggcggaggcggaagtggaggcggaggatctggcggcggaggctctttcgaacaagttcaactggttcagagcggagccgaagtgaagaaacctggcagcagcgtgaaggtgtcctgcaaagcaagcggcggcacctttagcagctacgccatctcttgggtccgacaggcacctggacaaggactggaatggatgggcggcatcatccccatcttcggcacagccaattacgcccagaaattccagggcagagtgaccatcaccgccgacgagtctacaagcaccgcctacatggaactgagcagcctgagaagcgaggacaccgccgtgtactattgtgccagaggcgtgtacggctacagcggctctgccccttatgatgagtggggccagggaaccctggtcaccgtttcttctacgcgtgaggacctgaagaacgtgttcccacctgaggtggccgtgttcgagcctagcgaggccgagatcagccacacccagaaagccaccctcgtgtgcctggctaccggcttctaccccgaccatgtggaactgtcttggtgggtcaacggcaaagaggtgcacagcggcgtgtgtaccgacccccagccactgaaagaacagcccgccctgaacgacagccggtactgcctgagcagcagactgagagtgtccgccaccttctggcagaacccccggaaccacttcagatgccaggtgcagttctacggcctgagcgagaacgacgagtggacccaggacagagccaagcccgtgacccagatcgtgtctgccgaagcctggggcagagccgatgatgtgattaagatccactggcaggaaaagaagtccaacaccatcctgggcagccaggaaggcaacaccatgaagaccaacgacacctacatgaagttcagctggctgaccgtgcccgagaagtccctggacaaagaacacagatgcatcgtgcggcacgaaaacaacaagaacggcgtggaccaggaaatcatcttcccacccatcaagaccgatgtgattacaatggaccccaaggacaactgctccaaggacgccaacgataccctgctgctccagctgaccaacaccagcgcctactacatgtacttgttgctgctgctgaagtccgtggtgtacttcgccatcatcacatgctgcctgctgcggagaaccgccttctgctgcaacggcgagaagtct

SEQ ID NO: 7998 - DNA, 3003 bp, synthetic construct
  source 1..3003: mol_type = other DNA
atggccttaccagtgaccgccttgctcctgccgctggccttgctgctccacgccgccaggccggaagtgcagctggttgaatctggcggaggactggttcagcctggcggatctctgagactgtcttgtgccgccagcggcttcagcttcagcgacttttggatgagctgggtccgacaggcccctggcaaaggacttgaatgggtcgccacaatcagccaggccggcagcgagaaggactacgtggactctgtgaagggcagattcaccatcagccgggacaacgccaagaagtccctgtacctccagatgaacagcctgagagccgaggacaccgccgtgtactattgtgcctctggcgtgtacagcttcgactacagaggccagggcaccctggtcacagtctcttctggtaccggcggaggcggatctggcggcggaggtagcggtggcggaggatctgaattcgaggtgcaactggttgagtctggcggaggactggtgcagcctggaagaagcctgagactgtcttgtgccgccagcggcttcaccttcgacgattatgccatgcactgggtccgacaggcccctggcaaaggacttgaatgggtgtccggcatctcctggaacagcggctctatcggctacgccgattccgtgaagggcagattcaccatcagccgggacaacgccaagaacagcctgtacctccagatgaactccctgagagccgaggacacagccctgtactactgcgccaaagacaaaggcggaggctactacgacttttggagcggcagcgattattggggccagggcacactggtcacagtgtctagcctcgagatccagaaccctgatcctgccgtgtaccagctgcgggatagcaagagcagcgacaagagcgtgtgtctgttcaccgacttcgacagccagaccaacgtgtcccagagcaaggactccgacgtgtacatcaccgataagtgcgtgctggacatgcggagcatggacttcaagagcaactccgccgtggcctggtccaacaagtccgatttcgcctgcgccaacgccttcaacaacagcattatccccgaggacacattcttcccaagccccgagagcagcgactccaccgaccacgtgaagcccaaagagacagagaacaccaagcagcccagcaagagctgccacaagcccaaggccatcgtgcacaccgagaaagtgaacatgatgagcctgaccgtgctgggcctgcggatgctgttcgccaaaaccgtggccgtgaacttcctgctgaccgccaagctgttcttcctccgcgccaagagaagcggatctggcgtgaagcagaccctgaatttcgacctgctgaagctggctggcgacgtggaatccaacccaggccctactagtatggactggatttggcgcatccttttccttgtcggcgctgctaccggcgcgcattccgggccccagctccagctgcaagagtctggacctggcctggtcaagcctagcgagacactgagcctgacctgtaccgtgtccggcgatagcatcagcagcggcgattactactggggctggatcagacagcctcctggcaaaggactggaatggatcggccacatctactacagcggcgtgacctactacaaccccagcctgaagtccagagtgaccatcagcgtggacaccagccggaaccagttctccctgaagctgtctagcgtgacagccgccgataccgccgtgtactactgcaccagagaggacagcagcaactggcggagtagaggccagggaacactggtcacagttagctctggatccggcggaggcggaagtggaggcggaggatctggcggcggaggctctttcgaatcttctgagctgacacaggaccctgccgtgtctgttgctctgggccagacagtgcggattacctgtcagggcgatagcctgagaagctactacgcctcctggtatcagcagaagccaggccaggctcctgtgctggtcatctacggcaagaacaacagacccagcggcatccccgatagattcagcggaagcagctctggcaataccgccagcctgacaattactggcgctcaggccgaggacgaggccgactactactgcaacagcagagatagcagcggctgggttttcggcggaggcacaaaactgacagtgctgacgcgtgaggacctgaagaacgtgttcccacctgaggtggccgtgttcgagcctagcgaggccgagatcagccacacccagaaagccaccctcgtgtgcctggctaccggcttctaccccgaccatgtggaactgtcttggtgggtcaacggcaaagaggtgcacagcggcgtgtgtaccgacccccagccactgaaagaacagcccgccctgaacgacagccggtactgcctgagcagcagactgagagtgtccgccaccttctggcagaacccccggaaccacttcagatgccaggtgcagttctacggcctgagcgagaacgacgagtggacccaggacagagccaagcccgtgacccagatcgtgtctgccgaagcctggggcagagccgatgatgtgattaagatccactggcaggaaaagaagtccaacaccatcctgggcagccaggaaggcaacaccatgaagaccaacgacacctacatgaagttcagctggctgaccgtgcccgagaagtccctggacaaagaacacagatgcatcgtgcggcacgaaaacaacaagaacggcgtggaccaggaaatcatcttcccacccatcaagaccgatgtgattacaatggaccccaaggacaactgctccaaggacgccaacgataccctgctgctccagctgaccaacaccagcgcctactacatgtacttgttgctgctgctgaagtccgtggtgtacttcgccatcatcacatgctgcctgctgcggagaaccgccttctgctgcaacggcgagaagtct

SEQ ID NO: 7999 - DNA, 3030 bp, synthetic construct
  source 1..3030: mol_type = other DNA
atggccttaccagtgaccgccttgctcctgccgctggccttgctgctccacgccgccaggccggaagtgcagctggttgaatctggcggaggactggttcagcctggcggatctctgagactgtcttgtgccgccagcggcttcagcttcagcgacttttggatgagctgggtccgacaggcccctggcaaaggacttgaatgggtcgccacaatcagccaggccggcagcgagaaggactacgtggactctgtgaagggcagattcaccatcagccgggacaacgccaagaagtccctgtacctccagatgaacagcctgagagccgaggacaccgccgtgtactattgtgcctctggcgtgtacagcttcgactacagaggccagggcaccctggtcacagtctcttctggtaccggcggaggcggatctggcggcggaggtagcggtggcggaggatctgaattcgaagtgcagctccagcagtctggacctggcctggttaagcctagccagacactgagcctgacctgtgccatcagcggcgatagcgtgctgagcaacagcgacacctggaactggatcagacagagccctagcagaggactggaatggctgggcagaacctaccacagaagcacttggtacgacgactacgccagctctgtgcggggcagagtgtccatcaatgtggacaccagcaagaaccagtacagcctgcaactgaacgccgtgacacctgaggataccggcgtgtactactgcgccagagacagactccaggacggcaactcttggagcgacgcctttgatgtgtggggccagggcacaatggtcaccgtttctagcctcgagatccagaaccctgatcctgccgtgtaccagctgcgggatagcaagagcagcgacaagagcgtgtgtctgttcaccgacttcgacagccagaccaacgtgtcccagagcaaggactccgacgtgtacatcaccgataagtgcgtgctggacatgcggagcatggacttcaagagcaactccgccgtggcctggtccaacaagtccgatttcgcctgcgccaacgccttcaacaacagcattatccccgaggacacattcttcccaagccccgagagcagcgactccaccgaccacgtgaagcccaaagagacagagaacaccaagcagcccagcaagagctgccacaagcccaaggccatcgtgcacaccgagaaagtgaacatgatgagcctgaccgtgctgggcctgcggatgctgttcgccaaaaccgtggccgtgaacttcctgctgaccgccaagctgttcttcctccgcgccaagagaagcggatctggcgtgaagcagaccctgaatttcgacctgctgaagctggctggcgacgtggaatccaacccaggccctactagtatggactggatttggcgcatccttttccttgtcggcgctgctaccggcgcgcattccgggccccagctccagctgcaagagtctggacctggcctggtcaagcctagcgagacactgagcctgacctgtaccgtgtccggcgatagcatcagcagcggcgattactactggggctggatcagacagcctcctggcaaaggactggaatggatcggccacatctactacagcggcgtgacctactacaaccccagcctgaagtccagagtgaccatcagcgtggacaccagccggaaccagttctccctgaagctgtctagcgtgacagccgccgataccgccgtgtactactgcaccagagaggacagcagcaactggcggagtagaggccagggaacactggtcacagttagctctggatccggcggaggcggaagtggaggcggaggatctggcggcggaggctctttcgaacaatctgctctgacacagcctgccagcgtgtcaggatctcctggacagagcatcaccatctcttgcaccggcaccagctctgatgtcggcggctacaattacgtgtcctggtatcagcagcaccccggcaaggcccctaagctgatgatctacgacgtgtccaacagacccagcggcgtgtccaatagattctccggcagcaagagcggcaacaccgccagcctgacaatttctggactgcaagccgaggacgaggccgactactactgtagcagctacaccagcagcagcacactggtgtacgtgttcggcacaggcaccaaagtgaccgtgcttacgcgtgaggacctgaagaacgtgttcccacctgaggtggccgtgttcgagcctagcgaggccgagatcagccacacccagaaagccaccctcgtgtgcctggctaccggcttctaccccgaccatgtggaactgtcttggtgggtcaacggcaaagaggtgcacagcggcgtgtgtaccgacccccagccactgaaagaacagcccgccctgaacgacagccggtactgcctgagcagcagactgagagtgtccgccaccttctggcagaacccccggaaccacttcagatgccaggtgcagttctacggcctgagcgagaacgacgagtggacccaggacagagccaagcccgtgacccagatcgtgtctgccgaagcctggggcagagccgatgatgtgattaagatccactggcaggaaaagaagtccaacaccatcctgggcagccaggaaggcaacaccatgaagaccaacgacacctacatgaagttcagctggctgaccgtgcccgagaagtccctggacaaagaacacagatgcatcgtgcggcacgaaaacaacaagaacggcgtggaccaggaaatcatcttcccacccatcaagaccgatgtgattacaatggaccccaaggacaactgctccaaggacgccaacgataccctgctgctccagctgaccaacaccagcgcctactacatgtacttgttgctgctgctgaagtccgtggtgtacttcgccatcatcacatgctgcctgctgcggagaaccgccttctgctgcaacggcgagaagtct

SEQ ID NO: 8000 - DNA, 2964 bp, synthetic construct
  source 1..2964: mol_type = other DNA
atggccttaccagtgaccgccttgctcctgccgctggccttgctgctccacgccgccaggccggaagtgcagctggttgaatctggcggaggactggttcagcctggcggatctctgagactgtcttgtgccgccagcggcttcagcttcagcgacttttggatgagctgggtccgacaggcccctggcaaaggacttgaatgggtcgccacaatcagccaggccggcagcgagaaggactacgtggactctgtgaagggcagattcaccatcagccgggacaacgccaagaagtccctgtacctccagatgaacagcctgagagccgaggacaccgccgtgtactattgtgcctctggcgtgtacagcttcgactacagaggccagggcaccctggtcacagtctcttctggtaccggcggaggcggatctggcggcggaggtagcggtggcggaggatctgaattccaggtgcaactggttcagtctggggccgaagtgaagaaacctggggcctctgtgaaggtgtcctgcaaggcttccggctacacctttaccagctacgacatcaactgggtccgacaggccacaggccaaggactggaatggatgggctggatgaaccccaacagcggcaataccggctacgcccagaaattccagggcagagtgaccatgaccagaaacaccagcatcagcaccgcctacatggaactgagcagcctgagaagcgaggacaccgccgtgtactattgcgccagaggcgacagcaccaaggtggaaatcaaactcgagatccagaaccctgatcctgccgtgtaccagctgcgggatagcaagagcagcgacaagagcgtgtgtctgttcaccgacttcgacagccagaccaacgtgtcccagagcaaggactccgacgtgtacatcaccgataagtgcgtgctggacatgcggagcatggacttcaagagcaactccgccgtggcctggtccaacaagtccgatttcgcctgcgccaacgccttcaacaacagcattatccccgaggacacattcttcccaagccccgagagcagcgactccaccgaccacgtgaagcccaaagagacagagaacaccaagcagcccagcaagagctgccacaagcccaaggccatcgtgcacaccgagaaagtgaacatgatgagcctgaccgtgctgggcctgcggatgctgttcgccaaaaccgtggccgtgaacttcctgctgaccgccaagctgttcttcctccgcgccaagagaagcggatctggcgtgaagcagaccctgaatttcgacctgctgaagctggctggcgacgtggaatccaacccaggccctactagtatggactggatttggcgcatccttttccttgtcggcgctgctaccggcgcgcattccgggccccagctccagctgcaagagtctggacctggcctggtcaagcctagcgagacactgagcctgacctgtaccgtgtccggcgatagcatcagcagcggcgattactactggggctggatcagacagcctcctggcaaaggactggaatggatcggccacatctactacagcggcgtgacctactacaaccccagcctgaagtccagagtgaccatcagcgtggacaccagccggaaccagttctccctgaagctgtctagcgtgacagccgccgataccgccgtgtactactgcaccagagaggacagcagcaactggcggagtagaggccagggaacactggtcacagttagctctggatccggcggaggcggaagtggaggcggaggatctggcggcggaggctctttcgaacaatctgtgctgacccagcctagatccgtgtctggctctcctggacagagcgtgaccatctcttgtaccggcaccagctctgatgtcggcggctacaattacgtgtcctggtatcagcagcaccccggcgaagcccctaagctgattatctacgacgccgacaagcggcccagcggcatcagcaatagattcagctctggcaagagcggcaacaccgccagcctgacaatcagcggactccaggtggaagatgaggccgactactactgctgctcctatgccggcggaagcacctgggttttcggaggcggtacaaaagtgaccgtgctgacgcgtgaggacctgaagaacgtgttcccacctgaggtggccgtgttcgagcctagcgaggccgagatcagccacacccagaaagccaccctcgtgtgcctggctaccggcttctaccccgaccatgtggaactgtcttggtgggtcaacggcaaagaggtgcacagcggcgtgtgtaccgacccccagccactgaaagaacagcccgccctgaacgacagccggtactgcctgagcagcagactgagagtgtccgccaccttctggcagaacccccggaaccacttcagatgccaggtgcagttctacggcctgagcgagaacgacgagtggacccaggacagagccaagcccgtgacccagatcgtgtctgccgaagcctggggcagagccgatgatgtgattaagatccactggcaggaaaagaagtccaacaccatcctgggcagccaggaaggcaacaccatgaagaccaacgacacctacatgaagttcagctggctgaccgtgcccgagaagtccctggacaaagaacacagatgcatcgtgcggcacgaaaacaacaagaacggcgtggaccaggaaatcatcttcccacccatcaagaccgatgtgattacaatggaccccaaggacaactgctccaaggacgccaacgataccctgctgctccagctgaccaacaccagcgcctactacatgtacttgttgctgctgctgaagtccgtggtgtacttcgccatcatcacatgctgcctgctgcggagaaccgccttctgctgcaacggcgagaagtct

SEQ ID NO: 8001 - DNA, 3030 bp, synthetic construct
  source 1..3030: mol_type = other DNA
atggccttaccagtgaccgccttgctcctgccgctggccttgctgctccacgccgccaggccggaagtgcagctggttgaatctggcggaggactggttcagcctggcggatctctgagactgtcttgtgccgccagcggcttcagcttcagcgacttttggatgagctgggtccgacaggcccctggcaaaggacttgaatgggtcgccacaatcagccaggccggcagcgagaaggactacgtggactctgtgaagggcagattcaccatcagccgggacaacgccaagaagtccctgtacctccagatgaacagcctgagagccgaggacaccgccgtgtactattgtgcctctggcgtgtacagcttcgactacagaggccagggcaccctggtcacagtctcttctggtaccggcggaggcggatctggcggcggaggtagcggtggcggaggatctgaattcgaagtgcagctccagcagtctggacctggcctggttaagcctagccagacactgagcctgacctgtgccatcagcggcgatagcgtgtcctctaatagcgccgcctggaactggatcagacagagccctagcagaggactggaatggctgggcagaacctactaccgcagcaagtggtacagcgactacgccgtgtccgtgaagtcccggatcaccatcaatcccgacaccagcaagaaccagttcagcctgcaactgaacagcgtgacccctgaggataccgccgtgtactactgcgccagagatccctacgacttttggagcggctaccccgacgcctttgacatctggggacagggcacaatggtcaccgtttctagcctcgagatccagaaccctgatcctgccgtgtaccagctgcgggatagcaagagcagcgacaagagcgtgtgtctgttcaccgacttcgacagccagaccaacgtgtcccagagcaaggactccgacgtgtacatcaccgataagtgcgtgctggacatgcggagcatggacttcaagagcaactccgccgtggcctggtccaacaagtccgatttcgcctgcgccaacgccttcaacaacagcattatccccgaggacacattcttcccaagccccgagagcagcgactccaccgaccacgtgaagcccaaagagacagagaacaccaagcagcccagcaagagctgccacaagcccaaggccatcgtgcacaccgagaaagtgaacatgatgagcctgaccgtgctgggcctgcggatgctgttcgccaaaaccgtggccgtgaacttcctgctgaccgccaagctgttcttcctccgcgccaagagaagcggatctggcgtgaagcagaccctgaatttcgacctgctgaagctggctggcgacgtggaatccaacccaggccctactagtatggactggatttggcgcatccttttccttgtcggcgctgctaccggcgcgcattccgggccccagctccagctgcaagagtctggacctggcctggtcaagcctagcgagacactgagcctgacctgtaccgtgtccggcgatagcatcagcagcggcgattactactggggctggatcagacagcctcctggcaaaggactggaatggatcggccacatctactacagcggcgtgacctactacaaccccagcctgaagtccagagtgaccatcagcgtggacaccagccggaaccagttctccctgaagctgtctagcgtgacagccgccgataccgccgtgtactactgcaccagagaggacagcagcaactggcggagtagaggccagggaacactggtcacagttagctctggatccggcggaggcggaagtggaggcggaggatctggcggcggaggctctttcgaacaatctgctctgacacagcctgccagcgtgtcaggatctcctggacagagcatcaccatctcttgcaccggcaccagctctgatgtcggcggctacaattacgtgtcctggtatcagcagcaccccggcaaggcccctaaagtgattatcagcgaagtgaacaacagacccagcggcgtgtcccacagattcagcggctctaagtctggcaacaccgccagcctgacaatctctggactgcaagccgaggacgaggccgactacttctgtagcagctacaccagcggcagaaccctgtacgtgttcggcacaggcagcaaagtgacagtgctgggaacgcgtgaggacctgaagaacgtgttcccacctgaggtggccgtgttcgagcctagcgaggccgagatcagccacacccagaaagccaccctcgtgtgcctggctaccggcttctaccccgaccatgtggaactgtcttggtgggtcaacggcaaagaggtgcacagcggcgtgtgtaccgacccccagccactgaaagaacagcccgccctgaacgacagccggtactgcctgagcagcagactgagagtgtccgccaccttctggcagaacccccggaaccacttcagatgccaggtgcagttctacggcctgagcgagaacgacgagtggacccaggacagagccaagcccgtgacccagatcgtgtctgccgaagcctggggcagagccgatgatgtgattaagatccactggcaggaaaagaagtccaacaccatcctgggcagccaggaaggcaacaccatgaagaccaacgacacctacatgaagttcagctggctgaccgtgcccgagaagtccctggacaaagaacacagatgcatcgtgcggcacgaaaacaacaagaacggcgtggaccaggaaatcatcttcccacccatcaagaccgatgtgattacaatggaccccaaggacaactgctccaaggacgccaacgataccctgctgctccagctgaccaacaccagcgcctactacatgtacttgttgctgctgctgaagtccgtggtgtacttcgccatcatcacatgctgcctgctgcggagaaccgccttctgctgcaacggcgagaagtct

SEQ ID NO: 8002 - DNA, 3027 bp, synthetic construct
  source 1..3027: mol_type = other DNA
atggccttaccagtgaccgccttgctcctgccgctggccttgctgctccacgccgccaggccggaagtgcagctggttgaatctggcggaggactggttcagcctggcggatctctgagactgtcttgtgccgccagcggcttcagcttcagcgacttttggatgagctgggtccgacaggcccctggcaaaggacttgaatgggtcgccacaatcagccaggccggcagcgagaaggactacgtggactctgtgaagggcagattcaccatcagccgggacaacgccaagaagtccctgtacctccagatgaacagcctgagagccgaggacaccgccgtgtactattgtgcctctggcgtgtacagcttcgactacagaggccagggcaccctggtcacagtctcttctggtaccggcggaggcggatctggcggcggaggtagcggtggcggaggatctgaattccaatctgctctgacacagcctgccagcgcctctggatctcctggacagagcgtgaccatctcctgtaccggcacctcttctgatgtcggcggctacaactacgtgtcctggtatcagcagcaccccggcaaggcccctaagctgatgatctacgacgtgtccaacagacccagcggcgtgtccaatagattctccggcagcaagagcggcaacaccgccagcctgacaatttctggactgcaagccgaggacgaggccgactactactgtagcagctacaccagcagcagcacactgtacgtgttcggcacaggcacccagctcacagttcttctcgagatccagaaccctgatcctgccgtgtaccagctgcgggatagcaagagcagcgacaagagcgtgtgtctgttcaccgacttcgacagccagaccaacgtgtcccagagcaaggactccgacgtgtacatcaccgataagtgcgtgctggacatgcggagcatggacttcaagagcaactccgccgtggcctggtccaacaagtccgatttcgcctgcgccaacgccttcaacaacagcattatccccgaggacacattcttcccaagccccgagagcagcgactccaccgaccacgtgaagcccaaagagacagagaacaccaagcagcccagcaagagctgccacaagcccaaggccatcgtgcacaccgagaaagtgaacatgatgagcctgaccgtgctgggcctgcggatgctgttcgccaaaaccgtggccgtgaacttcctgctgaccgccaagctgttcttcctccgcgccaagagaagcggatctggcgtgaagcagaccctgaatttcgacctgctgaagctggctggcgacgtggaatccaacccaggccctactagtatggactggatttggcgcatccttttccttgtcggcgctgctaccggcgcgcattccgggccccagctccagctgcaagagtctggacctggcctggtcaagcctagcgagacactgagcctgacctgtaccgtgtccggcgatagcatcagcagcggcgattactactggggctggatcagacagcctcctggcaaaggactggaatggatcggccacatctactacagcggcgtgacctactacaaccccagcctgaagtccagagtgaccatcagcgtggacaccagccggaaccagttctccctgaagctgtctagcgtgacagccgccgataccgccgtgtactactgcaccagagaggacagcagcaactggcggagtagaggccagggaacactggtcacagttagctctggatccggcggaggcggaagtggaggcggaggatctggcggcggaggctctttcgaagaagtgcagctccagcagtctggacctggcctggttaagcctagccagacactgagcctgacctgtgccatcagcggcgattccatgctgagcaacagcgacacctggaactggatcagacagagccccagcagaggcctggaatggctgggcagaacataccacagaagcacttggtacgacgactacgccagctctgtgcggggcagagtgtccatcaatgtggacaccagcaagaaccagtacagcctgcaactgaacgccgtgacacctgaggataccggcgtgtactactgtgccagagtgcggctccaggacggcaattcttggagcgacgcctttgatgtgtggggccagggcacaatggtcaccgtttctagcacgcgtgaggacctgaagaacgtgttcccacctgaggtggccgtgttcgagcctagcgaggccgagatcagccacacccagaaagccaccctcgtgtgcctggctaccggcttctaccccgaccatgtggaactgtcttggtgggtcaacggcaaagaggtgcacagcggcgtgtgtaccgacccccagccactgaaagaacagcccgccctgaacgacagccggtactgcctgagcagcagactgagagtgtccgccaccttctggcagaacccccggaaccacttcagatgccaggtgcagttctacggcctgagcgagaacgacgagtggacccaggacagagccaagcccgtgacccagatcgtgtctgccgaagcctggggcagagccgatgatgtgattaagatccactggcaggaaaagaagtccaacaccatcctgggcagccaggaaggcaacaccatgaagaccaacgacacctacatgaagttcagctggctgaccgtgcccgagaagtccctggacaaagaacacagatgcatcgtgcggcacgaaaacaacaagaacggcgtggaccaggaaatcatcttcccacccatcaagaccgatgtgattacaatggaccccaaggacaactgctccaaggacgccaacgataccctgctgctccagctgaccaacaccagcgcctactacatgtacttgttgctgctgctgaagtccgtggtgtacttcgccatcatcacatgctgcctgctgcggagaaccgccttctgctgcaacggcgagaagtct

SEQ ID NO: 8003 - DNA, 3027 bp, synthetic construct
  source 1..3027: mol_type = other DNA
atggccttaccagtgaccgccttgctcctgccgctggccttgctgctccacgccgccaggccggaagtgcagctggttgaatctggcggaggactggttcagcctggcggatctctgagactgtcttgtgccgccagcggcttcagcttcagcgacttttggatgagctgggtccgacaggcccctggcaaaggacttgaatgggtcgccacaatcagccaggccggcagcgagaaggactacgtggactctgtgaagggcagattcaccatcagccgggacaacgccaagaagtccctgtacctccagatgaacagcctgagagccgaggacaccgccgtgtactattgtgcctctggcgtgtacagcttcgactacagaggccagggcaccctggtcacagtctcttctggtaccggcggaggcggatctggcggcggaggtagcggtggcggaggatctgaattcgacgtgatgctgacccagacaccactgagcctgcctgtgtctctgggcgatcaggccagcatctcctgtagaagcagccagagcatcctgcacagcaccggcgatacctacctggaatggtatctccagaagcctggacagagccccaagctgctgattaacaaggtgtccaaccggctgagcggcgtgcccgatagattttctggcagcggctctggcaccgacttcaccctgaagatcagcagagtggaagccgaggacctgggcgtgtactactgcttccaaggcagccatgttccttggacctttggcggaggcaccaagctggaaatcaagagagctgacgccgctcctaccgtgtccatctttcctctcgagatccagaaccctgatcctgccgtgtaccagctgcgggatagcaagagcagcgacaagagcgtgtgtctgttcaccgacttcgacagccagaccaacgtgtcccagagcaaggactccgacgtgtacatcaccgataagtgcgtgctggacatgcggagcatggacttcaagagcaactccgccgtggcctggtccaacaagtccgatttcgcctgcgccaacgccttcaacaacagcattatccccgaggacacattcttcccaagccccgagagcagcgactccaccgaccacgtgaagcccaaagagacagagaacaccaagcagcccagcaagagctgccacaagcccaaggccatcgtgcacaccgagaaagtgaacatgatgagcctgaccgtgctgggcctgcggatgctgttcgccaaaaccgtggccgtgaacttcctgctgaccgccaagctgttcttcctccgcgccaagagaagcggatctggcgtgaagcagaccctgaatttcgacctgctgaagctggctggcgacgtggaatccaacccaggccctactagtatggactggatttggcgcatccttttccttgtcggcgctgctaccggcgcgcattccgggccccagctccagctgcaagagtctggacctggcctggtcaagcctagcgagacactgagcctgacctgtaccgtgtccggcgatagcatcagcagcggcgattactactggggctggatcagacagcctcctggcaaaggactggaatggatcggccacatctactacagcggcgtgacctactacaaccccagcctgaagtccagagtgaccatcagcgtggacaccagccggaaccagttctccctgaagctgtctagcgtgacagccgccgataccgccgtgtactactgcaccagagaggacagcagcaactggcggagtagaggccagggaacactggtcacagttagctctggatccggcggaggcggaagtggaggcggaggatctggcggcggaggctctttcgaacaagtgaagctccagcagagcggccctagccttgtgaaacctggcgcttccgtgaagatgagctgcaaggccagcggctacaccttcaccgatttctacatgaaatgggtcaagcagagccacggcaagtctctggaatggatcggcgacatcaaccccaacatcggagacaccttctacaaccagaagttcaagggcaaagccacactgaccgtggacaagagcagcagcaccgcctacatgcagctcaacagcctgaccagcgaggacagcgccgtgtacttttgttccgtgggctacttcgacgtgtggggagccggaacaaccgtgacagtctcttctacgcgtgaggacctgaagaacgtgttcccacctgaggtggccgtgttcgagcctagcgaggccgagatcagccacacccagaaagccaccctcgtgtgcctggctaccggcttctaccccgaccatgtggaactgtcttggtgggtcaacggcaaagaggtgcacagcggcgtgtgtaccgacccccagccactgaaagaacagcccgccctgaacgacagccggtactgcctgagcagcagactgagagtgtccgccaccttctggcagaacccccggaaccacttcagatgccaggtgcagttctacggcctgagcgagaacgacgagtggacccaggacagagccaagcccgtgacccagatcgtgtctgccgaagcctggggcagagccgatgatgtgattaagatccactggcaggaaaagaagtccaacaccatcctgggcagccaggaaggcaacaccatgaagaccaacgacacctacatgaagttcagctggctgaccgtgcccgagaagtccctggacaaagaacacagatgcatcgtgcggcacgaaaacaacaagaacggcgtggaccaggaaatcatcttcccacccatcaagaccgatgtgattacaatggaccccaaggacaactgctccaaggacgccaacgataccctgctgctccagctgaccaacaccagcgcctactacatgtacttgttgctgctgctgaagtccgtggtgtacttcgccatcatcacatgctgcctgctgcggagaaccgccttctgctgcaacggcgagaagtct

SEQ ID NO: 8004 - DNA, 3015 bp, synthetic construct
  source 1..3015: mol_type = other DNA
atggccttaccagtgaccgccttgctcctgccgctggccttgctgctccacgccgccaggccggaagtgcagctggttgaatctggcggaggactggttcagcctggcggatctctgagactgtcttgtgccgccagcggcttcagcttcagcgacttttggatgagctgggtccgacaggcccctggcaaaggacttgaatgggtcgccacaatcagccaggccggcagcgagaaggactacgtggactctgtgaagggcagattcaccatcagccgggacaacgccaagaagtccctgtacctccagatgaacagcctgagagccgaggacaccgccgtgtactattgtgcctctggcgtgtacagcttcgactacagaggccagggcaccctggtcacagtctcttctggtaccggcggaggcggatctggcggcggaggtagcggtggcggaggatctgaattcgagatcgtgctgacacagtctcccgccacactgtcactgtctccaggcgaaagagccacactgagctgtagagccagccagagcgtgtccatctacctggcctggtatcagcagaagcctggacaggctccccggctgctgatctacgatgccagcaatagagccacaggcatccccgccagattttctggctctggcagcggcaccgatttcaccctgaccataagcagcctggaacctgaggacttcgccgtgtactactgccagcagagaagcaactggcctcctttcacattcggccctggcaccaaggtggacatcaaactcgagatccagaaccctgatcctgccgtgtaccagctgcgggatagcaagagcagcgacaagagcgtgtgtctgttcaccgacttcgacagccagaccaacgtgtcccagagcaaggactccgacgtgtacatcaccgataagtgcgtgctggacatgcggagcatggacttcaagagcaactccgccgtggcctggtccaacaagtccgatttcgcctgcgccaacgccttcaacaacagcattatccccgaggacacattcttcccaagccccgagagcagcgactccaccgaccacgtgaagcccaaagagacagagaacaccaagcagcccagcaagagctgccacaagcccaaggccatcgtgcacaccgagaaagtgaacatgatgagcctgaccgtgctgggcctgcggatgctgttcgccaaaaccgtggccgtgaacttcctgctgaccgccaagctgttcttcctccgcgccaagagaagcggatctggcgtgaagcagaccctgaatttcgacctgctgaagctggctggcgacgtggaatccaacccaggccctactagtatggactggatttggcgcatccttttccttgtcggcgctgctaccggcgcgcattccgggccccagctccagctgcaagagtctggacctggcctggtcaagcctagcgagacactgagcctgacctgtaccgtgtccggcgatagcatcagcagcggcgattactactggggctggatcagacagcctcctggcaaaggactggaatggatcggccacatctactacagcggcgtgacctactacaaccccagcctgaagtccagagtgaccatcagcgtggacaccagccggaaccagttctccctgaagctgtctagcgtgacagccgccgataccgccgtgtactactgcaccagagaggacagcagcaactggcggagtagaggccagggaacactggtcacagttagctctggatccggcggaggcggaagtggaggcggaggatctggcggcggaggctctttcgaacaggtgcagcttgttgaaagcggaggcggagttgtgcagcctggcagaagtctgagactgtcttgtgccgccagcggcttcaccttcagcagctatggaatgcactgggtccgacaggcccctggcaaaggacttgaatgggttgccgtgatctgggacgacggcagcaacaagtattacgtggacagcgtgaagggcagattcaccatcagccgggacaacagcaagaacaccctgtacctccagatgaacagcctgagagccgaggacacagccgtgtattattgcgccagagatgactactacggcagcggctccttcaacagctactatggcacagacgtgtggggccagggcacaacagttaccgttagctctacgcgtgaggacctgaagaacgtgttcccacctgaggtggccgtgttcgagcctagcgaggccgagatcagccacacccagaaagccaccctcgtgtgcctggctaccggcttctaccccgaccatgtggaactgtcttggtgggtcaacggcaaagaggtgcacagcggcgtgtgtaccgacccccagccactgaaagaacagcccgccctgaacgacagccggtactgcctgagcagcagactgagagtgtccgccaccttctggcagaacccccggaaccacttcagatgccaggtgcagttctacggcctgagcgagaacgacgagtggacccaggacagagccaagcccgtgacccagatcgtgtctgccgaagcctggggcagagccgatgatgtgattaagatccactggcaggaaaagaagtccaacaccatcctgggcagccaggaaggcaacaccatgaagaccaacgacacctacatgaagttcagctggctgaccgtgcccgagaagtccctggacaaagaacacagatgcatcgtgcggcacgaaaacaacaagaacggcgtggaccaggaaatcatcttcccacccatcaagaccgatgtgattacaatggaccccaaggacaactgctccaaggacgccaacgataccctgctgctccagctgaccaacaccagcgcctactacatgtacttgttgctgctgctgaagtccgtggtgtacttcgccatcatcacatgctgcctgctgcggagaaccgccttctgctgcaacggcgagaagtct

SEQ ID NO: 8005 - DNA, 2970 bp, synthetic construct
  source 1..2970: mol_type = other DNA
atggccttaccagtgaccgccttgctcctgccgctggccttgctgctccacgccgccaggccggaagtgcagctggttgaatctggcggaggactggttcagcctggcggatctctgagactgtcttgtgccgccagcggcttcagcttcagcgacttttggatgagctgggtccgacaggcccctggcaaaggacttgaatgggtcgccacaatcagccaggccggcagcgagaaggactacgtggactctgtgaagggcagattcaccatcagccgggacaacgccaagaagtccctgtacctccagatgaacagcctgagagccgaggacaccgccgtgtactattgtgcctctggcgtgtacagcttcgactacagaggccagggcaccctggtcacagtctcttctggtaccggcggaggcggatctggcggcggaggtagcggtggcggaggatctgaattcgacatccagatgacacagagccctagcagcctgtctgccagcgtgggagacagagtgaccatcacctgtagagccagccagggcatctcttcttggctggcctggtatcagcagaagcccgagaaggcccctaagagcctgatctatgccgccagctctctccagagcggagtgcctagcagattttctggcagcggctccggcaccgatttcaccctgacaatatccagcctccagcctgaggacttcgccacctactactgccagcagtacaacagctacccctacaccttcggccagggcaccaagctggaaatcaaactcgagatccagaaccctgatcctgccgtgtaccagctgcgggatagcaagagcagcgacaagagcgtgtgtctgttcaccgacttcgacagccagaccaacgtgtcccagagcaaggactccgacgtgtacatcaccgataagtgcgtgctggacatgcggagcatggacttcaagagcaactccgccgtggcctggtccaacaagtccgatttcgcctgcgccaacgccttcaacaacagcattatccccgaggacacattcttcccaagccccgagagcagcgactccaccgaccacgtgaagcccaaagagacagagaacaccaagcagcccagcaagagctgccacaagcccaaggccatcgtgcacaccgagaaagtgaacatgatgagcctgaccgtgctgggcctgcggatgctgttcgccaaaaccgtggccgtgaacttcctgctgaccgccaagctgttcttcctccgcgccaagagaagcggatctggcgtgaagcagaccctgaatttcgacctgctgaagctggctggcgacgtggaatccaacccaggccctactagtatggactggatttggcgcatccttttccttgtcggcgctgctaccggcgcgcattccgggccccagctccagctgcaagagtctggacctggcctggtcaagcctagcgagacactgagcctgacctgtaccgtgtccggcgatagcatcagcagcggcgattactactggggctggatcagacagcctcctggcaaaggactggaatggatcggccacatctactacagcggcgtgacctactacaaccccagcctgaagtccagagtgaccatcagcgtggacaccagccggaaccagttctccctgaagctgtctagcgtgacagccgccgataccgccgtgtactactgcaccagagaggacagcagcaactggcggagtagaggccagggaacactggtcacagttagctctggatccggcggaggcggaagtggaggcggaggatctggcggcggaggctctttcgaagaagtgcaactggttcaatctggcggcggactggttcatccaggcggttctctgagactgagctgtgccggctctggcttcaccttcagcacctacctgatgtactgggtccgacaggcccctggcaagacactggaatgggtgtccgctattggcagcggaggcgatacctactacgccgactctgtgaagggcagattcaccatcagccgggacaacgccaagaacagcctgtacctccagatgaactccctgagagccgaggacatggccgtgtactactgtgccagaggactcggctattggggccagggaacactggtcacagtgtcctctacgcgtgaggacctgaagaacgtgttcccacctgaggtggccgtgttcgagcctagcgaggccgagatcagccacacccagaaagccaccctcgtgtgcctggctaccggcttctaccccgaccatgtggaactgtcttggtgggtcaacggcaaagaggtgcacagcggcgtgtgtaccgacccccagccactgaaagaacagcccgccctgaacgacagccggtactgcctgagcagcagactgagagtgtccgccaccttctggcagaacccccggaaccacttcagatgccaggtgcagttctacggcctgagcgagaacgacgagtggacccaggacagagccaagcccgtgacccagatcgtgtctgccgaagcctggggcagagccgatgatgtgattaagatccactggcaggaaaagaagtccaacaccatcctgggcagccaggaaggcaacaccatgaagaccaacgacacctacatgaagttcagctggctgaccgtgcccgagaagtccctggacaaagaacacagatgcatcgtgcggcacgaaaacaacaagaacggcgtggaccaggaaatcatcttcccacccatcaagaccgatgtgattacaatggaccccaaggacaactgctccaaggacgccaacgataccctgctgctccagctgaccaacaccagcgcctactacatgtacttgttgctgctgctgaagtccgtggtgtacttcgccatcatcacatgctgcctgctgcggagaaccgccttctgctgcaacggcgagaagtct

SEQ ID NO: 8006 - DNA, 3027 bp, synthetic construct
  source 1..3027: mol_type = other DNA
atggccttaccagtgaccgccttgctcctgccgctggccttgctgctccacgccgccaggccggaagtgcagctggttgaatctggcggaggactggttcagcctggcggatctctgagactgtcttgtgccgccagcggcttcagcttcagcgacttttggatgagctgggtccgacaggcccctggcaaaggacttgaatgggtcgccacaatcagccaggccggcagcgagaaggactacgtggactctgtgaagggcagattcaccatcagccgggacaacgccaagaagtccctgtacctccagatgaacagcctgagagccgaggacaccgccgtgtactattgtgcctctggcgtgtacagcttcgactacagaggccagggcaccctggtcacagtctcttctggtaccggcggaggcggatctggcggcggaggtagcggtggcggaggatctgaattcctgcctgttctgacacagcctccatccgtgtctgtggcccctggaaagaccgccagaatcacatgcggcggcaacaacatcggcagcaagagcgtgcactggtatcagcagaagcctggacaggctcctgtgctggtggtgtacgacgacagcgatagacctagcggcatccccgagagattcagcggcagcaattccggcaataccgccacactgaccatcagcagagtggaagctggcgacgaggccgactactactgccaagtgtgggacagcagcagcgactacgtggtgtttggcggcggaacaaagctgacagtgcttctcgagatccagaaccctgatcctgccgtgtaccagctgcgggatagcaagagcagcgacaagagcgtgtgtctgttcaccgacttcgacagccagaccaacgtgtcccagagcaaggactccgacgtgtacatcaccgataagtgcgtgctggacatgcggagcatggacttcaagagcaactccgccgtggcctggtccaacaagtccgatttcgcctgcgccaacgccttcaacaacagcattatccccgaggacacattcttcccaagccccgagagcagcgactccaccgaccacgtgaagcccaaagagacagagaacaccaagcagcccagcaagagctgccacaagcccaaggccatcgtgcacaccgagaaagtgaacatgatgagcctgaccgtgctgggcctgcggatgctgttcgccaaaaccgtggccgtgaacttcctgctgaccgccaagctgttcttcctccgcgccaagagaagcggatctggcgtgaagcagaccctgaatttcgacctgctgaagctggctggcgacgtggaatccaacccaggccctactagtatggactggatttggcgcatccttttccttgtcggcgctgctaccggcgcgcattccgggccccagctccagctgcaagagtctggacctggcctggtcaagcctagcgagacactgagcctgacctgtaccgtgtccggcgatagcatcagcagcggcgattactactggggctggatcagacagcctcctggcaaaggactggaatggatcggccacatctactacagcggcgtgacctactacaaccccagcctgaagtccagagtgaccatcagcgtggacaccagccggaaccagttctccctgaagctgtctagcgtgacagccgccgataccgccgtgtactactgcaccagagaggacagcagcaactggcggagtagaggccagggaacactggtcacagttagctctggatccggcggaggcggaagtggaggcggaggatctggcggcggaggctctttcgaagaagttcaactggtgcagagcggagccgaagtgaagaagccaggcgagagcctgaagattagctgcaaaggcagcggctacagcttcaccagctactggatcggctgggtccgacagatgcctggcaaaggactggaatggatgggcatcatctaccccggcgacagcgacaccagatacagccctagctttcagggccaagtgaccatctccgccgacaagagcatcagcacagcctacctccagtggtcctctctgaaggccagcgataccgccatgtactactgcgccagacaagtctggggatggcaaggcggcatgtaccccaggtctaactggtggtacaacctggactcttggggccagggcacactggtcacagtctcttctacgcgtgaggacctgaagaacgtgttcccacctgaggtggccgtgttcgagcctagcgaggccgagatcagccacacccagaaagccaccctcgtgtgcctggctaccggcttctaccccgaccatgtggaactgtcttggtgggtcaacggcaaagaggtgcacagcggcgtgtgtaccgacccccagccactgaaagaacagcccgccctgaacgacagccggtactgcctgagcagcagactgagagtgtccgccaccttctggcagaacccccggaaccacttcagatgccaggtgcagttctacggcctgagcgagaacgacgagtggacccaggacagagccaagcccgtgacccagatcgtgtctgccgaagcctggggcagagccgatgatgtgattaagatccactggcaggaaaagaagtccaacaccatcctgggcagccaggaaggcaacaccatgaagaccaacgacacctacatgaagttcagctggctgaccgtgcccgagaagtccctggacaaagaacacagatgcatcgtgcggcacgaaaacaacaagaacggcgtggaccaggaaatcatcttcccacccatcaagaccgatgtgattacaatggaccccaaggacaactgctccaaggacgccaacgataccctgctgctccagctgaccaacaccagcgcctactacatgtacttgttgctgctgctgaagtccgtggtgtacttcgccatcatcacatgctgcctgctgcggagaaccgccttctgctgcaacggcgagaagtct

SEQ ID NO: 8007 - DNA, 3006 bp, synthetic construct
  source 1..3006: mol_type = other DNA
atggccttaccagtgaccgccttgctcctgccgctggccttgctgctccacgccgccaggccggaagtgcagctggttgaatctggcggaggactggttcagcctggcggatctctgagactgtcttgtgccgccagcggcttcagcttcagcgacttttggatgagctgggtccgacaggcccctggcaaaggacttgaatgggtcgccacaatcagccaggccggcagcgagaaggactacgtggactctgtgaagggcagattcaccatcagccgggacaacgccaagaagtccctgtacctccagatgaacagcctgagagccgaggacaccgccgtgtactattgtgcctctggcgtgtacagcttcgactacagaggccagggcaccctggtcacagtctcttctggtaccggcggaggcggatctggcggcggaggtagcggtggcggaggatctgaattcgagctggtcatgacacagagccctgcttctctggccgtgtcactgggacagagagccaccatctcttgcagagccagcgagagcgtggacagctacggcaagagcttcatgcactggtatcagctcaagcccggccagcctcctaagctgctgatctacagagcctccaacctggaaagcggcgtgccagccagattttctggcagcggcagcagaaccgacttcaccctgaccattgatcccgtggaagccgatgatgccgccacctactactgccagcagaacaacgaggacccctggacatttggcggaggcaccaagctggaaatcaaactcgagatccagaaccctgatcctgccgtgtaccagctgcgggatagcaagagcagcgacaagagcgtgtgtctgttcaccgacttcgacagccagaccaacgtgtcccagagcaaggactccgacgtgtacatcaccgataagtgcgtgctggacatgcggagcatggacttcaagagcaactccgccgtggcctggtccaacaagtccgatttcgcctgcgccaacgccttcaacaacagcattatccccgaggacacattcttcccaagccccgagagcagcgactccaccgaccacgtgaagcccaaagagacagagaacaccaagcagcccagcaagagctgccacaagcccaaggccatcgtgcacaccgagaaagtgaacatgatgagcctgaccgtgctgggcctgcggatgctgttcgccaaaaccgtggccgtgaacttcctgctgaccgccaagctgttcttcctccgcgccaagagaagcggatctggcgtgaagcagaccctgaatttcgacctgctgaagctggctggcgacgtggaatccaacccaggccctactagtatggactggatttggcgcatccttttccttgtcggcgctgctaccggcgcgcattccgggccccagctccagctgcaagagtctggacctggcctggtcaagcctagcgagacactgagcctgacctgtaccgtgtccggcgatagcatcagcagcggcgattactactggggctggatcagacagcctcctggcaaaggactggaatggatcggccacatctactacagcggcgtgacctactacaaccccagcctgaagtccagagtgaccatcagcgtggacaccagccggaaccagttctccctgaagctgtctagcgtgacagccgccgataccgccgtgtactactgcaccagagaggacagcagcaactggcggagtagaggccagggaacactggtcacagttagctctggatccggcggaggcggaagtggaggcggaggatctggcggcggaggctctttcgaagaagtgcagctcgaacagtctggccccgagcttgtgaaacctggcgcttccgtgaagatgagctgcaaggccagcggctacaccttcaccaactactacatgaaatgggtcaagcagagccacggcaagtccctggaatggatcggcgatctgaaccccaacaacggcgacaccttctacaaccagaagttcaagggcaaagccacactgaccgtggacaagagcagcaacaccgcctacatgcagctcaactccctgaccagcgaggacagcgccgtgtactactgtgccagaaccggcagatacgaagagaacgctatggactactggggccagggcacaagcgtgacagtctcttctacgcgtgaggacctgaagaacgtgttcccacctgaggtggccgtgttcgagcctagcgaggccgagatcagccacacccagaaagccaccctcgtgtgcctggctaccggcttctaccccgaccatgtggaactgtcttggtgggtcaacggcaaagaggtgcacagcggcgtgtgtaccgacccccagccactgaaagaacagcccgccctgaacgacagccggtactgcctgagcagcagactgagagtgtccgccaccttctggcagaacccccggaaccacttcagatgccaggtgcagttctacggcctgagcgagaacgacgagtggacccaggacagagccaagcccgtgacccagatcgtgtctgccgaagcctggggcagagccgatgatgtgattaagatccactggcaggaaaagaagtccaacaccatcctgggcagccaggaaggcaacaccatgaagaccaacgacacctacatgaagttcagctggctgaccgtgcccgagaagtccctggacaaagaacacagatgcatcgtgcggcacgaaaacaacaagaacggcgtggaccaggaaatcatcttcccacccatcaagaccgatgtgattacaatggaccccaaggacaactgctccaaggacgccaacgataccctgctgctccagctgaccaacaccagcgcctactacatgtacttgttgctgctgctgaagtccgtggtgtacttcgccatcatcacatgctgcctgctgcggagaaccgccttctgctgcaacggcgagaagtct

SEQ ID NO: 8008 - DNA, 2988 bp, synthetic construct
  source 1..2988: mol_type = other DNA
atggccttaccagtgaccgccttgctcctgccgctggccttgctgctccacgccgccaggccggaagtgcagctggttgaatctggcggaggactggttcagcctggcggatctctgagactgtcttgtgccgccagcggcttcagcttcagcgacttttggatgagctgggtccgacaggcccctggcaaaggacttgaatgggtcgccacaatcagccaggccggcagcgagaaggactacgtggactctgtgaagggcagattcaccatcagccgggacaacgccaagaagtccctgtacctccagatgaacagcctgagagccgaggacaccgccgtgtactattgtgcctctggcgtgtacagcttcgactacagaggccagggcaccctggtcacagtctcttctggtaccggcggaggcggatctggcggcggaggtagcggtggcggaggatctgaattcgacgtggtcatgacacagagcccttctagcctgtctgccagcgtgggcgacagagtgaccatcacctgtatggcctccgaggacatctacatccggctggcctggtatcagcagaagcctggaaacgcccctaagctgctgatctacgccgccacctctctggaaacaggcgtgccaagcagattttccggcagcggctctggcaccgatttcaccctgacaatatccagcctccagcctgaggacttcgccacctactactgccagcagtattggagcagcccctggacatttggcggaggcaccaaggtggaaatcaaactcgagatccagaaccctgatcctgccgtgtaccagctgcgggatagcaagagcagcgacaagagcgtgtgtctgttcaccgacttcgacagccagaccaacgtgtcccagagcaaggactccgacgtgtacatcaccgataagtgcgtgctggacatgcggagcatggacttcaagagcaactccgccgtggcctggtccaacaagtccgatttcgcctgcgccaacgccttcaacaacagcattatccccgaggacacattcttcccaagccccgagagcagcgactccaccgaccacgtgaagcccaaagagacagagaacaccaagcagcccagcaagagctgccacaagcccaaggccatcgtgcacaccgagaaagtgaacatgatgagcctgaccgtgctgggcctgcggatgctgttcgccaaaaccgtggccgtgaacttcctgctgaccgccaagctgttcttcctccgcgccaagagaagcggatctggcgtgaagcagaccctgaatttcgacctgctgaagctggctggcgacgtggaatccaacccaggccctactagtatggactggatttggcgcatccttttccttgtcggcgctgctaccggcgcgcattccgggccccagctccagctgcaagagtctggacctggcctggtcaagcctagcgagacactgagcctgacctgtaccgtgtccggcgatagcatcagcagcggcgattactactggggctggatcagacagcctcctggcaaaggactggaatggatcggccacatctactacagcggcgtgacctactacaaccccagcctgaagtccagagtgaccatcagcgtggacaccagccggaaccagttctccctgaagctgtctagcgtgacagccgccgataccgccgtgtactactgcaccagagaggacagcagcaactggcggagtagaggccagggaacactggtcacagttagctctggatccggcggaggcggaagtggaggcggaggatctggcggcggaggctctttcgaacaggttcagctgcaagagtctggccccggactggtcaagcctagccaaacactgagcctgacctgtaccgtgtccggctacagcatcaccagcgactacacctggaactggatcagacagcctcctggcaacggactggaatggatcggctacatcacctacagcggcagcaccagctacaaccccagcctgaaaagccgggtgctgatctccgtggacaccagcaagaatcaggtgtccctgaagctgagcagcgtgacagccgctgataccgccgtgtactactgtgccagactggggagaagatacacaatggactactggggccagggcaccaccgtgacagtttcttctacgcgtgaggacctgaagaacgtgttcccacctgaggtggccgtgttcgagcctagcgaggccgagatcagccacacccagaaagccaccctcgtgtgcctggctaccggcttctaccccgaccatgtggaactgtcttggtgggtcaacggcaaagaggtgcacagcggcgtgtgtaccgacccccagccactgaaagaacagcccgccctgaacgacagccggtactgcctgagcagcagactgagagtgtccgccaccttctggcagaacccccggaaccacttcagatgccaggtgcagttctacggcctgagcgagaacgacgagtggacccaggacagagccaagcccgtgacccagatcgtgtctgccgaagcctggggcagagccgatgatgtgattaagatccactggcaggaaaagaagtccaacaccatcctgggcagccaggaaggcaacaccatgaagaccaacgacacctacatgaagttcagctggctgaccgtgcccgagaagtccctggacaaagaacacagatgcatcgtgcggcacgaaaacaacaagaacggcgtggaccaggaaatcatcttcccacccatcaagaccgatgtgattacaatggaccccaaggacaactgctccaaggacgccaacgataccctgctgctccagctgaccaacaccagcgcctactacatgtacttgttgctgctgctgaagtccgtggtgtacttcgccatcatcacatgctgcctgctgcggagaaccgccttctgctgcaacggcgagaagtct

SEQ ID NO: 8009 - DNA, 3000 bp, synthetic construct
  source 1..3000: mol_type = other DNA
atggccttaccagtgaccgccttgctcctgccgctggccttgctgctccacgccgccaggccggaagtgcagctggttgaatctggcggaggactggttcagcctggcggatctctgagactgtcttgtgccgccagcggcttcagcttcagcgacttttggatgagctgggtccgacaggcccctggcaaaggacttgaatgggtcgccacaatcagccaggccggcagcgagaaggactacgtggactctgtgaagggcagattcaccatcagccgggacaacgccaagaagtccctgtacctccagatgaacagcctgagagccgaggacaccgccgtgtactattgtgcctctggcgtgtacagcttcgactacagaggccagggcaccctggtcacagtctcttctggtaccggcggaggcggatctggcggcggaggtagcggtggcggaggatctgaattcgatattgtgctgactcagagccctgccactctgagccttagtccaggcgacagagctaccatctcctgtagggcctctgaatccgtgaccattctgggctctcatctcatatattggtatcaacaaaagccgggccagcctccacggctgctcattcaactggcctctaacgtgcagaccggcgtgccagctagattttctggctctggctcccggaccgactttacactgacaatcagctccgtggaacccgaagattttgccgtctattattgcctccagtccaggaccattcctcggacattcggccagggaacaaaactcgaaatcaagcggctcgagatccagaaccctgatcctgccgtgtaccagctgcgggatagcaagagcagcgacaagagcgtgtgtctgttcaccgacttcgacagccagaccaacgtgtcccagagcaaggactccgacgtgtacatcaccgataagtgcgtgctggacatgcggagcatggacttcaagagcaactccgccgtggcctggtccaacaagtccgatttcgcctgcgccaacgccttcaacaacagcattatccccgaggacacattcttcccaagccccgagagcagcgactccaccgaccacgtgaagcccaaagagacagagaacaccaagcagcccagcaagagctgccacaagcccaaggccatcgtgcacaccgagaaagtgaacatgatgagcctgaccgtgctgggcctgcggatgctgttcgccaaaaccgtggccgtgaacttcctgctgaccgccaagctgttcttcctccgcgccaagagaagcggatctggcgtgaagcagaccctgaatttcgacctgctgaagctggctggcgacgtggaatccaacccaggccctactagtatggactggatttggcgcatccttttccttgtcggcgctgctaccggcgcgcattccgggccccagctccagctgcaagagtctggacctggcctggtcaagcctagcgagacactgagcctgacctgtaccgtgtccggcgatagcatcagcagcggcgattactactggggctggatcagacagcctcctggcaaaggactggaatggatcggccacatctactacagcggcgtgacctactacaaccccagcctgaagtccagagtgaccatcagcgtggacaccagccggaaccagttctccctgaagctgtctagcgtgacagccgccgataccgccgtgtactactgcaccagagaggacagcagcaactggcggagtagaggccagggaacactggtcacagttagctctggatccggcggaggcggaagtggaggcggaggatctggcggcggaggctctttcgaacaggtgcagctcgttcagagtggccccgaagtgaaaaagccaggcgagtccgtgaagatttcctgcaaagcctccggctacacattccggcactactctatgaattgggtcaagcaggccccaggccagggccttaagtggatgggacgcatcaataccgagtccggcgtgccaatctacgccgatgacttcaaaggccggttcagcttcaccgtggatacctctgcctccaccgcctacctggaaatcagcagcctgaccagcgaggatacagctgtgtacttctgtagcaacgattacctctacagcctggatttctggggacagggaaccacactgaccgtgtctagcacgcgtgaggacctgaagaacgtgttcccacctgaggtggccgtgttcgagcctagcgaggccgagatcagccacacccagaaagccaccctcgtgtgcctggctaccggcttctaccccgaccatgtggaactgtcttggtgggtcaacggcaaagaggtgcacagcggcgtgtgtaccgacccccagccactgaaagaacagcccgccctgaacgacagccggtactgcctgagcagcagactgagagtgtccgccaccttctggcagaacccccggaaccacttcagatgccaggtgcagttctacggcctgagcgagaacgacgagtggacccaggacagagccaagcccgtgacccagatcgtgtctgccgaagcctggggcagagccgatgatgtgattaagatccactggcaggaaaagaagtccaacaccatcctgggcagccaggaaggcaacaccatgaagaccaacgacacctacatgaagttcagctggctgaccgtgcccgagaagtccctggacaaagaacacagatgcatcgtgcggcacgaaaacaacaagaacggcgtggaccaggaaatcatcttcccacccatcaagaccgatgtgattacaatggaccccaaggacaactgctccaaggacgccaacgataccctgctgctccagctgaccaacaccagcgcctactacatgtacttgttgctgctgctgaagtccgtggtgtacttcgccatcatcacatgctgcctgctgcggagaaccgccttctgctgcaacggcgagaagtct

SEQ ID NO: 8010 - DNA, 3000 bp, synthetic construct
  source 1..3000: mol_type = other DNA
atggccttaccagtgaccgccttgctcctgccgctggccttgctgctccacgccgccaggccggaagtgcagctggttgaatctggcggaggactggttcagcctggcggatctctgagactgtcttgtgccgccagcggcttcagcttcagcgacttttggatgagctgggtccgacaggcccctggcaaaggacttgaatgggtcgccacaatcagccaggccggcagcgagaaggactacgtggactctgtgaagggcagattcaccatcagccgggacaacgccaagaagtccctgtacctccagatgaacagcctgagagccgaggacaccgccgtgtactattgtgcctctggcgtgtacagcttcgactacagaggccagggcaccctggtcacagtctcttctggtaccggcggaggcggatctggcggcggaggtagcggtggcggaggatctgaattcgacatcgtgctgacacagtctcccgccacactgtcactgagccctggcgatagagccacactgagctgtagagccagcgagagcgtgacaatcctgggcagccacctgatctactggtatcagcagaagcccggacaggcccctagactgctgattcagctcgccagcaatgtgcagacaggcatccctgccagattttccggcagcggcagcagaaccgatttcaccctgaccataagcagcctggaacctgaggacttcgccgtgtactactgcctccagagccggacaatccccagaacctttggacagggcaccaagctggaaatcaagagactcgagatccagaaccctgatcctgccgtgtaccagctgcgggatagcaagagcagcgacaagagcgtgtgtctgttcaccgacttcgacagccagaccaacgtgtcccagagcaaggactccgacgtgtacatcaccgataagtgcgtgctggacatgcggagcatggacttcaagagcaactccgccgtggcctggtccaacaagtccgatttcgcctgcgccaacgccttcaacaacagcattatccccgaggacacattcttcccaagccccgagagcagcgactccaccgaccacgtgaagcccaaagagacagagaacaccaagcagcccagcaagagctgccacaagcccaaggccatcgtgcacaccgagaaagtgaacatgatgagcctgaccgtgctgggcctgcggatgctgttcgccaaaaccgtggccgtgaacttcctgctgaccgccaagctgttcttcctccgcgccaagagaagcggatctggcgtgaagcagaccctgaatttcgacctgctgaagctggctggcgacgtggaatccaacccaggccctactagtatggactggatttggcgcatccttttccttgtcggcgctgctaccggcgcgcattccgggccccagctccagctgcaagagtctggacctggcctggtcaagcctagcgagacactgagcctgacctgtaccgtgtccggcgatagcatcagcagcggcgattactactggggctggatcagacagcctcctggcaaaggactggaatggatcggccacatctactacagcggcgtgacctactacaaccccagcctgaagtccagagtgaccatcagcgtggacaccagccggaaccagttctccctgaagctgtctagcgtgacagccgccgataccgccgtgtactactgcaccagagaggacagcagcaactggcggagtagaggccagggaacactggtcacagttagctctggatccggcggaggcggaagtggaggcggaggatctggcggcggaggctctttcgaacaggttcagctggtgcagtctggcagcgagctgaagaaacctggcgagagcgtgaagatcagctgcaaggccagcggctacaccttcacacactacagcatgaactgggtccgacaggcccctggacaaggactggaatggatgggcagaatcaacaccgagacaggcgagcccctgtacgccgacgatttcaagggcagattcgtgttcagcctggacaccagcgccagcacagcctatctccagatcagctctctgaaggccgaggacaccgccgtgtactactgctccaacgactacctgtactccctggactattggggccagggcacactggtcacagtgtctagtacgcgtgaggacctgaagaacgtgttcccacctgaggtggccgtgttcgagcctagcgaggccgagatcagccacacccagaaagccaccctcgtgtgcctggctaccggcttctaccccgaccatgtggaactgtcttggtgggtcaacggcaaagaggtgcacagcggcgtgtgtaccgacccccagccactgaaagaacagcccgccctgaacgacagccggtactgcctgagcagcagactgagagtgtccgccaccttctggcagaacccccggaaccacttcagatgccaggtgcagttctacggcctgagcgagaacgacgagtggacccaggacagagccaagcccgtgacccagatcgtgtctgccgaagcctggggcagagccgatgatgtgattaagatccactggcaggaaaagaagtccaacaccatcctgggcagccaggaaggcaacaccatgaagaccaacgacacctacatgaagttcagctggctgaccgtgcccgagaagtccctggacaaagaacacagatgcatcgtgcggcacgaaaacaacaagaacggcgtggaccaggaaatcatcttcccacccatcaagaccgatgtgattacaatggaccccaaggacaactgctccaaggacgccaacgataccctgctgctccagctgaccaacaccagcgcctactacatgtacttgttgctgctgctgaagtccgtggtgtacttcgccatcatcacatgctgcctgctgcggagaaccgccttctgctgcaacggcgagaagtct

SEQ ID NO: 8011 - DNA, 3003 bp, synthetic construct
  source 1..3003: mol_type = other DNA
atggccttaccagtgaccgccttgctcctgccgctggccttgctgctccacgccgccaggccggaagtgcagctggttgaatctggcggaggactggttcagcctggcggatctctgagactgtcttgtgccgccagcggcttcagcttcagcgacttttggatgagctgggtccgacaggcccctggcaaaggacttgaatgggtcgccacaatcagccaggccggcagcgagaaggactacgtggactctgtgaagggcagattcaccatcagccgggacaacgccaagaagtccctgtacctccagatgaacagcctgagagccgaggacaccgccgtgtactattgtgcctctggcgtgtacagcttcgactacagaggccagggcaccctggtcacagtctcttctggtaccggcggaggcggatctggcggcggaggtagcggtggcggaggatctgaattcgacatccagctgactcagagccctagctttctgagcgccagcgtgggcgacagagtgaccattacatgtagagccagccagggcatcagcaccgacctgaactggtatcagcagaagcctggcaaggcccctaagctgctgatctacgccgccagcaatctggaaagcggcgtgccaagcagattttccggctctggcagcggcaccgagttcaccctgacaatatctagcctccagcctgaggacttcgccacctactactgccagcagagctacaactggccctacacctttggcggaggcaccaaggtggaaatcaagagactcgagatccagaaccctgatcctgccgtgtaccagctgcgggatagcaagagcagcgacaagagcgtgtgtctgttcaccgacttcgacagccagaccaacgtgtcccagagcaaggactccgacgtgtacatcaccgataagtgcgtgctggacatgcggagcatggacttcaagagcaactccgccgtggcctggtccaacaagtccgatttcgcctgcgccaacgccttcaacaacagcattatccccgaggacacattcttcccaagccccgagagcagcgactccaccgaccacgtgaagcccaaagagacagagaacaccaagcagcccagcaagagctgccacaagcccaaggccatcgtgcacaccgagaaagtgaacatgatgagcctgaccgtgctgggcctgcggatgctgttcgccaaaaccgtggccgtgaacttcctgctgaccgccaagctgttcttcctccgcgccaagagaagcggatctggcgtgaagcagaccctgaatttcgacctgctgaagctggctggcgacgtggaatccaacccaggccctactagtatggactggatttggcgcatccttttccttgtcggcgctgctaccggcgcgcattccgggccccagctccagctgcaagagtctggacctggcctggtcaagcctagcgagacactgagcctgacctgtaccgtgtccggcgatagcatcagcagcggcgattactactggggctggatcagacagcctcctggcaaaggactggaatggatcggccacatctactacagcggcgtgacctactacaaccccagcctgaagtccagagtgaccatcagcgtggacaccagccggaaccagttctccctgaagctgtctagcgtgacagccgccgataccgccgtgtactactgcaccagagaggacagcagcaactggcggagtagaggccagggaacactggtcacagttagctctggatccggcggaggcggaagtggaggcggaggatctggcggcggaggctctttcgaagaagttcagctggttgaatcaggcggaggactcgtgaaacctggcggctctctgagactgtcttgtgccgccagcggcttcaccttcagcaacttcgagatgaactgggtccgacaggccccaggcaaaggactggaatgggtgtccggcatcagctccaatggccggtacatcaactacgccgacagcgtgaagggcagattcaccatcagccgggacaacgccaagaacagcctgtacctccagatgaactccctgagagccgaggacaccgccgtgtactattgtgccagagtggtggacttcgaccaggactacaacggcttcgactattggggccagggcaccctggttaccgttagctctacgcgtgaggacctgaagaacgtgttcccacctgaggtggccgtgttcgagcctagcgaggccgagatcagccacacccagaaagccaccctcgtgtgcctggctaccggcttctaccccgaccatgtggaactgtcttggtgggtcaacggcaaagaggtgcacagcggcgtgtgtaccgacccccagccactgaaagaacagcccgccctgaacgacagccggtactgcctgagcagcagactgagagtgtccgccaccttctggcagaacccccggaaccacttcagatgccaggtgcagttctacggcctgagcgagaacgacgagtggacccaggacagagccaagcccgtgacccagatcgtgtctgccgaagcctggggcagagccgatgatgtgattaagatccactggcaggaaaagaagtccaacaccatcctgggcagccaggaaggcaacaccatgaagaccaacgacacctacatgaagttcagctggctgaccgtgcccgagaagtccctggacaaagaacacagatgcatcgtgcggcacgaaaacaacaagaacggcgtggaccaggaaatcatcttcccacccatcaagaccgatgtgattacaatggaccccaaggacaactgctccaaggacgccaacgataccctgctgctccagctgaccaacaccagcgcctactacatgtacttgttgctgctgctgaagtccgtggtgtacttcgccatcatcacatgctgcctgctgcggagaaccgccttctgctgcaacggcgagaagtct

SEQ ID NO: 8012 - DNA, 2997 bp, synthetic construct
  source 1..2997: mol_type = other DNA
atggccttaccagtgaccgccttgctcctgccgctggccttgctgctccacgccgccaggccggaagtgcagctggttgaatctggcggaggactggttcagcctggcggatctctgagactgtcttgtgccgccagcggcttcagcttcagcgacttttggatgagctgggtccgacaggcccctggcaaaggacttgaatgggtcgccacaatcagccaggccggcagcgagaaggactacgtggactctgtgaagggcagattcaccatcagccgggacaacgccaagaagtccctgtacctccagatgaacagcctgagagccgaggacaccgccgtgtactattgtgcctctggcgtgtacagcttcgactacagaggccagggcaccctggtcacagtctcttctggtaccggcggaggcggatctggcggcggaggtagcggtggcggaggatctgaattcgacatccaactgactcagagccccagctttctgagcgcctctgtgggcgacagagtgaccatcacatgtagtctcagcctgggcatcagcacatggcgggattggtttccgccgaggcttggcaggggccttgagccgctgacctacgccgccagcacactgcaaagcggagtgcctagcagattttccggcagcggctctggcaccgagttcaccctgacaatatccagcctccagcctgaggacttcgccacctactactgccagcagctcaacagctaccctctgacctttggcggaggcaccaaggtggaaatcaagagactcgagatccagaaccctgatcctgccgtgtaccagctgcgggatagcaagagcagcgacaagagcgtgtgtctgttcaccgacttcgacagccagaccaacgtgtcccagagcaaggactccgacgtgtacatcaccgataagtgcgtgctggacatgcggagcatggacttcaagagcaactccgccgtggcctggtccaacaagtccgatttcgcctgcgccaacgccttcaacaacagcattatccccgaggacacattcttcccaagccccgagagcagcgactccaccgaccacgtgaagcccaaagagacagagaacaccaagcagcccagcaagagctgccacaagcccaaggccatcgtgcacaccgagaaagtgaacatgatgagcctgaccgtgctgggcctgcggatgctgttcgccaaaaccgtggccgtgaacttcctgctgaccgccaagctgttcttcctccgcgccaagagaagcggatctggcgtgaagcagaccctgaatttcgacctgctgaagctggctggcgacgtggaatccaacccaggccctactagtatggactggatttggcgcatccttttccttgtcggcgctgctaccggcgcgcattccgggccccagctccagctgcaagagtctggacctggcctggtcaagcctagcgagacactgagcctgacctgtaccgtgtccggcgatagcatcagcagcggcgattactactggggctggatcagacagcctcctggcaaaggactggaatggatcggccacatctactacagcggcgtgacctactacaaccccagcctgaagtccagagtgaccatcagcgtggacaccagccggaaccagttctccctgaagctgtctagcgtgacagccgccgataccgccgtgtactactgcaccagagaggacagcagcaactggcggagtagaggccagggaacactggtcacagttagctctggatccggcggaggcggaagtggaggcggaggatctggcggcggaggctctttcgaagaagttcaactggttgagtctggtggcggcctggttaagcctggcggatctctgagactgagctgtgccgccagcggcttcacctttagcacatacggcatgagctgggtccgacaggcccctggaaaaggacttgagtgggtcgcctacatcaacaacggctccggctacatctactacgccgacagcgtgaagggcagattcaccatcagccgggacaacgccaagaacagcctgtacctccagatgaactccctgagagccgaggacaccgccgtgtactattgtgccagaggacagtggtggagcggcggagactttgattattggggccagggcaccctggtcaccgtttcttctacgcgtgaggacctgaagaacgtgttcccacctgaggtggccgtgttcgagcctagcgaggccgagatcagccacacccagaaagccaccctcgtgtgcctggctaccggcttctaccccgaccatgtggaactgtcttggtgggtcaacggcaaagaggtgcacagcggcgtgtgtaccgacccccagccactgaaagaacagcccgccctgaacgacagccggtactgcctgagcagcagactgagagtgtccgccaccttctggcagaacccccggaaccacttcagatgccaggtgcagttctacggcctgagcgagaacgacgagtggacccaggacagagccaagcccgtgacccagatcgtgtctgccgaagcctggggcagagccgatgatgtgattaagatccactggcaggaaaagaagtccaacaccatcctgggcagccaggaaggcaacaccatgaagaccaacgacacctacatgaagttcagctggctgaccgtgcccgagaagtccctggacaaagaacacagatgcatcgtgcggcacgaaaacaacaagaacggcgtggaccaggaaatcatcttcccacccatcaagaccgatgtgattacaatggaccccaaggacaactgctccaaggacgccaacgataccctgctgctccagctgaccaacaccagcgcctactacatgtacttgttgctgctgctgaagtccgtggtgtacttcgccatcatcacatgctgcctgctgcggagaaccgccttctgctgcaacggcgagaagtct

SEQ ID NO: 8013 - DNA, 3000 bp, synthetic construct
  source 1..3000: mol_type = other DNA
atggccttaccagtgaccgccttgctcctgccgctggccttgctgctccacgccgccaggccggaagtgcagctggttgaatctggcggaggactggttcagcctggcggatctctgagactgtcttgtgccgccagcggcttcagcttcagcgacttttggatgagctgggtccgacaggcccctggcaaaggacttgaatgggtcgccacaatcagccaggccggcagcgagaaggactacgtggactctgtgaagggcagattcaccatcagccgggacaacgccaagaagtccctgtacctccagatgaacagcctgagagccgaggacaccgccgtgtactattgtgcctctggcgtgtacagcttcgactacagaggccagggcaccctggtcacagtctcttctggtaccggcggaggcggatctggcggcggaggtagcggtggcggaggatctgaattcgagatcgtgctgacacagtctcccgccacactgtcactgtctccaggcgaaagagccacactgagctgtagcgccagcagcagcgtgtcctacatgtactggtatcagcagaagcccggacaggcccctagactgctgatctacagaaccagcaacctggcctctggcatccccgccagattttctggctctggcagcggcaccgatttcaccctgaccataagcagcctggaacctgaggacttcgccgtgtactactgccagcagtaccacagctaccccaccacctttggacagggcaccaaggtggaaatcaagcggacagttctcgagatccagaaccctgatcctgccgtgtaccagctgcgggatagcaagagcagcgacaagagcgtgtgtctgttcaccgacttcgacagccagaccaacgtgtcccagagcaaggactccgacgtgtacatcaccgataagtgcgtgctggacatgcggagcatggacttcaagagcaactccgccgtggcctggtccaacaagtccgatttcgcctgcgccaacgccttcaacaacagcattatccccgaggacacattcttcccaagccccgagagcagcgactccaccgaccacgtgaagcccaaagagacagagaacaccaagcagcccagcaagagctgccacaagcccaaggccatcgtgcacaccgagaaagtgaacatgatgagcctgaccgtgctgggcctgcggatgctgttcgccaaaaccgtggccgtgaacttcctgctgaccgccaagctgttcttcctccgcgccaagagaagcggatctggcgtgaagcagaccctgaatttcgacctgctgaagctggctggcgacgtggaatccaacccaggccctactagtatggactggatttggcgcatccttttccttgtcggcgctgctaccggcgcgcattccgggccccagctccagctgcaagagtctggacctggcctggtcaagcctagcgagacactgagcctgacctgtaccgtgtccggcgatagcatcagcagcggcgattactactggggctggatcagacagcctcctggcaaaggactggaatggatcggccacatctactacagcggcgtgacctactacaaccccagcctgaagtccagagtgaccatcagcgtggacaccagccggaaccagttctccctgaagctgtctagcgtgacagccgccgataccgccgtgtactactgcaccagagaggacagcagcaactggcggagtagaggccagggaacactggtcacagttagctctggatccggcggaggcggaagtggaggcggaggatctggcggcggaggctctttcgaagaagtgcagctggttgaatcaggtggcggcctggttcaacctggcggatctctgagactgtcttgtgccgccagcggcttcagcttcaacacctacgccatgaactgggtccgacaggctcctggcaaaggactggaatgggtgtcccacatcagaagcaagagcaacaacttcgccacctactacgccgacagcgtgaaggacagattcaccatcagccgggacaacgccaagaacagcctgtacctccagatgaactccctgagagccgaggacaccgccgtgtattattgcgccagacaaggcggcgacttccctatggattattggggccagggcaccctggtcaccgtttcttctacgcgtgaggacctgaagaacgtgttcccacctgaggtggccgtgttcgagcctagcgaggccgagatcagccacacccagaaagccaccctcgtgtgcctggctaccggcttctaccccgaccatgtggaactgtcttggtgggtcaacggcaaagaggtgcacagcggcgtgtgtaccgacccccagccactgaaagaacagcccgccctgaacgacagccggtactgcctgagcagcagactgagagtgtccgccaccttctggcagaacccccggaaccacttcagatgccaggtgcagttctacggcctgagcgagaacgacgagtggacccaggacagagccaagcccgtgacccagatcgtgtctgccgaagcctggggcagagccgatgatgtgattaagatccactggcaggaaaagaagtccaacaccatcctgggcagccaggaaggcaacaccatgaagaccaacgacacctacatgaagttcagctggctgaccgtgcccgagaagtccctggacaaagaacacagatgcatcgtgcggcacgaaaacaacaagaacggcgtggaccaggaaatcatcttcccacccatcaagaccgatgtgattacaatggaccccaaggacaactgctccaaggacgccaacgataccctgctgctccagctgaccaacaccagcgcctactacatgtacttgttgctgctgctgaagtccgtggtgtacttcgccatcatcacatgctgcctgctgcggagaaccgccttctgctgcaacggcgagaagtct

SEQ ID NO: 8014 - DNA, 2988 bp, synthetic construct
  source 1..2988: mol_type = other DNA
atggccttaccagtgaccgccttgctcctgccgctggccttgctgctccacgccgccaggccggaagtgcagctggttgaatctggcggaggactggttcagcctggcggatctctgagactgtcttgtgccgccagcggcttcagcttcagcgacttttggatgagctgggtccgacaggcccctggcaaaggacttgaatgggtcgccacaatcagccaggccggcagcgagaaggactacgtggactctgtgaagggcagattcaccatcagccgggacaacgccaagaagtccctgtacctccagatgaacagcctgagagccgaggacaccgccgtgtactattgtgcctctggcgtgtacagcttcgactacagaggccagggcaccctggtcacagtctcttctggtaccggcggaggcggatctggcggcggaggtagcggtggcggaggatctgaattcgacgtggtcatgacacagagcccttctagcctgtctgccagcgtgggcgacagagtgaccatcacctgtaaagccagcgaggacatctacatccggctggcctggtatcagcagaagcctggaaaggcccctaagctgctgatctacgccgccacctctctggaaacaggcgtgccaagcagattttccggcagcggctctggcaccgatttcaccctgacaatatccagcctccagcctgaggacttcgccacctactactgccagcagtattggaccacaccttggacctttggcggaggcaccaaggtggaaatcaaactcgagatccagaaccctgatcctgccgtgtaccagctgcgggatagcaagagcagcgacaagagcgtgtgtctgttcaccgacttcgacagccagaccaacgtgtcccagagcaaggactccgacgtgtacatcaccgataagtgcgtgctggacatgcggagcatggacttcaagagcaactccgccgtggcctggtccaacaagtccgatttcgcctgcgccaacgccttcaacaacagcattatccccgaggacacattcttcccaagccccgagagcagcgactccaccgaccacgtgaagcccaaagagacagagaacaccaagcagcccagcaagagctgccacaagcccaaggccatcgtgcacaccgagaaagtgaacatgatgagcctgaccgtgctgggcctgcggatgctgttcgccaaaaccgtggccgtgaacttcctgctgaccgccaagctgttcttcctccgcgccaagagaagcggatctggcgtgaagcagaccctgaatttcgacctgctgaagctggctggcgacgtggaatccaacccaggccctactagtatggactggatttggcgcatccttttccttgtcggcgctgctaccggcgcgcattccgggccccagctccagctgcaagagtctggacctggcctggtcaagcctagcgagacactgagcctgacctgtaccgtgtccggcgatagcatcagcagcggcgattactactggggctggatcagacagcctcctggcaaaggactggaatggatcggccacatctactacagcggcgtgacctactacaaccccagcctgaagtccagagtgaccatcagcgtggacaccagccggaaccagttctccctgaagctgtctagcgtgacagccgccgataccgccgtgtactactgcaccagagaggacagcagcaactggcggagtagaggccagggaacactggtcacagttagctctggatccggcggaggcggaagtggaggcggaggatctggcggcggaggctctttcgaacaggtgcagctccaagagtctggccctggactggtcaagcctagccagacactgagcctgacctgtaccgtgtccggctacagcatcaccatcgactacacctggaactggatcagacagcctcctggcaaaggactggaatggatcggctacatcacctacagcggcagcaccgactacaaccccagcctgaaaagccgggtgctgatctccgtggacaccagcaagaatcaggtgtccctgaagctgagcagcgtgacagccgctgataccgccgtgtactactgtgccagactgggcagaagatacgccctggattattggggccagggcaccaccgtgacagtgtcatctacgcgtgaggacctgaagaacgtgttcccacctgaggtggccgtgttcgagcctagcgaggccgagatcagccacacccagaaagccaccctcgtgtgcctggctaccggcttctaccccgaccatgtggaactgtcttggtgggtcaacggcaaagaggtgcacagcggcgtgtgtaccgacccccagccactgaaagaacagcccgccctgaacgacagccggtactgcctgagcagcagactgagagtgtccgccaccttctggcagaacccccggaaccacttcagatgccaggtgcagttctacggcctgagcgagaacgacgagtggacccaggacagagccaagcccgtgacccagatcgtgtctgccgaagcctggggcagagccgatgatgtgattaagatccactggcaggaaaagaagtccaacaccatcctgggcagccaggaaggcaacaccatgaagaccaacgacacctacatgaagttcagctggctgaccgtgcccgagaagtccctggacaaagaacacagatgcatcgtgcggcacgaaaacaacaagaacggcgtggaccaggaaatcatcttcccacccatcaagaccgatgtgattacaatggaccccaaggacaactgctccaaggacgccaacgataccctgctgctccagctgaccaacaccagcgcctactacatgtacttgttgctgctgctgaagtccgtggtgtacttcgccatcatcacatgctgcctgctgcggagaaccgccttctgctgcaacggcgagaagtct

SEQ ID NO: 8015 - DNA, 3000 bp, synthetic construct
  source 1..3000: mol_type = other DNA
atggccttaccagtgaccgccttgctcctgccgctggccttgctgctccacgccgccaggccggaagtgcagctggttgaatctggcggaggactggttcagcctggcggatctctgagactgtcttgtgccgccagcggcttcagcttcagcgacttttggatgagctgggtccgacaggcccctggcaaaggacttgaatgggtcgccacaatcagccaggccggcagcgagaaggactacgtggactctgtgaagggcagattcaccatcagccgggacaacgccaagaagtccctgtacctccagatgaacagcctgagagccgaggacaccgccgtgtactattgtgcctctggcgtgtacagcttcgactacagaggccagggcaccctggtcacagtctcttctggtaccggcggaggcggatctggcggcggaggtagcggtggcggaggatctgaattcgacatccagatgacccagaccacaagcagcctgtctgccagcctgggcgacagagtgaccatctcttgtagagccagccaggacatcagcaactacctgaactggtatcagcagaaacccgacggcaccgtgaagctgctgatctactacaccagcatcctgcacagcggcgtgcccagcagattttctggctctggcagcggcaccgactacagcctgaccatcagcaatctggaacaagaggacttcgctacctacttctgccagcaaggcaacaccctgccttggacatttggcggaggcaccaagctggaaatcaaagctctcgagatccagaaccctgatcctgccgtgtaccagctgcgggatagcaagagcagcgacaagagcgtgtgtctgttcaccgacttcgacagccagaccaacgtgtcccagagcaaggactccgacgtgtacatcaccgataagtgcgtgctggacatgcggagcatggacttcaagagcaactccgccgtggcctggtccaacaagtccgatttcgcctgcgccaacgccttcaacaacagcattatccccgaggacacattcttcccaagccccgagagcagcgactccaccgaccacgtgaagcccaaagagacagagaacaccaagcagcccagcaagagctgccacaagcccaaggccatcgtgcacaccgagaaagtgaacatgatgagcctgaccgtgctgggcctgcggatgctgttcgccaaaaccgtggccgtgaacttcctgctgaccgccaagctgttcttcctccgcgccaagagaagcggatctggcgtgaagcagaccctgaatttcgacctgctgaagctggctggcgacgtggaatccaacccaggccctactagtatggactggatttggcgcatccttttccttgtcggcgctgctaccggcgcgcattccgggccccagctccagctgcaagagtctggacctggcctggtcaagcctagcgagacactgagcctgacctgtaccgtgtccggcgatagcatcagcagcggcgattactactggggctggatcagacagcctcctggcaaaggactggaatggatcggccacatctactacagcggcgtgacctactacaaccccagcctgaagtccagagtgaccatcagcgtggacaccagccggaaccagttctccctgaagctgtctagcgtgacagccgccgataccgccgtgtactactgcaccagagaggacagcagcaactggcggagtagaggccagggaacactggtcacagttagctctggatccggcggaggcggaagtggaggcggaggatctggcggcggaggctctttcgaagtgcaactggttgaatctggcggcggactggttaagcctggcggatctctgaagctgagctgtgccgcctctggcttcgccttcagcatctacgatatgagctgggtccgacagacccctgagaagagactggaatgggtcgcctacatctctagcggcggagggacctactatcccgacacagtgaagggcagattcaccatctccagagacaacgccaagaacaccctgtacctccagatgagcagcctgaagtccgaggacaccgccatgtactactgcgccagacacagcggctatggcacacattggggagtgctgtttgcctactggggccagggaacactggtcacagtttctgctacgcgtgaggacctgaagaacgtgttcccacctgaggtggccgtgttcgagcctagcgaggccgagatcagccacacccagaaagccaccctcgtgtgcctggctaccggcttctaccccgaccatgtggaactgtcttggtgggtcaacggcaaagaggtgcacagcggcgtgtgtaccgacccccagccactgaaagaacagcccgccctgaacgacagccggtactgcctgagcagcagactgagagtgtccgccaccttctggcagaacccccggaaccacttcagatgccaggtgcagttctacggcctgagcgagaacgacgagtggacccaggacagagccaagcccgtgacccagatcgtgtctgccgaagcctggggcagagccgatgatgtgattaagatccactggcaggaaaagaagtccaacaccatcctgggcagccaggaaggcaacaccatgaagaccaacgacacctacatgaagttcagctggctgaccgtgcccgagaagtccctggacaaagaacacagatgcatcgtgcggcacgaaaacaacaagaacggcgtggaccaggaaatcatcttcccacccatcaagaccgatgtgattacaatggaccccaaggacaactgctccaaggacgccaacgataccctgctgctccagctgaccaacaccagcgcctactacatgtacttgttgctgctgctgaagtccgtggtgtacttcgccatcatcacatgctgcctgctgcggagaaccgccttctgctgcaacggcgagaagtct

SEQ ID NO: 8016 - DNA, 3033 bp, synthetic construct
  source 1..3033: mol_type = other DNA
atggccttaccagtgaccgccttgctcctgccgctggccttgctgctccacgccgccaggccggaagtgcagctggttgaatctggcggaggactggttcagcctggcggatctctgagactgtcttgtgccgccagcggcttcagcttcagcgacttttggatgagctgggtccgacaggcccctggcaaaggacttgaatgggtcgccacaatcagccaggccggcagcgagaaggactacgtggactctgtgaagggcagattcaccatcagccgggacaacgccaagaagtccctgtacctccagatgaacagcctgagagccgaggacaccgccgtgtactattgtgcctctggcgtgtacagcttcgactacagaggccagggcaccctggtcacagtctcttctggtaccggcggaggcggatctggcggcggaggtagcggtggcggaggatctgaattcgacatcgtgatgacacagagccctgatagcctggccgtgtctctgggagagagagccaccatcaactgcaagagcagccagagcctgctgtacagaagcaaccagaagaactacctggcctggtatcagcagaagcccggccagcctcctaagctgctgatctactgggccagcaccagagaaagcggcgtgcccgatagattttctggctctggcagcggcaccgacttcaccctgacaatttctagcctgcaagccgaggacgtggccgtgtactactgccagcagtattacaactaccccagaaccttcggccagggcaccaaggtggaaatcaagagaacagttctcgagatccagaaccctgatcctgccgtgtaccagctgcgggatagcaagagcagcgacaagagcgtgtgtctgttcaccgacttcgacagccagaccaacgtgtcccagagcaaggactccgacgtgtacatcaccgataagtgcgtgctggacatgcggagcatggacttcaagagcaactccgccgtggcctggtccaacaagtccgatttcgcctgcgccaacgccttcaacaacagcattatccccgaggacacattcttcccaagccccgagagcagcgactccaccgaccacgtgaagcccaaagagacagagaacaccaagcagcccagcaagagctgccacaagcccaaggccatcgtgcacaccgagaaagtgaacatgatgagcctgaccgtgctgggcctgcggatgctgttcgccaaaaccgtggccgtgaacttcctgctgaccgccaagctgttcttcctccgcgccaagagaagcggatctggcgtgaagcagaccctgaatttcgacctgctgaagctggctggcgacgtggaatccaacccaggccctactagtatggactggatttggcgcatccttttccttgtcggcgctgctaccggcgcgcattccgggccccagctccagctgcaagagtctggacctggcctggtcaagcctagcgagacactgagcctgacctgtaccgtgtccggcgatagcatcagcagcggcgattactactggggctggatcagacagcctcctggcaaaggactggaatggatcggccacatctactacagcggcgtgacctactacaaccccagcctgaagtccagagtgaccatcagcgtggacaccagccggaaccagttctccctgaagctgtctagcgtgacagccgccgataccgccgtgtactactgcaccagagaggacagcagcaactggcggagtagaggccagggaacactggtcacagttagctctggatccggcggaggcggaagtggaggcggaggatctggcggcggaggctctttcgaagaagttcagctgcttgaatcaggcggcggactggttcaacctggcggatctctgagactgagctgtgccgccagcggctacagcatcacaagcgactatgcctggaactgggtccgacaggcccctggcaaaggactggaatgggtgtcctacatcagcaacagcggcagcaccagctacaaccccagcctgaagtcccggttcaccatcagcagagacaacagcaagaacaccctgtacctccagatgaacagcctgagagctgaggacaccgccgtgtattattgcgccaaagagcggaactacgactacgacgattactactacgctatggactactggggccagggaaccctggtcacagtctcttctacgcgtgaggacctgaagaacgtgttcccacctgaggtggccgtgttcgagcctagcgaggccgagatcagccacacccagaaagccaccctcgtgtgcctggctaccggcttctaccccgaccatgtggaactgtcttggtgggtcaacggcaaagaggtgcacagcggcgtgtgtaccgacccccagccactgaaagaacagcccgccctgaacgacagccggtactgcctgagcagcagactgagagtgtccgccaccttctggcagaacccccggaaccacttcagatgccaggtgcagttctacggcctgagcgagaacgacgagtggacccaggacagagccaagcccgtgacccagatcgtgtctgccgaagcctggggcagagccgatgatgtgattaagatccactggcaggaaaagaagtccaacaccatcctgggcagccaggaaggcaacaccatgaagaccaacgacacctacatgaagttcagctggctgaccgtgcccgagaagtccctggacaaagaacacagatgcatcgtgcggcacgaaaacaacaagaacggcgtggaccaggaaatcatcttcccacccatcaagaccgatgtgattacaatggaccccaaggacaactgctccaaggacgccaacgataccctgctgctccagctgaccaacaccagcgcctactacatgtacttgttgctgctgctgaagtccgtggtgtacttcgccatcatcacatgctgcctgctgcggagaaccgccttctgctgcaacggcgagaagtct

SEQ ID NO: 8017 - DNA, 3012 bp, synthetic construct
  source 1..3012: mol_type = other DNA
atggccttaccagtgaccgccttgctcctgccgctggccttgctgctccacgccgccaggccggaagtgcagctggttgaatctggcggaggactggttcagcctggcggatctctgagactgtcttgtgccgccagcggcttcagcttcagcgacttttggatgagctgggtccgacaggcccctggcaaaggacttgaatgggtcgccacaatcagccaggccggcagcgagaaggactacgtggactctgtgaagggcagattcaccatcagccgggacaacgccaagaagtccctgtacctccagatgaacagcctgagagccgaggacaccgccgtgtactattgtgcctctggcgtgtacagcttcgactacagaggccagggcaccctggtcacagtctcttctggtaccggcggaggcggatctggcggcggaggtagcggtggcggaggatctgaattcgacgtggtcatgacacagagccctctgagcctgcctgtgacacttggacagcctgccagcatcagctgtagaagcagccagagcctgctgcacagcagcggcaatacctacctggaatggtatcagcagaggcccggacagagccccagacctctgatctacaagatcagcacccggttcagcggcgtgcccgatagattttctggctctggcagcggcaccgacttcaccctgaagattagcagagtggaagccgaggacgtgggcgtgtactactgcttccaaggcagccacgtgccatacacctttggcggcggaacaaaggtggaaatcaagagactcgagatccagaaccctgatcctgccgtgtaccagctgcgggatagcaagagcagcgacaagagcgtgtgtctgttcaccgacttcgacagccagaccaacgtgtcccagagcaaggactccgacgtgtacatcaccgataagtgcgtgctggacatgcggagcatggacttcaagagcaactccgccgtggcctggtccaacaagtccgatttcgcctgcgccaacgccttcaacaacagcattatccccgaggacacattcttcccaagccccgagagcagcgactccaccgaccacgtgaagcccaaagagacagagaacaccaagcagcccagcaagagctgccacaagcccaaggccatcgtgcacaccgagaaagtgaacatgatgagcctgaccgtgctgggcctgcggatgctgttcgccaaaaccgtggccgtgaacttcctgctgaccgccaagctgttcttcctccgcgccaagagaagcggatctggcgtgaagcagaccctgaatttcgacctgctgaagctggctggcgacgtggaatccaacccaggccctactagtatggactggatttggcgcatccttttccttgtcggcgctgctaccggcgcgcattccgggccccagctccagctgcaagagtctggacctggcctggtcaagcctagcgagacactgagcctgacctgtaccgtgtccggcgatagcatcagcagcggcgattactactggggctggatcagacagcctcctggcaaaggactggaatggatcggccacatctactacagcggcgtgacctactacaaccccagcctgaagtccagagtgaccatcagcgtggacaccagccggaaccagttctccctgaagctgtctagcgtgacagccgccgataccgccgtgtactactgcaccagagaggacagcagcaactggcggagtagaggccagggaacactggtcacagttagctctggatccggcggaggcggaagtggaggcggaggatctggcggcggaggctctttcgaacaagttcagctggttcagagcggagccgaagtgaagaaacctggggcctctgtgaaggtgtcctgcaaagcctctggcctgaccatcgaggactactacatgcactgggtccgacaggcccctggacaaggacttgaatggatgggctggatcgaccccgagaacggcgatacagagtacggccctaagttccagggcagagtgaccatgaccagagacaccagcatcaacaccgcctacatggaactgagccggctgagatccgatgacaccgccgtgtactattgcgccgtgcacaatgcccactacggcacttggtttgcctattggggccagggcacactggtcaccgttagctctacgcgtgaggacctgaagaacgtgttcccacctgaggtggccgtgttcgagcctagcgaggccgagatcagccacacccagaaagccaccctcgtgtgcctggctaccggcttctaccccgaccatgtggaactgtcttggtgggtcaacggcaaagaggtgcacagcggcgtgtgtaccgacccccagccactgaaagaacagcccgccctgaacgacagccggtactgcctgagcagcagactgagagtgtccgccaccttctggcagaacccccggaaccacttcagatgccaggtgcagttctacggcctgagcgagaacgacgagtggacccaggacagagccaagcccgtgacccagatcgtgtctgccgaagcctggggcagagccgatgatgtgattaagatccactggcaggaaaagaagtccaacaccatcctgggcagccaggaaggcaacaccatgaagaccaacgacacctacatgaagttcagctggctgaccgtgcccgagaagtccctggacaaagaacacagatgcatcgtgcggcacgaaaacaacaagaacggcgtggaccaggaaatcatcttcccacccatcaagaccgatgtgattacaatggaccccaaggacaactgctccaaggacgccaacgataccctgctgctccagctgaccaacaccagcgcctactacatgtacttgttgctgctgctgaagtccgtggtgtacttcgccatcatcacatgctgcctgctgcggagaaccgccttctgctgcaacggcgagaagtct

SEQ ID NO: 8018 - DNA, 2988 bp, synthetic construct
  source 1..2988: mol_type = other DNA
atggccttaccagtgaccgccttgctcctgccgctggccttgctgctccacgccgccaggccggaagtgcagctggttgaatctggcggaggactggttcagcctggcggatctctgagactgtcttgtgccgccagcggcttcagcttcagcgacttttggatgagctgggtccgacaggcccctggcaaaggacttgaatgggtcgccacaatcagccaggccggcagcgagaaggactacgtggactctgtgaagggcagattcaccatcagccgggacaacgccaagaagtccctgtacctccagatgaacagcctgagagccgaggacaccgccgtgtactattgtgcctctggcgtgtacagcttcgactacagaggccagggcaccctggtcacagtctcttctggtaccggcggaggcggatctggcggcggaggtagcggtggcggaggatctgaattcgacatccagatgacacagagccctagcagcctgtctgccagcgtgggagacagagtgaccatcacctgtagagccagcgagaacatctacagcaacctggcctggtatcagcagaagcctggcaaggcccctaagctgctgatctacgccgccaccaatctggctgatggcgtgccaagcagattttccggctctggcagcggcaccgatttcaccctgacaatatccagcctccagcctgaggacttcgccacctactactgccagcacttttggggcacccctacattcggccagggcaccaaggtggaaatcaagagaacagttctcgagatccagaaccctgatcctgccgtgtaccagctgcgggatagcaagagcagcgacaagagcgtgtgtctgttcaccgacttcgacagccagaccaacgtgtcccagagcaaggactccgacgtgtacatcaccgataagtgcgtgctggacatgcggagcatggacttcaagagcaactccgccgtggcctggtccaacaagtccgatttcgcctgcgccaacgccttcaacaacagcattatccccgaggacacattcttcccaagccccgagagcagcgactccaccgaccacgtgaagcccaaagagacagagaacaccaagcagcccagcaagagctgccacaagcccaaggccatcgtgcacaccgagaaagtgaacatgatgagcctgaccgtgctgggcctgcggatgctgttcgccaaaaccgtggccgtgaacttcctgctgaccgccaagctgttcttcctccgcgccaagagaagcggatctggcgtgaagcagaccctgaatttcgacctgctgaagctggctggcgacgtggaatccaacccaggccctactagtatggactggatttggcgcatccttttccttgtcggcgctgctaccggcgcgcattccgggccccagctccagctgcaagagtctggacctggcctggtcaagcctagcgagacactgagcctgacctgtaccgtgtccggcgatagcatcagcagcggcgattactactggggctggatcagacagcctcctggcaaaggactggaatggatcggccacatctactacagcggcgtgacctactacaaccccagcctgaagtccagagtgaccatcagcgtggacaccagccggaaccagttctccctgaagctgtctagcgtgacagccgccgataccgccgtgtactactgcaccagagaggacagcagcaactggcggagtagaggccagggaacactggtcacagttagctctggatccggcggaggcggaagtggaggcggaggatctggcggcggaggctctttcgaagaagtgcagctggttgaatcaggtggcggcctggttcaacctggcggatctctgagactgagctgtgccgcctctggcttcagcctgacaaattacggcgtgcactgggtccgacaggcccctggaaaaggactggaatgggtgtccgtgatttggagcggcggcagcaccgattacaacgccgccttcatcagccggttcaccatcagcgccgacaccagcaagaataccgcctacctccagatgaactccctgagagccgaggacaccgccgtgtactattgcgccagagaactgatccacgctatggacaactggggccagggaaccctggtcacagtctcttctacgcgtgaggacctgaagaacgtgttcccacctgaggtggccgtgttcgagcctagcgaggccgagatcagccacacccagaaagccaccctcgtgtgcctggctaccggcttctaccccgaccatgtggaactgtcttggtgggtcaacggcaaagaggtgcacagcggcgtgtgtaccgacccccagccactgaaagaacagcccgccctgaacgacagccggtactgcctgagcagcagactgagagtgtccgccaccttctggcagaacccccggaaccacttcagatgccaggtgcagttctacggcctgagcgagaacgacgagtggacccaggacagagccaagcccgtgacccagatcgtgtctgccgaagcctggggcagagccgatgatgtgattaagatccactggcaggaaaagaagtccaacaccatcctgggcagccaggaaggcaacaccatgaagaccaacgacacctacatgaagttcagctggctgaccgtgcccgagaagtccctggacaaagaacacagatgcatcgtgcggcacgaaaacaacaagaacggcgtggaccaggaaatcatcttcccacccatcaagaccgatgtgattacaatggaccccaaggacaactgctccaaggacgccaacgataccctgctgctccagctgaccaacaccagcgcctactacatgtacttgttgctgctgctgaagtccgtggtgtacttcgccatcatcacatgctgcctgctgcggagaaccgccttctgctgcaacggcgagaagtct

SEQ ID NO: 8019 - DNA, 3009 bp, synthetic construct
  source 1..3009: mol_type = other DNA
atggccttaccagtgaccgccttgctcctgccgctggccttgctgctccacgccgccaggccggaagtgcagctggttgaatctggcggaggactggttcagcctggcggatctctgagactgtcttgtgccgccagcggcttcagcttcagcgacttttggatgagctgggtccgacaggcccctggcaaaggacttgaatgggtcgccacaatcagccaggccggcagcgagaaggactacgtggactctgtgaagggcagattcaccatcagccgggacaacgccaagaagtccctgtacctccagatgaacagcctgagagccgaggacaccgccgtgtactattgtgcctctggcgtgtacagcttcgactacagaggccagggcaccctggtcacagtctcttctggtaccggcggaggcggatctggcggcggaggtagcggtggcggaggatctgaattcgacttcgtgatgacacagagccctctgagcctgcctgtgacacctggcgaacctgccagcatcagctgtagaagcagccagagcatcgtgcacagcaacggcaacacctacctggaatggtatctccagaagcctggacagagcccacagctgctgatctacaaggtgtccaacagattcagcggcgtgcccgacagattttctggcagcggctctggcaccgacttcaccctgaagattagcagagtggaagccgaggacgtgggcgtgtactactgcttccaaggctctcacgtgcccctgacctttggacagggcaccaagctggaaatcaagagactcgagatccagaaccctgatcctgccgtgtaccagctgcgggatagcaagagcagcgacaagagcgtgtgtctgttcaccgacttcgacagccagaccaacgtgtcccagagcaaggactccgacgtgtacatcaccgataagtgcgtgctggacatgcggagcatggacttcaagagcaactccgccgtggcctggtccaacaagtccgatttcgcctgcgccaacgccttcaacaacagcattatccccgaggacacattcttcccaagccccgagagcagcgactccaccgaccacgtgaagcccaaagagacagagaacaccaagcagcccagcaagagctgccacaagcccaaggccatcgtgcacaccgagaaagtgaacatgatgagcctgaccgtgctgggcctgcggatgctgttcgccaaaaccgtggccgtgaacttcctgctgaccgccaagctgttcttcctccgcgccaagagaagcggatctggcgtgaagcagaccctgaatttcgacctgctgaagctggctggcgacgtggaatccaacccaggccctactagtatggactggatttggcgcatccttttccttgtcggcgctgctaccggcgcgcattccgggccccagctccagctgcaagagtctggacctggcctggtcaagcctagcgagacactgagcctgacctgtaccgtgtccggcgatagcatcagcagcggcgattactactggggctggatcagacagcctcctggcaaaggactggaatggatcggccacatctactacagcggcgtgacctactacaaccccagcctgaagtccagagtgaccatcagcgtggacaccagccggaaccagttctccctgaagctgtctagcgtgacagccgccgataccgccgtgtactactgcaccagagaggacagcagcaactggcggagtagaggccagggaacactggtcacagttagctctggatccggcggaggcggaagtggaggcggaggatctggcggcggaggctctttcgaagaagtgcagctggttgaaagcggagccgaagtgaagaaacctggggcctctgtgaaggtgtcctgcaaggccagcggctacacctttaccagctactggattcactgggtccgacaggcccctggacaaggacttgagtggatgggcgagaacgacccctccaacggcaggaccaactacaacgagaagttcaagaaccgcgtgaccctgaccgtggacaccagcatctctaccgcctacatggaactgagccggctgagatccgatgacaccgccgtgtactattgcgccagaggacccaactacttttacagcatggactactggggccagggcacaatggtcaccgttagctctacgcgtgaggacctgaagaacgtgttcccacctgaggtggccgtgttcgagcctagcgaggccgagatcagccacacccagaaagccaccctcgtgtgcctggctaccggcttctaccccgaccatgtggaactgtcttggtgggtcaacggcaaagaggtgcacagcggcgtgtgtaccgacccccagccactgaaagaacagcccgccctgaacgacagccggtactgcctgagcagcagactgagagtgtccgccaccttctggcagaacccccggaaccacttcagatgccaggtgcagttctacggcctgagcgagaacgacgagtggacccaggacagagccaagcccgtgacccagatcgtgtctgccgaagcctggggcagagccgatgatgtgattaagatccactggcaggaaaagaagtccaacaccatcctgggcagccaggaaggcaacaccatgaagaccaacgacacctacatgaagttcagctggctgaccgtgcccgagaagtccctggacaaagaacacagatgcatcgtgcggcacgaaaacaacaagaacggcgtggaccaggaaatcatcttcccacccatcaagaccgatgtgattacaatggaccccaaggacaactgctccaaggacgccaacgataccctgctgctccagctgaccaacaccagcgcctactacatgtacttgttgctgctgctgaagtccgtggtgtacttcgccatcatcacatgctgcctgctgcggagaaccgccttctgctgcaacggcgagaagtct

SEQ ID NO: 8020 - DNA, 2988 bp, synthetic construct
  source 1..2988: mol_type = other DNA
atggccttaccagtgaccgccttgctcctgccgctggccttgctgctccacgccgccaggccggaagtgcagctggttgaatctggcggaggactggttcagcctggcggatctctgagactgtcttgtgccgccagcggcttcagcttcagcgacttttggatgagctgggtccgacaggcccctggcaaaggacttgaatgggtcgccacaatcagccaggccggcagcgagaaggactacgtggactctgtgaagggcagattcaccatcagccgggacaacgccaagaagtccctgtacctccagatgaacagcctgagagccgaggacaccgccgtgtactattgtgcctctggcgtgtacagcttcgactacagaggccagggcaccctggtcacagtctcttctggtaccggcggaggcggatctggcggcggaggtagcggtggcggaggatctgaattcgacatccagctgactcagagccctagctttctgagcgccagcgtgggcgacagagtgaccatcacatgtagcgccagatccagcatcagcttcatgtactggtatcagcagaagcccggcaaggcccctaagctgctgatctacgacaccagcaatctggcctctggcgtgcccagcagattttctggaagcggcagcggcaccgagttcaccctgacaatctctagcctggaagccgaggatgccgccacctactattgccagcagtggtccagctatcccctgacatttggacagggcaccaagctggaaatcaaactcgagatccagaaccctgatcctgccgtgtaccagctgcgggatagcaagagcagcgacaagagcgtgtgtctgttcaccgacttcgacagccagaccaacgtgtcccagagcaaggactccgacgtgtacatcaccgataagtgcgtgctggacatgcggagcatggacttcaagagcaactccgccgtggcctggtccaacaagtccgatttcgcctgcgccaacgccttcaacaacagcattatccccgaggacacattcttcccaagccccgagagcagcgactccaccgaccacgtgaagcccaaagagacagagaacaccaagcagcccagcaagagctgccacaagcccaaggccatcgtgcacaccgagaaagtgaacatgatgagcctgaccgtgctgggcctgcggatgctgttcgccaaaaccgtggccgtgaacttcctgctgaccgccaagctgttcttcctccgcgccaagagaagcggatctggcgtgaagcagaccctgaatttcgacctgctgaagctggctggcgacgtggaatccaacccaggccctactagtatggactggatttggcgcatccttttccttgtcggcgctgctaccggcgcgcattccgggccccagctccagctgcaagagtctggacctggcctggtcaagcctagcgagacactgagcctgacctgtaccgtgtccggcgatagcatcagcagcggcgattactactggggctggatcagacagcctcctggcaaaggactggaatggatcggccacatctactacagcggcgtgacctactacaaccccagcctgaagtccagagtgaccatcagcgtggacaccagccggaaccagttctccctgaagctgtctagcgtgacagccgccgataccgccgtgtactactgcaccagagaggacagcagcaactggcggagtagaggccagggaacactggtcacagttagctctggatccggcggaggcggaagtggaggcggaggatctggcggcggaggctctttcgaacaggttcagctggttcagtctggggccgaagtgaagaaacctggggcctctgtgaaggtgtcctgcaaggcttccggctacacctttaccggctcttggatgaactgggtccgacaggctcctggacagggactcgaatggatcggcagaatctatcctggcgacggcgagacaaactacaacggcaagttcaaggaccgcgtgacaatcaccgccgacaagagcacaagcaccgcctacatggaactgagcagcctgcggagcgaagataccgccgtgtactactgcgcccggatctacggcaacaacgtgtacttcgatgtgtggggccagggcacaaccgtgacagtctcttctacgcgtgaggacctgaagaacgtgttcccacctgaggtggccgtgttcgagcctagcgaggccgagatcagccacacccagaaagccaccctcgtgtgcctggctaccggcttctaccccgaccatgtggaactgtcttggtgggtcaacggcaaagaggtgcacagcggcgtgtgtaccgacccccagccactgaaagaacagcccgccctgaacgacagccggtactgcctgagcagcagactgagagtgtccgccaccttctggcagaacccccggaaccacttcagatgccaggtgcagttctacggcctgagcgagaacgacgagtggacccaggacagagccaagcccgtgacccagatcgtgtctgccgaagcctggggcagagccgatgatgtgattaagatccactggcaggaaaagaagtccaacaccatcctgggcagccaggaaggcaacaccatgaagaccaacgacacctacatgaagttcagctggctgaccgtgcccgagaagtccctggacaaagaacacagatgcatcgtgcggcacgaaaacaacaagaacggcgtggaccaggaaatcatcttcccacccatcaagaccgatgtgattacaatggaccccaaggacaactgctccaaggacgccaacgataccctgctgctccagctgaccaacaccagcgcctactacatgtacttgttgctgctgctgaagtccgtggtgtacttcgccatcatcacatgctgcctgctgcggagaaccgccttctgctgcaacggcgagaagtct

SEQ ID NO: 8021 - DNA, 3012 bp, synthetic construct
  source 1..3012: mol_type = other DNA
atggccttaccagtgaccgccttgctcctgccgctggccttgctgctccacgccgccaggccggaagtgcagctggttgaatctggcggaggactggttcagcctggcggatctctgagactgtcttgtgccgccagcggcttcagcttcagcgacttttggatgagctgggtccgacaggcccctggcaaaggacttgaatgggtcgccacaatcagccaggccggcagcgagaaggactacgtggactctgtgaagggcagattcaccatcagccgggacaacgccaagaagtccctgtacctccagatgaacagcctgagagccgaggacaccgccgtgtactattgtgcctctggcgtgtacagcttcgactacagaggccagggcaccctggtcacagtctcttctggtaccggcggaggcggatctggcggcggaggtagcggtggcggaggatctgaattccagctggtgctgacacagtctccaagcgcctctgccagcctgggatctagcgtgaagctgacctgtacactgagcagcggccacaagaccgacaccatcgactggtatcagcagcagcctggcaaggcccctagatacctgatgaagctggaaggcagcggcagctacaacaaaggctctggcgtgcccgatagattcagcggcagttcttctggcgctgattggtatctgaccatcagcagcctccagagcgaggacgaggccgattactactgcggcacagactaccccggcaactacctgtttggcggcggaacacagctgacagtgcttggcctcgagatccagaaccctgatcctgccgtgtaccagctgcgggatagcaagagcagcgacaagagcgtgtgtctgttcaccgacttcgacagccagaccaacgtgtcccagagcaaggactccgacgtgtacatcaccgataagtgcgtgctggacatgcggagcatggacttcaagagcaactccgccgtggcctggtccaacaagtccgatttcgcctgcgccaacgccttcaacaacagcattatccccgaggacacattcttcccaagccccgagagcagcgactccaccgaccacgtgaagcccaaagagacagagaacaccaagcagcccagcaagagctgccacaagcccaaggccatcgtgcacaccgagaaagtgaacatgatgagcctgaccgtgctgggcctgcggatgctgttcgccaaaaccgtggccgtgaacttcctgctgaccgccaagctgttcttcctccgcgccaagagaagcggatctggcgtgaagcagaccctgaatttcgacctgctgaagctggctggcgacgtggaatccaacccaggccctactagtatggactggatttggcgcatccttttccttgtcggcgctgctaccggcgcgcattccgggccccagctccagctgcaagagtctggacctggcctggtcaagcctagcgagacactgagcctgacctgtaccgtgtccggcgatagcatcagcagcggcgattactactggggctggatcagacagcctcctggcaaaggactggaatggatcggccacatctactacagcggcgtgacctactacaaccccagcctgaagtccagagtgaccatcagcgtggacaccagccggaaccagttctccctgaagctgtctagcgtgacagccgccgataccgccgtgtactactgcaccagagaggacagcagcaactggcggagtagaggccagggaacactggtcacagttagctctggatccggcggaggcggaagtggaggcggaggatctggcggcggaggctctttcgaacaagaacagctggttgaaagcggcggaggactggttcaacctggcggttctctgagactgagctgtgccgccagcggcttcaccttcagcgactactacatgagctggatcagacaggccccaggcaaaggactggaatgggtcgccacaatctaccccagcagcggcaagacctactacgccgattctgccaagggcagactgaccatctccagcgacaacgccaaggacagcctgtacctccagatgaacagcctgagagccgaggacaccgccgtgtactactgcaccagagatagctacgccgacgacgccgctctgtttgacatttggggccagggcaccaccgtgaccgtttcttctacgcgtgaggacctgaagaacgtgttcccacctgaggtggccgtgttcgagcctagcgaggccgagatcagccacacccagaaagccaccctcgtgtgcctggctaccggcttctaccccgaccatgtggaactgtcttggtgggtcaacggcaaagaggtgcacagcggcgtgtgtaccgacccccagccactgaaagaacagcccgccctgaacgacagccggtactgcctgagcagcagactgagagtgtccgccaccttctggcagaacccccggaaccacttcagatgccaggtgcagttctacggcctgagcgagaacgacgagtggacccaggacagagccaagcccgtgacccagatcgtgtctgccgaagcctggggcagagccgatgatgtgattaagatccactggcaggaaaagaagtccaacaccatcctgggcagccaggaaggcaacaccatgaagaccaacgacacctacatgaagttcagctggctgaccgtgcccgagaagtccctggacaaagaacacagatgcatcgtgcggcacgaaaacaacaagaacggcgtggaccaggaaatcatcttcccacccatcaagaccgatgtgattacaatggaccccaaggacaactgctccaaggacgccaacgataccctgctgctccagctgaccaacaccagcgcctactacatgtacttgttgctgctgctgaagtccgtggtgtacttcgccatcatcacatgctgcctgctgcggagaaccgccttctgctgcaacggcgagaagtct

SEQ ID NO: 8022 - DNA, 2988 bp, synthetic construct; identical to SEQ ID NO: 8018
  source 1..2988: mol_type = other DNA

SEQ ID NO: 8023 - DNA, 3009 bp, synthetic construct; identical to SEQ ID NO: 8019
  source 1..3009: mol_type = other DNA

SEQ ID NO: 8024 - DNA, 2988 bp, synthetic construct; identical to SEQ ID NO: 8020
  source 1..2988: mol_type = other DNA

SEQ ID NO: 8025 - DNA, 3012 bp, synthetic construct; identical to SEQ ID NO: 8021
  source 1..3012: mol_type = other DNA

SEQ ID NO: 8026 - DNA, 3009 bp, synthetic construct
  source 1..3009: mol_type = other DNA
atggccttaccagtgaccgccttgctcctgccgctggccttgctgctccacgccgccaggccggaagtgcagctggttgaatctggcggaggactggttcagcctggcggatctctgagactgtcttgtgccgccagcggcttcagcttcagcgacttttggatgagctgggtccgacaggcccctggcaaaggacttgaatgggtcgccacaatcagccaggccggcagcgagaaggactacgtggactctgtgaagggcagattcaccatcagccgggacaacgccaagaagtccctgtacctccagatgaacagcctgagagccgaggacaccgccgtgtactattgtgcctctggcgtgtacagcttcgactacagaggccagggcaccctggtcacagtctcttctggtaccggcggaggcggatctggcggcggaggtagcggtggcggaggatctgaattcgatatccagctcactcaaagcccctctagtctctctgcctcagtgggggatcgggtcagttttacttgtcaagcttcacaggatatcaacaacttccttaattggtatcagcagaagccaggaaaagcacccaagctgctcatctatgatgcctcaaatttggagacgggtgttcccagtcgattctctgggtcagggtccgggaccgactttacgtttacgatctcctctctgcagcccgaagacatcgccacatactattgtcaacagtacggcaacttgcctttcacatttgggggcgggactaaggttgaaatcaagaggctcgagatccagaaccctgatcctgccgtgtaccagctgcgggatagcaagagcagcgacaagagcgtgtgtctgttcaccgacttcgacagccagaccaacgtgtcccagagcaaggactccgacgtgtacatcaccgataagtgcgtgctggacatgcggagcatggacttcaagagcaactccgccgtggcctggtccaacaagtccgatttcgcctgcgccaacgccttcaacaacagcattatccccgaggacacattcttcccaagccccgagagcagcgactccaccgaccacgtgaagcccaaagagacagagaacaccaagcagcccagcaagagctgccacaagcccaaggccatcgtgcacaccgagaaagtgaacatgatgagcctgaccgtgctgggcctgcggatgctgttcgccaaaaccgtggccgtgaacttcctgctgaccgccaagctgttcttcctccgcgccaagagaagcggatctggcgtgaagcagaccctgaatttcgacctgctgaagctggctggcgacgtggaatccaacccaggccctactagtatggactggatttggcgcatccttttccttgtcggcgctgctaccggcgcgcattccgggccccagctccagctgcaagagtctggacctggcctggtcaagcctagcgagacactgagcctgacctgtaccgtgtccggcgatagcatcagcagcggcgattactactggggctggatcagacagcctcctggcaaaggactggaatggatcggccacatctactacagcggcgtgacctactacaaccccagcctgaagtccagagtgaccatcagcgtggacaccagccggaaccagttctccctgaagctgtctagcgtgacagccgccgataccgccgtgtactactgcaccagagaggacagcagcaactggcggagtagaggccagggaacactggtcacagttagctctggatccggcggaggcggaagtggaggcggaggatctggcggcggaggctctttcgaacaggtacagctgcaggaatctgggcccggacttgtcaagccaagtcagacactttctcttacatgtaccgtgagcggcggaagtataagcagtggaggcttttactggtcttggatacggcagcacccaggcaaaggcttggagtggattggatacattcatcattcaggatctacacactataatccatcccttaagtcccgggtcaccattagcattgatacgtctaagaatctgttcagtctcaggctgtcctccgtcactgctgccgacacagccgtgtactactgcgcctccttggtttactgcggaggcgactgttatagcggctttgattattgggggcaggggaccctcgtaaccgtgagctctacgcgtgaggacctgaagaacgtgttcccacctgaggtggccgtgttcgagcctagcgaggccgagatcagccacacccagaaagccaccctcgtgtgcctggctaccggcttctaccccgaccatgtggaactgtcttggtgggtcaacggcaaagaggtgcacagcggcgtgtgtaccgacccccagccactgaaagaacagcccgccctgaacgacagccggtactgcctgagcagcagactgagagtgtccgccaccttctggcagaacccccggaaccacttcagatgccaggtgcagttctacggcctgagcgagaacgacgagtggacccaggacagagccaagcccgtgacccagatcgtgtctgccgaagcctggggcagagccgatgatgtgattaagatccactggcaggaaaagaagtccaacaccatcctgggcagccaggaaggcaacaccatgaagaccaacgacacctacatgaagttcagctggctgaccgtgcccgagaagtccctggacaaagaacacagatgcatcgtgcggcacgaaaacaacaagaacggcgtggaccaggaaatcatcttcccacccatcaagaccgatgtgattacaatggaccccaaggacaactgctccaaggacgccaacgataccctgctgctccagctgaccaacaccagcgcctactacatgtacttgttgctgctgctgaagtccgtggtgtacttcgccatcatcacatgctgcctgctgcggagaaccgccttctgctgcaacggcgagaagtct

SEQ ID NO: 8027 - DNA, 2997 bp, synthetic construct
  source 1..2997: mol_type = other DNA
atggccttaccagtgaccgccttgctcctgccgctggccttgctgctccacgccgccaggccggaagtgcagctggttgaatctggcggaggactggttcagcctggcggatctctgagactgtcttgtgccgccagcggcttcagcttcagcgacttttggatgagctgggtccgacaggcccctggcaaaggacttgaatgggtcgccacaatcagccaggccggcagcgagaaggactacgtggactctgtgaagggcagattcaccatcagccgggacaacgccaagaagtccctgtacctccagatgaacagcctgagagccgaggacaccgccgtgtactattgtgcctctggcgtgtacagcttcgactacagaggccagggcaccctggtcacagtctcttctggtaccggcggaggcggatctggcggcggaggtagcggtggcggaggatctgaattcgacattcagatgacacagagccctagcagcctgagcgcctctgtgggagacagagtgaccatcacatgcaagagcagccagagcgtgctgtactccagcaatcagaagaactacctggcctggttccagcagaagcctggcaaggctcctaagctgctgatctactgggccagcaccagagaaagcggcgtgccaagcagattttctggcagcggctctggcaccgacttcaccctgacaatatccagcctccagcctgaggacttcgccacctacttttgccaccagtacctgagcagctacacattcggacagggcaccaaggtggaaatcaagcggctcgagatccagaaccctgatcctgccgtgtaccagctgcgggatagcaagagcagcgacaagagcgtgtgtctgttcaccgacttcgacagccagaccaacgtgtcccagagcaaggactccgacgtgtacatcaccgataagtgcgtgctggacatgcggagcatggacttcaagagcaactccgccgtggcctggtccaacaagtccgatttcgcctgcgccaacgccttcaacaacagcattatccccgaggacacattcttcccaagccccgagagcagcgactccaccgaccacgtgaagcccaaagagacagagaacaccaagcagcccagcaagagctgccacaagcccaaggccatcgtgcacaccgagaaagtgaacatgatgagcctgaccgtgctgggcctgcggatgctgttcgccaaaaccgtggccgtgaacttcctgctgaccgccaagctgttcttcctccgcgccaagagaagcggatctggcgtgaagcagaccctgaatttcgacctgctgaagctggctggcgacgtggaatccaacccaggccctactagtatggactggatttggcgcatccttttccttgtcggcgctgctaccggcgcgcattccgggccccagctccagctgcaagagtctggacctggcctggtcaagcctagcgagacactgagcctgacctgtaccgtgtccggcgatagcatcagcagcggcgattactactggggctggatcagacagcctcctggcaaaggactggaatggatcggccacatctactacagcggcgtgacctactacaaccccagcctgaagtccagagtgaccatcagcgtggacaccagccggaaccagttctccctgaagctgtctagcgtgacagccgccgataccgccgtgtactactgcaccagagaggacagcagcaactggcggagtagaggccagggaacactggtcacagttagctctggatccggcggaggcggaagtggaggcggaggatctggcggcggaggctctttcgaagaggtgcagctggttgaatctggcggaggactggttcagcctggcggatctctgagactgtcttgtgccgccagcggctacaccttcaccacctattggatgcactgggtccgacaggcccctggcaaaggacttgagtgggtcggatatatcaggcccagcaccggctacacagagtacaaccagaagttcaaggaccgcttcaccatcagcgccgacaccagcaagaataccgcctacctccagatgaacagcctgagagccgaggacaccgccgtgtactactgtgccagatccagatggctgctggactattggggccagggcacactggttacagtttctacgcgtgaggacctgaagaacgtgttcccacctgaggtggccgtgttcgagcctagcgaggccgagatcagccacacccagaaagccaccctcgtgtgcctggctaccggcttctaccccgaccatgtggaactgtcttggtgggtcaacggcaaagaggtgcacagcggcgtgtgtaccgacccccagccactgaaagaacagcccgccctgaacgacagccggtactgcctgagcagcagactgagagtgtccgccaccttctggcagaacccccggaaccacttcagatgccaggtgcagttctacggcctgagcgagaacgacgagtggacccaggacagagccaagcccgtgacccagatcgtgtctgccgaagcctggggcagagccgatgatgtgattaagatccactggcaggaaaagaagtccaacaccatcctgggcagccaggaaggcaacaccatgaagaccaacgacacctacatgaagttcagctggctgaccgtgcccgagaagtccctggacaaagaacacagatgcatcgtgcggcacgaaaacaacaagaacggcgtggaccaggaaatcatcttcccacccatcaagaccgatgtgattacaatggaccccaaggacaactgctccaaggacgccaacgataccctgctgctccagctgaccaacaccagcgcctactacatgtacttgttgctgctgctgaagtccgtggtgtacttcgccatcatcacatgctgcctgctgcggagaaccgccttctgctgcaacggcgagaagtct

SEQ ID NO: 8028 - DNA, 2988 bp, synthetic construct
  source 1..2988: mol_type = other DNA
atggccttaccagtgaccgccttgctcctgccgctggccttgctgctccacgccgccaggccggaagtgcagctggttgaatctggcggaggactggttcagcctggcggatctctgagactgtcttgtgccgccagcggcttcagcttcagcgacttttggatgagctgggtccgacaggcccctggcaaaggacttgaatgggtcgccacaatcagccaggccggcagcgagaaggactacgtggactctgtgaagggcagattcaccatcagccgggacaacgccaagaagtccctgtacctccagatgaacagcctgagagccgaggacaccgccgtgtactattgtgcctctggcgtgtacagcttcgactacagaggccagggcaccctggtcacagtctcttctggtaccggcggaggcggatctggcggcggaggtagcggtggcggaggatctgaattcgacatccagatgacacagagccctagcagcctgtctgccagcgtgggagacagagtgaccatcacctgtagagccagccaggacatcagcaactacctgaactggtatcagcagaagcccggcaaggcccctaagctgctgatctactacaccagcagactgcacagcggcgtgcccagcagattttctggctctggcagcggcaccgacttcaccctgacaatatctagcctccagcctgaggacttcgccacctactattgccagcagggcaacaccctgccttacacatttggacagggcaccaaggtggaaatcaagagactcgagatccagaaccctgatcctgccgtgtaccagctgcgggatagcaagagcagcgacaagagcgtgtgtctgttcaccgacttcgacagccagaccaacgtgtcccagagcaaggactccgacgtgtacatcaccgataagtgcgtgctggacatgcggagcatggacttcaagagcaactccgccgtggcctggtccaacaagtccgatttcgcctgcgccaacgccttcaacaacagcattatccccgaggacacattcttcccaagccccgagagcagcgactccaccgaccacgtgaagcccaaagagacagagaacaccaagcagcccagcaagagctgccacaagcccaaggccatcgtgcacaccgagaaagtgaacatgatgagcctgaccgtgctgggcctgcggatgctgttcgccaaaaccgtggccgtgaacttcctgctgaccgccaagctgttcttcctccgcgccaagagaagcggatctggcgtgaagcagaccctgaatttcgacctgctgaagctggctggcgacgtggaatccaacccaggccctactagtatggactggatttggcgcatccttttccttgtcggcgctgctaccggcgcgcattccgggccccagctccagctgcaagagtctggacctggcctggtcaagcctagcgagacactgagcctgacctgtaccgtgtccggcgatagcatcagcagcggcgattactactggggctggatcagacagcctcctggcaaaggactggaatggatcggccacatctactacagcggcgtgacctactacaaccccagcctgaagtccagagtgaccatcagcgtggacaccagccggaaccagttctccctgaagctgtctagcgtgacagccgccgataccgccgtgtactactgcaccagagaggacagcagcaactggcggagtagaggccagggaacactggtcacagttagctctggatccggcggaggcggaagtggaggcggaggatctggcggcggaggctctttcgaagaagtgcagctggttgaatcaggtggcggcctggttcaacctggcggatctctgagactgagctgtgccgccagcggcttcaccttcagcgactactttatgagctgggtccgacaggcccctggcaaaggacttgaatgggtcgccaccatcagcaatggcggcacctacacttactaccccgacagcgtgaagggcagattcaccatctccagagacaacagcaagaacaccctgtacctccagatgaactccctgagagccgaggacaccgccgtgtactactgcgccagattcgacggctacatcttcgactattggggccagggcaccctggtcacagtctcttctacgcgtgaggacctgaagaacgtgttcccacctgaggtggccgtgttcgagcctagcgaggccgagatcagccacacccagaaagccaccctcgtgtgcctggctaccggcttctaccccgaccatgtggaactgtcttggtgggtcaacggcaaagaggtgcacagcggcgtgtgtaccgacccccagccactgaaagaacagcccgccctgaacgacagccggtactgcctgagcagcagactgagagtgtccgccaccttctggcagaacccccggaaccacttcagatgccaggtgcagttctacggcctgagcgagaacgacgagtggacccaggacagagccaagcccgtgacccagatcgtgtctgccgaagcctggggcagagccgatgatgtgattaagatccactggcaggaaaagaagtccaacaccatcctgggcagccaggaaggcaacaccatgaagaccaacgacacctacatgaagttcagctggctgaccgtgcccgagaagtccctggacaaagaacacagatgcatcgtgcggcacgaaaacaacaagaacggcgtggaccaggaaatcatcttcccacccatcaagaccgatgtgattacaatggaccccaaggacaactgctccaaggacgccaacgataccctgctgctccagctgaccaacaccagcgcctactacatgtacttgttgctgctgctgaagtccgtggtgtacttcgccatcatcacatgctgcctgctgcggagaaccgccttctgctgcaacggcgagaagtct

SEQ ID NO: 8029 - DNA, 2382 bp, synthetic construct
  source 1..2382: mol_type = other DNA
atggccttaccagtgaccgccttgctcctgccgctggccttgctgctccacgccgccaggccggacatccagatgacacagagccctagcagcctgtctgccagcgtgggagacagagtgaccatcacatgcaaggccagcgaccacatcaacaactggctggcctggtatcagcagaagcctggacaggcccctaagctgctgatctacggcgctaccacactggaaacaggcgtgcccagcagattttctggcagcggctctggcaccgactacaccctgacaatatccagcctccagcctgaggacttcgccacctactactgtcagcagagctggaacaccccttggacattcggccagggcaccaagctggaaatcaagagactcgaggacctgaagaacgtgttcccacctgaggtggccgtgttcgagcctagcgaggccgagatcagccacacccagaaagccaccctcgtgtgcctggctaccggcttctaccccgaccatgtggaactgtcttggtgggtcaacggcaaagaggtgcacagcggcgtgtgtaccgacccccagccactgaaagaacagcccgccctgaacgacagccggtactgcctgagcagcagactgagagtgtccgccaccttctggcagaacccccggaaccacttcagatgccaggtgcagttctacggcctgagcgagaacgacgagtggacccaggacagagccaagcccgtgacccagatcgtgtctgccgaagcctggggcagagccgatgatgtgattaagatccactggcaggaaaagaagtccaacaccatcctgggcagccaggaaggcaacaccatgaagaccaacgacacctacatgaagttcagctggctgaccgtgcccgagaagtccctggacaaagaacacagatgcatcgtgcggcacgaaaacaacaagaacggcgtggaccaggaaatcatcttcccacccatcaagaccgatgtgattacaatggaccccaaggacaactgctccaaggacgccaacgataccctgctgctccagctgaccaacaccagcgcctactacatgtacttgttgctgctgctgaagtccgtggtgtacttcgccatcatcacatgctgcctgctgcggagaaccgccttctgctgcaacggcgagaagtctagggccaagcgatctggatctggagcaacaaacttctcactactcaaacaagcaggtgacgtggaggagaatcccgggcctactagtatggactggatttggcgcatccttttccttgtcggcgctgctaccggcgcccattccgggcccatggaccccgacctggaaatcagagccgccttcctgcggcagagaaacacagccctgagaacagaggtggccgagctggaacaagaggtgcagcggctggaaaacgaggtgtcccagtacgagacaagatacggccctctcggaggcggaaaaggatccggcggcggaggatctggcggaggcggatctgggggcggaggctctttcgaacaagttcagcttcaacagcctggcgctgagctggtcaaacctggcgcttctgtgaagatgagctgcaaagccagcggctacgccttcagcagctactggatcaactggatgaagcagaaacccggccagggactcgaatggatcggccaaatctatcccggcgacggcgacaccaactacaacggcaagttcaagggcagagccacactgaccgccgatacctctagcagcacagcctacatgcagctgagcagcctgaccagcgaagatagcgccgtgtacttctgtgcccggtccatcacaacagtcgtgggctgcgctatggactattggggccagggaacaagcgtgaccgtgtctagtacgcgtatccagaaccctgatcctgccgtgtaccagctgcgggatagcaagagcagcgacaagagcgtgtgtctgttcaccgacttcgacagccagaccaacgtgtcccagagcaaggactccgacgtgtacatcaccgataagtgcgtgctggacatgcggagcatggacttcaagagcaactccgccgtggcctggtccaacaagtccgatttcgcctgcgccaacgccttcaacaacagcattatccccgaggacacattcttcccaagccccgagagcagcgactccaccgaccacgtgaagcccaaagagacagagaacaccaagcagcccagcaagagctgccacaagcccaaggccatcgtgcacaccgagaaagtgaacatgatgagcctgaccgtgctgggcctgcggatgctgttcgccaaaaccgtggccgtgaacttcctgctgaccgccaagctgttcttcctc

SEQ ID NO: 8030 - DNA, 2394 bp, synthetic construct
  source 1..2394: mol_type = other DNA
atggccttaccagtgaccgccttgctcctgccgctggccttgctgctccacgccgccaggccggacatccagatgacacagagccctagcagcctgtctgccagcgtgggagacagagtgaccatcacatgcaaggccagcgaccacatcaacaactggctggcctggtatcagcagaagcctggacaggcccctaagctgctgatctacggcgctaccacactggaaacaggcgtgcccagcagattttctggcagcggctctggcaccgactacaccctgacaatatccagcctccagcctgaggacttcgccacctactactgtcagcagagctggaacaccccttggacattcggccagggcaccaagctggaaatcaagagactcgagatccagaaccctgatcctgccgtgtaccagctgcgggatagcaagagcagcgacaagagcgtgtgtctgttcaccgacttcgacagccagaccaacgtgtcccagagcaaggactccgacgtgtacatcaccgataagtgcgtgctggacatgcggagcatggacttcaagagcaactccgccgtggcctggtccaacaagtccgatttcgcctgcgccaacgccttcaacaacagcattatccccgaggacacattcttcccaagccccgagagcagcgactccaccgaccacgtgaagcccaaagagacagagaacaccaagcagcccagcaagagctgccacaagcccaaggccatcgtgcacaccgagaaagtgaacatgatgagcctgaccgtgctgggcctgcggatgctgttcgccaaaaccgtggccgtgaacttcctgctgaccgccaagctgttcttcctccgcgccaagagaagcggatctggcgtgaagcagaccctgaatttcgacctgctgaagctggctggcgacgtggaatccaacccaggccctactagtatggactggatttggcgcatccttttccttgtcggcgctgctaccggcgcccattccgggcccatggaccccgacctggaaatcagagccgccttcctgcggcagagaaacacagccctgagaacagaggtggccgagctggaacaagaggtgcagcggctggaaaacgaggtgtcccagtacgagacaagatacggccctctcggaggcggaaaaggatccggcggcggaggatctggcggaggcggatctgggggcggaggctctttcgaacaagttcagcttcaacagcctggcgctgagctggtcaaacctggcgcttctgtgaagatgagctgcaaagccagcggctacgccttcagcagctactggatcaactggatgaagcagaaacccggccagggactcgaatggatcggccaaatctatcccggcgacggcgacaccaactacaacggcaagttcaagggcagagccacactgaccgccgatacctctagcagcacagcctacatgcagctgagcagcctgaccagcgaagatagcgccgtgtacttctgtgcccggtccatcacaacagtcgtgggctgcgctatggactattggggccagggaacaagcgtgaccgtgtctagtacgcgtgaggacctgaagaacgtgttcccacctgaggtggccgtgttcgagcctagcgaggccgagatcagccacacccagaaagccaccctcgtgtgcctggctaccggcttctaccccgaccatgtggaactgtcttggtgggtcaacggcaaagaggtgcacagcggcgtgtgtaccgacccccagccactgaaagaacagcccgccctgaacgacagccggtactgcctgagcagcagactgagagtgtccgccaccttctggcagaacccccggaaccacttcagatgccaggtgcagttctacggcctgagcgagaacgacgagtggacccaggacagagccaagcccgtgacccagatcgtgtctgccgaagcctggggcagagccgatgatgtgattaagatccactggcaggaaaagaagtccaacaccatcctgggcagccaggaaggcaacaccatgaagaccaacgacacctacatgaagttcagctggctgaccgtgcccgagaagtccctggacaaagaacacagatgcatcgtgcggcacgaaaacaacaagaacggcgtggaccaggaaatcatcttcccacccatcaagaccgatgtgattacaatggaccccaaggacaactgctccaaggacgccaacgataccctgctgctccagctgaccaacaccagcgcctactacatgtacttgttgctgctgctgaagtccgtggtgtacttcgccatcatcacatgctgcctgctgcggagaaccgccttctgctgcaacggcgagaagtct

SEQ ID NO: 8031 - DNA, 2313 bp, synthetic construct
  source 1..2313: mol_type = other DNA
atggccttaccagtgaccgccttgctcctgccgctggccttgctgctccacgccgccaggccggacatccagatgacacagagccctagcagcctgtctgccagcgtgggagacagagtgaccatcacatgcaaggccagcgaccacatcaacaactggctggcctggtatcagcagaagcctggacaggcccctaagctgctgatctacggcgctaccacactggaaacaggcgtgcccagcagattttctggcagcggctctggcaccgactacaccctgacaatatccagcctccagcctgaggacttcgccacctactactgtcagcagagctggaacaccccttggacattcggccagggcaccaagctggaaatcaagagactcgaggacctgaagaacgtgttcccacctgaggtggccgtgttcgagcctagcgaggccgagatcagccacacccagaaagccaccctcgtgtgcctggctaccggcttctaccccgaccatgtggaactgtcttggtgggtcaacggcaaagaggtgcacagcggcgtgtgtaccgacccccagccactgaaagaacagcccgccctgaacgacagccggtactgcctgagcagcagactgagagtgtccgccaccttctggcagaacccccggaaccacttcagatgccaggtgcagttctacggcctgagcgagaacgacgagtggacccaggacagagccaagcccgtgacccagatcgtgtctgccgaagcctggggcagagccgatgatgtgattaagatccactggcaggaaaagaagtccaacaccatcctgggcagccaggaaggcaacaccatgaagaccaacgacacctacatgaagttcagctggctgaccgtgcccgagaagtccctggacaaagaacacagatgcatcgtgcggcacgaaaacaacaagaacggcgtggaccaggaaatcatcttcccacccatcaagaccgatgtgattacaatggaccccaaggacaactgctccaaggacgccaacgataccctgctgctccagctgaccaacaccagcgcctactacatgtacttgttgctgctgctgaagtccgtggtgtacttcgccatcatcacatgctgcctgctgcggagaaccgccttctgctgcaacggcgagaagtctagggccaagcgatctggatctggagcaacaaacttctcactactcaaacaagcaggtgacgtggaggagaatcccgggcctactagtatggactggatttggcgcatccttttccttgtcggcgctgctaccggcgcccattccgggcccgaagttgctgccctcgagaaggaggtagcagctttggaaaaagaagtcgcagcccttgagaaagaagttgcggctctggagaagggatccggcggcggaggatctggcggaggcggatctgggggcggaggctctttcgaacaagttcagcttcaacagcctggcgctgagctggtcaaacctggcgcttctgtgaagatgagctgcaaagccagcggctacgccttcagcagctactggatcaactggatgaagcagaaacccggccagggactcgaatggatcggccaaatctatcccggcgacggcgacaccaactacaacggcaagttcaagggcagagccacactgaccgccgatacctctagcagcacagcctacatgcagctgagcagcctgaccagcgaagatagcgccgtgtacttctgtgcccggtccatcacaacagtcgtgggctgcgctatggactattggggccagggaacaagcgtgaccgtgtctagtacgcgtatccagaaccctgatcctgccgtgtaccagctgcgggatagcaagagcagcgacaagagcgtgtgtctgttcaccgacttcgacagccagaccaacgtgtcccagagcaaggactccgacgtgtacatcaccgataagtgcgtgctggacatgcggagcatggacttcaagagcaactccgccgtggcctggtccaacaagtccgatttcgcctgcgccaacgccttcaacaacagcattatccccgaggacacattcttcccaagccccgagagcagcgactccaccgaccacgtgaagcccaaagagacagagaacaccaagcagcccagcaagagctgccacaagcccaaggccatcgtgcacaccgagaaagtgaacatgatgagcctgaccgtgctgggcctgcggatgctgttcgccaaaaccgtggccgtgaacttcctgctgaccgccaagctgttcttcctc

SEQ ID NO: 8032 - DNA, 2325 bp, synthetic construct
  source 1..2325: mol_type = other DNA
atggccttaccagtgaccgccttgctcctgccgctggccttgctgctccacgccgccaggccggacatccagatgacacagagccctagcagcctgtctgccagcgtgggagacagagtgaccatcacatgcaaggccagcgaccacatcaacaactggctggcctggtatcagcagaagcctggacaggcccctaagctgctgatctacggcgctaccacactggaaacaggcgtgcccagcagattttctggcagcggctctggcaccgactacaccctgacaatatccagcctccagcctgaggacttcgccacctactactgtcagcagagctggaacaccccttggacattcggccagggcaccaagctggaaatcaagagactcgagatccagaaccctgatcctgccgtgtaccagctgcgggatagcaagagcagcgacaagagcgtgtgtctgttcaccgacttcgacagccagaccaacgtgtcccagagcaaggactccgacgtgtacatcaccgataagtgcgtgctggacatgcggagcatggacttcaagagcaactccgccgtggcctggtccaacaagtccgatttcgcctgcgccaacgccttcaacaacagcattatccccgaggacacattcttcccaagccccgagagcagcgactccaccgaccacgtgaagcccaaagagacagagaacaccaagcagcccagcaagagctgccacaagcccaaggccatcgtgcacaccgagaaagtgaacatgatgagcctgaccgtgctgggcctgcggatgctgttcgccaaaaccgtggccgtgaacttcctgctgaccgccaagctgttcttcctccgcgccaagagaagcggatctggcgtgaagcagaccctgaatttcgacctgctgaagctggctggcgacgtggaatccaacccaggccctactagtatggactggatttggcgcatccttttccttgtcggcgctgctaccggcgcccattccgggcccgaagttgctgccctcgagaaggaggtagcagctttggaaaaagaagtcgcagcccttgagaaagaagttgcggctctggagaagggatccggcggcggaggatctggcggaggcggatctgggggcggaggctctttcgaacaagttcagcttcaacagcctggcgctgagctggtcaaacctggcgcttctgtgaagatgagctgcaaagccagcggctacgccttcagcagctactggatcaactggatgaagcagaaacccggccagggactcgaatggatcggccaaatctatcccggcgacggcgacaccaactacaacggcaagttcaagggcagagccacactgaccgccgatacctctagcagcacagcctacatgcagctgagcagcctgaccagcgaagatagcgccgtgtacttctgtgcccggtccatcacaacagtcgtgggctgcgctatggactattggggccagggaacaagcgtgaccgtgtctagtacgcgtgaggacctgaagaacgtgttcccacctgaggtggccgtgttcgagcctagcgaggccgagatcagccacacccagaaagccaccctcgtgtgcctggctaccggcttctaccccgaccatgtggaactgtcttggtgggtcaacggcaaagaggtgcacagcggcgtgtgtaccgacccccagccactgaaagaacagcccgccctgaacgacagccggtactgcctgagcagcagactgagagtgtccgccaccttctggcagaacccccggaaccacttcagatgccaggtgcagttctacggcctgagcgagaacgacgagtggacccaggacagagccaagcccgtgacccagatcgtgtctgccgaagcctggggcagagccgatgatgtgattaagatccactggcaggaaaagaagtccaacaccatcctgggcagccaggaaggcaacaccatgaagaccaacgacacctacatgaagttcagctggctgaccgtgcccgagaagtccctggacaaagaacacagatgcatcgtgcggcacgaaaacaacaagaacggcgtggaccaggaaatcatcttcccacccatcaagaccgatgtgattacaatggaccccaaggacaactgctccaaggacgccaacgataccctgctgctccagctgaccaacaccagcgcctactacatgtacttgttgctgctgctgaagtccgtggtgtacttcgccatcatcacatgctgcctgctgcggagaaccgccttctgctgcaacggcgagaagtct

SEQ ID NO: 8033 - DNA, 2313 bp, synthetic construct; identical to SEQ ID NO: 8031
  source 1..2313: mol_type = other DNA

SEQ ID NO: 8034 - DNA, 2325 bp, synthetic construct; identical to SEQ ID NO: 8032
  source 1..2325: mol_type = other DNA

SEQ ID NO: 8035 - DNA, 2583 bp, synthetic construct
  source 1..2583: mol_type = other DNA
atggccttaccagtgaccgccttgctcctgccgctggccttgctgctccacgccgccaggccggacatccagatgacacagagccctagcagcctgtctgccagcgtgggagacagagtgaccatcacatgcaaggccagcgaccacatcaacaactggctggcctggtatcagcagaagcctggacaggcccctaagctgctgatctacggcgctaccacactggaaacaggcgtgcccagcagattttctggcagcggctctggcaccgactacaccctgacaatatccagcctccagcctgaggacttcgccacctactactgtcagcagagctggaacaccccttggacattcggccagggcaccaagctggaaatcaagagactcgaggacctgaagaacgtgttcccacctgaggtggccgtgttcgagcctagcgaggccgagatcagccacacccagaaagccaccctcgtgtgcctggctaccggcttctaccccgaccatgtggaactgtcttggtgggtcaacggcaaagaggtgcacagcggcgtgtgtaccgacccccagccactgaaagaacagcccgccctgaacgacagccggtactgcctgagcagcagactgagagtgtccgccaccttctggcagaacccccggaaccacttcagatgccaggtgcagttctacggcctgagcgagaacgacgagtggacccaggacagagccaagcccgtgacccagatcgtgtctgccgaagcctggggcagagccgatgatgtgattaagatccactggcaggaaaagaagtccaacaccatcctgggcagccaggaaggcaacaccatgaagaccaacgacacctacatgaagttcagctggctgaccgtgcccgagaagtccctggacaaagaacacagatgcatcgtgcggcacgaaaacaacaagaacggcgtggaccaggaaatcatcttcccacccatcaagaccgatgtgattacaatggaccccaaggacaactgctccaaggacgccaacgataccctgctgctccagctgaccaacaccagcgcctactacatgtacttgttgctgctgctgaagtccgtggtgtacttcgccatcatcacatgctgcctgctgcggagaaccgccttctgctgcaacggcgagaagtctagggccaagcgatctggatctggagcaacaaacttctcactactcaaacaagcaggtgacgtggaggagaatcccgggcctactagtatggactggatttggcgcatccttttccttgtcggcgctgctaccggcgcccattccgggccccaggttcagctgcaagagtctggcggaggacttgctcaagctggcggaagcctgagactgtcttgtgccgcctctggcagaaccttcagcatgggctggtttagacaggcccctggcaaagagagagagttcgtcgccgccatcacatacagcggcggcagcccttactacgcctcttctgtcagaggccggttcaccatcagccgggacaacgccaagaacaccgtgtacctccagatgaacagcctgaagccagaggacaccgccgtgtactactgtgccgccaatccaacctacggcagcgactggaatgccgagaattggggccagggcacccaagtgacagtgtctagtggatccggcggcggaggatctggcggaggcggatctgggggcggaggctctttcgaacaagttcagcttcaacagcctggcgctgagctggtcaaacctggcgcttctgtgaagatgagctgcaaagccagcggctacgccttcagcagctactggatcaactggatgaagcagaaacccggccagggactcgaatggatcggccaaatctatcccggcgacggcgacaccaactacaacggcaagttcaagggcagagccacactgaccgccgatacctctagcagcacagcctacatgcagctgagcagcctgaccagcgaagatagcgccgtgtacttctgtgcccggtccatcacaacagtcgtgggctgcgctatggactattggggccagggaacaagcgtgaccgtgtctagtacgcgtatccagaaccctgatcctgccgtgtaccagctgcgggatagcaagagcagcgacaagagcgtgtgtctgttcaccgacttcgacagccagaccaacgtgtcccagagcaaggactccgacgtgtacatcaccgataagtgcgtgctggacatgcggagcatggacttcaagagcaactccgccgtggcctggtccaacaagtccgatttcgcctgcgccaacgccttcaacaacagcattatccccgaggacacattcttcccaagccccgagagcagcgactccaccgaccacgtgaagcccaaagagacagagaacaccaagcagcccagcaagagctgccacaagcccaaggccatcgtgcacaccgagaaagtgaacatgatgagcctgaccgtgctgggcctgcggatgctgttcgccaaaaccgtggccgtgaacttcctgctgaccgccaagctgttcttcctc

SEQ ID NO: 8036 - DNA, 2595 bp, synthetic construct
  source 1..2595: mol_type = other DNA
atggccttaccagtgaccgccttgctcctgccgctggccttgctgctccacgccgccaggccggacatccagatgacacagagccctagcagcctgtctgccagcgtgggagacagagtgaccatcacatgcaaggccagcgaccacatcaacaactggctggcctggtatcagcagaagcctggacaggcccctaagctgctgatctacggcgctaccacactggaaacaggcgtgcccagcagattttctggcagcggctctggcaccgactacaccctgacaatatccagcctccagcctgaggacttcgccacctactactgtcagcagagctggaacaccccttggacattcggccagggcaccaagctggaaatcaagagactcgagatccagaaccctgatcctgccgtgtaccagctgcgggatagcaagagcagcgacaagagcgtgtgtctgttcaccgacttcgacagccagaccaacgtgtcccagagcaaggactccgacgtgtacatcaccgataagtgcgtgctggacatgcggagcatggacttcaagagcaactccgccgtggcctggtccaacaagtccgatttcgcctgcgccaacgccttcaacaacagcattatccccgaggacacattcttcccaagccccgagagcagcgactccaccgaccacgtgaagcccaaagagacagagaacaccaagcagcccagcaagagctgccacaagcccaaggccatcgtgcacaccgagaaagtgaacatgatgagcctgaccgtgctgggcctgcggatgctgttcgccaaaaccgtggccgtgaacttcctgctgaccgccaagctgttcttcctccgcgccaagagaagcggatctggcgtgaagcagaccctgaatttcgacctgctgaagctggctggcgacgtggaatccaacccaggccctactagtatggactggatttggcgcatccttttccttgtcggcgctgctaccggcgcccattccgggccccaggttcagctgcaagagtctggcggaggacttgctcaagctggcggaagcctgagactgtcttgtgccgcctctggcagaaccttcagcatgggctggtttagacaggcccctggcaaagagagagagttcgtcgccgccatcacatacagcggcggcagcccttactacgcctcttctgtcagaggccggttcaccatcagccgggacaacgccaagaacaccgtgtacctccagatgaacagcctgaagccagaggacaccgccgtgtactactgtgccgccaatccaacctacggcagcgactggaatgccgagaattggggccagggcacccaagtgacagtgtctagtggatccggcggcggaggatctggcggaggcggatctgggggcggaggctctttcgaacaagttcagcttcaacagcctggcgctgagctggtcaaacctggcgcttctgtgaagatgagctgcaaagccagcggctacgccttcagcagctactggatcaactggatgaagcagaaacccggccagggactcgaatggatcggccaaatctatcccggcgacggcgacaccaactacaacggcaagttcaagggcagagccacactgaccgccgatacctctagcagcacagcctacatgcagctgagcagcctgaccagcgaagatagcgccgtgtacttctgtgcccggtccatcacaacagtcgtgggctgcgctatggactattggggccagggaacaagcgtgaccgtgtctagtacgcgtgaggacctgaagaacgtgttcccacctgaggtggccgtgttcgagcctagcgaggccgagatcagccacacccagaaagccaccctcgtgtgcctggctaccggcttctaccccgaccatgtggaactgtcttggtgggtcaacggcaaagaggtgcacagcggcgtgtgtaccgacccccagccactgaaagaacagcccgccctgaacgacagccggtactgcctgagcagcagactgagagtgtccgccaccttctggcagaacccccggaaccacttcagatgccaggtgcagttctacggcctgagcgagaacgacgagtggacccaggacagagccaagcccgtgacccagatcgtgtctgccgaagcctggggcagagccgatgatgtgattaagatccactggcaggaaaagaagtccaacaccatcctgggcagccaggaaggcaacaccatgaagaccaacgacacctacatgaagttcagctggctgaccgtgcccgagaagtccctggacaaagaacacagatgcatcgtgcggcacgaaaacaacaagaacggcgtggaccaggaaatcatcttcccacccatcaagaccgatgtgattacaatggaccccaaggacaactgctccaaggacgccaacgataccctgctgctccagctgaccaacaccagcgcctactacatgtacttgttgctgctgctgaagtccgtggtgtacttcgccatcatcacatgctgcctgctgcggagaaccgccttctgctgcaacggcgagaagtct

SEQ ID NO: 8037 - DNA, 2601 bp, synthetic construct
  source 1..2601: mol_type = other DNA
atggccttaccagtgaccgccttgctcctgccgctggccttgctgctccacgccgccaggccggaagtgcaactggtggaatctggaggctctctggtgcagccagggggaagcctgagactgtcttgtgccgcttccggcttcaccttcgacgactacgccatgagctgggtgcgccaggtgccaggcaaaggcctggaatgggtgtccagcatcaactggagcggcacccacaccgattacgccgactccgtgaaaggcagattcacaatcagcagaaacaacgccaacaataccctgtacctgcagatgaactccctgaagtctgaggatacagcagtgtattattgcgccaagaactggcgggacgccggcaccacttggtttgagaaaagcggctctgccggacagggaacccaagtgacagtgtcctccggtaccggcggaggcggatctggcggcggaggtagcggtggcggaggatctgaattcgacatccagatgacacagagccctagcagcctgtctgccagcgtgggagacagagtgaccatcacatgcaaggccagcgaccacatcaacaactggctggcctggtatcagcagaagcctggacaggcccctaagctgctgatctacggcgctaccacactggaaacaggcgtgcccagcagattttctggcagcggctctggcaccgactacaccctgacaatatccagcctccagcctgaggacttcgccacctactactgtcagcagagctggaacaccccttggacattcggccagggcaccaagctggaaatcaagagactcgaggacctgaagaacgtgttcccacctgaggtggccgtgttcgagcctagcgaggccgagatcagccacacccagaaagccaccctcgtgtgcctggctaccggcttctaccccgaccatgtggaactgtcttggtgggtcaacggcaaagaggtgcacagcggcgtgtgtaccgacccccagccactgaaagaacagcccgccctgaacgacagccggtactgcctgagcagcagactgagagtgtccgccaccttctggcagaacccccggaaccacttcagatgccaggtgcagttctacggcctgagcgagaacgacgagtggacccaggacagagccaagcccgtgacccagatcgtgtctgccgaagcctggggcagagccgatgatgtgattaagatccactggcaggaaaagaagtccaacaccatcctgggcagccaggaaggcaacaccatgaagaccaacgacacctacatgaagttcagctggctgaccgtgcccgagaagtccctggacaaagaacacagatgcatcgtgcggcacgaaaacaacaagaacggcgtggaccaggaaatcatcttcccacccatcaagaccgatgtgattacaatggaccccaaggacaactgctccaaggacgccaacgataccctgctgctccagctgaccaacaccagcgcctactacatgtacttgttgctgctgctgaagtccgtggtgtacttcgccatcatcacatgctgcctgctgcggagaaccgccttctgctgcaacggcgagaagtctagggccaagcgatctggatctggagcaacaaacttctcactactcaaacaagcaggtgacgtggaggagaatcccgggcctactagtatggactggatttggcgcatccttttccttgtcggcgctgctaccggcgcgcattccttcgaacaagttcagcttcaacagcctggcgctgagctggtcaaacctggcgcttctgtgaagatgagctgcaaagccagcggctacgccttcagcagctactggatcaactggatgaagcagaaacccggccagggactcgaatggatcggccaaatctatcccggcgacggcgacaccaactacaacggcaagttcaagggcagagccacactgaccgccgatacctctagcagcacagcctacatgcagctgagcagcctgaccagcgaagatagcgccgtgtacttctgtgcccggtccatcacaacagtcgtgggctgcgctatggactattggggccagggaacaagcgtgaccgtgtctagtacgcgtatccagaaccctgatcctgccgtgtaccagctgcgggatagcaagagcagcgacaagagcgtgtgtctgttcaccgacttcgacagccagaccaacgtgtcccagagcaaggactccgacgtgtacatcaccgataagtgcgtgctggacatgcggagcatggacttcaagagcaactccgccgtggcctggtccaacaagtccgatttcgcctgcgccaacgccttcaacaacagcattatccccgaggacacattcttcccaagccccgagagcagcgactccaccgaccacgtgaagcccaaagagacagagaacaccaagcagcccagcaagagctgccacaagcccaaggccatcgtgcacaccgagaaagtgaacatgatgagcctgaccgtgctgggcctgcggatgctgttcgccaaaaccgtggccgtgaacttcctgctgaccgccaagctgttcttcctc

SEQ ID NO: 8038 - DNA, 2613 bp, synthetic construct
  source 1..2613: mol_type = other DNA
atggccttaccagtgaccgccttgctcctgccgctggccttgctgctccacgccgccaggccggaagtgcaactggtggaatctggaggctctctggtgcagccagggggaagcctgagactgtcttgtgccgcttccggcttcaccttcgacgactacgccatgagctgggtgcgccaggtgccaggcaaaggcctggaatgggtgtccagcatcaactggagcggcacccacaccgattacgccgactccgtgaaaggcagattcacaatcagcagaaacaacgccaacaataccctgtacctgcagatgaactccctgaagtctgaggatacagcagtgtattattgcgccaagaactggcgggacgccggcaccacttggtttgagaaaagcggctctgccggacagggaacccaagtgacagtgtcctccggtaccggcggaggcggatctggcggcggaggtagcggtggcggaggatctgaattcgacatccagatgacacagagccctagcagcctgtctgccagcgtgggagacagagtgaccatcacatgcaaggccagcgaccacatcaacaactggctggcctggtatcagcagaagcctggacaggcccctaagctgctgatctacggcgctaccacactggaaacaggcgtgcccagcagattttctggcagcggctctggcaccgactacaccctgacaatatccagcctccagcctgaggacttcgccacctactactgtcagcagagctggaacaccccttggacattcggccagggcaccaagctggaaatcaagagactcgagatccagaaccctgatcctgccgtgtaccagctgcgggatagcaagagcagcgacaagagcgtgtgtctgttcaccgacttcgacagccagaccaacgtgtcccagagcaaggactccgacgtgtacatcaccgataagtgcgtgctggacatgcggagcatggacttcaagagcaactccgccgtggcctggtccaacaagtccgatttcgcctgcgccaacgccttcaacaacagcattatccccgaggacacattcttcccaagccccgagagcagcgactccaccgaccacgtgaagcccaaagagacagagaacaccaagcagcccagcaagagctgccacaagcccaaggccatcgtgcacaccgagaaagtgaacatgatgagcctgaccgtgctgggcctgcggatgctgttcgccaaaaccgtggccgtgaacttcctgctgaccgccaagctgttcttcctccgcgccaagagaagcggatctggcgtgaagcagaccctgaatttcgacctgctgaagctggctggcgacgtggaatccaacccaggccctactagtatggactggatttggcgcatccttttccttgtcggcgctgctaccggcgcgcattccttcgaacaagttcagcttcaacagcctggcgctgagctggtcaaacctggcgcttctgtgaagatgagctgcaaagccagcggctacgccttcagcagctactggatcaactggatgaagcagaaacccggccagggactcgaatggatcggccaaatctatcccggcgacggcgacaccaactacaacggcaagttcaagggcagagccacactgaccgccgatacctctagcagcacagcctacatgcagctgagcagcctgaccagcgaagatagcgccgtgtacttctgtgcccggtccatcacaacagtcgtgggctgcgctatggactattggggccagggaacaagcgtgaccgtgtctagtacgcgtgaggacctgaagaacgtgttcccacctgaggtggccgtgttcgagcctagcgaggccgagatcagccacacccagaaagccaccctcgtgtgcctggctaccggcttctaccccgaccatgtggaactgtcttggtgggtcaacggcaaagaggtgcacagcggcgtgtgtaccgacccccagccactgaaagaacagcccgccctgaacgacagccggtactgcctgagcagcagactgagagtgtccgccaccttctggcagaacccccggaaccacttcagatgccaggtgcagttctacggcctgagcgagaacgacgagtggacccaggacagagccaagcccgtgacccagatcgtgtctgccgaagcctggggcagagccgatgatgtgattaagatccactggcaggaaaagaagtccaacaccatcctgggcagccaggaaggcaacaccatgaagaccaacgacacctacatgaagttcagctggctgaccgtgcccgagaagtccctggacaaagaacacagatgcatcgtgcggcacgaaaacaacaagaacggcgtggaccaggaaatcatcttcccacccatcaagaccgatgtgattacaatggaccccaaggacaactgctccaaggacgccaacgataccctgctgctccagctgaccaacaccagcgcctactacatgtacttgttgctgctgctgaagtccgtggtgtacttcgccatcatcacatgctgcctgctgcggagaaccgccttctgctgcaacggcgagaagtct

SEQ ID NO: 8039 - DNA, 2595 bp, synthetic construct
  source 1..2595: mol_type = other DNA
atggccttaccagtgaccgccttgctcctgccgctggccttgctgctccacgccgccaggccggaagttcagctgcttgagtctggcggaggactggttcaacctggcggaagcctgagactgtcttgtgccgccagcggcttcatcttcagcagctacgccatgagctgggtccgacaggctcctggaaagggccaagaatgggtttccggcgttagcggcacaggcgtgaacacctactacgccgatagcgtgaagggcagattcaccatcagccgggacaacagcaagaacaccctgtacctccagatgaacagcctgagagccgaggacaccgccgtgtactattgtgcctctggcaaaggctgggacagcggctcttggtacgaggactatagaggccagggcaccctggtcacagtttcttcaggtaccggcggaggcggatctggcggcggaggtagcggtggcggaggatctgaattcgacatccagatgacacagagccctagcagcctgtctgccagcgtgggagacagagtgaccatcacatgcaaggccagcgaccacatcaacaactggctggcctggtatcagcagaagcctggacaggcccctaagctgctgatctacggcgctaccacactggaaacaggcgtgcccagcagattttctggcagcggctctggcaccgactacaccctgacaatatccagcctccagcctgaggacttcgccacctactactgtcagcagagctggaacaccccttggacattcggccagggcaccaagctggaaatcaagagactcgaggacctgaagaacgtgttcccacctgaggtggccgtgttcgagcctagcgaggccgagatcagccacacccagaaagccaccctcgtgtgcctggctaccggcttctaccccgaccatgtggaactgtcttggtgggtcaacggcaaagaggtgcacagcggcgtgtgtaccgacccccagccactgaaagaacagcccgccctgaacgacagccggtactgcctgagcagcagactgagagtgtccgccaccttctggcagaacccccggaaccacttcagatgccaggtgcagttctacggcctgagcgagaacgacgagtggacccaggacagagccaagcccgtgacccagatcgtgtctgccgaagcctggggcagagccgatgatgtgattaagatccactggcaggaaaagaagtccaacaccatcctgggcagccaggaaggcaacaccatgaagaccaacgacacctacatgaagttcagctggctgaccgtgcccgagaagtccctggacaaagaacacagatgcatcgtgcggcacgaaaacaacaagaacggcgtggaccaggaaatcatcttcccacccatcaagaccgatgtgattacaatggaccccaaggacaactgctccaaggacgccaacgataccctgctgctccagctgaccaacaccagcgcctactacatgtacttgttgctgctgctgaagtccgtggtgtacttcgccatcatcacatgctgcctgctgcggagaaccgccttctgctgcaacggcgagaagtctagggccaagcgatctggatctggagcaacaaacttctcactactcaaacaagcaggtgacgtggaggagaatcccgggcctactagtatggactggatttggcgcatccttttccttgtcggcgctgctaccggcgcgcattccttcgaacaagttcagcttcaacagcctggcgctgagctggtcaaacctggcgcttctgtgaagatgagctgcaaagccagcggctacgccttcagcagctactggatcaactggatgaagcagaaacccggccagggactcgaatggatcggccaaatctatcccggcgacggcgacaccaactacaacggcaagttcaagggcagagccacactgaccgccgatacctctagcagcacagcctacatgcagctgagcagcctgaccagcgaagatagcgccgtgtacttctgtgcccggtccatcacaacagtcgtgggctgcgctatggactattggggccagggaacaagcgtgaccgtgtctagtacgcgtatccagaaccctgatcctgccgtgtaccagctgcgggatagcaagagcagcgacaagagcgtgtgtctgttcaccgacttcgacagccagaccaacgtgtcccagagcaaggactccgacgtgtacatcaccgataagtgcgtgctggacatgcggagcatggacttcaagagcaactccgccgtggcctggtccaacaagtccgatttcgcctgcgccaacgccttcaacaacagcattatccccgaggacacattcttcccaagccccgagagcagcgactccaccgaccacgtgaagcccaaagagacagagaacaccaagcagcccagcaagagctgccacaagcccaaggccatcgtgcacaccgagaaagtgaacatgatgagcctgaccgtgctgggcctgcggatgctgttcgccaaaaccgtggccgtgaacttcctgctgaccgccaagctgttcttcctc

SEQ ID NO: 8040 - DNA, 2607 bp, synthetic construct
  source 1..2607: mol_type = other DNA
atggccttaccagtgaccgccttgctcctgccgctggccttgctgctccacgccgccaggccggaagttcagctgcttgagtctggcggaggactggttcaacctggcggaagcctgagactgtcttgtgccgccagcggcttcatcttcagcagctacgccatgagctgggtccgacaggctcctggaaagggccaagaatgggtttccggcgttagcggcacaggcgtgaacacctactacgccgatagcgtgaagggcagattcaccatcagccgggacaacagcaagaacaccctgtacctccagatgaacagcctgagagccgaggacaccgccgtgtactattgtgcctctggcaaaggctgggacagcggctcttggtacgaggactatagaggccagggcaccctggtcacagtttcttcaggtaccggcggaggcggatctggcggcggaggtagcggtggcggaggatctgaattcgacatccagatgacacagagccctagcagcctgtctgccagcgtgggagacagagtgaccatcacatgcaaggccagcgaccacatcaacaactggctggcctggtatcagcagaagcctggacaggcccctaagctgctgatctacggcgctaccacactggaaacaggcgtgcccagcagattttctggcagcggctctggcaccgactacaccctgacaatatccagcctccagcctgaggacttcgccacctactactgtcagcagagctggaacaccccttggacattcggccagggcaccaagctggaaatcaagagactcgagatccagaaccctgatcctgccgtgtaccagctgcgggatagcaagagcagcgacaagagcgtgtgtctgttcaccgacttcgacagccagaccaacgtgtcccagagcaaggactccgacgtgtacatcaccgataagtgcgtgctggacatgcggagcatggacttcaagagcaactccgccgtggcctggtccaacaagtccgatttcgcctgcgccaacgccttcaacaacagcattatccccgaggacacattcttcccaagccccgagagcagcgactccaccgaccacgtgaagcccaaagagacagagaacaccaagcagcccagcaagagctgccacaagcccaaggccatcgtgcacaccgagaaagtgaacatgatgagcctgaccgtgctgggcctgcggatgctgttcgccaaaaccgtggccgtgaacttcctgctgaccgccaagctgttcttcctccgcgccaagagaagcggatctggcgtgaagcagaccctgaatttcgacctgctgaagctggctggcgacgtggaatccaacccaggccctactagtatggactggatttggcgcatccttttccttgtcggcgctgctaccggcgcgcattccttcgaacaagttcagcttcaacagcctggcgctgagctggtcaaacctggcgcttctgtgaagatgagctgcaaagccagcggctacgccttcagcagctactggatcaactggatgaagcagaaacccggccagggactcgaatggatcggccaaatctatcccggcgacggcgacaccaactacaacggcaagttcaagggcagagccacactgaccgccgatacctctagcagcacagcctacatgcagctgagcagcctgaccagcgaagatagcgccgtgtacttctgtgcccggtccatcacaacagtcgtgggctgcgctatggactattggggccagggaacaagcgtgaccgtgtctagtacgcgtgaggacctgaagaacgtgttcccacctgaggtggccgtgttcgagcctagcgaggccgagatcagccacacccagaaagccaccctcgtgtgcctggctaccggcttctaccccgaccatgtggaactgtcttggtgggtcaacggcaaagaggtgcacagcggcgtgtgtaccgacccccagccactgaaagaacagcccgccctgaacgacagccggtactgcctgagcagcagactgagagtgtccgccaccttctggcagaacccccggaaccacttcagatgccaggtgcagttctacggcctgagcgagaacgacgagtggacccaggacagagccaagcccgtgacccagatcgtgtctgccgaagcctggggcagagccgatgatgtgattaagatccactggcaggaaaagaagtccaacaccatcctgggcagccaggaaggcaacaccatgaagaccaacgacacctacatgaagttcagctggctgaccgtgcccgagaagtccctggacaaagaacacagatgcatcgtgcggcacgaaaacaacaagaacggcgtggaccaggaaatcatcttcccacccatcaagaccgatgtgattacaatggaccccaaggacaactgctccaaggacgccaacgataccctgctgctccagctgaccaacaccagcgcctactacatgtacttgttgctgctgctgaagtccgtggtgtacttcgccatcatcacatgctgcctgctgcggagaaccgccttctgctgcaacggcgagaagtct

SEQ ID NO: 8041 - DNA, 2499 bp, synthetic construct
  source 1..2499: mol_type = other DNA
atggccttaccagtgaccgccttgctcctgccgctggccttgctgctccacgccgccaggccgatgctgcccgctcctaagaatctggtggtgtccagaatcaccgaggacagcgccagactgtcttggacagctcctgatgccgccttcgacagcttccccatccggtacatcgagacactgatctggggcgaagccatctggctggatgtgcctggaagcgagagaagctacgacctgaccggactgaagcctggcacagagtatgccgtggtcatcaccggcgtgaaaggcggcagattctctagccctctggtggcctctttcaccaccggtaccggcggaggcggatctggcggcggaggtagcggtggcggaggatctgaattcgacatccagatgacacagagccctagcagcctgtctgccagcgtgggagacagagtgaccatcacatgcaaggccagcgaccacatcaacaactggctggcctggtatcagcagaagcctggacaggcccctaagctgctgatctacggcgctaccacactggaaacaggcgtgcccagcagattttctggcagcggctctggcaccgactacaccctgacaatatccagcctccagcctgaggacttcgccacctactactgtcagcagagctggaacaccccttggacattcggccagggcaccaagctggaaatcaagagactcgaggacctgaagaacgtgttcccacctgaggtggccgtgttcgagcctagcgaggccgagatcagccacacccagaaagccaccctcgtgtgcctggctaccggcttctaccccgaccatgtggaactgtcttggtgggtcaacggcaaagaggtgcacagcggcgtgtgtaccgacccccagccactgaaagaacagcccgccctgaacgacagccggtactgcctgagcagcagactgagagtgtccgccaccttctggcagaacccccggaaccacttcagatgccaggtgcagttctacggcctgagcgagaacgacgagtggacccaggacagagccaagcccgtgacccagatcgtgtctgccgaagcctggggcagagccgatgatgtgattaagatccactggcaggaaaagaagtccaacaccatcctgggcagccaggaaggcaacaccatgaagaccaacgacacctacatgaagttcagctggctgaccgtgcccgagaagtccctggacaaagaacacagatgcatcgtgcggcacgaaaacaacaagaacggcgtggaccaggaaatcatcttcccacccatcaagaccgatgtgattacaatggaccccaaggacaactgctccaaggacgccaacgataccctgctgctccagctgaccaacaccagcgcctactacatgtacttgttgctgctgctgaagtccgtggtgtacttcgccatcatcacatgctgcctgctgcggagaaccgccttctgctgcaacggcgagaagtctagggccaagcgatctggatctggagcaacaaacttctcactactcaaacaagcaggtgacgtggaggagaatcccgggcctactagtatggactggatttggcgcatccttttccttgtcggcgctgctaccggcgcgcattccttcgaacaagttcagcttcaacagcctggcgctgagctggtcaaacctggcgcttctgtgaagatgagctgcaaagccagcggctacgccttcagcagctactggatcaactggatgaagcagaaacccggccagggactcgaatggatcggccaaatctatcccggcgacggcgacaccaactacaacggcaagttcaagggcagagccacactgaccgccgatacctctagcagcacagcctacatgcagctgagcagcctgaccagcgaagatagcgccgtgtacttctgtgcccggtccatcacaacagtcgtgggctgcgctatggactattggggccagggaacaagcgtgaccgtgtctagtacgcgtatccagaaccctgatcctgccgtgtaccagctgcgggatagcaagagcagcgacaagagcgtgtgtctgttcaccgacttcgacagccagaccaacgtgtcccagagcaaggactccgacgtgtacatcaccgataagtgcgtgctggacatgcggagcatggacttcaagagcaactccgccgtggcctggtccaacaagtccgatttcgcctgcgccaacgccttcaacaacagcattatccccgaggacacattcttcccaagccccgagagcagcgactccaccgaccacgtgaagcccaaagagacagagaacaccaagcagcccagcaagagctgccacaagcccaaggccatcgtgcacaccgagaaagtgaacatgatgagcctgaccgtgctgggcctgcggatgctgttcgccaaaaccgtggccgtgaacttcctgctgaccgccaagctgttcttcctc

SEQ ID NO: 8042 - DNA, 2511 bp, synthetic construct
  source 1..2511: mol_type = other DNA
atggccttaccagtgaccgccttgctcctgccgctggccttgctgctccacgccgccaggccgatgctgcccgctcctaagaatctggtggtgtccagaatcaccgaggacagcgccagactgtcttggacagctcctgatgccgccttcgacagcttccccatccggtacatcgagacactgatctggggcgaagccatctggctggatgtgcctggaagcgagagaagctacgacctgaccggactgaagcctggcacagagtatgccgtggtcatcaccggcgtgaaaggcggcagattctctagccctctggtggcctctttcaccaccggtaccggcggaggcggatctggcggcggaggtagcggtggcggaggatctgaattcgacatccagatgacacagagccctagcagcctgtctgccagcgtgggagacagagtgaccatcacatgcaaggccagcgaccacatcaacaactggctggcctggtatcagcagaagcctggacaggcccctaagctgctgatctacggcgctaccacactggaaacaggcgtgcccagcagattttctggcagcggctctggcaccgactacaccctgacaatatccagcctccagcctgaggacttcgccacctactactgtcagcagagctggaacaccccttggacattcggccagggcaccaagctggaaatcaagagactcgagatccagaaccctgatcctgccgtgtaccagctgcgggatagcaagagcagcgacaagagcgtgtgtctgttcaccgacttcgacagccagaccaacgtgtcccagagcaaggactccgacgtgtacatcaccgataagtgcgtgctggacatgcggagcatggacttcaagagcaactccgccgtggcctggtccaacaagtccgatttcgcctgcgccaacgccttcaacaacagcattatccccgaggacacattcttcccaagccccgagagcagcgactccaccgaccacgtgaagcccaaagagacagagaacaccaagcagcccagcaagagctgccacaagcccaaggccatcgtgcacaccgagaaagtgaacatgatgagcctgaccgtgctgggcctgcggatgctgttcgccaaaaccgtggccgtgaacttcctgctgaccgccaagctgttcttcctccgcgccaagagaagcggatctggcgtgaagcagaccctgaatttcgacctgctgaagctggctggcgacgtggaatccaacccaggccctactagtatggactggatttggcgcatccttttccttgtcggcgctgctaccggcgcgcattccttcgaacaagttcagcttcaacagcctggcgctgagctggtcaaacctggcgcttctgtgaagatgagctgcaaagccagcggctacgccttcagcagctactggatcaactggatgaagcagaaacccggccagggactcgaatggatcggccaaatctatcccggcgacggcgacaccaactacaacggcaagttcaagggcagagccacactgaccgccgatacctctagcagcacagcctacatgcagctgagcagcctgaccagcgaagatagcgccgtgtacttctgtgcccggtccatcacaacagtcgtgggctgcgctatggactattggggccagggaacaagcgtgaccgtgtctagtacgcgtgaggacctgaagaacgtgttcccacctgaggtggccgtgttcgagcctagcgaggccgagatcagccacacccagaaagccaccctcgtgtgcctggctaccggcttctaccccgaccatgtggaactgtcttggtgggtcaacggcaaagaggtgcacagcggcgtgtgtaccgacccccagccactgaaagaacagcccgccctgaacgacagccggtactgcctgagcagcagactgagagtgtccgccaccttctggcagaacccccggaaccacttcagatgccaggtgcagttctacggcctgagcgagaacgacgagtggacccaggacagagccaagcccgtgacccagatcgtgtctgccgaagcctggggcagagccgatgatgtgattaagatccactggcaggaaaagaagtccaacaccatcctgggcagccaggaaggcaacaccatgaagaccaacgacacctacatgaagttcagctggctgaccgtgcccgagaagtccctggacaaagaacacagatgcatcgtgcggcacgaaaacaacaagaacggcgtggaccaggaaatcatcttcccacccatcaagaccgatgtgattacaatggaccccaaggacaactgctccaaggacgccaacgataccctgctgctccagctgaccaacaccagcgcctactacatgtacttgttgctgctgctgaagtccgtggtgtacttcgccatcatcacatgctgcctgctgcggagaaccgccttctgctgcaacggcgagaagtct

SEQ ID NO: 8043 - DNA, 2586 bp, synthetic construct
  source 1..2586: mol_type = other DNA
atggccttaccagtgaccgccttgctcctgccgctggccttgctgctccacgccgccaggccggaggtgcagctggttgaatctggcggaggactggttcagcctggcggatctctgagactgtcttgtgccgccagcggcttcaacatcaaggatacctgtatcggctgggttcgcagagcccctggcaaagaggaagaactggtcgccaaaatctgcaagtacagcggccacaccagatacgccgacagcgtgaagggcagattcaccatcagcgccgacaccagcaagaacaccgcctacctccagatgaacagcctgagagccgaggacaccgccgtgtactattgtgccgctgtgtccgtcagagatgggcactacaattactggggccagggcaccaccgtgaccgtttcttcaggtaccggcggaggcggatctggcggcggaggtagcggtggcggaggatctgaattcgacatccagatgacacagagccctagcagcctgtctgccagcgtgggagacagagtgaccatcacatgcaaggccagcgaccacatcaacaactggctggcctggtatcagcagaagcctggacaggcccctaagctgctgatctacggcgctaccacactggaaacaggcgtgcccagcagattttctggcagcggctctggcaccgactacaccctgacaatatccagcctccagcctgaggacttcgccacctactactgtcagcagagctggaacaccccttggacattcggccagggcaccaagctggaaatcaagagactcgaggacctgaagaacgtgttcccacctgaggtggccgtgttcgagcctagcgaggccgagatcagccacacccagaaagccaccctcgtgtgcctggctaccggcttctaccccgaccatgtggaactgtcttggtgggtcaacggcaaagaggtgcacagcggcgtgtgtaccgacccccagccactgaaagaacagcccgccctgaacgacagccggtactgcctgagcagcagactgagagtgtccgccaccttctggcagaacccccggaaccacttcagatgccaggtgcagttctacggcctgagcgagaacgacgagtggacccaggacagagccaagcccgtgacccagatcgtgtctgccgaagcctggggcagagccgatgatgtgattaagatccactggcaggaaaagaagtccaacaccatcctgggcagccaggaaggcaacaccatgaagaccaacgacacctacatgaagttcagctggctgaccgtgcccgagaagtccctggacaaagaacacagatgcatcgtgcggcacgaaaacaacaagaacggcgtggaccaggaaatcatcttcccacccatcaagaccgatgtgattacaatggaccccaaggacaactgctccaaggacgccaacgataccctgctgctccagctgaccaacaccagcgcctactacatgtacttgttgctgctgctgaagtccgtggtgtacttcgccatcatcacatgctgcctgctgcggagaaccgccttctgctgcaacggcgagaagtctagggccaagcgatctggatctggagcaacaaacttctcactactcaaacaagcaggtgacgtggaggagaatcccgggcctactagtatggactggatttggcgcatccttttccttgtcggcgctgctaccggcgcgcattccttcgaacaagttcagcttcaacagcctggcgctgagctggtcaaacctggcgcttctgtgaagatgagctgcaaagccagcggctacgccttcagcagctactggatcaactggatgaagcagaaacccggccagggactcgaatggatcggccaaatctatcccggcgacggcgacaccaactacaacggcaagttcaagggcagagccacactgaccgccgatacctctagcagcacagcctacatgcagctgagcagcctgaccagcgaagatagcgccgtgtacttctgtgcccggtccatcacaacagtcgtgggctgcgctatggactattggggccagggaacaagcgtgaccgtgtctagtacgcgtatccagaaccctgatcctgccgtgtaccagctgcgggatagcaagagcagcgacaagagcgtgtgtctgttcaccgacttcgacagccagaccaacgtgtcccagagcaaggactccgacgtgtacatcaccgataagtgcgtgctggacatgcggagcatggacttcaagagcaactccgccgtggcctggtccaacaagtccgatttcgcctgcgccaacgccttcaacaacagcattatccccgaggacacattcttcccaagccccgagagcagcgactccaccgaccacgtgaagcccaaagagacagagaacaccaagcagcccagcaagagctgccacaagcccaaggccatcgtgcacaccgagaaagtgaacatgatgagcctgaccgtgctgggcctgcggatgctgttcgccaaaaccgtggccgtgaacttcctgctgaccgccaagctgttcttcctc

SEQ ID NO: 8044 - DNA, 2598 bp, synthetic construct
  source 1..2598: mol_type = other DNA
atggccttaccagtgaccgccttgctcctgccgctggccttgctgctccacgccgccaggccggaggtgcagctggttgaatctggcggaggactggttcagcctggcggatctctgagactgtcttgtgccgccagcggcttcaacatcaaggatacctgtatcggctgggttcgcagagcccctggcaaagaggaagaactggtcgccaaaatctgcaagtacagcggccacaccagatacgccgacagcgtgaagggcagattcaccatcagcgccgacaccagcaagaacaccgcctacctccagatgaacagcctgagagccgaggacaccgccgtgtactattgtgccgctgtgtccgtcagagatgggcactacaattactggggccagggcaccaccgtgaccgtttcttcaggtaccggcggaggcggatctggcggcggaggtagcggtggcggaggatctgaattcgacatccagatgacacagagccctagcagcctgtctgccagcgtgggagacagagtgaccatcacatgcaaggccagcgaccacatcaacaactggctggcctggtatcagcagaagcctggacaggcccctaagctgctgatctacggcgctaccacactggaaacaggcgtgcccagcagattttctggcagcggctctggcaccgactacaccctgacaatatccagcctccagcctgaggacttcgccacctactactgtcagcagagctggaacaccccttggacattcggccagggcaccaagctggaaatcaagagactcgagatccagaaccctgatcctgccgtgtaccagctgcgggatagcaagagcagcgacaagagcgtgtgtctgttcaccgacttcgacagccagaccaacgtgtcccagagcaaggactccgacgtgtacatcaccgataagtgcgtgctggacatgcggagcatggacttcaagagcaactccgccgtggcctggtccaacaagtccgatttcgcctgcgccaacgccttcaacaacagcattatccccgaggacacattcttcccaagccccgagagcagcgactccaccgaccacgtgaagcccaaagagacagagaacaccaagcagcccagcaagagctgccacaagcccaaggccatcgtgcacaccgagaaagtgaacatgatgagcctgaccgtgctgggcctgcggatgctgttcgccaaaaccgtggccgtgaacttcctgctgaccgccaagctgttcttcctccgcgccaagagaagcggatctggcgtgaagcagaccctgaatttcgacctgctgaagctggctggcgacgtggaatccaacccaggccctactagtatggactggatttggcgcatccttttccttgtcggcgctgctaccggcgcgcattccttcgaacaagttcagcttcaacagcctggcgctgagctggtcaaacctggcgcttctgtgaagatgagctgcaaagccagcggctacgccttcagcagctactggatcaactggatgaagcagaaacccggccagggactcgaatggatcggccaaatctatcccggcgacggcgacaccaactacaacggcaagttcaagggcagagccacactgaccgccgatacctctagcagcacagcctacatgcagctgagcagcctgaccagcgaagatagcgccgtgtacttctgtgcccggtccatcacaacagtcgtgggctgcgctatggactattggggccagggaacaagcgtgaccgtgtctagtacgcgtgaggacctgaagaacgtgttcccacctgaggtggccgtgttcgagcctagcgaggccgagatcagccacacccagaaagccaccctcgtgtgcctggctaccggcttctaccccgaccatgtggaactgtcttggtgggtcaacggcaaagaggtgcacagcggcgtgtgtaccgacccccagccactgaaagaacagcccgccctgaacgacagccggtactgcctgagcagcagactgagagtgtccgccaccttctggcagaacccccggaaccacttcagatgccaggtgcagttctacggcctgagcgagaacgacgagtggacccaggacagagccaagcccgtgacccagatcgtgtctgccgaagcctggggcagagccgatgatgtgattaagatccactggcaggaaaagaagtccaacaccatcctgggcagccaggaaggcaacaccatgaagaccaacgacacctacatgaagttcagctggctgaccgtgcccgagaagtccctggacaaagaacacagatgcatcgtgcggcacgaaaacaacaagaacggcgtggaccaggaaatcatcttcccacccatcaagaccgatgtgattacaatggaccccaaggacaactgctccaaggacgccaacgataccctgctgctccagctgaccaacaccagcgcctactacatgtacttgttgctgctgctgaagtccgtggtgtacttcgccatcatcacatgctgcctgctgcggagaaccgccttctgctgcaacggcgagaagtct

SEQ ID NO: 8045 - DNA, 2217 bp, synthetic construct
  source 1..2217: mol_type = other DNA
atggccttaccagtgaccgccttgctcctgccgctggccttgctgctccacgccgccaggccgcagctccagctgcaagagtctggacctggcctggtcaagcctagcgagacactgagcctgacctgtaccgtgtccggcgatagcatcagcagcggcgattactactggggctggatcagacagcctcctggcaaaggactggaatggatcggccacatctactacagcggcgtgacctactacaaccccagcctgaagtccagagtgaccatcagcgtggacaccagccggaaccagttctccctgaagctgtctagcgtgacagccgccgataccgccgtgtactactgcaccagagaggacagcagcaactggcggagtagaggccagggaacactggtcacagttagctctctcgaggacctgaagaacgtgttcccacctgaggtggccgtgttcgagcctagcgaggccgagatcagccacacccagaaagccaccctcgtgtgcctggctaccggcttctaccccgaccatgtggaactgtcttggtgggtcaacggcaaagaggtgcacagcggcgtgtgtaccgacccccagccactgaaagaacagcccgccctgaacgacagccggtactgcctgagcagcagactgagagtgtccgccaccttctggcagaacccccggaaccacttcagatgccaggtgcagttctacggcctgagcgagaacgacgagtggacccaggacagagccaagcccgtgacccagatcgtgtctgccgaagcctggggcagagccgatgatgtgattaagatccactggcaggaaaagaagtccaacaccatcctgggcagccaggaaggcaacaccatgaagaccaacgacacctacatgaagttcagctggctgaccgtgcccgagaagtccctggacaaagaacacagatgcatcgtgcggcacgaaaacaacaagaacggcgtggaccaggaaatcatcttcccacccatcaagaccgatgtgattacaatggaccccaaggacaactgctccaaggacgccaacgataccctgctgctccagctgaccaacaccagcgcctactacatgtacttgttgctgctgctgaagtccgtggtgtacttcgccatcatcacatgctgcctgctgcggagaaccgccttctgctgcaacggcgagaagtctagggccaagcgatctggatctggagcaacaaacttctcactactcaaacaagcaggtgacgtggaggagaatcccgggcctactagtatggactggatttggcgcatccttttccttgtcggcgctgctaccggcgcgcattccttcgaagttcagttggtagagtctggaggcggagtggtacaaccggggcggtctcttagacttagttgcgcagcaagcggtttctctttctctggctatgggatgcactgggtgagacaggcccctgggaaaggactggagtgggtggcctacatttcatacgacgggagtaataaatactatgcagactccgttaagggcaggttcacgatctctcgggacaattccaagaatacattgtatcttcagatgaatagtctccgagctgaagacacggcggtttactactgcgctaaagacccggcctggggacttcgacttggagagagttctagctacgattttgacatttggggacaagggacaatggtcactgtctcaagtacgcgtatccagaaccctgatcctgccgtgtaccagctgcgggatagcaagagcagcgacaagagcgtgtgtctgttcaccgacttcgacagccagaccaacgtgtcccagagcaaggactccgacgtgtacatcaccgataagtgcgtgctggacatgcggagcatggacttcaagagcaactccgccgtggcctggtccaacaagtccgatttcgcctgcgccaacgccttcaacaacagcattatccccgaggacacattcttcccaagccccgagagcagcgactccaccgaccacgtgaagcccaaagagacagagaacaccaagcagcccagcaagagctgccacaagcccaaggccatcgtgcacaccgagaaagtgaacatgatgagcctgaccgtgctgggcctgcggatgctgttcgccaaaaccgtggccgtgaacttcctgctgaccgccaagctgttcttcctc

SEQ ID NO: 8046 - DNA, 2229 bp, synthetic construct
  source 1..2229: mol_type = other DNA
atggccttaccagtgaccgccttgctcctgccgctggccttgctgctccacgccgccaggccgcagctccagctgcaagagtctggacctggcctggtcaagcctagcgagacactgagcctgacctgtaccgtgtccggcgatagcatcagcagcggcgattactactggggctggatcagacagcctcctggcaaaggactggaatggatcggccacatctactacagcggcgtgacctactacaaccccagcctgaagtccagagtgaccatcagcgtggacaccagccggaaccagttctccctgaagctgtctagcgtgacagccgccgataccgccgtgtactactgcaccagagaggacagcagcaactggcggagtagaggccagggaacactggtcacagttagctctctcgagatccagaaccctgatcctgccgtgtaccagctgcgggatagcaagagcagcgacaagagcgtgtgtctgttcaccgacttcgacagccagaccaacgtgtcccagagcaaggactccgacgtgtacatcaccgataagtgcgtgctggacatgcggagcatggacttcaagagcaactccgccgtggcctggtccaacaagtccgatttcgcctgcgccaacgccttcaacaacagcattatccccgaggacacattcttcccaagccccgagagcagcgactccaccgaccacgtgaagcccaaagagacagagaacaccaagcagcccagcaagagctgccacaagcccaaggccatcgtgcacaccgagaaagtgaacatgatgagcctgaccgtgctgggcctgcggatgctgttcgccaaaaccgtggccgtgaacttcctgctgaccgccaagctgttcttcctccgcgccaagagaagcggatctggcgtgaagcagaccctgaatttcgacctgctgaagctggctggcgacgtggaatccaacccaggccctactagtatggactggatttggcgcatccttttccttgtcggcgctgctaccggcgcgcattccttcgaagttcagttggtagagtctggaggcggagtggtacaaccggggcggtctcttagacttagttgcgcagcaagcggtttctctttctctggctatgggatgcactgggtgagacaggcccctgggaaaggactggagtgggtggcctacatttcatacgacgggagtaataaatactatgcagactccgttaagggcaggttcacgatctctcgggacaattccaagaatacattgtatcttcagatgaatagtctccgagctgaagacacggcggtttactactgcgctaaagacccggcctggggacttcgacttggagagagttctagctacgattttgacatttggggacaagggacaatggtcactgtctcaagtacgcgtgaggacctgaagaacgtgttcccacctgaggtggccgtgttcgagcctagcgaggccgagatcagccacacccagaaagccaccctcgtgtgcctggctaccggcttctaccccgaccatgtggaactgtcttggtgggtcaacggcaaagaggtgcacagcggcgtgtgtaccgacccccagccactgaaagaacagcccgccctgaacgacagccggtactgcctgagcagcagactgagagtgtccgccaccttctggcagaacccccggaaccacttcagatgccaggtgcagttctacggcctgagcgagaacgacgagtggacccaggacagagccaagcccgtgacccagatcgtgtctgccgaagcctggggcagagccgatgatgtgattaagatccactggcaggaaaagaagtccaacaccatcctgggcagccaggaaggcaacaccatgaagaccaacgacacctacatgaagttcagctggctgaccgtgcccgagaagtccctggacaaagaacacagatgcatcgtgcggcacgaaaacaacaagaacggcgtggaccaggaaatcatcttcccacccatcaagaccgatgtgattacaatggaccccaaggacaactgctccaaggacgccaacgataccctgctgctccagctgaccaacaccagcgcctactacatgtacttgttgctgctgctgaagtccgtggtgtacttcgccatcatcacatgctgcctgctgcggagaaccgccttctgctgcaacggcgagaagtct

SEQ ID NO: 8047 - DNA, 2184 bp, synthetic construct
  source 1..2184: mol_type = other DNA
atggccttaccagtgaccgccttgctcctgccgctggccttgctgctccacgccgccaggccgcagctccagctgcaagagtctggacctggcctggtcaagcctagcgagacactgagcctgacctgtaccgtgtccggcgatagcatcagcagcggcgattactactggggctggatcagacagcctcctggcaaaggactggaatggatcggccacatctactacagcggcgtgacctactacaaccccagcctgaagtccagagtgaccatcagcgtggacaccagccggaaccagttctccctgaagctgtctagcgtgacagccgccgataccgccgtgtactactgcaccagagaggacagcagcaactggcggagtagaggccagggaacactggtcacagttagctctctcgaggacctgaagaacgtgttcccacctgaggtggccgtgttcgagcctagcgaggccgagatcagccacacccagaaagccaccctcgtgtgcctggctaccggcttctaccccgaccatgtggaactgtcttggtgggtcaacggcaaagaggtgcacagcggcgtgtgtaccgacccccagccactgaaagaacagcccgccctgaacgacagccggtactgcctgagcagcagactgagagtgtccgccaccttctggcagaacccccggaaccacttcagatgccaggtgcagttctacggcctgagcgagaacgacgagtggacccaggacagagccaagcccgtgacccagatcgtgtctgccgaagcctggggcagagccgatgatgtgattaagatccactggcaggaaaagaagtccaacaccatcctgggcagccaggaaggcaacaccatgaagaccaacgacacctacatgaagttcagctggctgaccgtgcccgagaagtccctggacaaagaacacagatgcatcgtgcggcacgaaaacaacaagaacggcgtggaccaggaaatcatcttcccacccatcaagaccgatgtgattacaatggaccccaaggacaactgctccaaggacgccaacgataccctgctgctccagctgaccaacaccagcgcctactacatgtacttgttgctgctgctgaagtccgtggtgtacttcgccatcatcacatgctgcctgctgcggagaaccgccttctgctgcaacggcgagaagtctagggccaagcgatctggatctggagcaacaaacttctcactactcaaacaagcaggtgacgtggaggagaatcccgggcctactagtatggactggatttggcgcatccttttccttgtcggcgctgctaccggcgcgcattccttcgaagtgcagctggttgaatctggcggaggactggttcagcctggcggatctctgagactgtcttgtgccgccagcggcttcagcttcagcgacttttggatgagctgggtccgacaggcccctggcaaaggacttgaatgggtcgccacaatcagccaggccggcagcgagaaggactacgtggactctgtgaagggcagattcaccatcagccgggacaacgccaagaagtccctgtacctccagatgaacagcctgagagccgaggacaccgccgtgtactattgtgcctctggcgtgtacagcttcgactacagaggccagggcaccctggtcacagtctcttctacgcgtatccagaaccctgatcctgccgtgtaccagctgcgggatagcaagagcagcgacaagagcgtgtgtctgttcaccgacttcgacagccagaccaacgtgtcccagagcaaggactccgacgtgtacatcaccgataagtgcgtgctggacatgcggagcatggacttcaagagcaactccgccgtggcctggtccaacaagtccgatttcgcctgcgccaacgccttcaacaacagcattatccccgaggacacattcttcccaagccccgagagcagcgactccaccgaccacgtgaagcccaaagagacagagaacaccaagcagcccagcaagagctgccacaagcccaaggccatcgtgcacaccgagaaagtgaacatgatgagcctgaccgtgctgggcctgcggatgctgttcgccaaaaccgtggccgtgaacttcctgctgaccgccaagctgttcttcctc

SEQ ID NO: 8048 - DNA, 2196 bp, synthetic construct
  source 1..2196: mol_type = other DNA
atggccttaccagtgaccgccttgctcctgccgctggccttgctgctccacgccgccaggccgcagctccagctgcaagagtctggacctggcctggtcaagcctagcgagacactgagcctgacctgtaccgtgtccggcgatagcatcagcagcggcgattactactggggctggatcagacagcctcctggcaaaggactggaatggatcggccacatctactacagcggcgtgacctactacaaccccagcctgaagtccagagtgaccatcagcgtggacaccagccggaaccagttctccctgaagctgtctagcgtgacagccgccgataccgccgtgtactactgcaccagagaggacagcagcaactggcggagtagaggccagggaacactggtcacagttagctctctcgagatccagaaccctgatcctgccgtgtaccagctgcgggatagcaagagcagcgacaagagcgtgtgtctgttcaccgacttcgacagccagaccaacgtgtcccagagcaaggactccgacgtgtacatcaccgataagtgcgtgctggacatgcggagcatggacttcaagagcaactccgccgtggcctggtccaacaagtccgatttcgcctgcgccaacgccttcaacaacagcattatccccgaggacacattcttcccaagccccgagagcagcgactccaccgaccacgtgaagcccaaagagacagagaacaccaagcagcccagcaagagctgccacaagcccaaggccatcgtgcacaccgagaaagtgaacatgatgagcctgaccgtgctgggcctgcggatgctgttcgccaaaaccgtggccgtgaacttcctgctgaccgccaagctgttcttcctccgcgccaagagaagcggatctggcgtgaagcagaccctgaatttcgacctgctgaagctggctggcgacgtggaatccaacccaggccctactagtatggactggatttggcgcatccttttccttgtcggcgctgctaccggcgcgcattccttcgaagtgcagctggttgaatctggcggaggactggttcagcctggcggatctctgagactgtcttgtgccgccagcggcttcagcttcagcgacttttggatgagctgggtccgacaggcccctggcaaaggacttgaatgggtcgccacaatcagccaggccggcagcgagaaggactacgtggactctgtgaagggcagattcaccatcagccgggacaacgccaagaagtccctgtacctccagatgaacagcctgagagccgaggacaccgccgtgtactattgtgcctctggcgtgtacagcttcgactacagaggccagggcaccctggtcacagtctcttctacgcgtgaggacctgaagaacgtgttcccacctgaggtggccgtgttcgagcctagcgaggccgagatcagccacacccagaaagccaccctcgtgtgcctggctaccggcttctaccccgaccatgtggaactgtcttggtgggtcaacggcaaagaggtgcacagcggcgtgtgtaccgacccccagccactgaaagaacagcccgccctgaacgacagccggtactgcctgagcagcagactgagagtgtccgccaccttctggcagaacccccggaaccacttcagatgccaggtgcagttctacggcctgagcgagaacgacgagtggacccaggacagagccaagcccgtgacccagatcgtgtctgccgaagcctggggcagagccgatgatgtgattaagatccactggcaggaaaagaagtccaacaccatcctgggcagccaggaaggcaacaccatgaagaccaacgacacctacatgaagttcagctggctgaccgtgcccgagaagtccctggacaaagaacacagatgcatcgtgcggcacgaaaacaacaagaacggcgtggaccaggaaatcatcttcccacccatcaagaccgatgtgattacaatggaccccaaggacaactgctccaaggacgccaacgataccctgctgctccagctgaccaacaccagcgcctactacatgtacttgttgctgctgctgaagtccgtggtgtacttcgccatcatcacatgctgcctgctgcggagaaccgccttctgctgcaacggcgagaagtct

SEQ ID NO: 8049 - DNA, 2190 bp, synthetic construct
  source 1..2190: mol_type = other DNA
atggccttaccagtgaccgccttgctcctgccgctggccttgctgctccacgccgccaggccgcagctccagctgcaagagtctggacctggcctggtcaagcctagcgagacactgagcctgacctgtaccgtgtccggcgatagcatcagcagcggcgattactactggggctggatcagacagcctcctggcaaaggactggaatggatcggccacatctactacagcggcgtgacctactacaaccccagcctgaagtccagagtgaccatcagcgtggacaccagccggaaccagttctccctgaagctgtctagcgtgacagccgccgataccgccgtgtactactgcaccagagaggacagcagcaactggcggagtagaggccagggaacactggtcacagttagctctctcgaggacctgaagaacgtgttcccacctgaggtggccgtgttcgagcctagcgaggccgagatcagccacacccagaaagccaccctcgtgtgcctggctaccggcttctaccccgaccatgtggaactgtcttggtgggtcaacggcaaagaggtgcacagcggcgtgtgtaccgacccccagccactgaaagaacagcccgccctgaacgacagccggtactgcctgagcagcagactgagagtgtccgccaccttctggcagaacccccggaaccacttcagatgccaggtgcagttctacggcctgagcgagaacgacgagtggacccaggacagagccaagcccgtgacccagatcgtgtctgccgaagcctggggcagagccgatgatgtgattaagatccactggcaggaaaagaagtccaacaccatcctgggcagccaggaaggcaacaccatgaagaccaacgacacctacatgaagttcagctggctgaccgtgcccgagaagtccctggacaaagaacacagatgcatcgtgcggcacgaaaacaacaagaacggcgtggaccaggaaatcatcttcccacccatcaagaccgatgtgattacaatggaccccaaggacaactgctccaaggacgccaacgataccctgctgctccagctgaccaacaccagcgcctactacatgtacttgttgctgctgctgaagtccgtggtgtacttcgccatcatcacatgctgcctgctgcggagaaccgccttctgctgcaacggcgagaagtctagggccaagcgatctggatctggagcaacaaacttctcactactcaaacaagcaggtgacgtggaggagaatcccgggcctactagtatggactggatttggcgcatccttttccttgtcggcgctgctaccggcgcgcattccttccaggtgcagctggttgaatctggcggaggactggttcagcctggcggatctctgagactgtcttgtgccgccagcggcttcaccttcaccaatcacgccatgagctgggtccgacaggcccctggaaaaggactggaactggtgtctagcatcagcggcaacggcagaaccacctactacgccgatagcgtgaagggcagattcaccatcagccgggacatcagcaagaacaccctggacctccagatgaacagcctgagagccgaggataccgccgtgtactactgtgccaaggatggcggagagacactggtggatagcagaggccagggcacactggtcacagtgtcatctacgcgtatccagaaccctgatcctgccgtgtaccagctgcgggatagcaagagcagcgacaagagcgtgtgtctgttcaccgacttcgacagccagaccaacgtgtcccagagcaaggactccgacgtgtacatcaccgataagtgcgtgctggacatgcggagcatggacttcaagagcaactccgccgtggcctggtccaacaagtccgatttcgcctgcgccaacgccttcaacaacagcattatccccgaggacacattcttcccaagccccgagagcagcgactccaccgaccacgtgaagcccaaagagacagagaacaccaagcagcccagcaagagctgccacaagcccaaggccatcgtgcacaccgagaaagtgaacatgatgagcctgaccgtgctgggcctgcggatgctgttcgccaaaaccgtggccgtgaacttcctgctgaccgccaagctgttcttcctc

SEQ ID NO: 8050 - DNA, 2202 bp, synthetic construct
  source 1..2202: mol_type = other DNA
atggccttaccagtgaccgccttgctcctgccgctggccttgctgctccacgccgccaggccgcagctccagctgcaagagtctggacctggcctggtcaagcctagcgagacactgagcctgacctgtaccgtgtccggcgatagcatcagcagcggcgattactactggggctggatcagacagcctcctggcaaaggactggaatggatcggccacatctactacagcggcgtgacctactacaaccccagcctgaagtccagagtgaccatcagcgtggacaccagccggaaccagttctccctgaagctgtctagcgtgacagccgccgataccgccgtgtactactgcaccagagaggacagcagcaactggcggagtagaggccagggaacactggtcacagttagctctctcgagatccagaaccctgatcctgccgtgtaccagctgcgggatagcaagagcagcgacaagagcgtgtgtctgttcaccgacttcgacagccagaccaacgtgtcccagagcaaggactccgacgtgtacatcaccgataagtgcgtgctggacatgcggagcatggacttcaagagcaactccgccgtggcctggtccaacaagtccgatttcgcctgcgccaacgccttcaacaacagcattatccccgaggacacattcttcccaagccccgagagcagcgactccaccgaccacgtgaagcccaaagagacagagaacaccaagcagcccagcaagagctgccacaagcccaaggccatcgtgcacaccgagaaagtgaacatgatgagcctgaccgtgctgggcctgcggatgctgttcgccaaaaccgtggccgtgaacttcctgctgaccgccaagctgttcttcctccgcgccaagagaagcggatctggcgtgaagcagaccctgaatttcgacctgctgaagctggctggcgacgtggaatccaacccaggccctactagtatggactggatttggcgcatccttttccttgtcggcgctgctaccggcgcgcattccttccaggtgcagctggttgaatctggcggaggactggttcagcctggcggatctctgagactgtcttgtgccgccagcggcttcaccttcaccaatcacgccatgagctgggtccgacaggcccctggaaaaggactggaactggtgtctagcatcagcggcaacggcagaaccacctactacgccgatagcgtgaagggcagattcaccatcagccgggacatcagcaagaacaccctggacctccagatgaacagcctgagagccgaggataccgccgtgtactactgtgccaaggatggcggagagacactggtggatagcagaggccagggcacactggtcacagtgtcatctacgcgtgaggacctgaagaacgtgttcccacctgaggtggccgtgttcgagcctagcgaggccgagatcagccacacccagaaagccaccctcgtgtgcctggctaccggcttctaccccgaccatgtggaactgtcttggtgggtcaacggcaaagaggtgcacagcggcgtgtgtaccgacccccagccactgaaagaacagcccgccctgaacgacagccggtactgcctgagcagcagactgagagtgtccgccaccttctggcagaacccccggaaccacttcagatgccaggtgcagttctacggcctgagcgagaacgacgagtggacccaggacagagccaagcccgtgacccagatcgtgtctgccgaagcctggggcagagccgatgatgtgattaagatccactggcaggaaaagaagtccaacaccatcctgggcagccaggaaggcaacaccatgaagaccaacgacacctacatgaagttcagctggctgaccgtgcccgagaagtccctggacaaagaacacagatgcatcgtgcggcacgaaaacaacaagaacggcgtggaccaggaaatcatcttcccacccatcaagaccgatgtgattacaatggaccccaaggacaactgctccaaggacgccaacgataccctgctgctccagctgaccaacaccagcgcctactacatgtacttgttgctgctgctgaagtccgtggtgtacttcgccatcatcacatgctgcctgctgcggagaaccgccttctgctgcaacggcgagaagtct

SEQ ID NO: 8051 - DNA, 2187 bp, synthetic construct
  source 1..2187: mol_type = other DNA
atggccttaccagtgaccgccttgctcctgccgctggccttgctgctccacgccgccaggccggaagtgcagctgcttgaaagtggcggcggactgattcagcctggcggatctctgagactgagctgtgccgccagcggcttcaccttttctagccacgccatgacctgggtccgacaggcacctggaaaagggcttgaatgggtgtccgccatcagcggctctggcgattacacacactacgccgacagcgtgaagggcagattcaccatcagcagagacaacagcaagaacaccgtgtacctccagatgaacagcctgagagccgaggacagcgccgtgtattattgcgccaaggatgaggatggcggcagcctgcttggacacagaggacaaggcaccctggtcaccgtttcttccctcgaggacctgaagaacgtgttcccacctgaggtggccgtgttcgagcctagcgaggccgagatcagccacacccagaaagccaccctcgtgtgcctggctaccggcttctaccccgaccatgtggaactgtcttggtgggtcaacggcaaagaggtgcacagcggcgtgtgtaccgacccccagccactgaaagaacagcccgccctgaacgacagccggtactgcctgagcagcagactgagagtgtccgccaccttctggcagaacccccggaaccacttcagatgccaggtgcagttctacggcctgagcgagaacgacgagtggacccaggacagagccaagcccgtgacccagatcgtgtctgccgaagcctggggcagagccgatgatgtgattaagatccactggcaggaaaagaagtccaacaccatcctgggcagccaggaaggcaacaccatgaagaccaacgacacctacatgaagttcagctggctgaccgtgcccgagaagtccctggacaaagaacacagatgcatcgtgcggcacgaaaacaacaagaacggcgtggaccaggaaatcatcttcccacccatcaagaccgatgtgattacaatggaccccaaggacaactgctccaaggacgccaacgataccctgctgctccagctgaccaacaccagcgcctactacatgtacttgttgctgctgctgaagtccgtggtgtacttcgccatcatcacatgctgcctgctgcggagaaccgccttctgctgcaacggcgagaagtctagggccaagcgatctggatctggagcaacaaacttctcactactcaaacaagcaggtgacgtggaggagaatcccgggcctactagtatggactggatttggcgcatccttttccttgtcggcgctgctaccggcgcgcattccttcgaagtgcagctggttgaatctggcggaggactggttcagcctggcggatctctgagactgtcttgtgccgccagcggcttcagcttcagcgacttttggatgagctgggtccgacaggcccctggcaaaggacttgaatgggtcgccacaatcagccaggccggcagcgagaaggactacgtggactctgtgaagggcagattcaccatcagccgggacaacgccaagaagtccctgtacctccagatgaacagcctgagagccgaggacaccgccgtgtactattgtgcctctggcgtgtacagcttcgactacagaggccagggcaccctggtcacagtctcttctacgcgtatccagaaccctgatcctgccgtgtaccagctgcgggatagcaagagcagcgacaagagcgtgtgtctgttcaccgacttcgacagccagaccaacgtgtcccagagcaaggactccgacgtgtacatcaccgataagtgcgtgctggacatgcggagcatggacttcaagagcaactccgccgtggcctggtccaacaagtccgatttcgcctgcgccaacgccttcaacaacagcattatccccgaggacacattcttcccaagccccgagagcagcgactccaccgaccacgtgaagcccaaagagacagagaacaccaagcagcccagcaagagctgccacaagcccaaggccatcgtgcacaccgagaaagtgaacatgatgagcctgaccgtgctgggcctgcggatgctgttcgccaaaaccgtggccgtgaacttcctgctgaccgccaagctgttcttcctc

SEQ ID NO: 8052 - DNA, 2199 bp, synthetic construct
  source 1..2199: mol_type = other DNA
atggccttaccagtgaccgccttgctcctgccgctggccttgctgctccacgccgccaggccggaagtgcagctgcttgaaagtggcggcggactgattcagcctggcggatctctgagactgagctgtgccgccagcggcttcaccttttctagccacgccatgacctgggtccgacaggcacctggaaaagggcttgaatgggtgtccgccatcagcggctctggcgattacacacactacgccgacagcgtgaagggcagattcaccatcagcagagacaacagcaagaacaccgtgtacctccagatgaacagcctgagagccgaggacagcgccgtgtattattgcgccaaggatgaggatggcggcagcctgcttggacacagaggacaaggcaccctggtcaccgtttcttccctcgagatccagaaccctgatcctgccgtgtaccagctgcgggatagcaagagcagcgacaagagcgtgtgtctgttcaccgacttcgacagccagaccaacgtgtcccagagcaaggactccgacgtgtacatcaccgataagtgcgtgctggacatgcggagcatggacttcaagagcaactccgccgtggcctggtccaacaagtccgatttcgcctgcgccaacgccttcaacaacagcattatccccgaggacacattcttcccaagccccgagagcagcgactccaccgaccacgtgaagcccaaagagacagagaacaccaagcagcccagcaagagctgccacaagcccaaggccatcgtgcacaccgagaaagtgaacatgatgagcctgaccgtgctgggcctgcggatgctgttcgccaaaaccgtggccgtgaacttcctgctgaccgccaagctgttcttcctccgcgccaagagaagcggatctggcgtgaagcagaccctgaatttcgacctgctgaagctggctggcgacgtggaatccaacccaggccctactagtatggactggatttggcgcatccttttccttgtcggcgctgctaccggcgcgcattccttcgaagtgcagctggttgaatctggcggaggactggttcagcctggcggatctctgagactgtcttgtgccgccagcggcttcagcttcagcgacttttggatgagctgggtccgacaggcccctggcaaaggacttgaatgggtcgccacaatcagccaggccggcagcgagaaggactacgtggactctgtgaagggcagattcaccatcagccgggacaacgccaagaagtccctgtacctccagatgaacagcctgagagccgaggacaccgccgtgtactattgtgcctctggcgtgtacagcttcgactacagaggccagggcaccctggtcacagtctcttctacgcgtgaggacctgaagaacgtgttcccacctgaggtggccgtgttcgagcctagcgaggccgagatcagccacacccagaaagccaccctcgtgtgcctggctaccggcttctaccccgaccatgtggaactgtcttggtgggtcaacggcaaagaggtgcacagcggcgtgtgtaccgacccccagccactgaaagaacagcccgccctgaacgacagccggtactgcctgagcagcagactgagagtgtccgccaccttctggcagaacccccggaaccacttcagatgccaggtgcagttctacggcctgagcgagaacgacgagtggacccaggacagagccaagcccgtgacccagatcgtgtctgccgaagcctggggcagagccgatgatgtgattaagatccactggcaggaaaagaagtccaacaccatcctgggcagccaggaaggcaacaccatgaagaccaacgacacctacatgaagttcagctggctgaccgtgcccgagaagtccctggacaaagaacacagatgcatcgtgcggcacgaaaacaacaagaacggcgtggaccaggaaatcatcttcccacccatcaagaccgatgtgattacaatggaccccaaggacaactgctccaaggacgccaacgataccctgctgctccagctgaccaacaccagcgcctactacatgtacttgttgctgctgctgaagtccgtggtgtacttcgccatcatcacatgctgcctgctgcggagaaccgccttctgctgcaacggcgagaagtct

SEQ ID NO: 8053 - DNA, 2205 bp, synthetic construct
  source 1..2205: mol_type = other DNA
atggccttaccagtgaccgccttgctcctgccgctggccttgctgctccacgccgccaggccgcaggtgcagctggttgaatctggcggaggactggttcagcctggcggatctctgagactgtcttgtgccgccagcggcttcaccttcaccaatcacgccatgagctgggtccgacaggcccctggaaaaggactggaactggtgtctagcatcagcggcaacggcagaaccacctactacgccgatagcgtgaagggcagattcaccatcagccgggacatcagcaagaacaccctggacctccagatgaacagcctgagagccgaggataccgccgtgtactactgtgccaaggatggcggagagacactggtggatagcagaggccagggcacactggtcacagtgtcatctctcgaggacctgaagaacgtgttcccacctgaggtggccgtgttcgagcctagcgaggccgagatcagccacacccagaaagccaccctcgtgtgcctggctaccggcttctaccccgaccatgtggaactgtcttggtgggtcaacggcaaagaggtgcacagcggcgtgtgtaccgacccccagccactgaaagaacagcccgccctgaacgacagccggtactgcctgagcagcagactgagagtgtccgccaccttctggcagaacccccggaaccacttcagatgccaggtgcagttctacggcctgagcgagaacgacgagtggacccaggacagagccaagcccgtgacccagatcgtgtctgccgaagcctggggcagagccgatgatgtgattaagatccactggcaggaaaagaagtccaacaccatcctgggcagccaggaaggcaacaccatgaagaccaacgacacctacatgaagttcagctggctgaccgtgcccgagaagtccctggacaaagaacacagatgcatcgtgcggcacgaaaacaacaagaacggcgtggaccaggaaatcatcttcccacccatcaagaccgatgtgattacaatggaccccaaggacaactgctccaaggacgccaacgataccctgctgctccagctgaccaacaccagcgcctactacatgtacttgttgctgctgctgaagtccgtggtgtacttcgccatcatcacatgctgcctgctgcggagaaccgccttctgctgcaacggcgagaagtctagggccaagcgatctggatctggagcaacaaacttctcactactcaaacaagcaggtgacgtggaggagaatcccgggcctactagtatggactggatttggcgcatccttttccttgtcggcgctgctaccggcgcgcattccttcgaagaagttcagctgcttgagtctggcggaggactggttcaacctggcggaagcctgagactgtcttgtgccgccagcggcttcatcttcagcagctacgccatgagctgggtccgacaggctcctggaaagggccaagaatgggtttccggcgttagcggcacaggcgtgaacacctactacgccgatagcgtgaagggcagattcaccatcagccgggacaacagcaagaacaccctgtacctccagatgaacagcctgagagccgaggacaccgccgtgtactattgtgcctctggcaaaggctgggacagcggctcttggtacgaggactatagaggccagggcaccctggtcacagtttcttcaacgcgtatccagaaccctgatcctgccgtgtaccagctgcgggatagcaagagcagcgacaagagcgtgtgtctgttcaccgacttcgacagccagaccaacgtgtcccagagcaaggactccgacgtgtacatcaccgataagtgcgtgctggacatgcggagcatggacttcaagagcaactccgccgtggcctggtccaacaagtccgatttcgcctgcgccaacgccttcaacaacagcattatccccgaggacacattcttcccaagccccgagagcagcgactccaccgaccacgtgaagcccaaagagacagagaacaccaagcagcccagcaagagctgccacaagcccaaggccatcgtgcacaccgagaaagtgaacatgatgagcctgaccgtgctgggcctgcggatgctgttcgccaaaaccgtggccgtgaacttcctgctgaccgccaagctgttcttcctc

SEQ ID NO: 8054 - DNA, 2217 bp, synthetic construct
  source 1..2217: mol_type = other DNA
atggccttaccagtgaccgccttgctcctgccgctggccttgctgctccacgccgccaggccgcaggtgcagctggttgaatctggcggaggactggttcagcctggcggatctctgagactgtcttgtgccgccagcggcttcaccttcaccaatcacgccatgagctgggtccgacaggcccctggaaaaggactggaactggtgtctagcatcagcggcaacggcagaaccacctactacgccgatagcgtgaagggcagattcaccatcagccgggacatcagcaagaacaccctggacctccagatgaacagcctgagagccgaggataccgccgtgtactactgtgccaaggatggcggagagacactggtggatagcagaggccagggcacactggtcacagtgtcatctctcgagatccagaaccctgatcctgccgtgtaccagctgcgggatagcaagagcagcgacaagagcgtgtgtctgttcaccgacttcgacagccagaccaacgtgtcccagagcaaggactccgacgtgtacatcaccgataagtgcgtgctggacatgcggagcatggacttcaagagcaactccgccgtggcctggtccaacaagtccgatttcgcctgcgccaacgccttcaacaacagcattatccccgaggacacattcttcccaagccccgagagcagcgactccaccgaccacgtgaagcccaaagagacagagaacaccaagcagcccagcaagagctgccacaagcccaaggccatcgtgcacaccgagaaagtgaacatgatgagcctgaccgtgctgggcctgcggatgctgttcgccaaaaccgtggccgtgaacttcctgctgaccgccaagctgttcttcctccgcgccaagagaagcggatctggcgtgaagcagaccctgaatttcgacctgctgaagctggctggcgacgtggaatccaacccaggccctactagtatggactggatttggcgcatccttttccttgtcggcgctgctaccggcgcgcattccttcgaagaagttcagctgcttgagtctggcggaggactggttcaacctggcggaagcctgagactgtcttgtgccgccagcggcttcatcttcagcagctacgccatgagctgggtccgacaggctcctggaaagggccaagaatgggtttccggcgttagcggcacaggcgtgaacacctactacgccgatagcgtgaagggcagattcaccatcagccgggacaacagcaagaacaccctgtacctccagatgaacagcctgagagccgaggacaccgccgtgtactattgtgcctctggcaaaggctgggacagcggctcttggtacgaggactatagaggccagggcaccctggtcacagtttcttcaacgcgtgaggacctgaagaacgtgttcccacctgaggtggccgtgttcgagcctagcgaggccgagatcagccacacccagaaagccaccctcgtgtgcctggctaccggcttctaccccgaccatgtggaactgtcttggtgggtcaacggcaaagaggtgcacagcggcgtgtgtaccgacccccagccactgaaagaacagcccgccctgaacgacagccggtactgcctgagcagcagactgagagtgtccgccaccttctggcagaacccccggaaccacttcagatgccaggtgcagttctacggcctgagcgagaacgacgagtggacccaggacagagccaagcccgtgacccagatcgtgtctgccgaagcctggggcagagccgatgatgtgattaagatccactggcaggaaaagaagtccaacaccatcctgggcagccaggaaggcaacaccatgaagaccaacgacacctacatgaagttcagctggctgaccgtgcccgagaagtccctggacaaagaacacagatgcatcgtgcggcacgaaaacaacaagaacggcgtggaccaggaaatcatcttcccacccatcaagaccgatgtgattacaatggaccccaaggacaactgctccaaggacgccaacgataccctgctgctccagctgaccaacaccagcgcctactacatgtacttgttgctgctgctgaagtccgtggtgtacttcgccatcatcacatgctgcctgctgcggagaaccgccttctgctgcaacggcgagaagtct

SEQ ID NO: 8055 - DNA, 2193 bp, synthetic construct
  source 1..2193: mol_type = other DNA
atggccttaccagtgaccgccttgctcctgccgctggccttgctgctccacgccgccaggccggaagtgcagctggttgaatctggcggaggactggttcaggctggcggatctctgagactgtcttgtgccgccagcggcagaacctttagcatgggctggtttagacaggcccctggcaaagagagagagttcgtcgccgccatcacatactctggcggcagcccttactacgccgactctgtgaagggcagattcaccatcagccgggacaacgccaagaacaccgtgtacctccagatgaacagcctgaagcctgaggacaccgccgtgtactactgcgccgccaatccaacatacggcagcgactggaacgccgagaattggggccagggaacccaagtgacagtgtctagcctcgaggacctgaagaacgtgttcccacctgaggtggccgtgttcgagcctagcgaggccgagatcagccacacccagaaagccaccctcgtgtgcctggctaccggcttctaccccgaccatgtggaactgtcttggtgggtcaacggcaaagaggtgcacagcggcgtgtgtaccgacccccagccactgaaagaacagcccgccctgaacgacagccggtactgcctgagcagcagactgagagtgtccgccaccttctggcagaacccccggaaccacttcagatgccaggtgcagttctacggcctgagcgagaacgacgagtggacccaggacagagccaagcccgtgacccagatcgtgtctgccgaagcctggggcagagccgatgatgtgattaagatccactggcaggaaaagaagtccaacaccatcctgggcagccaggaaggcaacaccatgaagaccaacgacacctacatgaagttcagctggctgaccgtgcccgagaagtccctggacaaagaacacagatgcatcgtgcggcacgaaaacaacaagaacggcgtggaccaggaaatcatcttcccacccatcaagaccgatgtgattacaatggaccccaaggacaactgctccaaggacgccaacgataccctgctgctccagctgaccaacaccagcgcctactacatgtacttgttgctgctgctgaagtccgtggtgtacttcgccatcatcacatgctgcctgctgcggagaaccgccttctgctgcaacggcgagaagtctagggccaagcgatctggatctggagcaacaaacttctcactactcaaacaagcaggtgacgtggaggagaatcccgggcctactagtatggactggatttggcgcatccttttccttgtcggcgctgctaccggcgcgcattccttcgaacaactgcaactgcaagagtctggccctggcctggtcaagccttctgaaaccctgagcctgacctgtaccgtgtccggcggctctatcagcagcggcgattactactggggctggatcagacagcctccaggcaagggactcgaatggatcggcagcatcagctacagcggctccacctactacaacccaagcctgaagtccagagtgaccatcagcgtggacaccagcagaaaccagttctccctgaagctgagcagcgtgacagccgccgatacagccgtgtattattgcaccagagaggacagcagcaactggcggagtagaggacagggcacactggtcacagtgtcctctacgcgtatccagaaccctgatcctgccgtgtaccagctgcgggatagcaagagcagcgacaagagcgtgtgtctgttcaccgacttcgacagccagaccaacgtgtcccagagcaaggactccgacgtgtacatcaccgataagtgcgtgctggacatgcggagcatggacttcaagagcaactccgccgtggcctggtccaacaagtccgatttcgcctgcgccaacgccttcaacaacagcattatccccgaggacacattcttcccaagccccgagagcagcgactccaccgaccacgtgaagcccaaagagacagagaacaccaagcagcccagcaagagctgccacaagcccaaggccatcgtgcacaccgagaaagtgaacatgatgagcctgaccgtgctgggcctgcggatgctgttcgccaaaaccgtggccgtgaacttcctgctgaccgccaagctgttcttcctc

SEQ ID NO: 8056 - DNA, 2205 bp, synthetic construct
  source 1..2205: mol_type = other DNA
atggccttaccagtgaccgccttgctcctgccgctggccttgctgctccacgccgccaggccggaagtgcagctggttgaatctggcggaggactggttcaggctggcggatctctgagactgtcttgtgccgccagcggcagaacctttagcatgggctggtttagacaggcccctggcaaagagagagagttcgtcgccgccatcacatactctggcggcagcccttactacgccgactctgtgaagggcagattcaccatcagccgggacaacgccaagaacaccgtgtacctccagatgaacagcctgaagcctgaggacaccgccgtgtactactgcgccgccaatccaacatacggcagcgactggaacgccgagaattggggccagggaacccaagtgacagtgtctagcctcgagatccagaaccctgatcctgccgtgtaccagctgcgggatagcaagagcagcgacaagagcgtgtgtctgttcaccgacttcgacagccagaccaacgtgtcccagagcaaggactccgacgtgtacatcaccgataagtgcgtgctggacatgcggagcatggacttcaagagcaactccgccgtggcctggtccaacaagtccgatttcgcctgcgccaacgccttcaacaacagcattatccccgaggacacattcttcccaagccccgagagcagcgactccaccgaccacgtgaagcccaaagagacagagaacaccaagcagcccagcaagagctgccacaagcccaaggccatcgtgcacaccgagaaagtgaacatgatgagcctgaccgtgctgggcctgcggatgctgttcgccaaaaccgtggccgtgaacttcctgctgaccgccaagctgttcttcctccgcgccaagagaagcggatctggcgtgaagcagaccctgaatttcgacctgctgaagctggctggcgacgtggaatccaacccaggccctactagtatggactggatttggcgcatccttttccttgtcggcgctgctaccggcgcgcattccttcgaacaactgcaactgcaagagtctggccctggcctggtcaagccttctgaaaccctgagcctgacctgtaccgtgtccggcggctctatcagcagcggcgattactactggggctggatcagacagcctccaggcaagggactcgaatggatcggcagcatcagctacagcggctccacctactacaacccaagcctgaagtccagagtgaccatcagcgtggacaccagcagaaaccagttctccctgaagctgagcagcgtgacagccgccgatacagccgtgtattattgcaccagagaggacagcagcaactggcggagtagaggacagggcacactggtcacagtgtcctctacgcgtgaggacctgaagaacgtgttcccacctgaggtggccgtgttcgagcctagcgaggccgagatcagccacacccagaaagccaccctcgtgtgcctggctaccggcttctaccccgaccatgtggaactgtcttggtgggtcaacggcaaagaggtgcacagcggcgtgtgtaccgacccccagccactgaaagaacagcccgccctgaacgacagccggtactgcctgagcagcagactgagagtgtccgccaccttctggcagaacccccggaaccacttcagatgccaggtgcagttctacggcctgagcgagaacgacgagtggacccaggacagagccaagcccgtgacccagatcgtgtctgccgaagcctggggcagagccgatgatgtgattaagatccactggcaggaaaagaagtccaacaccatcctgggcagccaggaaggcaacaccatgaagaccaacgacacctacatgaagttcagctggctgaccgtgcccgagaagtccctggacaaagaacacagatgcatcgtgcggcacgaaaacaacaagaacggcgtggaccaggaaatcatcttcccacccatcaagaccgatgtgattacaatggaccccaaggacaactgctccaaggacgccaacgataccctgctgctccagctgaccaacaccagcgcctactacatgtacttgttgctgctgctgaagtccgtggtgtacttcgccatcatcacatgctgcctgctgcggagaaccgccttctgctgcaacggcgagaagtct

SEQ ID NO: 8057 - DNA, 3702 bp, synthetic construct
  source 1..3702: mol_type = other DNA
atggccttaccagtgaccgccttgctcctgccgctggccttgctgctccacgccgccaggccggaagtgcagctggttgaatctggcggaggactggttcaggctggcggatctctgagactgtcttgtgccgccagcggcagaacctttagcatgggctggtttagacaggcccctggcaaagagagagagttcgtcgccgccatcacatactctggcggcagcccttactacgccgactctgtgaagggcagattcaccatcagccgggacaacgccaagaacaccgtgtacctccagatgaacagcctgaagcctgaggacaccgccgtgtactactgcgccgccaatccaacatacggcagcgactggaacgccgagaattggggccagggaacccaagtgacagtgtctagcggtaccggcggaggcggatctggcggcggaggtagcggtggcggaggatctgaattcgacatccagatgacacagagccctagcagcctgtctgccagcgtgggagacagagtgaccatcacatgcaaggccagcgaccacatcaacaactggctggcctggtatcagcagaagcctggacaggcccctaagctgctgatctacggcgctaccacactggaaacaggcgtgcccagcagattttctggcagcggctctggcaccgactacaccctgacaatatccagcctccagcctgaggacttcgccacctactactgtcagcagagctggaacaccccttggacattcggccagggcaccaagctggaaatcaagagactcgaggacctgaagaacgtgttcccacctgaggtggccgtgttcgagcctagcgaggccgagatcagccacacccagaaagccaccctcgtgtgcctggctaccggcttctaccccgaccatgtggaactgtcttggtgggtcaacggcaaagaggtgcacagcggcgtgtgtaccgacccccagccactgaaagaacagcccgccctgaacgacagccggtactgcctgagcagcagactgagagtgtccgccaccttctggcagaacccccggaaccacttcagatgccaggtgcagttctacggcctgagcgagaacgacgagtggacccaggacagagccaagcccgtgacccagatcgtgtctgccgaagcctggggcagagccgatgatgtgattaagatccactggcaggaaaagaagtccaacaccatcctgggcagccaggaaggcaacaccatgaagaccaacgacacctacatgaagttcagctggctgaccgtgcccgagaagtccctggacaaagaacacagatgcatcgtgcggcacgaaaacaacaagaacggcgtggaccaggaaatcatcttcccacccatcaagaccgatgtgattacaatggaccccaaggacaactgctccaaggacgccaacgataccctgctgctccagctgaccaacaccagcgcctactacatgtacttgttgctgctgctgaagtccgtggtgtacttcgccatcatcacatgctgcctgctgcggagaaccgccttctgctgcaacggcgagaagtctagggccaagcgatctggatctggagcaacaaacttctcactactcaaacaagcaggtgacgtggaggagaatcccgggcctactagtgccaccatggactggatttggcgcatccttttccttgtcggcgctgctaccggcgcccattccgggcccgaagtgcaactggttgaatccggtggcggcctggtgcaagcaggcggatctctcagacttagctgtgccgcctccggcagaaccttcacaatgggatggtttaggcaggctccagggaaagagagagagttcgtcgccgccatctctctgtctcccacactggcctactacgccgactctgtgaaaggccggttcaccatctccagagataatgccaagaacaccgtggtgctgcaaatgaactctctgaaacccgaggatacagccctgtactattgtgccgctgaccggaagtccgtgatgagcatcagacccgattactggggacagggcacacaagtcacagtgtcctctggatccggcggcggaggatctggcggaggcggatctgggggcggaggctctttcgaacaagttcagcttcaacagcctggcgctgagctggtcaaacctggcgcttctgtgaagatgagctgcaaagccagcggctacgccttcagcagctactggatcaactggatgaagcagaaacccggccagggactcgaatggatcggccaaatctatcccggcgacggcgacaccaactacaacggcaagttcaagggcagagccacactgaccgccgatacctctagcagcacagcctacatgcagctgagcagcctgaccagcgaagatagcgccgtgtacttctgtgcccggtccatcacaacagtcgtgggctgcgctatggactattggggccagggaacaagcgtgaccgtgtctagtacgcgtatccagaaccctgatcctgccgtgtaccagctgcgggatagcaagagcagcgacaagagcgtgtgtctgttcaccgacttcgacagccagaccaacgtgtcccagagcaaggactccgacgtgtacatcaccgataagtgcgtgctggacatgcggagcatggacttcaagagcaactccgccgtggcctggtccaacaagtccgatttcgcctgcgccaacgccttcaacaacagcattatccccgaggacacattcttcccaagccccgagagcagcgactccaccgaccacgtgaagcccaaagagacagagaacaccaagcagcccagcaagagctgccacaagcccaaggccatcgtgcacaccgagaaagtgaacatgatgagcctgaccgtgctgggcctgcggatgctgttcgccaaaaccgtggccgtgaacttcctgctgaccgccaagctgttcttcctccgcgccaagagaagcggatctggcgtgaagcagaccctgaatttcgacctgctgaagctggctggcgacgtggaatccaacccaggcccttctagaggccatatgaccgagtacaagcccacggtgcgcctcgccacccgcgacgacgtccccagggccgtacgcaccctcgccgccgcgttcgccgactaccccgccacgcgccacaccgtcgatccggaccgccacatcgagcgggtcaccgagctgcaagaactcttcctcacgcgcgtcgggctcgacatcggcaaggtgtgggtcgcggacgacggcgccgcggtggcggtctggaccacgccggagagcgtcgaagcgggggcggtgttcgccgagatcggcccgcgcatggccgagttgagcggttcccggctggccgcgcagcaacagatggaaggcctcctggcgccgcaccggcccaaggagcccgcgtggttcctggccaccgtcggcgtctcgcccgaccaccagggcaagggtctgggcagcgccgtcgtgctccccggagtggaggcggccgagcgcgccggggtgcccgccttcctggagacctccgcgccccgcaacctccccttctacgagcggctcggcttcaccgtcaccgccgacgtcgaggtgcccgaaggaccgcgcacctggtgcatgacccgcaagcccggtgcctga

SEQ ID NO: 8058 - DNA, 2616 bp, synthetic construct
  source 1..2616: mol_type = other DNA
atggccttaccagtgaccgccttgctcctgccgctggccttgctgctccacgccgccaggccggaagtgcagctggttgaatctggcggaggactggttcagcctggcggatctctgagactgtcttgtgccgcctctggcttcgccagcgactactatatcatcggctggttcagacaggcccctggcaaagagagagagggcgtcagctgtatcagcagcagatacgccaacaccaactacgccgacagcgtgaagggcagattcaccatcagccgggacaacgccaagaacaccgtgtacctccagatgaacagcctgaagcctgaggacaccgccgtgtactactgtgccgccgacaccagaagatacacctgtcctgacattgccaccatgcaccggaacttcgattcttggggccagggcacactggtcaccgtttcttctggtaccggcggaggcggatctggcggcggaggtagcggtggcggaggatctgaattcgacatccagatgacacagagccctagcagcctgtctgccagcgtgggagacagagtgaccatcacatgcaaggccagcgaccacatcaacaactggctggcctggtatcagcagaagcctggacaggcccctaagctgctgatctacggcgctaccacactggaaacaggcgtgcccagcagattttctggcagcggctctggcaccgactacaccctgacaatatccagcctccagcctgaggacttcgccacctactactgtcagcagagctggaacaccccttggacattcggccagggcaccaagctggaaatcaagagactcgaggacctgaagaacgtgttcccacctgaggtggccgtgttcgagcctagcgaggccgagatcagccacacccagaaagccaccctcgtgtgcctggctaccggcttctaccccgaccatgtggaactgtcttggtgggtcaacggcaaagaggtgcacagcggcgtgtgtaccgacccccagccactgaaagaacagcccgccctgaacgacagccggtactgcctgagcagcagactgagagtgtccgccaccttctggcagaacccccggaaccacttcagatgccaggtgcagttctacggcctgagcgagaacgacgagtggacccaggacagagccaagcccgtgacccagatcgtgtctgccgaagcctggggcagagccgatgatgtgattaagatccactggcaggaaaagaagtccaacaccatcctgggcagccaggaaggcaacaccatgaagaccaacgacacctacatgaagttcagctggctgaccgtgcccgagaagtccctggacaaagaacacagatgcatcgtgcggcacgaaaacaacaagaacggcgtggaccaggaaatcatcttcccacccatcaagaccgatgtgattacaatggaccccaaggacaactgctccaaggacgccaacgataccctgctgctccagctgaccaacaccagcgcctactacatgtacttgttgctgctgctgaagtccgtggtgtacttcgccatcatcacatgctgcctgctgcggagaaccgccttctgctgcaacggcgagaagtctagggccaagcgatctggatctggagcaacaaacttctcactactcaaacaagcaggtgacgtggaggagaatcccgggcctactagtatggactggatttggcgcatccttttccttgtcggcgctgctaccggcgcgcattccttcgaacaagttcagcttcaacagcctggcgctgagctggtcaaacctggcgcttctgtgaagatgagctgcaaagccagcggctacgccttcagcagctactggatcaactggatgaagcagaaacccggccagggactcgaatggatcggccaaatctatcccggcgacggcgacaccaactacaacggcaagttcaagggcagagccacactgaccgccgatacctctagcagcacagcctacatgcagctgagcagcctgaccagcgaagatagcgccgtgtacttctgtgcccggtccatcacaacagtcgtgggctgcgctatggactattggggccagggaacaagcgtgaccgtgtctagtacgcgtatccagaaccctgatcctgccgtgtaccagctgcgggatagcaagagcagcgacaagagcgtgtgtctgttcaccgacttcgacagccagaccaacgtgtcccagagcaaggactccgacgtgtacatcaccgataagtgcgtgctggacatgcggagcatggacttcaagagcaactccgccgtggcctggtccaacaagtccgatttcgcctgcgccaacgccttcaacaacagcattatccccgaggacacattcttcccaagccccgagagcagcgactccaccgaccacgtgaagcccaaagagacagagaacaccaagcagcccagcaagagctgccacaagcccaaggccatcgtgcacaccgagaaagtgaacatgatgagcctgaccgtgctgggcctgcggatgctgttcgccaaaaccgtggccgtgaacttcctgctgaccgccaagctgttcttcctctaa

SEQ ID NO: 8059 - DNA, 2616 bp, synthetic construct
  source 1..2616: mol_type = other DNA
atggccttaccagtgaccgccttgctcctgccgctggccttgctgctccacgccgccaggccggaagtgcagctggttgaatctggcggaggactggttcagcctggcggatctctgagactgagctgtgaagccagcggcttcgccagcgacgattacatcatcggctggttcagacaggcccctggcaaagagagagagggcgtcagctgcatcagctctaagtacgccaacaccgtgtacaccgacagcgtgaagggcagattcagactgagcagaggcaccgccaagaataccgtgtacctccagatgagcgccctgaagcctgaggataccgccgtgtactactgcgctatggacagccgcagagtgacatgccctgagatcagcaccatgcaccggaacttcgattcttggggccagggcacactggtcacagtgtcatctggtaccggcggaggcggatctggcggcggaggtagcggtggcggaggatctgaattcgacatccagatgacacagagccctagcagcctgtctgccagcgtgggagacagagtgaccatcacatgcaaggccagcgaccacatcaacaactggctggcctggtatcagcagaagcctggacaggcccctaagctgctgatctacggcgctaccacactggaaacaggcgtgcccagcagattttctggcagcggctctggcaccgactacaccctgacaatatccagcctccagcctgaggacttcgccacctactactgtcagcagagctggaacaccccttggacattcggccagggcaccaagctggaaatcaagagactcgaggacctgaagaacgtgttcccacctgaggtggccgtgttcgagcctagcgaggccgagatcagccacacccagaaagccaccctcgtgtgcctggctaccggcttctaccccgaccatgtggaactgtcttggtgggtcaacggcaaagaggtgcacagcggcgtgtgtaccgacccccagccactgaaagaacagcccgccctgaacgacagccggtactgcctgagcagcagactgagagtgtccgccaccttctggcagaacccccggaaccacttcagatgccaggtgcagttctacggcctgagcgagaacgacgagtggacccaggacagagccaagcccgtgacccagatcgtgtctgccgaagcctggggcagagccgatgatgtgattaagatccactggcaggaaaagaagtccaacaccatcctgggcagccaggaaggcaacaccatgaagaccaacgacacctacatgaagttcagctggctgaccgtgcccgagaagtccctggacaaagaacacagatgcatcgtgcggcacgaaaacaacaagaacggcgtggaccaggaaatcatcttcccacccatcaagaccgatgtgattacaatggaccccaaggacaactgctccaaggacgccaacgataccctgctgctccagctgaccaacaccagcgcctactacatgtacttgttgctgctgctgaagtccgtggtgtacttcgccatcatcacatgctgcctgctgcggagaaccgccttctgctgcaacggcgagaagtctagggccaagcgatctggatctggagcaacaaacttctcactactcaaacaagcaggtgacgtggaggagaatcccgggcctactagtatggactggatttggcgcatccttttccttgtcggcgctgctaccggcgcgcattccttcgaacaagttcagcttcaacagcctggcgctgagctggtcaaacctggcgcttctgtgaagatgagctgcaaagccagcggctacgccttcagcagctactggatcaactggatgaagcagaaacccggccagggactcgaatggatcggccaaatctatcccggcgacggcgacaccaactacaacggcaagttcaagggcagagccacactgaccgccgatacctctagcagcacagcctacatgcagctgagcagcctgaccagcgaagatagcgccgtgtacttctgtgcccggtccatcacaacagtcgtgggctgcgctatggactattggggccagggaacaagcgtgaccgtgtctagtacgcgtatccagaaccctgatcctgccgtgtaccagctgcgggatagcaagagcagcgacaagagcgtgtgtctgttcaccgacttcgacagccagaccaacgtgtcccagagcaaggactccgacgtgtacatcaccgataagtgcgtgctggacatgcggagcatggacttcaagagcaactccgccgtggcctggtccaacaagtccgatttcgcctgcgccaacgccttcaacaacagcattatccccgaggacacattcttcccaagccccgagagcagcgactccaccgaccacgtgaagcccaaagagacagagaacaccaagcagcccagcaagagctgccacaagcccaaggccatcgtgcacaccgagaaagtgaacatgatgagcctgaccgtgctgggcctgcggatgctgttcgccaaaaccgtggccgtgaacttcctgctgaccgccaagctgttcttcctctaa

SEQ ID NO: 8060 - DNA, 2632 bp, synthetic construct
  source 1..2632: mol_type = other DNA
atggccttaccagtgaccgccttgctcctgccgctggccttgctgctccacgccgccaggccggaagtgcagctggttgaatctggcggaggactggttcagcctggcggatctctgagactgtcttgtgccgcctctggcttcgccagcgactactatatcatcggctggttcagacaggcccctggcaaagagagagagggcgtcagctgtatcagcagcagatacgccaacaccaactacgccgacagcgtgaagggcagattcaccatcagccgggacaacgccaagaacaccgtgtacctccagatgaacagcctgaagcctgaggacaccgccgtgtactactgtgccgccgacaccagaagatacacctgtcctgacattgccaccatgcaccggaacttcgattcttggggccagggcacactggtcaccgtttcttctggtaccggcggaggcggatctggcggcggaggtagcggtggcggaggatctgaattcgacatccagatgacacagagccctagcagcctgtctgccagcgtgggagacagagtgaccatcacatgcaaggccagcgaccacatcaacaactggctggcctggtatcagcagaagcctggacaggcccctaagctgctgatctacggcgctaccacactggaaacaggcgtgcccagcagattttctggcagcggctctggcaccgactacaccctgacaatatccagcctccagcctgaggacttcgccacctactactgtcagcagagctggaacaccccttggacattcggccagggcaccaagctggaaatcaagagactcgagatccagaaccctgatcctgccgtgtaccagctgcgggatagcaagagcagcgacaagagcgtgtgtctgttcaccgacttcgacagccagaccaacgtgtcccagagcaaggactccgacgtgtacatcatcgataagtgcgtgctggacatgcggcgacaagcctagcctgagcgccagatatgttcgggttaagttttccagatccgcagacgcacccgcttaccaacaacagcattatccccgaggacacattcttcccaagccccgagagcagctgcgacgtgaagctggtggaaaagaagagacagagaacaccaagcagcccagcaagagctgccacaagcccaaggccatcgtgcacaccgagaaagtgaacatgatgagcctgaccgtgctgggcctgcggatgctgttcgccaaaaccgtggccgtgaacttcctgctgaccgccaagctgttcttcctctctagtcgcgccaagagaagcggatctggcgtgaagcagaccctgaatttcgacctgctgaagctggctggcgacgtggaatccaacccaggccctactagtatggactggatttggcgcatccttttccttgtcggcgctgctaccggcgcgcattccttcgaacaagttcagcttcaacagcctggcgctgagctggtcaaacctggcgcttctgtgaagatgagctgcaaagccagcggctacgccttcagcagctactggatcaactggatgaagcagaaacccggccagggactcgaatggatcggccaaatctatcccggcgacggcgacaccaactacaacggcaagttcaagggcagagccacactgaccgccgatacctctagcagcacagcctacatgcagctgagcagcctgaccagcgaagatagcgccgtgtacttctgtgcccggtccatcacaacagtcgtgggctgcgctatggactattggggccagggaacaagcgtgaccgtgtctagtacgcgtgaggacctgaagaacgtgttcccacctgaggtggccgtgttcgagcctagcgaggccgagatcagccacacccagaaagccaccctcgtgtgcctggctaccggcttctaccccgaccatgtggaactgtcttggtgggtcaacggcaaagaggtgcacagcggcgtgtgtaccgacccccagccactgaaagaacagcccgccctgaacgacagccggtactgcctgagcagcagactgagagtgtccgccaccttctggcagaacccccggaaccacttcagatgccaggtgcagttctacggcctgagcgagaacgacgagtggacccaggacagagccaagcccgtgacccagatcgtgtctgccgaagcctggggcagagccgatgatgtgattaagatccactggcaggaaaagaagtccaacaccatcctgggcagccaggaaggcaacaccatgaagaccaacgacacctacatgaagttcagctggctgaccgtgcccgagaagtccctggacaaagaacacagatgcatcgtgcggcacgaaaacaacaagaacggcgtggaccaggaaatcatcttcccacccatcaagaccgatgtgattacaatggaccccaaggacaactgctccaaggacgccaacgataccctgctgctccagctgaccaacaccagcgcctactacatgtacttgttgctgctgctgaagtccgtggtgtacttcgccatcatcacatgctgcctgctgcggagaaccgccttctgctgcaacggcgagaagtcttaa

SEQ ID NO: 8061 - DNA, 2632 bp, synthetic construct
  source 1..2632: mol_type = other DNA
atggccttaccagtgaccgccttgctcctgccgctggccttgctgctccacgccgccaggccggaagtgcagctggttgaatctggcggaggactggttcagcctggcggatctctgagactgagctgtgaagccagcggcttcgccagcgacgattacatcatcggctggttcagacaggcccctggcaaagagagagagggcgtcagctgcatcagctctaagtacgccaacaccgtgtacaccgacagcgtgaagggcagattcagactgagcagaggcaccgccaagaataccgtgtacctccagatgagcgccctgaagcctgaggataccgccgtgtactactgcgctatggacagccgcagagtgacatgccctgagatcagcaccatgcaccggaacttcgattcttggggccagggcacactggtcacagtgtcatctggtaccggcggaggcggatctggcggcggaggtagcggtggcggaggatctgaattcgacatccagatgacacagagccctagcagcctgtctgccagcgtgggagacagagtgaccatcacatgcaaggccagcgaccacatcaacaactggctggcctggtatcagcagaagcctggacaggcccctaagctgctgatctacggcgctaccacactggaaacaggcgtgcccagcagattttctggcagcggctctggcaccgactacaccctgacaatatccagcctccagcctgaggacttcgccacctactactgtcagcagagctggaacaccccttggacattcggccagggcaccaagctggaaatcaagagactcgagatccagaaccctgatcctgccgtgtaccagctgcgggatagcaagagcagcgacaagagcgtgtgtctgttcaccgacttcgacagccagaccaacgtgtcccagagcaaggactccgacgtgtacatcatcgataagtgcgtgctggacatgcggcgacaagcctagcctgagcgccagatatgttcgggttaagttttccagatccgcagacgcacccgcttaccaacaacagcattatccccgaggacacattcttcccaagccccgagagcagctgcgacgtgaagctggtggaaaagaagagacagagaacaccaagcagcccagcaagagctgccacaagcccaaggccatcgtgcacaccgagaaagtgaacatgatgagcctgaccgtgctgggcctgcggatgctgttcgccaaaaccgtggccgtgaacttcctgctgaccgccaagctgttcttcctctctagtcgcgccaagagaagcggatctggcgtgaagcagaccctgaatttcgacctgctgaagctggctggcgacgtggaatccaacccaggccctactagtatggactggatttggcgcatccttttccttgtcggcgctgctaccggcgcgcattccttcgaacaagttcagcttcaacagcctggcgctgagctggtcaaacctggcgcttctgtgaagatgagctgcaaagccagcggctacgccttcagcagctactggatcaactggatgaagcagaaacccggccagggactcgaatggatcggccaaatctatcccggcgacggcgacaccaactacaacggcaagttcaagggcagagccacactgaccgccgatacctctagcagcacagcctacatgcagctgagcagcctgaccagcgaagatagcgccgtgtacttctgtgcccggtccatcacaacagtcgtgggctgcgctatggactattggggccagggaacaagcgtgaccgtgtctagtacgcgtgaggacctgaagaacgtgttcccacctgaggtggccgtgttcgagcctagcgaggccgagatcagccacacccagaaagccaccctcgtgtgcctggctaccggcttctaccccgaccatgtggaactgtcttggtgggtcaacggcaaagaggtgcacagcggcgtgtgtaccgacccccagccactgaaagaacagcccgccctgaacgacagccggtactgcctgagcagcagactgagagtgtccgccaccttctggcagaacccccggaaccacttcagatgccaggtgcagttctacggcctgagcgagaacgacgagtggacccaggacagagccaagcccgtgacccagatcgtgtctgccgaagcctggggcagagccgatgatgtgattaagatccactggcaggaaaagaagtccaacaccatcctgggcagccaggaaggcaacaccatgaagaccaacgacacctacatgaagttcagctggctgaccgtgcccgagaagtccctggacaaagaacacagatgcatcgtgcggcacgaaaacaacaagaacggcgtggaccaggaaatcatcttcccacccatcaagaccgatgtgattacaatggaccccaaggacaactgctccaaggacgccaacgataccctgctgctccagctgaccaacaccagcgcctactacatgtacttgttgctgctgctgaagtccgtggtgtacttcgccatcatcacatgctgcctgctgcggagaaccgccttctgctgcaacggcgagaagtcttaa

SEQ ID NO: 8062 - DNA, 2611 bp, synthetic construct
  source 1..2611: mol_type = other DNA
atggccttaccagtgaccgccttgctcctgccgctggccttgctgctccacgccgccaggccggcatgccaagtcaaactggaagaaagcggtggcggcctggtgcaacctggcgaatctctgagactgagctgtagcgccagcggctccatcttcaaggtgttcagagtgttcgccatgagctggtacaggcaaggccctggcaagcagagagagctggtcgcctctatcagcagcggcgagacaaccacatacgccgaatctgtgaaaggccggttcaccatcagccgggataatgccaagaataccgcctatctccagatggactccctgaagcctgaagatacagctgtgtactactgcaacgccgaccataccttcaccggcgatttttggggccagggaacccaagtgaccgtgtctagtggtaccggcggaggcggatctggcggcggaggtagcggtggcggaggatctgaattcgacatccagatgacacagagccctagcagcctgtctgccagcgtgggagacagagtgaccatcacatgcaaggccagcgaccacatcaacaactggctggcctggtatcagcagaagcctggacaggcccctaagctgctgatctacggcgctaccacactggaaacaggcgtgcccagcagattttctggcagcggctctggcaccgactacaccctgacaatatccagcctccagcctgaggacttcgccacctactactgtcagcagagctggaacaccccttggacattcggccagggcaccaagctggaaatcaagagactcgagatccagaaccctgatcctgccgtgtaccagctgcgggatagcaagagcagcgacaagagcgtgtgtctgttcaccgacttcgacagccagaccaacgtgtcccagagcaaggactccgacgtgtacatcatcgataagtgcgtgctggacatgcggcgacaagcctagcctgagcgccagatatgttcgggttaagttttccagatccgcagacgcacccgcttaccaacaacagcattatccccgaggacacattcttcccaagccccgagagcagctgcgacgtgaagctggtggaaaagaagagacagagaacaccaagcagcccagcaagagctgccacaagcccaaggccatcgtgcacaccgagaaagtgaacatgatgagcctgaccgtgctgggcctgcggatgctgttcgccaaaaccgtggccgtgaacttcctgctgaccgccaagctgttcttcctctctagtcgcgccaagagaagcggatctggcgtgaagcagaccctgaatttcgacctgctgaagctggctggcgacgtggaatccaacccaggccctactagtatggactggatttggcgcatccttttccttgtcggcgctgctaccggcgcgcattccttcgaacaagttcagcttcaacagcctggcgctgagctggtcaaacctggcgcttctgtgaagatgagctgcaaagccagcggctacgccttcagcagctactggatcaactggatgaagcagaaacccggccagggactcgaatggatcggccaaatctatcccggcgacggcgacaccaactacaacggcaagttcaagggcagagccacactgaccgccgatacctctagcagcacagcctacatgcagctgagcagcctgaccagcgaagatagcgccgtgtacttctgtgcccggtccatcacaacagtcgtgggctgcgctatggactattggggccagggaacaagcgtgaccgtgtctagtacgcgtgaggacctgaagaacgtgttcccacctgaggtggccgtgttcgagcctagcgaggccgagatcagccacacccagaaagccaccctcgtgtgcctggctaccggcttctaccccgaccatgtggaactgtcttggtgggtcaacggcaaagaggtgcacagcggcgtgtgtaccgacccccagccactgaaagaacagcccgccctgaacgacagccggtactgcctgagcagcagactgagagtgtccgccaccttctggcagaacccccggaaccacttcagatgccaggtgcagttctacggcctgagcgagaacgacgagtggacccaggacagagccaagcccgtgacccagatcgtgtctgccgaagcctggggcagagccgatgatgtgattaagatccactggcaggaaaagaagtccaacaccatcctgggcagccaggaaggcaacaccatgaagaccaacgacacctacatgaagttcagctggctgaccgtgcccgagaagtccctggacaaagaacacagatgcatcgtgcggcacgaaaacaacaagaacggcgtggaccaggaaatcatcttcccacccatcaagaccgatgtgattacaatggaccccaaggacaactgctccaaggacgccaacgataccctgctgctccagctgaccaacaccagcgcctactacatgtacttgttgctgctgctgaagtccgtggtgtacttcgccatcatcacatgctgcctgctgcggagaaccgccttctgctgcaacggcgagaagtcttaa

SEQ ID NO: 8063 - DNA, 2592 bp, synthetic construct
  source 1..2592: mol_type = other DNA
atggccttaccagtgaccgccttgctcctgccgctggccttgctgctccacgccgccaggccggacatccagatgacacagagccctagcagcctgtctgccagcgtgggagacagagtgaccatcacatgcaaggccagcgaccacatcaacaactggctggcctggtatcagcagaagcctggacaggcccctaagctgctgatctacggcgctaccacactggaaacaggcgtgcccagcagattttctggcagcggctctggcaccgactacaccctgacaatatccagcctccagcctgaggacttcgccacctactactgtcagcagagctggaacaccccttggacattcggccagggcaccaagctggaaatcaagagactcgaggacctgaagaacgtgttcccacctgaggtggccgtgttcgagcctagcgaggccgagatcagccacacccagaaagccaccctcgtgtgcctggctaccggcttctaccccgaccatgtggaactgtcttggtgggtcaacggcaaagaggtgcacagcggcgtgtgtaccgacccccagccactgaaagaacagcccgccctgaacgacagccggtactgcctgagcagcagactgagagtgtccgccaccttctggcagaacccccggaaccacttcagatgccaggtgcagttctacggcctgagcgagaacgacgagtggacccaggacagagccaagcccgtgacccagatcgtgtctgccgaagcctggggcagagccgatgatgtgattaagatccactggcaggaaaagaagtccaacaccatcctgggcagccaggaaggcaacaccatgaagaccaacgacacctacatgaagttcagctggctgaccgtgcccgagaagtccctggacaaagaacacagatgcatcgtgcggcacgaaaacaacaagaacggcgtggaccaggaaatcatcttcccacccatcaagaccgatgtgattacaatggaccccaaggacaactgctccaaggacgccaacgataccctgctgctccagctgaccaacaccagcgcctactacatgtacttgttgctgctgctgaagtccgtggtgtacttcgccatcatcacatgctgcctgctgcggagaaccgccttctgctgcaacggcgagaagtctagggccaagcgatctggatctggagcaacaaacttctcactactcaaacaagcaggtgacgtggaggagaatcccgggcctactagtgccaccatggactggatttggcgcatccttttccttgtcggcgctgctaccggcgcccattccgggcccgaagtgcagctggttgaatctggcggaggactggttcaggctggcggatctctgagactgtcttgtgccgccagcggcagaacctttagcatgggctggtttagacaggcccctggcaaagagagagagttcgtcgccgccatcacatactctggcggcagcccttactacgccgactctgtgaagggcagattcaccatcagccgggacaacgccaagaacaccgtgtacctccagatgaacagcctgaagcctgaggacaccgccgtgtactactgcgccgccaatccaacatacggcagcgactggaacgccgagaattggggccagggaacccaagtgacagtgtctagcggatccggcggcggaggatctggcggaggcggatctgggggcggaggctctttcgaacaagttcagcttcaacagcctggcgctgagctggtcaaacctggcgcttctgtgaagatgagctgcaaagccagcggctacgccttcagcagctactggatcaactggatgaagcagaaacccggccagggactcgaatggatcggccaaatctatcccggcgacggcgacaccaactacaacggcaagttcaagggcagagccacactgaccgccgatacctctagcagcacagcctacatgcagctgagcagcctgaccagcgaagatagcgccgtgtacttctgtgcccggtccatcacaacagtcgtgggctgcgctatggactattggggccagggaacaagcgtgaccgtgtctagtacgcgtatccagaaccctgatcctgccgtgtaccagctgcgggatagcaagagcagcgacaagagcgtgtgtctgttcaccgacttcgacagccagaccaacgtgtcccagagcaaggactccgacgtgtacatcaccgataagtgcgtgctggacatgcggagcatggacttcaagagcaactccgccgtggcctggtccaacaagtccgatttcgcctgcgccaacgccttcaacaacagcattatccccgaggacacattcttcccaagccccgagagcagcgactccaccgaccacgtgaagcccaaagagacagagaacaccaagcagcccagcaagagctgccacaagcccaaggccatcgtgcacaccgagaaagtgaacatgatgagcctgaccgtgctgggcctgcggatgctgttcgccaaaaccgtggccgtgaacttcctgctgaccgccaagctgttcttcctctaa

SEQ ID NO: 8064 - DNA, 2595 bp, synthetic construct
  source 1..2595: mol_type = other DNA
atggccttaccagtgaccgccttgctcctgccgctggccttgctgctccacgccgccaggccggacatccagatgacacagagccctagcagcctgtctgccagcgtgggagacagagtgaccatcacatgcaaggccagcgaccacatcaacaactggctggcctggtatcagcagaagcctggacaggcccctaagctgctgatctacggcgctaccacactggaaacaggcgtgcccagcagattttctggcagcggctctggcaccgactacaccctgacaatatccagcctccagcctgaggacttcgccacctactactgtcagcagagctggaacaccccttggacattcggccagggcaccaagctggaaatcaagagactcgaggacctgaagaacgtgttcccacctgaggtggccgtgttcgagcctagcgaggccgagatcagccacacccagaaagccaccctcgtgtgcctggctaccggcttctaccccgaccatgtggaactgtcttggtgggtcaacggcaaagaggtgcacagcggcgtgtgtaccgacccccagccactgaaagaacagcccgccctgaacgacagccggtactgcctgagcagcagactgagagtgtccgccaccttctggcagaacccccggaaccacttcagatgccaggtgcagttctacggcctgagcgagaacgacgagtggacccaggacagagccaagcccgtgacccagatcgtgtctgccgaagcctggggcagagccgatgatgtgattaagatccactggcaggaaaagaagtccaacaccatcctgggcagccaggaaggcaacaccatgaagaccaacgacacctacatgaagttcagctggctgaccgtgcccgagaagtccctggacaaagaacacagatgcatcgtgcggcacgaaaacaacaagaacggcgtggaccaggaaatcatcttcccacccatcaagaccgatgtgattacaatggaccccaaggacaactgctccaaggacgccaacgataccctgctgctccagctgaccaacaccagcgcctactacatgtacttgttgctgctgctgaagtccgtggtgtacttcgccatcatcacatgctgcctgctgcggagaaccgccttctgctgcaacggcgagaagtctagggccaagcgatctggatctggagcaacaaacttctcactactcaaacaagcaggtgacgtggaggagaatcccgggcctactagtgccaccatggactggatttggcgcatccttttccttgtcggcgctgctaccggcgcccattccgggcccgaagtgcaactggtggaatctgggggcggactggtgcagccaggcggaagtctgaggctgtcttgtgccgcctccggcagcatcttcggcttcaacgacatggcctggtatcggcaggctcccggaaaacagcgcgagctggtggctctgattagcagagtgggcgtgaccagcagcgccgactctgtgaagggcagattcacaatctccagagtgaacgccaaggatacagtgtacctccagatgaactctctgaaacctgaggatacagcagtgtactattgctacatggaccagcggctggacggcagcacactggcctactggggacagggaactcaagtgacagtgtctagcggatccggcggcggaggatctggcggaggcggatctgggggcggaggctctttcgaacaagttcagcttcaacagcctggcgctgagctggtcaaacctggcgcttctgtgaagatgagctgcaaagccagcggctacgccttcagcagctactggatcaactggatgaagcagaaacccggccagggactcgaatggatcggccaaatctatcccggcgacggcgacaccaactacaacggcaagttcaagggcagagccacactgaccgccgatacctctagcagcacagcctacatgcagctgagcagcctgaccagcgaagatagcgccgtgtacttctgtgcccggtccatcacaacagtcgtgggctgcgctatggactattggggccagggaacaagcgtgaccgtgtctagtacgcgtatccagaaccctgatcctgccgtgtaccagctgcgggatagcaagagcagcgacaagagcgtgtgtctgttcaccgacttcgacagccagaccaacgtgtcccagagcaaggactccgacgtgtacatcaccgataagtgcgtgctggacatgcggagcatggacttcaagagcaactccgccgtggcctggtccaacaagtccgatttcgcctgcgccaacgccttcaacaacagcattatccccgaggacacattcttcccaagccccgagagcagcgactccaccgaccacgtgaagcccaaagagacagagaacaccaagcagcccagcaagagctgccacaagcccaaggccatcgtgcacaccgagaaagtgaacatgatgagcctgaccgtgctgggcctgcggatgctgttcgccaaaaccgtggccgtgaacttcctgctgaccgccaagctgttcttcctctaa

SEQ ID NO: 8065 - DNA, 2583 bp, synthetic construct
  source 1..2583: mol_type = other DNA
atggccttaccagtgaccgccttgctcctgccgctggccttgctgctccacgccgccaggccggacatccagatgacacagagccctagcagcctgtctgccagcgtgggagacagagtgaccatcacatgcaaggccagcgaccacatcaacaactggctggcctggtatcagcagaagcctggacaggcccctaagctgctgatctacggcgctaccacactggaaacaggcgtgcccagcagattttctggcagcggctctggcaccgactacaccctgacaatatccagcctccagcctgaggacttcgccacctactactgtcagcagagctggaacaccccttggacattcggccagggcaccaagctggaaatcaagagactcgaggacctgaagaacgtgttcccacctgaggtggccgtgttcgagcctagcgaggccgagatcagccacacccagaaagccaccctcgtgtgcctggctaccggcttctaccccgaccatgtggaactgtcttggtgggtcaacggcaaagaggtgcacagcggcgtgtgtaccgacccccagccactgaaagaacagcccgccctgaacgacagccggtactgcctgagcagcagactgagagtgtccgccaccttctggcagaacccccggaaccacttcagatgccaggtgcagttctacggcctgagcgagaacgacgagtggacccaggacagagccaagcccgtgacccagatcgtgtctgccgaagcctggggcagagccgatgatgtgattaagatccactggcaggaaaagaagtccaacaccatcctgggcagccaggaaggcaacaccatgaagaccaacgacacctacatgaagttcagctggctgaccgtgcccgagaagtccctggacaaagaacacagatgcatcgtgcggcacgaaaacaacaagaacggcgtggaccaggaaatcatcttcccacccatcaagaccgatgtgattacaatggaccccaaggacaactgctccaaggacgccaacgataccctgctgctccagctgaccaacaccagcgcctactacatgtacttgttgctgctgctgaagtccgtggtgtacttcgccatcatcacatgctgcctgctgcggagaaccgccttctgctgcaacggcgagaagtctagggccaagcgatctggatctggagcaacaaacttctcactactcaaacaagcaggtgacgtggaggagaatcccgggcctactagtgccaccatggactggatttggcgcatccttttccttgtcggcgctgctaccggcgcccattccgggcccgaggtgcagctggttgaatctggcggaggactggttcaggctggcggatctctgagactgtcttgtgccgccagcggctctgtgttcagcggcaatgtgatgggctggtacagacaggcccctggcaaagaaagagagtgggttgccgccattgccagcggcggcagcatctactacagagactctgtgaagggcagattcaccatcagccgggacaacgccaagaacaccgtgtacctccagatgaacagcctgaagcctgaggacaccgccgtgtactactgcaactctcaccctcctacactgccctattggggcctgggaacccaagtgacagtgtcctctggatccggcggcggaggatctggcggaggcggatctgggggcggaggctctttcgaacaagttcagcttcaacagcctggcgctgagctggtcaaacctggcgcttctgtgaagatgagctgcaaagccagcggctacgccttcagcagctactggatcaactggatgaagcagaaacccggccagggactcgaatggatcggccaaatctatcccggcgacggcgacaccaactacaacggcaagttcaagggcagagccacactgaccgccgatacctctagcagcacagcctacatgcagctgagcagcctgaccagcgaagatagcgccgtgtacttctgtgcccggtccatcacaacagtcgtgggctgcgctatggactattggggccagggaacaagcgtgaccgtgtctagtacgcgtatccagaaccctgatcctgccgtgtaccagctgcgggatagcaagagcagcgacaagagcgtgtgtctgttcaccgacttcgacagccagaccaacgtgtcccagagcaaggactccgacgtgtacatcaccgataagtgcgtgctggacatgcggagcatggacttcaagagcaactccgccgtggcctggtccaacaagtccgatttcgcctgcgccaacgccttcaacaacagcattatccccgaggacacattcttcccaagccccgagagcagcgactccaccgaccacgtgaagcccaaagagacagagaacaccaagcagcccagcaagagctgccacaagcccaaggccatcgtgcacaccgagaaagtgaacatgatgagcctgaccgtgctgggcctgcggatgctgttcgccaaaaccgtggccgtgaacttcctgctgaccgccaagctgttcttcctctaa

SEQ ID NO: 8066 - DNA, 2577 bp, synthetic construct
  source 1..2577: mol_type = other DNA
atggccttaccagtgaccgccttgctcctgccgctggccttgctgctccacgccgccaggccggacatccagatgacacagagccctagcagcctgtctgccagcgtgggagacagagtgaccatcacatgcaaggccagcgaccacatcaacaactggctggcctggtatcagcagaagcctggacaggcccctaagctgctgatctacggcgctaccacactggaaacaggcgtgcccagcagattttctggcagcggctctggcaccgactacaccctgacaatatccagcctccagcctgaggacttcgccacctactactgtcagcagagctggaacaccccttggacattcggccagggcaccaagctggaaatcaagagactcgaggacctgaagaacgtgttcccacctgaggtggccgtgttcgagcctagcgaggccgagatcagccacacccagaaagccaccctcgtgtgcctggctaccggcttctaccccgaccatgtggaactgtcttggtgggtcaacggcaaagaggtgcacagcggcgtgtgtaccgacccccagccactgaaagaacagcccgccctgaacgacagccggtactgcctgagcagcagactgagagtgtccgccaccttctggcagaacccccggaaccacttcagatgccaggtgcagttctacggcctgagcgagaacgacgagtggacccaggacagagccaagcccgtgacccagatcgtgtctgccgaagcctggggcagagccgatgatgtgattaagatccactggcaggaaaagaagtccaacaccatcctgggcagccaggaaggcaacaccatgaagaccaacgacacctacatgaagttcagctggctgaccgtgcccgagaagtccctggacaaagaacacagatgcatcgtgcggcacgaaaacaacaagaacggcgtggaccaggaaatcatcttcccacccatcaagaccgatgtgattacaatggaccccaaggacaactgctccaaggacgccaacgataccctgctgctccagctgaccaacaccagcgcctactacatgtacttgttgctgctgctgaagtccgtggtgtacttcgccatcatcacatgctgcctgctgcggagaaccgccttctgctgcaacggcgagaagtctagggccaagcgatctggatctggagcaacaaacttctcactactcaaacaagcaggtgacgtggaggagaatcccgggcctactagtgccaccatggactggatttggcgcatccttttccttgtcggcgctgctaccggcgcccattccgggcccgaagttcagctgctggaatctggcggaggactcgttcaacctggcggctctctgagactgagctgtgccgcttctggcttcagcttctctagctacgccctgagctgggttcgacaagctcccggaaagggccttgaatgggtgtccagcatcggcgagaatgacggcaccacagactatgccgatgccgtgaaaggccggtttaccatcagcagagacaattccaagaacacgctctatctgcaaatgaactccctgcgcgtggaagatacagccgtgtattattgcgtgaaggacggcatccactggggacagggaaccctggttacagtgtctagcggatccggcggcggaggatctggcggaggcggatctgggggcggaggctctttcgaacaagttcagcttcaacagcctggcgctgagctggtcaaacctggcgcttctgtgaagatgagctgcaaagccagcggctacgccttcagcagctactggatcaactggatgaagcagaaacccggccagggactcgaatggatcggccaaatctatcccggcgacggcgacaccaactacaacggcaagttcaagggcagagccacactgaccgccgatacctctagcagcacagcctacatgcagctgagcagcctgaccagcgaagatagcgccgtgtacttctgtgcccggtccatcacaacagtcgtgggctgcgctatggactattggggccagggaacaagcgtgaccgtgtctagtacgcgtatccagaaccctgatcctgccgtgtaccagctgcgggatagcaagagcagcgacaagagcgtgtgtctgttcaccgacttcgacagccagaccaacgtgtcccagagcaaggactccgacgtgtacatcaccgataagtgcgtgctggacatgcggagcatggacttcaagagcaactccgccgtggcctggtccaacaagtccgatttcgcctgcgccaacgccttcaacaacagcattatccccgaggacacattcttcccaagccccgagagcagcgactccaccgaccacgtgaagcccaaagagacagagaacaccaagcagcccagcaagagctgccacaagcccaaggccatcgtgcacaccgagaaagtgaacatgatgagcctgaccgtgctgggcctgcggatgctgttcgccaaaaccgtggccgtgaacttcctgctgaccgccaagctgttcttcctctaa

SEQ ID NO: 8067 - DNA, 3684 bp, synthetic construct
  source 1..3684: mol_type = other DNA
atgggacccagactgctgttttgggctctgctgtgtctgctcggcacaggacctgttgaagctggcgtgacacagagccccacacacctgattaagaccagaggccagcaggccacactgagatgcagccctatcagcggccacaccagcgtgtactggtatcagcaggctctcggactgggcctccagttcctgctttggtacgacgagggcgaagagagaaaccggggcaacttccctcctcggttttccggcagacagttccccaactacagcagcgagctgaacgtgaacgccctggaactggaagatagcgccctgtacctgtgtgcctcttctcttggtggacctcgcggactggctggactgagaggggatgagcagtttttcggccctggcaccagactgaccgtgctggaaggtaccggcggaggcggatctggcggcggagaattcgacatccagatgacacagagccctagcagcctgtctgccagcgtgggagacagagtgaccatcacatgcaaggccagcgaccacatcaacaactggctggcctggtatcagcagaagcctggacaggcccctaagctgctgatctacggcgctaccacactggaaacaggcgtgcccagcagattttctggcagcggctctggcaccgactacaccctgacaatatccagcctccagcctgaggacttcgccacctactactgtcagcagagctggaacaccccttggacattcggccagggcaccaagctggaaatcaagagactcgaggacctgaagaacgtgttcccacctgaggtggccgtgttcgagcctagcgaggccgagatcagccacacccagaaagccaccctcgtgtgcctggctaccggcttctaccccgaccatgtggaactgtcttggtgggtcaacggcaaagaggtgcacagcggcgtgtgtaccgacccccagccactgaaagaacagcccgccctgaacgacagccggtactgcctgagcagcagactgagagtgtccgccaccttctggcagaacccccggaaccacttcagatgccaggtgcagttctacggcctgagcgagaacgacgagtggacccaggacagagccaagcccgtgacccagatcgtgtctgccgaagcctggggcagagccgatgatgtgattaagatccactggcaggaaaagaagtccaacaccatcctgggcagccaggaaggcaacaccatgaagaccaacgacacctacatgaagttcagctggctgaccgtgcccgagaagtccctggacaaagaacacagatgcatcgtgcggcacgaaaacaacaagaacggcgtggaccaggaaatcatcttcccacccatcaagaccgatgtgattacaatggaccccaaggacaactgctccaaggacgccaacgataccctgctgctccagctgaccaacaccagcgcctactacatgtacttgttgctgctgctgaagtccgtggtgtacttcgccatcatcacatgctgcctgctgcggagaaccgccttctgctgcaacggcgagaagtctagggccaagcgatctggatctggagcaacaaacttctcactactcaaacaagcaggtgacgtggaggagaatcccgggcctactagtgccaccatggactggatttggcgcatccttttccttgtcggcgctgctaccggcgcccattccgggcccgaagtgcagctggttgaatctggcggaggactggttcaggctggcggatctctgagactgtcttgtgccgccagcggcagaacctttagcatgggctggtttagacaggcccctggcaaagagagagagttcgtcgccgccatcacatactctggcggcagcccttactacgccgactctgtgaagggcagattcaccatcagccgggacaacgccaagaacaccgtgtacctccagatgaacagcctgaagcctgaggacaccgccgtgtactactgcgccgccaatccaacatacggcagcgactggaacgccgagaattggggccagggaacccaagtgacagtgtctagcggatccggcggcggaggatctggcggaggcggatctgggggcggaggctctttcgaacaagttcagcttcaacagcctggcgctgagctggtcaaacctggcgcttctgtgaagatgagctgcaaagccagcggctacgccttcagcagctactggatcaactggatgaagcagaaacccggccagggactcgaatggatcggccaaatctatcccggcgacggcgacaccaactacaacggcaagttcaagggcagagccacactgaccgccgatacctctagcagcacagcctacatgcagctgagcagcctgaccagcgaagatagcgccgtgtacttctgtgcccggtccatcacaacagtcgtgggctgcgctatggactattggggccagggaacaagcgtgaccgtgtctagtacgcgtatccagaaccctgatcctgccgtgtaccagctgcgggatagcaagagcagcgacaagagcgtgtgtctgttcaccgacttcgacagccagaccaacgtgtcccagagcaaggactccgacgtgtacatcaccgataagtgcgtgctggacatgcggagcatggacttcaagagcaactccgccgtggcctggtccaacaagtccgatttcgcctgcgccaacgccttcaacaacagcattatccccgaggacacattcttcccaagccccgagagcagcgactccaccgaccacgtgaagcccaaagagacagagaacaccaagcagcccagcaagagctgccacaagcccaaggccatcgtgcacaccgagaaagtgaacatgatgagcctgaccgtgctgggcctgcggatgctgttcgccaaaaccgtggccgtgaacttcctgctgaccgccaagctgttcttcctccgcgccaagagaagcggatctggcgtgaagcagaccctgaatttcgacctgctgaagctggctggcgacgtggaatccaacccaggcccttctagaggccatatgaccgagtacaagcccacggtgcgcctcgccacccgcgacgacgtccccagggccgtacgcaccctcgccgccgcgttcgccgactaccccgccacgcgccacaccgtcgatccggaccgccacatcgagcgggtcaccgagctgcaagaactcttcctcacgcgcgtcgggctcgacatcggcaaggtgtgggtcgcggacgacggcgccgcggtggcggtctggaccacgccggagagcgtcgaagcgggggcggtgttcgccgagatcggcccgcgcatggccgagttgagcggttcccggctggccgcgcagcaacagatggaaggcctcctggcgccgcaccggcccaaggagcccgcgtggttcctggccaccgtcggcgtctcgcccgaccaccagggcaagggtctgggcagcgccgtcgtgctccccggagtggaggcggccgagcgcgccggggtgcccgccttcctggagacctccgcgccccgcaacctccccttctacgagcggctcggcttcaccgtcaccgccgacgtcgaggtgcccgaaggaccgcgcacctggtgcatgacccgcaagcccggtgcctga

SEQ ID NO: 8068 - DNA, 3681 bp, synthetic construct
  source 1..3681: mol_type = other DNA
atgggacccagactgctgttttgggctctgctgtgtctgctcggcacaggacctgttgaagctggcgtgacacagagccccacacacctgattaagaccagaggccagcaggccacactgagatgcagccctatcagcggccacaccagcgtgtactggtatcagcaggctctcggactgggcctccagttcctgctttggtacgacgagggcgaagagagaaaccggggcaacttccctcctcggttttccggcagacagttccccaactacagcagcgagctgaacgtgaacgccctggaactggaagatagcgccctgtacctgtgtgccagctctctcggcggagatgaactgggagccgatggcaacgagcagttctttggccctggcaccagactgaccgtgctggaaggtaccggcggaggcggatctggcggcggaagcgaattcgacatccagatgacacagagccctagcagcctgtctgccagcgtgggagacagagtgaccatcacatgcaaggccagcgaccacatcaacaactggctggcctggtatcagcagaagcctggacaggcccctaagctgctgatctacggcgctaccacactggaaacaggcgtgcccagcagattttctggcagcggctctggcaccgactacaccctgacaatatccagcctccagcctgaggacttcgccacctactactgtcagcagagctggaacaccccttggacattcggccagggcaccaagctggaaatcaagagactcgaggacctgaagaacgtgttcccacctgaggtggccgtgttcgagcctagcgaggccgagatcagccacacccagaaagccaccctcgtgtgcctggctaccggcttctaccccgaccatgtggaactgtcttggtgggtcaacggcaaagaggtgcacagcggcgtgtgtaccgacccccagccactgaaagaacagcccgccctgaacgacagccggtactgcctgagcagcagactgagagtgtccgccaccttctggcagaacccccggaaccacttcagatgccaggtgcagttctacggcctgagcgagaacgacgagtggacccaggacagagccaagcccgtgacccagatcgtgtctgccgaagcctggggcagagccgatgatgtgattaagatccactggcaggaaaagaagtccaacaccatcctgggcagccaggaaggcaacaccatgaagaccaacgacacctacatgaagttcagctggctgaccgtgcccgagaagtccctggacaaagaacacagatgcatcgtgcggcacgaaaacaacaagaacggcgtggaccaggaaatcatcttcccacccatcaagaccgatgtgattacaatggaccccaaggacaactgctccaaggacgccaacgataccctgctgctccagctgaccaacaccagcgcctactacatgtacttgttgctgctgctgaagtccgtggtgtacttcgccatcatcacatgctgcctgctgcggagaaccgccttctgctgcaacggcgagaagtctagggccaagcgatctggatctggagcaacaaacttctcactactcaaacaagcaggtgacgtggaggagaatcccgggcctactagtgccaccatggactggatttggcgcatccttttccttgtcggcgctgctaccggcgcccattccgggcccgaagtgcagctggttgaatctggcggaggactggttcaggctggcggatctctgagactgtcttgtgccgccagcggcagaacctttagcatgggctggtttagacaggcccctggcaaagagagagagttcgtcgccgccatcacatactctggcggcagcccttactacgccgactctgtgaagggcagattcaccatcagccgggacaacgccaagaacaccgtgtacctccagatgaacagcctgaagcctgaggacaccgccgtgtactactgcgccgccaatccaacatacggcagcgactggaacgccgagaattggggccagggaacccaagtgacagtgtctagcggatccggcggcggaggatctggcggaggcggatctgggggcggaggctctttcgaacaagttcagcttcaacagcctggcgctgagctggtcaaacctggcgcttctgtgaagatgagctgcaaagccagcggctacgccttcagcagctactggatcaactggatgaagcagaaacccggccagggactcgaatggatcggccaaatctatcccggcgacggcgacaccaactacaacggcaagttcaagggcagagccacactgaccgccgatacctctagcagcacagcctacatgcagctgagcagcctgaccagcgaagatagcgccgtgtacttctgtgcccggtccatcacaacagtcgtgggctgcgctatggactattggggccagggaacaagcgtgaccgtgtctagtacgcgtatccagaaccctgatcctgccgtgtaccagctgcgggatagcaagagcagcgacaagagcgtgtgtctgttcaccgacttcgacagccagaccaacgtgtcccagagcaaggactccgacgtgtacatcaccgataagtgcgtgctggacatgcggagcatggacttcaagagcaactccgccgtggcctggtccaacaagtccgatttcgcctgcgccaacgccttcaacaacagcattatccccgaggacacattcttcccaagccccgagagcagcgactccaccgaccacgtgaagcccaaagagacagagaacaccaagcagcccagcaagagctgccacaagcccaaggccatcgtgcacaccgagaaagtgaacatgatgagcctgaccgtgctgggcctgcggatgctgttcgccaaaaccgtggccgtgaacttcctgctgaccgccaagctgttcttcctccgcgccaagagaagcggatctggcgtgaagcagaccctgaatttcgacctgctgaagctggctggcgacgtggaatccaacccaggcccttctagaggccatatgaccgagtacaagcccacggtgcgcctcgccacccgcgacgacgtccccagggccgtacgcaccctcgccgccgcgttcgccgactaccccgccacgcgccacaccgtcgatccggaccgccacatcgagcgggtcaccgagctgcaagaactcttcctcacgcgcgtcgggctcgacatcggcaaggtgtgggtcgcggacgacggcgccgcggtggcggtctggaccacgccggagagcgtcgaagcgggggcggtgttcgccgagatcggcccgcgcatggccgagttgagcggttcccggctggccgcgcagcaacagatggaaggcctcctggcgccgcaccggcccaaggagcccgcgtggttcctggccaccgtcggcgtctcgcccgaccaccagggcaagggtctgggcagcgccgtcgtgctccccggagtggaggcggccgagcgcgccggggtgcccgccttcctggagacctccgcgccccgcaacctccccttctacgagcggctcggcttcaccgtcaccgccgacgtcgaggtgcccgaaggaccgcgcacctggtgcatgacccgcaagcccggtgcctga

SEQ ID NO: 8069 - DNA, 3006 bp, synthetic construct
  source 1..3006: mol_type = other DNA
atggccttaccagtgaccgccttgctcctgccgctggccttgctgctccacgccgccaggccggcatgcctgttcaatcaagaggtgcagatccctctgaccgagagctactgtggcccctgtcctaagaactggatctgctacaagaacaactgctaccagttcttcgacgagagcaagaattggtacgagagccaggccagctgcatgagccagaatgccagcctgctgaaggtgtacagcaaagaggaccaggacctgctgaaactggtcaagagcgcccactggatgggccttgtgcacatccccaccaatggctcttggcagtgggaggacggcagcattctgagccctaacctgctgaccatcatcgagatgcagaagggcgactgcgccctgtacgccagcagctttaagggctacatcgagaattgcagcaccccgaacacctacatctgtatgcagagaaccgttctcgaggacctgaagaacgtgttcccacctgaggtggccgtgttcgagcctagcgaggccgagatcagccacacccagaaagccaccctcgtgtgcctggctaccggcttctaccccgaccatgtggaactgtcttggtgggtcaacggcaaagaggtgcacagcggcgtgtgtaccgacccccagccactgaaagaacagcccgccctgaacgacagccggtactgcctgagcagcagactgagagtgtccgccaccttctggcagaacccccggaaccacttcagatgccaggtgcagttctacggcctgagcgagaacgacgagtggacccaggacagagccaagcccgtgacccagatcgtgtctgccgaagcctggggcagagccgatgatgtgattaagatccactggcaggaaaagaagtccaacaccatcctgggcagccaggaaggcaacaccatgaagaccaacgacacctacatgaagttcagctggctgaccgtgcccgagaagtccctggacaaagaacacagatgcatcgtgcggcacgaaaacaacaagaacggcgtggaccaggaaatcatcttcccacccatcaagaccgatgtgattacaatggaccccaaggacaactgctccaaggacgccaacgataccctgctgctccagctgaccaacaccagcgcctactacatgtacttgttgctgctgctgaagtccgtggtgtacttcgccatcatcacatgctgcctgctgcggagaaccgccttctgctgcaacggcgagaagtctagggccaagcgatctggatctggagcaacaaacttctcactactcaaacaagcaggtgacgtggaggagaatcccgggcctactagtatggactggatttggcgcatccttttccttgtcggcgctgctaccggcgcgcattccttcgaagacctctttaatcaagaagtccagattccactcaccgaatcctactgcggaccttgtccaaaaaattggatttgttataagaacaactgttatcaattctttgatgagtctaaaaattggtatgagtcccaggcttcctgcatgtctcagaacgcttctctgctgaaagtctactctaaagaagatcaggatctcctgaagctcgtcaagtctgcccattggatggggctcgtccacattcctaccaacggaagctggcaatgggaagatggctccatcctgtctccaaatctgctcacgattattgaaatgcagaaaggggattgtgctctctacgccagctccttcaagggatttattgagaactgtagcacgcccaatacttatatctgtatgcaacggaccgtgacgcgtatccagaaccctgatcctgccgtgtaccagctgcgggatagcaagagcagcgacaagagcgtgtgtctgttcaccgacttcgacagccagaccaacgtgtcccagagcaaggactccgacgtgtacatcaccgataagtgcgtgctggacatgcggagcatggacttcaagagcaactccgccgtggcctggtccaacaagtccgatttcgcctgcgccaacgccttcaacaacagcattatccccgaggacacattcttcccaagccccgagagcagcgactccaccgaccacgtgaagcccaaagagacagagaacaccaagcagcccagcaagagctgccacaagcccaaggccatcgtgcacaccgagaaagtgaacatgatgagcctgaccgtgctgggcctgcggatgctgttcgccaaaaccgtggccgtgaacttcctgctgaccgccaagctgttcttcctccgcgccaagagaagcggatctggcgtgaagcagaccctgaatttcgacctgctgaagctggctggcgacgtggaatccaacccaggcccttctagaggccatatgaccgagtacaagcccacggtgcgcctcgccacccgcgacgacgtccccagggccgtacgcaccctcgccgccgcgttcgccgactaccccgccacgcgccacaccgtcgatccggaccgccacatcgagcgggtcaccgagctgcaagaactcttcctcacgcgcgtcgggctcgacatcggcaaggtgtgggtcgcggacgacggcgccgcggtggcggtctggaccacgccggagagcgtcgaagcgggggcggtgttcgccgagatcggcccgcgcatggccgagttgagcggttcccggctggccgcgcagcaacagatggaaggcctcctggcgccgcaccggcccaaggagcccgcgtggttcctggccaccgtcggcgtctcgcccgaccaccagggcaagggtctgggcagcgccgtcgtgctccccggagtggaggcggccgagcgcgccggggtgcccgccttcctggagacctccgcgccccgcaacctccccttctacgagcggctcggcttcaccgtcaccgccgacgtcgaggtgcccgaaggaccgcgcacctggtgcatgacccgcaagcccggtgcctga

SEQ ID NO: 8070 - DNA, 3156 bp, synthetic construct
  source 1..3156: mol_type = other DNA
atggccttaccagtgaccgccttgctcctgccgctggccttgctgctccacgccgccaggccggacatccagatgacacagagccctagcagcctgtctgccagcgtgggagacagagtgaccatcacatgcaaggccagcgaccacatcaacaactggctggcctggtatcagcagaagcctggacaggcccctaagctgctgatctacggcgctaccacactggaaacaggcgtgcccagcagattttctggcagcggctctggcaccgactacaccctgacaatatccagcctccagcctgaggacttcgccacctactactgtcagcagagctggaacaccccttggacattcggccagggcaccaagctggaaatcaagagactcgaggacctgaagaacgtgttcccacctgaggtggccgtgttcgagcctagcgaggccgagatcagccacacccagaaagccaccctcgtgtgcctggctaccggcttctaccccgaccatgtggaactgtcttggtgggtcaacggcaaagaggtgcacagcggcgtgtgtaccgacccccagccactgaaagaacagcccgccctgaacgacagccggtactgcctgagcagcagactgagagtgtccgccaccttctggcagaacccccggaaccacttcagatgccaggtgcagttctacggcctgagcgagaacgacgagtggacccaggacagagccaagcccgtgacccagatcgtgtctgccgaagcctggggcagagccgatgatgtgattaagatccactggcaggaaaagaagtccaacaccatcctgggcagccaggaaggcaacaccatgaagaccaacgacacctacatgaagttcagctggctgaccgtgcccgagaagtccctggacaaagaacacagatgcatcgtgcggcacgaaaacaacaagaacggcgtggaccaggaaatcatcttcccacccatcaagaccgatgtgattacaatggaccccaaggacaactgctccaaggacgccaacgataccctgctgctccagctgaccaacaccagcgcctactacatgtacttgttgctgctgctgaagtccgtggtgtacttcgccatcatcacatgctgcctgctgcggagaaccgccttctgctgcaacggcgagaagtctagggccaagcgatctggatctggagcaacaaacttctcactactcaaacaagcaggtgacgtggaggagaatcccgggcctactagtgccaccatggactggatttggcgcatccttttccttgtcggcgctgctaccggcgcccattccgggcccatgggaagctggcttgagttctaccacagactcaacgccattgacagcaggctgtgggcacttggcggaagcgaagctgaactcgccgcttttgaaaaagaaattgccgctttcgagtccgagcttcaggcttacaaaggcaaagggaatcctgaggtcgagagcctgagagatcacgctgcccacattagagagtggttgcaggcataccggcacaatggatccggcggcggaggatctggcggaggcggatctgggggcggaggctctttcgaacaagttcagcttcaacagcctggcgctgagctggtcaaacctggcgcttctgtgaagatgagctgcaaagccagcggctacgccttcagcagctactggatcaactggatgaagcagaaacccggccagggactcgaatggatcggccaaatctatcccggcgacggcgacaccaactacaacggcaagttcaagggcagagccacactgaccgccgatacctctagcagcacagcctacatgcagctgagcagcctgaccagcgaagatagcgccgtgtacttctgtgcccggtccatcacaacagtcgtgggctgcgctatggactattggggccagggaacaagcgtgaccgtgtctagtacgcgtatccagaaccctgatcctgccgtgtaccagctgcgggatagcaagagcagcgacaagagcgtgtgtctgttcaccgacttcgacagccagaccaacgtgtcccagagcaaggactccgacgtgtacatcaccgataagtgcgtgctggacatgcggagcatggacttcaagagcaactccgccgtggcctggtccaacaagtccgatttcgcctgcgccaacgccttcaacaacagcattatccccgaggacacattcttcccaagccccgagagcagcgactccaccgaccacgtgaagcccaaagagacagagaacaccaagcagcccagcaagagctgccacaagcccaaggccatcgtgcacaccgagaaagtgaacatgatgagcctgaccgtgctgggcctgcggatgctgttcgccaaaaccgtggccgtgaacttcctgctgaccgccaagctgttcttcctccgcgccaagagaagcggatctggcgtgaagcagaccctgaatttcgacctgctgaagctggctggcgacgtggaatccaacccaggcccttctagaggccatatgaccgagtacaagcccacggtgcgcctcgccacccgcgacgacgtccccagggccgtacgcaccctcgccgccgcgttcgccgactaccccgccacgcgccacaccgtcgatccggaccgccacatcgagcgggtcaccgagctgcaagaactcttcctcacgcgcgtcgggctcgacatcggcaaggtgtgggtcgcggacgacggcgccgcggtggcggtctggaccacgccggagagcgtcgaagcgggggcggtgttcgccgagatcggcccgcgcatggccgagttgagcggttcccggctggccgcgcagcaacagatggaaggcctcctggcgccgcaccggcccaaggagcccgcgtggttcctggccaccgtcggcgtctcgcccgaccaccagggcaagggtctgggcagcgccgtcgtgctccccggagtggaggcggccgagcgcgccggggtgcccgccttcctggagacctccgcgccccgcaacctccccttctacgagcggctcggcttcaccgtcaccgccgacgtcgaggtgcccgaaggaccgcgcacctggtgcatgacccgcaagcccggtgcctga

SEQ ID NO: 8071 - DNA, 3156 bp, synthetic construct
  source 1..3156: mol_type = other DNA
atggccttaccagtgaccgccttgctcctgccgctggccttgctgctccacgccgccaggccggcatgcatgggcagttggttcgagttctacgaccggctgaatgccatcgacgccagactgtgggctctcggaggatctgaagctgagctggccgccttcgagaaagagatcgccgcctttgagagcgagctgcaagcctacaaaggcaagggcaaccccgaggtggaaaacctgagagtgcacgccgctgccatcagagaatggctccaggcttacagacacaacggtaccggcggaggcggatctggcggcggaggtagcggtggcggaggatctgaattcgacatccagatgacacagagccctagcagcctgtctgccagcgtgggagacagagtgaccatcacatgcaaggccagcgaccacatcaacaactggctggcctggtatcagcagaagcctggacaggcccctaagctgctgatctacggcgctaccacactggaaacaggcgtgcccagcagattttctggcagcggctctggcaccgactacaccctgacaatatccagcctccagcctgaggacttcgccacctactactgtcagcagagctggaacaccccttggacattcggccagggcaccaagctggaaatcaagagactcgaggacctgaagaacgtgttcccacctgaggtggccgtgttcgagcctagcgaggccgagatcagccacacccagaaagccaccctcgtgtgcctggctaccggcttctaccccgaccatgtggaactgtcttggtgggtcaacggcaaagaggtgcacagcggcgtgtgtaccgacccccagccactgaaagaacagcccgccctgaacgacagccggtactgcctgagcagcagactgagagtgtccgccaccttctggcagaacccccggaaccacttcagatgccaggtgcagttctacggcctgagcgagaacgacgagtggacccaggacagagccaagcccgtgacccagatcgtgtctgccgaagcctggggcagagccgatgatgtgattaagatccactggcaggaaaagaagtccaacaccatcctgggcagccaggaaggcaacaccatgaagaccaacgacacctacatgaagttcagctggctgaccgtgcccgagaagtccctggacaaagaacacagatgcatcgtgcggcacgaaaacaacaagaacggcgtggaccaggaaatcatcttcccacccatcaagaccgatgtgattacaatggaccccaaggacaactgctccaaggacgccaacgataccctgctgctccagctgaccaacaccagcgcctactacatgtacttgttgctgctgctgaagtccgtggtgtacttcgccatcatcacatgctgcctgctgcggagaaccgccttctgctgcaacggcgagaagtctagggccaagcgatctggatctggagcaacaaacttctcactactcaaacaagcaggtgacgtggaggagaatcccgggcctactagtatggactggatttggcgcatccttttccttgtcggcgctgctaccggcgcgcattccttcgaacaagttcagcttcaacagcctggcgctgagctggtcaaacctggcgcttctgtgaagatgagctgcaaagccagcggctacgccttcagcagctactggatcaactggatgaagcagaaacccggccagggactcgaatggatcggccaaatctatcccggcgacggcgacaccaactacaacggcaagttcaagggcagagccacactgaccgccgatacctctagcagcacagcctacatgcagctgagcagcctgaccagcgaagatagcgccgtgtacttctgtgcccggtccatcacaacagtcgtgggctgcgctatggactattggggccagggaacaagcgtgaccgtgtctagtacgcgtatccagaaccctgatcctgccgtgtaccagctgcgggatagcaagagcagcgacaagagcgtgtgtctgttcaccgacttcgacagccagaccaacgtgtcccagagcaaggactccgacgtgtacatcaccgataagtgcgtgctggacatgcggagcatggacttcaagagcaactccgccgtggcctggtccaacaagtccgatttcgcctgcgccaacgccttcaacaacagcattatccccgaggacacattcttcccaagccccgagagcagcgactccaccgaccacgtgaagcccaaagagacagagaacaccaagcagcccagcaagagctgccacaagcccaaggccatcgtgcacaccgagaaagtgaacatgatgagcctgaccgtgctgggcctgcggatgctgttcgccaaaaccgtggccgtgaacttcctgctgaccgccaagctgttcttcctccgcgccaagagaagcggatctggcgtgaagcagaccctgaatttcgacctgctgaagctggctggcgacgtggaatccaacccaggcccttctagaggccatatgaccgagtacaagcccacggtgcgcctcgccacccgcgacgacgtccccagggccgtacgcaccctcgccgccgcgttcgccgactaccccgccacgcgccacaccgtcgatccggaccgccacatcgagcgggtcaccgagctgcaagaactcttcctcacgcgcgtcgggctcgacatcggcaaggtgtgggtcgcggacgacggcgccgcggtggcggtctggaccacgccggagagcgtcgaagcgggggcggtgttcgccgagatcggcccgcgcatggccgagttgagcggttcccggctggccgcgcagcaacagatggaaggcctcctggcgccgcaccggcccaaggagcccgcgtggttcctggccaccgtcggcgtctcgcccgaccaccagggcaagggtctgggcagcgccgtcgtgctccccggagtggaggcggccgagcgcgccggggtgcccgccttcctggagacctccgcgccccgcaacctccccttctacgagcggctcggcttcaccgtcaccgccgacgtcgaggtgcccgaaggaccgcgcacctggtgcatgacccgcaagcccggtgcctga

SEQ ID NO: 8072 - DNA, 3507 bp, synthetic construct
  source 1..3507: mol_type = other DNA
atggccttaccagtgaccgccttgctcctgccgctggccttgctgctccacgccgccaggccggcatgcatggaccccgacctggaaatcagagccgccttcctgcggcagagaaacacagccctgagaacagaggtggccgagctggaacaagaggtgcagcggctggaaaacgaggtgtcccagtacgagacaagatacggccctctcggaggcggaaaaggtaccggcggaggcggatctggcggcggaggtagcggtggcggaggatctgaattcgacatccagatgacacagagccctagcagcctgtctgccagcgtgggagacagagtgaccatcacatgcaaggccagcgaccacatcaacaactggctggcctggtatcagcagaagcctggacaggcccctaagctgctgatctacggcgctaccacactggaaacaggcgtgcccagcagattttctggcagcggctctggcaccgactacaccctgacaatatccagcctccagcctgaggacttcgccacctactactgtcagcagagctggaacaccccttggacattcggccagggcaccaagctggaaatcaagagactcgaggacctgaagaacgtgttcccacctgaggtggccgtgttcgagcctagcgaggccgagatcagccacacccagaaagccaccctcgtgtgcctggctaccggcttctaccccgaccatgtggaactgtcttggtgggtcaacggcaaagaggtgcacagcggcgtgtgtaccgacccccagccactgaaagaacagcccgccctgaacgacagccggtactgcctgagcagcagactgagagtgtccgccaccttctggcagaacccccggaaccacttcagatgccaggtgcagttctacggcctgagcgagaacgacgagtggacccaggacagagccaagcccgtgacccagatcgtgtctgccgaagcctggggcagagccgatgatgtgattaagatccactggcaggaaaagaagtccaacaccatcctgggcagccaggaaggcaacaccatgaagaccaacgacacctacatgaagttcagctggctgaccgtgcccgagaagtccctggacaaagaacacagatgcatcgtgcggcacgaaaacaacaagaacggcgtggaccaggaaatcatcttcccacccatcaagaccgatgtgattacaatggaccccaaggacaactgctccaaggacgccaacgataccctgctgctccagctgaccaacaccagcgcctactacatgtacttgttgctgctgctgaagtccgtggtgtacttcgccatcatcacatgctgcctgctgcggagaaccgccttctgctgcaacggcgagaagtctagggccaagcgatctggatctggagcaacaaacttctcactactcaaacaagcaggtgacgtggaggagaatcccgggcctactagtgccaccatggactggatttggcgcatccttttccttgtcggcgctgctaccggcgcccattccgggcccgaagtgcagctggttgaatctggcggaggactggttcaggctggcggatctctgagactgtcttgtgccgccagcggcagaacctttagcatgggctggtttagacaggcccctggcaaagagagagagttcgtcgccgccatcacatactctggcggcagcccttactacgccgactctgtgaagggcagattcaccatcagccgggacaacgccaagaacaccgtgtacctccagatgaacagcctgaagcctgaggacaccgccgtgtactactgcgccgccaatccaacatacggcagcgactggaacgccgagaattggggccagggaacccaagtgacagtgtctagcggatccggcggcggaggatctggcggaggcggatctgggggcggaggctctttcgaacaagttcagcttcaacagcctggcgctgagctggtcaaacctggcgcttctgtgaagatgagctgcaaagccagcggctacgccttcagcagctactggatcaactggatgaagcagaaacccggccagggactcgaatggatcggccaaatctatcccggcgacggcgacaccaactacaacggcaagttcaagggcagagccacactgaccgccgatacctctagcagcacagcctacatgcagctgagcagcctgaccagcgaagatagcgccgtgtacttctgtgcccggtccatcacaacagtcgtgggctgcgctatggactattggggccagggaacaagcgtgaccgtgtctagtacgcgtatccagaaccctgatcctgccgtgtaccagctgcgggatagcaagagcagcgacaagagcgtgtgtctgttcaccgacttcgacagccagaccaacgtgtcccagagcaaggactccgacgtgtacatcaccgataagtgcgtgctggacatgcggagcatggacttcaagagcaactccgccgtggcctggtccaacaagtccgatttcgcctgcgccaacgccttcaacaacagcattatccccgaggacacattcttcccaagccccgagagcagcgactccaccgaccacgtgaagcccaaagagacagagaacaccaagcagcccagcaagagctgccacaagcccaaggccatcgtgcacaccgagaaagtgaacatgatgagcctgaccgtgctgggcctgcggatgctgttcgccaaaaccgtggccgtgaacttcctgctgaccgccaagctgttcttcctccgcgccaagagaagcggatctggcgtgaagcagaccctgaatttcgacctgctgaagctggctggcgacgtggaatccaacccaggcccttctagaggccatatgaccgagtacaagcccacggtgcgcctcgccacccgcgacgacgtccccagggccgtacgcaccctcgccgccgcgttcgccgactaccccgccacgcgccacaccgtcgatccggaccgccacatcgagcgggtcaccgagctgcaagaactcttcctcacgcgcgtcgggctcgacatcggcaaggtgtgggtcgcggacgacggcgccgcggtggcggtctggaccacgccggagagcgtcgaagcgggggcggtgttcgccgagatcggcccgcgcatggccgagttgagcggttcccggctggccgcgcagcaacagatggaaggcctcctggcgccgcaccggcccaaggagcccgcgtggttcctggccaccgtcggcgtctcgcccgaccaccagggcaagggtctgggcagcgccgtcgtgctccccggagtggaggcggccgagcgcgccggggtgcccgccttcctggagacctccgcgccccgcaacctccccttctacgagcggctcggcttcaccgtcaccgccgacgtcgaggtgcccgaaggaccgcgcacctggtgcatgacccgcaagcccggtgcctga

SEQ ID NO: 8073 - DNA, 3156 bp, synthetic construct
  source 1..3156: mol_type = other DNA
atggccttaccagtgaccgccttgctcctgccgctggccttgctgctccacgccgccaggccggacatccagatgacacagagccctagcagcctgtctgccagcgtgggagacagagtgaccatcacatgcaaggccagcgaccacatcaacaactggctggcctggtatcagcagaagcctggacaggcccctaagctgctgatctacggcgctaccacactggaaacaggcgtgcccagcagattttctggcagcggctctggcaccgactacaccctgacaatatccagcctccagcctgaggacttcgccacctactactgtcagcagagctggaacaccccttggacattcggccagggcaccaagctggaaatcaagagactcgaggacctgaagaacgtgttcccacctgaggtggccgtgttcgagcctagcgaggccgagatcagccacacccagaaagccaccctcgtgtgcctggctaccggcttctaccccgaccatgtggaactgtcttggtgggtcaacggcaaagaggtgcacagcggcgtgtgtaccgacccccagccactgaaagaacagcccgccctgaacgacagccggtactgcctgagcagcagactgagagtgtccgccaccttctggcagaacccccggaaccacttcagatgccaggtgcagttctacggcctgagcgagaacgacgagtggacccaggacagagccaagcccgtgacccagatcgtgtctgccgaagcctggggcagagccgatgatgtgattaagatccactggcaggaaaagaagtccaacaccatcctgggcagccaggaaggcaacaccatgaagaccaacgacacctacatgaagttcagctggctgaccgtgcccgagaagtccctggacaaagaacacagatgcatcgtgcggcacgaaaacaacaagaacggcgtggaccaggaaatcatcttcccacccatcaagaccgatgtgattacaatggaccccaaggacaactgctccaaggacgccaacgataccctgctgctccagctgaccaacaccagcgcctactacatgtacttgttgctgctgctgaagtccgtggtgtacttcgccatcatcacatgctgcctgctgcggagaaccgccttctgctgcaacggcgagaagtctagggccaagcgatctggatctggagcaacaaacttctcactactcaaacaagcaggtgacgtggaggagaatcccgggcctactagtgccaccatggactggatttggcgcatccttttccttgtcggcgctgctaccggcgcccattccgggcccatgggatcttggagcgagttttacgatcggctgcacgccattcaccaccggctgtatgctctcggaggaagcgaagctgagctggccgcttttgaaaaagaaattgccgctttcgagtccgagcttcaggcttacaaaggcaaagggaatcctgaggtcgaggccctgagagataccgccgccttcatcagaacccggttgcaggcataccggcacaacggatccggcggcggaggatctggcggaggcggatctgggggcggaggctctttcgaacaagttcagcttcaacagcctggcgctgagctggtcaaacctggcgcttctgtgaagatgagctgcaaagccagcggctacgccttcagcagctactggatcaactggatgaagcagaaacccggccagggactcgaatggatcggccaaatctatcccggcgacggcgacaccaactacaacggcaagttcaagggcagagccacactgaccgccgatacctctagcagcacagcctacatgcagctgagcagcctgaccagcgaagatagcgccgtgtacttctgtgcccggtccatcacaacagtcgtgggctgcgctatggactattggggccagggaacaagcgtgaccgtgtctagtacgcgtatccagaaccctgatcctgccgtgtaccagctgcgggatagcaagagcagcgacaagagcgtgtgtctgttcaccgacttcgacagccagaccaacgtgtcccagagcaaggactccgacgtgtacatcaccgataagtgcgtgctggacatgcggagcatggacttcaagagcaactccgccgtggcctggtccaacaagtccgatttcgcctgcgccaacgccttcaacaacagcattatccccgaggacacattcttcccaagccccgagagcagcgactccaccgaccacgtgaagcccaaagagacagagaacaccaagcagcccagcaagagctgccacaagcccaaggccatcgtgcacaccgagaaagtgaacatgatgagcctgaccgtgctgggcctgcggatgctgttcgccaaaaccgtggccgtgaacttcctgctgaccgccaagctgttcttcctccgcgccaagagaagcggatctggcgtgaagcagaccctgaatttcgacctgctgaagctggctggcgacgtggaatccaacccaggcccttctagaggccatatgaccgagtacaagcccacggtgcgcctcgccacccgcgacgacgtccccagggccgtacgcaccctcgccgccgcgttcgccgactaccccgccacgcgccacaccgtcgatccggaccgccacatcgagcgggtcaccgagctgcaagaactcttcctcacgcgcgtcgggctcgacatcggcaaggtgtgggtcgcggacgacggcgccgcggtggcggtctggaccacgccggagagcgtcgaagcgggggcggtgttcgccgagatcggcccgcgcatggccgagttgagcggttcccggctggccgcgcagcaacagatggaaggcctcctggcgccgcaccggcccaaggagcccgcgtggttcctggccaccgtcggcgtctcgcccgaccaccagggcaagggtctgggcagcgccgtcgtgctccccggagtggaggcggccgagcgcgccggggtgcccgccttcctggagacctccgcgccccgcaacctccccttctacgagcggctcggcttcaccgtcaccgccgacgtcgaggtgcccgaaggaccgcgcacctggtgcatgacccgcaagcccggtgcctga

SEQ ID NO: 8074 - DNA, 3786 bp, synthetic construct
  source 1..3786: mol_type = other DNA
atggccttaccagtgaccgccttgctcctgccgctggccttgctgctccacgccgccaggccggacatccagatgacacagagccctagcagcctgtctgccagcgtgggagacagagtgaccatcacatgcaaggccagcgaccacatcaacaactggctggcctggtatcagcagaagcctggacaggcccctaagctgctgatctacggcgctaccacactggaaacaggcgtgcccagcagattttctggcagcggctctggcaccgactacaccctgacaatatccagcctccagcctgaggacttcgccacctactactgtcagcagagctggaacaccccttggacattcggccagggcaccaagctggaaatcaagagactcgaggacctgaagaacgtgttcccacctgaggtggccgtgttcgagcctagcgaggccgagatcagccacacccagaaagccaccctcgtgtgcctggctaccggcttctaccccgaccatgtggaactgtcttggtgggtcaacggcaaagaggtgcacagcggcgtgtgtaccgacccccagccactgaaagaacagcccgccctgaacgacagccggtactgcctgagcagcagactgagagtgtccgccaccttctggcagaacccccggaaccacttcagatgccaggtgcagttctacggcctgagcgagaacgacgagtggacccaggacagagccaagcccgtgacccagatcgtgtctgccgaagcctggggcagagccgatgatgtgattaagatccactggcaggaaaagaagtccaacaccatcctgggcagccaggaaggcaacaccatgaagaccaacgacacctacatgaagttcagctggctgaccgtgcccgagaagtccctggacaaagaacacagatgcatcgtgcggcacgaaaacaacaagaacggcgtggaccaggaaatcatcttcccacccatcaagaccgatgtgattacaatggaccccaaggacaactgctccaaggacgccaacgataccctgctgctccagctgaccaacaccagcgcctactacatgtacttgttgctgctgctgaagtccgtggtgtacttcgccatcatcacatgctgcctgctgcggagaaccgccttctgctgcaacggcgagaagtctagggccaagcgatctggatctggagcaacaaacttctcactactcaaacaagcaggtgacgtggaggagaatcccgggcctactagtaccatggactggatttggcgcatccttttccttgtcggcgctgctaccggcgcccattccctgttcaatcaagaggtgcagatccctctgaccgagagctactgtggcccctgtcctaagaactggatctgctacaagaacaactgctaccagttcttcgacgagagcaagaattggtacgagagccaggccagctgcatgagccagaatgccagcctgctgaaggtgtacagcaaagaggaccaggacctgctgaaactggtcaagagcgcccactggatgggccttgtgcacatccccaccaatggctcttggcagtgggaggacggcagcattctgagccctaacctgctgaccatcatcgagatgcagaagggcgactgcgccctgtacgccagcagctttaagggctacatcgagaattgcagcaccccgaacacctacatctgtatgcagagaaccgtttctggcggaggcggctctggaggaggcggaagtggcggcggaggcgacctctttaatcaagaagtccagattccactcaccgaatcctactgcggaccttgtccaaaaaattggatttgttataagaacaactgttatcaattctttgatgagtctaaaaattggtatgagtcccaggcttcctgcatgtctcagaacgcttctctgctgaaagtctactctaaagaagatcaggatctcctgaagctcgtcaagtctgcccattggatggggctcgtccacattcctaccaacggaagctggcaatgggaagatggctccatcctgtctccaaatctgctcacgattattgaaatgcagaaaggggattgtgctctctacgccagctccttcaagggatatattgagaactgtagcacgcccaatacttatatctgtatgcaacggaccgtgggatccggcggcggaggatctggcggaggcggatctgggggcggaggctctttcgaacaagttcagcttcaacagcctggcgctgagctggtcaaacctggcgcttctgtgaagatgagctgcaaagccagcggctacgccttcagcagctactggatcaactggatgaagcagaaacccggccagggactcgaatggatcggccaaatctatcccggcgacggcgacaccaactacaacggcaagttcaagggcagagccacactgaccgccgatacctctagcagcacagcctacatgcagctgagcagcctgaccagcgaagatagcgccgtgtacttctgtgcccggtccatcacaacagtcgtgggctgcgctatggactattggggccagggaacaagcgtgaccgtgtctagtacgcgtatccagaaccctgatcctgccgtgtaccagctgcgggatagcaagagcagcgacaagagcgtgtgtctgttcaccgacttcgacagccagaccaacgtgtcccagagcaaggactccgacgtgtacatcaccgataagtgcgtgctggacatgcggagcatggacttcaagagcaactccgccgtggcctggtccaacaagtccgatttcgcctgcgccaacgccttcaacaacagcattatccccgaggacacattcttcccaagccccgagagcagcgactccaccgaccacgtgaagcccaaagagacagagaacaccaagcagcccagcaagagctgccacaagcccaaggccatcgtgcacaccgagaaagtgaacatgatgagcctgaccgtgctgggcctgcggatgctgttcgccaaaaccgtggccgtgaacttcctgctgaccgccaagctgttcttcctccgcgccaagagaagcggatctggcgtgaagcagaccctgaatttcgacctgctgaagctggctggcgacgtggaatccaacccaggcccttctagaggccatatgaccgagtacaagcccacggtgcgcctcgccacccgcgacgacgtccccagggccgtacgcaccctcgccgccgcgttcgccgactaccccgccacgcgccacaccgtcgatccggaccgccacatcgagcgggtcaccgagctgcaagaactcttcctcacgcgcgtcgggctcgacatcggcaaggtgtgggtcgcggacgacggcgccgcggtggcggtctggaccacgccggagagcgtcgaagcgggggcggtgttcgccgagatcggcccgcgcatggccgagttgagcggttcccggctggccgcgcagcaacagatggaaggcctcctggcgccgcaccggcccaaggagcccgcgtggttcctggccaccgtcggcgtctcgcccgaccaccagggcaagggtctgggcagcgccgtcgtgctccccggagtggaggcggccgagcgcgccggggtgcccgccttcctggagacctccgcgccccgcaacctccccttctacgagcggctcggcttcaccgtcaccgccgacgtcgaggtgcccgaaggaccgcgcacctggtgcatgacccgcaagcccggtgcctga

SEQ ID NO: 8075 - DNA, 28 bp, synthetic construct
  source 1..28: mol_type = other DNA
gggggggggggggggggggggggggggg

SEQ ID NO: 8076 - DNA, 1866 bp, synthetic construct
  source 1..1866: mol_type = other DNA
atggccttaccagtgaccgccttgctcctgccgctggccttgctgctccacgccgccaggccggacatccagatgacacagagccctagcagcctgtctgccagcgtgggagacagagtgaccatcacatgcaaggccagcgaccacatcaacaactggctggcctggtatcagcagaagcctggacaggcccctaagctgctgatctacggcgctaccacactggaaacaggcgtgcccagcagattttctggcagcggctctggcaccgactacaccctgacaatatccagcctccagcctgaggacttcgccacctactactgtcagcagagctggaacaccccttggacattcggccagggcaccaagctggaaatcaagagactcgaggacctgaagaacgtgttcccacctgaggtggccgtgttcgagcctagcgaggccgagatcagccacacccagaaagccaccctcgtgtgcctggctaccggcttctaccccgaccatgtggaactgtcttggtgggtcaacggcaaagaggtgcacagcggcgtgtctaccgacccccagccactgaaagaacagcccgccctgaacgacagccggtactgcctgagcagcagactgagagtgtccgccaccttctggcagaacccccggaaccacttcagatgccaggtgcagttctacggcctgagcgagaacgacgagtggacccaggacagagccaagcccgtgacccagatcgtgtctgccgaagcctggggcagagccgattgcgacgtgaagctggtggaaaagagcttcgagacagacaccaacctgaacttccagaacctgagcgtgatcggcttcagaatcctgctgctgaaagtggccggctttaacctgctgatgaccctgcggctgtggtccagcagggccaagcgatctggatctggagcaacaaacttctcactactcaaacaagcaggtgacgtggaggagaatcccgggcctactagtatggactggatttggcgcatccttttccttgtcggcgctgctaccggcgcgcattccttcgaacaagttcagcttcaacagcctggcgctgagctggtcaaacctggcgcttctgtgaagatgagctgcaaagccagcggctacgccttcagcagctactggatcaactggatgaagcagaaacccggccagggactcgaatggatcggccaaatctatcccggcgacggcgacaccaactacaacggcaagttcaagggcagagccacactgaccgccgatacctctagcagcacagcctacatgcagctgagcagcctgaccagcgaagatagcgccgtgtacttctgtgcccggtccatcacaacagtcgtgggctgcgctatggactattggggccagggaacaagcgtgaccgtgtctagtacgcgtatccagaaccctgatcctgccgtgtaccagctgcgggatagcaagagcagcgacaagagcgtgtgtctgttcaccgacttcgacagccagaccaacgtgtcccagagcaaggactccgacgtgtacatcaccgataagaccgtgctggacatgcggagcatggacttcaagagcaactccgccgtggcctggtccaacaagtccgatttcgcctgcgccaacgccttcaacaacagcattatccccgaggacacattcttcccaagccccgagagcagctgcggctttaccagcgagagctaccagcagggcgtgctgagcgccaccatcctgtacgagatcctgctgggcaaggccaccctgtacgccgtgctggtgtctgccctggtgctgatggctatggtcaagcggaaggacagccgggga

SEQ ID NO: 8077 - DNA, 1857 bp, synthetic construct
  source 1..1857: mol_type = other DNA
atggccttaccagtgaccgccttgctcctgccgctggccttgctgctccacgccgccaggccggacatccagatgacacagactacatcctccctgtctgcctctctgggagacagagtcaccatcagttgcagggcaagtcaggacattagtaagtacctgaactggtatcagcagaaaccagatggaactgttaaactcctgatctaccatacatcaagattacactcaggagtcccatcaaggttcagtggcagtgggtctggaacagattattctctcaccattagcaacctggagcaagaagatattgccacttacttttgccaacagggtaatacgcttccgtacacgttcggaggggggaccaagctggagatcacactcgaggacctgaagaacgtgttcccacctgaggtggccgtgttcgagcctagcgaggccgagatcagccacacccagaaagccaccctcgtgtgcctggctaccggcttctaccccgaccatgtggaactgtcttggtgggtcaacggcaaagaggtgcacagcggcgtgtctaccgacccccagccactgaaagaacagcccgccctgaacgacagccggtactgcctgagcagcagactgagagtgtccgccaccttctggcagaacccccggaaccacttcagatgccaggtgcagttctacggcctgagcgagaacgacgagtggacccaggacagagccaagcccgtgacccagatcgtgtctgccgaagcctggggcagagccgattgcgacgtgaagctggtggaaaagagcttcgagacagacaccaacctgaacttccagaacctgagcgtgatcggcttcagaatcctgctgctgaaagtggccggctttaacctgctgatgaccctgcggctgtggtccagcagggccaagcgatctggatctggagcaacaaacttctcactactcaaacaagcaggtgacgtggaggagaatcccgggcctactagtatggactggatttggcgcatccttttccttgtcggcgctgctaccggcgcgcattccttcgaagtgaaactgcaggagtcaggacctggcctggtggcgccctcacagagcctgtccgtcacatgcactgtctcaggggtctcattacccgactatggtgtaagctggattcgccagcctccacgaaagggtctggagtggctgggagtaatatggggtagtgaaaccacatactataattcagctctcaaatccagactgaccatcatcaaggacaactccaagagccaagttttcttaaaaatgaacagtctgcaaactgatgacacagccatttactactgtgccaaacattattactacggtggtagctatgctatggactactggggccaaggaacctcagtcaccgtctcctcaacgcgtatccagaaccctgatcctgccgtgtaccagctgcgggatagcaagagcagcgacaagagcgtgtgtctgttcaccgacttcgacagccagaccaacgtgtcccagagcaaggactccgacgtgtacatcaccgataagaccgtgctggacatgcggagcatggacttcaagagcaactccgccgtggcctggtccaacaagtccgatttcgcctgcgccaacgccttcaacaacagcattatccccgaggacacattcttcccaagccccgagagcagctgcggctttaccagcgagagctaccagcagggcgtgctgagcgccaccatcctgtacgagatcctgctgggcaaggccaccctgtacgccgtgctggtgtctgccctggtgctgatggctatggtcaagcggaaggacagccgggga

SEQ ID NO: 8078 - DNA, 1860 bp, synthetic construct
  source 1..1860: mol_type = other DNA
atggccttaccagtgaccgccttgctcctgccgctggccttgctgctccacgccgccaggccggagatcgtgatgacccagagccctgccaccctgtctctgagccctggcgaaagagccaccctgagctgtagagccagccaggacatcagcaagtacctgaactggtatcagcagaagcccggccaggcccccagactgctgatctaccacaccagcagactgcacagcggcatccccgccagattttctggctctggcagcggcaccgactacaccctgacaatcagcagcctccagcccgaggacttcgccgtgtacttctgtcagcaaggcaacaccctgccctacaccttcggccagggcaccaagctggaaatcaagctcgaggacctgaagaacgtgttcccacctgaggtggccgtgttcgagcctagcgaggccgagatcagccacacccagaaagccaccctcgtgtgcctggctaccggcttctaccccgaccatgtggaactgtcttggtgggtcaacggcaaagaggtgcacagcggcgtgtctaccgacccccagccactgaaagaacagcccgccctgaacgacagccggtactgcctgagcagcagactgagagtgtccgccaccttctggcagaacccccggaaccacttcagatgccaggtgcagttctacggcctgagcgagaacgacgagtggacccaggacagagccaagcccgtgacccagatcgtgtctgccgaagcctggggcagagccgattgcgacgtgaagctggtggaaaagagcttcgagacagacaccaacctgaacttccagaacctgagcgtgatcggcttcagaatcctgctgctgaaagtggccggctttaacctgctgatgaccctgcggctgtggtccagcagggccaagcgatctggatctggagcaacaaacttctcactactcaaacaagcaggtgacgtggaggagaatcccgggcctactagtatggactggatttggcgcatccttttccttgtcggcgctgctaccggcgcgcattccttcgaacaggtgcaactccaggaatctggccctggcctcgtgaagcccagcgagacactgagcctgacctgtaccgtgtccggcgtgtccctgcctgactatggcgtgtcctggatcagacagccccctggcaagggcctggaatggatcggagtgatttggggcagcgaaaccacctactacaacagctccctgaagtccagagtgaccatctccaaggacaactccaagaaccaggtgtccctgaagctgagcagcgtgacagccgccgacaccgccgtgtattactgcgccaagcactactactacggcggcagctacgctatggactactggggccagggaaccctcgtgaccgtgtctagtacgcgtatccagaaccctgatcctgccgtgtaccagctgcgggatagcaagagcagcgacaagagcgtgtgtctgttcaccgacttcgacagccagaccaacgtgtcccagagcaaggactccgacgtgtacatcaccgataagaccgtgctggacatgcggagcatggacttcaagagcaactccgccgtggcctggtccaacaagtccgatttcgcctgcgccaacgccttcaacaacagcattatccccgaggacacattcttcccaagccccgagagcagctgcggctttaccagcgagagctaccagcagggcgtgctgagcgccaccatcctgtacgagatcctgctgggcaaggccaccctgtacgccgtgctggtgtctgccctggtgctgatggctatggtcaagcggaaggacagccgggga

SEQ ID NO: 8079 - DNA, 1863 bp, synthetic construct
  source 1..1863: mol_type = other DNA
atggccttaccagtgaccgccttgctcctgccgctggccttgctgctccacgccgccaggccggacgagatcgtgctgacacagagccccgccaccctgtcactgtctccaggcgaaagagccaccctgagctgtagcgccagcagcagcgtgtcctacatgcactggtatcagcagaagcccggccaggcccccagactgctgatctacgataccagcaagctggcctccggcatccccgccagattttctggcagcggctccggcaccgacttcaccctgacaatcagcagcctggaacccgaggacgtggccgtgtactactgttttcaaggcagcgtgtaccccttcaccttcggccagggcaccaagctggaaatcaagagactcgaggacctgaagaacgtgttcccacctgaggtggccgtgttcgagcctagcgaggccgagatcagccacacccagaaagccaccctcgtgtgcctggctaccggcttctaccccgaccatgtggaactgtcttggtgggtcaacggcaaagaggtgcacagcggcgtgtctaccgacccccagccactgaaagaacagcccgccctgaacgacagccggtactgcctgagcagcagactgagagtgtccgccaccttctggcagaacccccggaaccacttcagatgccaggtgcagttctacggcctgagcgagaacgacgagtggacccaggacagagccaagcccgtgacccagatcgtgtctgccgaagcctggggcagagccgattgcgacgtgaagctggtggaaaagagcttcgagacagacaccaacctgaacttccagaacctgagcgtgatcggcttcagaatcctgctgctgaaagtggccggctttaacctgctgatgaccctgcggctgtggtccagcagggccaagcgatctggatctggagcaacaaacttctcactactcaaacaagcaggtgacgtggaggagaatcccgggcctactagtatggactggatttggcgcatccttttccttgtcggcgctgctaccggcgcgcattccttcgaacaggtgcagctccaggaatctggccctggcctcgtgaagcctagccagaccctgagcctgacctgtaccgtgtctggcggcagcatcagcacaagcggcatgggcgtgggctggatcagacagcaccctggcaagggcctggaatggatcggccacatttggtgggacgacgacaagcggtacaaccccgccctgaagtccagagtgaccatcagcgtggacaccagcaagaaccagttcagcctgaagctgagcagcgtgacagccgccgataccgccgtgtattattgcgcccggatggaactgtggtcctactacttcgactactggggccagggaaccctcgtgaccgtgtctagtacgcgtatccagaaccctgatcctgccgtgtaccagctgcgggatagcaagagcagcgacaagagcgtgtgtctgttcaccgacttcgacagccagaccaacgtgtcccagagcaaggactccgacgtgtacatcaccgataagaccgtgctggacatgcggagcatggacttcaagagcaactccgccgtggcctggtccaacaagtccgatttcgcctgcgccaacgccttcaacaacagcattatccccgaggacacattcttcccaagccccgagagcagctgcggctttaccagcgagagctaccagcagggcgtgctgagcgccaccatcctgtacgagatcctgctgggcaaggccaccctgtacgccgtgctggtgtctgccctggtgctgatggctatggtcaagcggaaggacagccgggga

SEQ ID NO: 8080 - DNA, 1857 bp, synthetic construct
  source 1..1857: mol_type = other DNA
atggccttaccagtgaccgccttgctcctgccgctggccttgctgctccacgccgccaggccggactacatccacgtgacacagagccctagcagcctgtccgtgtccatcggcgatagagtgaccatcaactgccagacctctcaaggcgtgggcagcgacctgcactggtatcagcacaaacctggcagagcccctaagctgctgatccaccatgccagctctgtggaagatggcgtgcccagcagattttccggcaccggatttcacaccagcttcaacctgacaatcaacgacctccaggccgacgacatcggcacctactactgtcaagtgctccagagcttcggcagaggcagcagactggatacaaaactcgaggacctgaagaacgtgttcccacctgaggtggccgtgttcgagcctagcgaggccgagatcagccacacccagaaagccaccctcgtgtgcctggctaccggcttctaccccgaccatgtggaactgtcttggtgggtcaacggcaaagaggtgcacagcggcgtgtctaccgacccccagccactgaaagaacagcccgccctgaacgacagccggtactgcctgagcagcagactgagagtgtccgccaccttctggcagaacccccggaaccacttcagatgccaggtgcagttctacggcctgagcgagaacgacgagtggacccaggacagagccaagcccgtgacccagatcgtgtctgccgaagcctggggcagagccgattgcgacgtgaagctggtggaaaagagcttcgagacagacaccaacctgaacttccagaacctgagcgtgatcggcttcagaatcctgctgctgaaagtggccggctttaacctgctgatgaccctgcggctgtggtccagcagggccaagcgatctggatctggagcaacaaacttctcactactcaaacaagcaggtgacgtggaggagaatcccgggcctactagtatggactggatttggcgcatccttttccttgtcggcgctgctaccggcgcgcattccttcgaaagggcacacctggtgcagtctggcaccgccatgaagaaacctggcgcttccgtcagagtgtcctgtcagacaagcggctacaccttcacagcccacatcctgttctggttcagacaggccccaggcagaggactggaatgggtcggatggatcaagccccagtacggggccgtgaatttcggcggaggcttcagagacagagtgaccctgaccagggacgtgtaccgggaaatcgcctacatggacatccggggcctgaagcctgatgacaccgccgtgtactactgcgccagggatagaagctacggcgacagctcttgggctctcgatgcttggggacagggcacaacagtggtggtgtctgctacgcgtatccagaaccctgatcctgccgtgtaccagctgcgggatagcaagagcagcgacaagagcgtgtgtctgttcaccgacttcgacagccagaccaacgtgtcccagagcaaggactccgacgtgtacatcaccgataagaccgtgctggacatgcggagcatggacttcaagagcaactccgccgtggcctggtccaacaagtccgatttcgcctgcgccaacgccttcaacaacagcattatccccgaggacacattcttcccaagccccgagagcagctgcggctttaccagcgagagctaccagcagggcgtgctgagcgccaccatcctgtacgagatcctgctgggcaaggccaccctgtacgccgtgctggtgtctgccctggtgctgatggctatggtcaagcggaaggacagccgggga

SEQ ID NO: 8081 - DNA, 1887 bp, synthetic construct
  source 1..1887: mol_type = other DNA
atggccttaccagtgaccgccttgctcctgccgctggccttgctgctccacgccgccaggccggacgtgcagatgatccagacccccgatagcctggccgtgtccctgggacagagagccaccatctcttgcagagccagcgagagcgtggacaactacggcatcagcttcatgcactggtatcagcagaagcccggccagagccccaagctgctgatctacagagcctccaacctggaaagcggcatccccgccagattttccggcagcggcagcagaaccgacttcaccctgaccatcaaccccgtggaaaccgacgacgtggcaacctactactgccagcagaacaacaaggacccccccacctttggcggaggcaccaagctggaaatcaagctcgaggacctgaagaacgtgttcccacctgaggtggccgtgttcgagcctagcgaggccgagatcagccacacccagaaagccaccctcgtgtgcctggctaccggcttctaccccgaccatgtggaactgtcttggtgggtcaacggcaaagaggtgcacagcggcgtgtctaccgacccccagccactgaaagaacagcccgccctgaacgacagccggtactgcctgagcagcagactgagagtgtccgccaccttctggcagaacccccggaaccacttcagatgccaggtgcagttctacggcctgagcgagaacgacgagtggacccaggacagagccaagcccgtgacccagatcgtgtctgccgaagcctggggcagagccgattgcgacgtgaagctggtggaaaagagcttcgagacagacaccaacctgaacttccagaacctgagcgtgatcggcttcagaatcctgctgctgaaagtggccggctttaacctgctgatgaccctgcggctgtggtccagcagggccaagcgatctggatctggagcaacaaacttctcactactcaaacaagcaggtgacgtggaggagaatcccgggcctactagtatggactggatttggcgcatccttttccttgtcggcgctgctaccggcgcgcattccttcgaagggggaggcggctctcaggtgcaactccagcagtctggcgctgagcttgtgaagcctggggccagcgtgaagattagctgcaaggccagcggctacgccttcagcagctactggatgaactgggtcaagcagcggcctggcaagggcctggaatggatcggccaaatctaccccggcgacggcgacaccacctacaacggcaagttcaagggcaaggccaccctgacagccgacaagagcagcagcaccgtgtacatgcaactgaacagcctgaccagcgaggacagcgccgtgtacttctgcgtgcggtactactacggcagctccggctacttcgactattggggccagggcaccacactgaccgtgtcctctacgcgtatccagaaccctgatcctgccgtgtaccagctgcgggatagcaagagcagcgacaagagcgtgtgtctgttcaccgacttcgacagccagaccaacgtgtcccagagcaaggactccgacgtgtacatcaccgataagaccgtgctggacatgcggagcatggacttcaagagcaactccgccgtggcctggtccaacaagtccgatttcgcctgcgccaacgccttcaacaacagcattatccccgaggacacattcttcccaagccccgagagcagctgcggctttaccagcgagagctaccagcagggcgtgctgagcgccaccatcctgtacgagatcctgctgggcaaggccaccctgtacgccgtgctggtgtctgccctggtgctgatggctatggtcaagcggaaggacagccgggga

SEQ ID NO: 8082 - DNA, 1860 bp, synthetic construct
  source 1..1860: mol_type = other DNA
atggccttaccagtgaccgccttgctcctgccgctggccttgctgctccacgccgccaggccggacgtgcagatgatccagacccccagcagcctgtctgccagcctgggcgatagagtgaccatcagctgtcgggccagccaggacatcggcaactacctgaactggtatcagcagaaacccgacggcaccgtgaagctgctgatctactacaccagcagactgcacagcggcgtgcccagcagattttctggcagcggctctggcaccgagtacagcctgaccatctccaacctggaacaggaagatattgctacctacttctgtcagcaaggcagcgccctgccccctacatttggcggcggaacaaagctggaaatcaacctcgaggacctgaagaacgtgttcccacctgaggtggccgtgttcgagcctagcgaggccgagatcagccacacccagaaagccaccctcgtgtgcctggctaccggcttctaccccgaccatgtggaactgtcttggtgggtcaacggcaaagaggtgcacagcggcgtgtctaccgacccccagccactgaaagaacagcccgccctgaacgacagccggtactgcctgagcagcagactgagagtgtccgccaccttctggcagaacccccggaaccacttcagatgccaggtgcagttctacggcctgagcgagaacgacgagtggacccaggacagagccaagcccgtgacccagatcgtgtctgccgaagcctggggcagagccgattgcgacgtgaagctggtggaaaagagcttcgagacagacaccaacctgaacttccagaacctgagcgtgatcggcttcagaatcctgctgctgaaagtggccggctttaacctgctgatgaccctgcggctgtggtccagcagggccaagcgatctggatctggagcaacaaacttctcactactcaaacaagcaggtgacgtggaggagaatcccgggcctactagtatggactggatttggcgcatccttttccttgtcggcgctgctaccggcgcgcattccttcgaagctctccagctccagcagtctggcgcagaactcgtgcggcctggcgcttctgtgaccctgagctgtaaagccagcggctacaccttcaccgactacgagatgcactgggtcaagcagacccctgtgcacggcctggaatggatcggagccatcgaccctgagacaggcggcaccgcctacaaccagaagttcgagggcaaggccatcctgaccgccgacaagagcagcagcacagcctacatggaactgcggagcctgacctccgaggacagccccgtgtactactgtgccagacggcggtactacggcagcagctccttcgactattggggccagggcaccaccctgaccgtgtctagtacgcgtatccagaaccctgatcctgccgtgtaccagctgcgggatagcaagagcagcgacaagagcgtgtgtctgttcaccgacttcgacagccagaccaacgtgtcccagagcaaggactccgacgtgtacatcaccgataagaccgtgctggacatgcggagcatggacttcaagagcaactccgccgtggcctggtccaacaagtccgatttcgcctgcgccaacgccttcaacaacagcattatccccgaggacacattcttcccaagccccgagagcagctgcggctttaccagcgagagctaccagcagggcgtgctgagcgccaccatcctgtacgagatcctgctgggcaaggccaccctgtacgccgtgctggtgtctgccctggtgctgatggctatggtcaagcggaaggacagccgggga

SEQ ID NO: 8083 - DNA, 1866 bp, synthetic construct
  source 1..1866: mol_type = other DNA
atggccttaccagtgaccgccttgctcctgccgctggccttgctgctccacgccgccaggccggacatccagatgacacagagccctagcagcctgtctgccagcgtgggagacagagtgaccatcacatgcaaggccagcgaccacatcaacaactggctggcctggtatcagcagaagcctggacaggcccctaagctgctgatctacggcgctaccacactggaaacaggcgtgcccagcagattttctggcagcggctctggcaccgactacaccctgacaatatccagcctccagcctgaggacttcgccacctactactgtcagcagagctggaacaccccttggacattcggccagggcaccaagctggaaatcaagagactcgaggacctgaagaacgtgttcccacctgaggtggccgtgttcgagcctagcgaggccgagatcagccacacccagaaagccaccctcgtgtgcctggctaccggcttctaccccgaccatgtggaactgtcttggtgggtcaacggcaaagaggtgcacagcggcgtgtctaccgacccccagccactgaaagaacagcccgccctgaacgacagccggtactgcctgagcagcagactgagagtgtccgccaccttctggcagaacccccggaaccacttcagatgccaggtgcagttctacggcctgagcgagaacgacgagtggacccaggacagagccaagcccgtgacccagatcgtgtctgccgaagcctggggcagagccgattgcggctttaccagcgagagctaccagcagggcgtgctgagcgccaccaacctgagcgtgatcggcttcagaatcctgctgctgaaagtggccggctttaacctgctgatgaccctgcggctgtggtccagcagggccaagcgatctggatctggagcaacaaacttctcactactcaaacaagcaggtgacgtggaggagaatcccgggcctactagtatggactggatttggcgcatccttttccttgtcggcgctgctaccggcgcgcattccttcgaacaagttcagcttcaacagcctggcgctgagctggtcaaacctggcgcttctgtgaagatgagctgcaaagccagcggctacgccttcagcagctactggatcaactggatgaagcagaaacccggccagggactcgaatggatcggccaaatctatcccggcgacggcgacaccaactacaacggcaagttcaagggcagagccacactgaccgccgatacctctagcagcacagcctacatgcagctgagcagcctgaccagcgaagatagcgccgtgtacttctgtgcccggtccatcacaacagtcgtgggctgcgctatggactattggggccagggaacaagcgtgaccgtgtctagtacgcgtatccagaaccctgatcctgccgtgtaccagctgcgggatagcaagagcagcgacaagagcgtgtgtctgttcaccgacttcgacagccagaccaacgtgtcccagagcaaggactccgacgtgtacatcaccgataagaccgtgctggacatgcggagcatggacttcaagagcaactccgccgtggcctggtccaacaagtccgatttcgcctgcgccaacgccttcaacaacagcattatccccgaggacacattcttcccaagccccgagagcagctgcgacgtgaagctggtggaaaagagcttcgagacagacaccaacctgaacttccagatcctgtacgagatcctgctgggcaaggccaccctgtacgccgtgctggtgtctgccctggtgctgatggctatggtcaagcggaaggacagccgggga

SEQ ID NO: 8084 - DNA, 1857 bp, synthetic construct
  source 1..1857: mol_type = other DNA
atggccttaccagtgaccgccttgctcctgccgctggccttgctgctccacgccgccaggccggacatccagatgacacagactacatcctccctgtctgcctctctgggagacagagtcaccatcagttgcagggcaagtcaggacattagtaagtacctgaactggtatcagcagaaaccagatggaactgttaaactcctgatctaccatacatcaagattacactcaggagtcccatcaaggttcagtggcagtgggtctggaacagattattctctcaccattagcaacctggagcaagaagatattgccacttacttttgccaacagggtaatacgcttccgtacacgttcggaggggggaccaagctggagatcacactcgaggacctgaagaacgtgttcccacctgaggtggccgtgttcgagcctagcgaggccgagatcagccacacccagaaagccaccctcgtgtgcctggctaccggcttctaccccgaccatgtggaactgtcttggtgggtcaacggcaaagaggtgcacagcggcgtgtctaccgacccccagccactgaaagaacagcccgccctgaacgacagccggtactgcctgagcagcagactgagagtgtccgccaccttctggcagaacccccggaaccacttcagatgccaggtgcagttctacggcctgagcgagaacgacgagtggacccaggacagagccaagcccgtgacccagatcgtgtctgccgaagcctggggcagagccgattgcggctttaccagcgagagctaccagcagggcgtgctgagcgccaccaacctgagcgtgatcggcttcagaatcctgctgctgaaagtggccggctttaacctgctgatgaccctgcggctgtggtccagcagggccaagcgatctggatctggagcaacaaacttctcactactcaaacaagcaggtgacgtggaggagaatcccgggcctactagtatggactggatttggcgcatccttttccttgtcggcgctgctaccggcgcgcattccttcgaagtgaaactgcaggagtcaggacctggcctggtggcgccctcacagagcctgtccgtcacatgcactgtctcaggggtctcattacccgactatggtgtaagctggattcgccagcctccacgaaagggtctggagtggctgggagtaatatggggtagtgaaaccacatactataattcagctctcaaatccagactgaccatcatcaaggacaactccaagagccaagttttcttaaaaatgaacagtctgcaaactgatgacacagccatttactactgtgccaaacattattactacggtggtagctatgctatggactactggggccaaggaacctcagtcaccgtctcctcaacgcgtatccagaaccctgatcctgccgtgtaccagctgcgggatagcaagagcagcgacaagagcgtgtgtctgttcaccgacttcgacagccagaccaacgtgtcccagagcaaggactccgacgtgtacatcaccgataagaccgtgctggacatgcggagcatggacttcaagagcaactccgccgtggcctggtccaacaagtccgatttcgcctgcgccaacgccttcaacaacagcattatccccgaggacacattcttcccaagccccgagagcagctgcgacgtgaagctggtggaaaagagcttcgagacagacaccaacctgaacttccagatcctgtacgagatcctgctgggcaaggccaccctgtacgccgtgctggtgtctgccctggtgctgatggctatggtcaagcggaaggacagccgggga

SEQ ID NO: 8085 - DNA, 1860 bp, synthetic construct
  source 1..1860: mol_type = other DNA
atggccttaccagtgaccgccttgctcctgccgctggccttgctgctccacgccgccaggccggagatcgtgatgacccagagccctgccaccctgtctctgagccctggcgaaagagccaccctgagctgtagagccagccaggacatcagcaagtacctgaactggtatcagcagaagcccggccaggcccccagactgctgatctaccacaccagcagactgcacagcggcatccccgccagattttctggctctggcagcggcaccgactacaccctgacaatcagcagcctccagcccgaggacttcgccgtgtacttctgtcagcaaggcaacaccctgccctacaccttcggccagggcaccaagctggaaatcaagctcgaggacctgaagaacgtgttcccacctgaggtggccgtgttcgagcctagcgaggccgagatcagccacacccagaaagccaccctcgtgtgcctggctaccggcttctaccccgaccatgtggaactgtcttggtgggtcaacggcaaagaggtgcacagcggcgtgtctaccgacccccagccactgaaagaacagcccgccctgaacgacagccggtactgcctgagcagcagactgagagtgtccgccaccttctggcagaacccccggaaccacttcagatgccaggtgcagttctacggcctgagcgagaacgacgagtggacccaggacagagccaagcccgtgacccagatcgtgtctgccgaagcctggggcagagccgattgcggctttaccagcgagagctaccagcagggcgtgctgagcgccaccaacctgagcgtgatcggcttcagaatcctgctgctgaaagtggccggctttaacctgctgatgaccctgcggctgtggtccagcagggccaagcgatctggatctggagcaacaaacttctcactactcaaacaagcaggtgacgtggaggagaatcccgggcctactagtatggactggatttggcgcatccttttccttgtcggcgctgctaccggcgcgcattccttcgaacaggtgcaactccaggaatctggccctggcctcgtgaagcccagcgagacactgagcctgacctgtaccgtgtccggcgtgtccctgcctgactatggcgtgtcctggatcagacagccccctggcaagggcctggaatggatcggagtgatttggggcagcgaaaccacctactacaacagctccctgaagtccagagtgaccatctccaaggacaactccaagaaccaggtgtccctgaagctgagcagcgtgacagccgccgacaccgccgtgtattactgcgccaagcactactactacggcggcagctacgctatggactactggggccagggaaccctcgtgaccgtgtctagtacgcgtatccagaaccctgatcctgccgtgtaccagctgcgggatagcaagagcagcgacaagagcgtgtgtctgttcaccgacttcgacagccagaccaacgtgtcccagagcaaggactccgacgtgtacatcaccgataagaccgtgctggacatgcggagcatggacttcaagagcaactccgccgtggcctggtccaacaagtccgatttcgcctgcgccaacgccttcaacaacagcattatccccgaggacacattcttcccaagccccgagagcagctgcgacgtgaagctggtggaaaagagcttcgagacagacaccaacctgaacttccagatcctgtacgagatcctgctgggcaaggccaccctgtacgccgtgctggtgtctgccctggtgctgatggctatggtcaagcggaaggacagccgggga

SEQ ID NO: 8086 - DNA, 1863 bp, synthetic construct
  source 1..1863: mol_type = other DNA
atggccttaccagtgaccgccttgctcctgccgctggccttgctgctccacgccgccaggccggacgagatcgtgctgacacagagccccgccaccctgtcactgtctccaggcgaaagagccaccctgagctgtagcgccagcagcagcgtgtcctacatgcactggtatcagcagaagcccggccaggcccccagactgctgatctacgataccagcaagctggcctccggcatccccgccagattttctggcagcggctccggcaccgacttcaccctgacaatcagcagcctggaacccgaggacgtggccgtgtactactgttttcaaggcagcgtgtaccccttcaccttcggccagggcaccaagctggaaatcaagagactcgaggacctgaagaacgtgttcccacctgaggtggccgtgttcgagcctagcgaggccgagatcagccacacccagaaagccaccctcgtgtgcctggctaccggcttctaccccgaccatgtggaactgtcttggtgggtcaacggcaaagaggtgcacagcggcgtgtctaccgacccccagccactgaaagaacagcccgccctgaacgacagccggtactgcctgagcagcagactgagagtgtccgccaccttctggcagaacccccggaaccacttcagatgccaggtgcagttctacggcctgagcgagaacgacgagtggacccaggacagagccaagcccgtgacccagatcgtgtctgccgaagcctggggcagagccgattgcggctttaccagcgagagctaccagcagggcgtgctgagcgccaccaacctgagcgtgatcggcttcagaatcctgctgctgaaagtggccggctttaacctgctgatgaccctgcggctgtggtccagcagggccaagcgatctggatctggagcaacaaacttctcactactcaaacaagcaggtgacgtggaggagaatcccgggcctactagtatggactggatttggcgcatccttttccttgtcggcgctgctaccggcgcgcattccttcgaacaggtgcagctccaggaatctggccctggcctcgtgaagcctagccagaccctgagcctgacctgtaccgtgtctggcggcagcatcagcacaagcggcatgggcgtgggctggatcagacagcaccctggcaagggcctggaatggatcggccacatttggtgggacgacgacaagcggtacaaccccgccctgaagtccagagtgaccatcagcgtggacaccagcaagaaccagttcagcctgaagctgagcagcgtgacagccgccgataccgccgtgtattattgcgcccggatggaactgtggtcctactacttcgactactggggccagggaaccctcgtgaccgtgtctagtacgcgtatccagaaccctgatcctgccgtgtaccagctgcgggatagcaagagcagcgacaagagcgtgtgtctgttcaccgacttcgacagccagaccaacgtgtcccagagcaaggactccgacgtgtacatcaccgataagaccgtgctggacatgcggagcatggacttcaagagcaactccgccgtggcctggtccaacaagtccgatttcgcctgcgccaacgccttcaacaacagcattatccccgaggacacattcttcccaagccccgagagcagctgcgacgtgaagctggtggaaaagagcttcgagacagacaccaacctgaacttccagatcctgtacgagatcctgctgggcaaggccaccctgtacgccgtgctggtgtctgccctggtgctgatggctatggtcaagcggaaggacagccgggga

SEQ ID NO: 8087 - DNA, 1857 bp, synthetic construct
  source 1..1857: mol_type = other DNA
atggccttaccagtgaccgccttgctcctgccgctggccttgctgctccacgccgccaggccggactacatccacgtgacacagagccctagcagcctgtccgtgtccatcggcgatagagtgaccatcaactgccagacctctcaaggcgtgggcagcgacctgcactggtatcagcacaaacctggcagagcccctaagctgctgatccaccatgccagctctgtggaagatggcgtgcccagcagattttccggcaccggatttcacaccagcttcaacctgacaatcaacgacctccaggccgacgacatcggcacctactactgtcaagtgctccagagcttcggcagaggcagcagactggatacaaaactcgaggacctgaagaacgtgttcccacctgaggtggccgtgttcgagcctagcgaggccgagatcagccacacccagaaagccaccctcgtgtgcctggctaccggcttctaccccgaccatgtggaactgtcttggtgggtcaacggcaaagaggtgcacagcggcgtgtctaccgacccccagccactgaaagaacagcccgccctgaacgacagccggtactgcctgagcagcagactgagagtgtccgccaccttctggcagaacccccggaaccacttcagatgccaggtgcagttctacggcctgagcgagaacgacgagtggacccaggacagagccaagcccgtgacccagatcgtgtctgccgaagcctggggcagagccgattgcggctttaccagcgagagctaccagcagggcgtgctgagcgccaccaacctgagcgtgatcggcttcagaatcctgctgctgaaagtggccggctttaacctgctgatgaccctgcggctgtggtccagcagggccaagcgatctggatctggagcaacaaacttctcactactcaaacaagcaggtgacgtggaggagaatcccgggcctactagtatggactggatttggcgcatccttttccttgtcggcgctgctaccggcgcgcattccttcgaaagggcacacctggtgcagtctggcaccgccatgaagaaacctggcgcttccgtcagagtgtcctgtcagacaagcggctacaccttcacagcccacatcctgttctggttcagacaggccccaggcagaggactggaatgggtcggatggatcaagccccagtacggggccgtgaatttcggcggaggcttcagagacagagtgaccctgaccagggacgtgtaccgggaaatcgcctacatggacatccggggcctgaagcctgatgacaccgccgtgtactactgcgccagggatagaagctacggcgacagctcttgggctctcgatgcttggggacagggcacaacagtggtggtgtctgctacgcgtatccagaaccctgatcctgccgtgtaccagctgcgggatagcaagagcagcgacaagagcgtgtgtctgttcaccgacttcgacagccagaccaacgtgtcccagagcaaggactccgacgtgtacatcaccgataagaccgtgctggacatgcggagcatggacttcaagagcaactccgccgtggcctggtccaacaagtccgatttcgcctgcgccaacgccttcaacaacagcattatccccgaggacacattcttcccaagccccgagagcagctgcgacgtgaagctggtggaaaagagcttcgagacagacaccaacctgaacttccagatcctgtacgagatcctgctgggcaaggccaccctgtacgccgtgctggtgtctgccctggtgctgatggctatggtcaagcggaaggacagccgggga

SEQ ID NO: 8088 - DNA, 1887 bp, synthetic construct
  source 1..1887: mol_type = other DNA
atggccttaccagtgaccgccttgctcctgccgctggccttgctgctccacgccgccaggccggacgtgcagatgatccagacccccgatagcctggccgtgtccctgggacagagagccaccatctcttgcagagccagcgagagcgtggacaactacggcatcagcttcatgcactggtatcagcagaagcccggccagagccccaagctgctgatctacagagcctccaacctggaaagcggcatccccgccagattttccggcagcggcagcagaaccgacttcaccctgaccatcaaccccgtggaaaccgacgacgtggcaacctactactgccagcagaacaacaaggacccccccacctttggcggaggcaccaagctggaaatcaagctcgaggacctgaagaacgtgttcccacctgaggtggccgtgttcgagcctagcgaggccgagatcagccacacccagaaagccaccctcgtgtgcctggctaccggcttctaccccgaccatgtggaactgtcttggtgggtcaacggcaaagaggtgcacagcggcgtgtctaccgacccccagccactgaaagaacagcccgccctgaacgacagccggtactgcctgagcagcagactgagagtgtccgccaccttctggcagaacccccggaaccacttcagatgccaggtgcagttctacggcctgagcgagaacgacgagtggacccaggacagagccaagcccgtgacccagatcgtgtctgccgaagcctggggcagagccgattgcggctttaccagcgagagctaccagcagggcgtgctgagcgccaccaacctgagcgtgatcggcttcagaatcctgctgctgaaagtggccggctttaacctgctgatgaccctgcggctgtggtccagcagggccaagcgatctggatctggagcaacaaacttctcactactcaaacaagcaggtgacgtggaggagaatcccgggcctactagtatggactggatttggcgcatccttttccttgtcggcgctgctaccggcgcgcattccttcgaagggggaggcggctctcaggtgcaactccagcagtctggcgctgagcttgtgaagcctggggccagcgtgaagattagctgcaaggccagcggctacgccttcagcagctactggatgaactgggtcaagcagcggcctggcaagggcctggaatggatcggccaaatctaccccggcgacggcgacaccacctacaacggcaagttcaagggcaaggccaccctgacagccgacaagagcagcagcaccgtgtacatgcaactgaacagcctgaccagcgaggacagcgccgtgtacttctgcgtgcggtactactacggcagctccggctacttcgactattggggccagggcaccacactgaccgtgtcctctacgcgtatccagaaccctgatcctgccgtgtaccagctgcgggatagcaagagcagcgacaagagcgtgtgtctgttcaccgacttcgacagccagaccaacgtgtcccagagcaaggactccgacgtgtacatcaccgataagaccgtgctggacatgcggagcatggacttcaagagcaactccgccgtggcctggtccaacaagtccgatttcgcctgcgccaacgccttcaacaacagcattatccccgaggacacattcttcccaagccccgagagcagctgcgacgtgaagctggtggaaaagagcttcgagacagacaccaacctgaacttccagatcctgtacgagatcctgctgggcaaggccaccctgtacgccgtgctggtgtctgccctggtgctgatggctatggtcaagcggaaggacagccgggga

SEQ ID NO: 8089 - DNA, 1860 bp, synthetic construct
  source 1..1860: mol_type = other DNA
atggccttaccagtgaccgccttgctcctgccgctggccttgctgctccacgccgccaggccggacgtgcagatgatccagacccccagcagcctgtctgccagcctgggcgatagagtgaccatcagctgtcgggccagccaggacatcggcaactacctgaactggtatcagcagaaacccgacggcaccgtgaagctgctgatctactacaccagcagactgcacagcggcgtgcccagcagattttctggcagcggctctggcaccgagtacagcctgaccatctccaacctggaacaggaagatattgctacctacttctgtcagcaaggcagcgccctgccccctacatttggcggcggaacaaagctggaaatcaacctcgaggacctgaagaacgtgttcccacctgaggtggccgtgttcgagcctagcgaggccgagatcagccacacccagaaagccaccctcgtgtgcctggctaccggcttctaccccgaccatgtggaactgtcttggtgggtcaacggcaaagaggtgcacagcggcgtgtctaccgacccccagccactgaaagaacagcccgccctgaacgacagccggtactgcctgagcagcagactgagagtgtccgccaccttctggcagaacccccggaaccacttcagatgccaggtgcagttctacggcctgagcgagaacgacgagtggacccaggacagagccaagcccgtgacccagatcgtgtctgccgaagcctggggcagagccgattgcggctttaccagcgagagctaccagcagggcgtgctgagcgccaccaacctgagcgtgatcggcttcagaatcctgctgctgaaagtggccggctttaacctgctgatgaccctgcggctgtggtccagcagggccaagcgatctggatctggagcaacaaacttctcactactcaaacaagcaggtgacgtggaggagaatcccgggcctactagtatggactggatttggcgcatccttttccttgtcggcgctgctaccggcgcgcattccttcgaagctctccagctccagcagtctggcgcagaactcgtgcggcctggcgcttctgtgaccctgagctgtaaagccagcggctacaccttcaccgactacgagatgcactgggtcaagcagacccctgtgcacggcctggaatggatcggagccatcgaccctgagacaggcggcaccgcctacaaccagaagttcgagggcaaggccatcctgaccgccgacaagagcagcagcacagcctacatggaactgcggagcctgacctccgaggacagccccgtgtactactgtgccagacggcggtactacggcagcagctccttcgactattggggccagggcaccaccctgaccgtgtctagtacgcgtatccagaaccctgatcctgccgtgtaccagctgcgggatagcaagagcagcgacaagagcgtgtgtctgttcaccgacttcgacagccagaccaacgtgtcccagagcaaggactccgacgtgtacatcaccgataagaccgtgctggacatgcggagcatggacttcaagagcaactccgccgtggcctggtccaacaagtccgatttcgcctgcgccaacgccttcaacaacagcattatccccgaggacacattcttcccaagccccgagagcagctgcgacgtgaagctggtggaaaagagcttcgagacagacaccaacctgaacttccagatcctgtacgagatcctgctgggcaaggccaccctgtacgccgtgctggtgtctgccctggtgctgatggctatggtcaagcggaaggacagccgggga

SEQ ID NO: 8090 - DNA, 2178 bp, synthetic construct
  source 1..2178: mol_type = other DNA
atggccttaccagtgaccgccttgctcctgccgctggccttgctgctccacgccgccaggccggacatccagatgacacagagccctagcagcctgtctgccagcgtgggagacagagtgaccatcacatgcaaggccagcgaccacatcaacaactggctggcctggtatcagcagaagcctggacaggcccctaagctgctgatctacggcgctaccacactggaaacaggcgtgcccagcagattttctggcagcggctctggcaccgactacaccctgacaatatccagcctccagcctgaggacttcgccacctactactgtcagcagagctggaacaccccttggacattcggccagggcaccaagctggaaatcaagagactcgaggacctgaagaacgtgttcccacctgaggtggccgtgttcgagcctagcgaggccgagatcagccacacccagaaagccaccctcgtgtgcctggctaccggcttctaccccgaccatgtggaactgtcttggtgggtcaacggcaaagaggtgcacagcggcgtgtctaccgacccccagccactgaaagaacagcccgccctgaacgacagccggtactgcctgagcagcagactgagagtgtccgccaccttctggcagaacccccggaaccacttcagatgccaggtgcagttctacggcctgagcgagaacgacgagtggacccaggacagagccaagcccgtgacccagatcgtgtctgccgaagcctggggcagagccgatgatgtgattaagatccactggcaggaaaagaagtccaacaccatcctgggcagccaggaaggcaacaccatgaagaccaacgacacctacatgaagttcagctggctgaccgtgcccgagaagtccctggacaaagaacacagatgcatcgtgcggcacgaaaacaacaagaacggcgtggaccaggaaatcatcttcccacccatcaagaccgatgtgattacaatggaccccaaggacaactgctccaaggacgccaacgataccctgctgctccagctgaccaacaccagcgcctactacatgtacttgttgctgctgctgaagtccgtggtgtacttcgccatcatcacatgctgcctgctgatggctatggtcaagcggaaggacagccggggaagggccaagcgatctggatctggagcaacaaacttctcactactcaaacaagcaggtgacgtggaggagaatcccgggcctactagtatggactggatttggcgcatccttttccttgtcggcgctgctaccggcgcgcattccttcgaacaagttcagcttcaacagcctggcgctgagctggtcaaacctggcgcttctgtgaagatgagctgcaaagccagcggctacgccttcagcagctactggatcaactggatgaagcagaaacccggccagggactcgaatggatcggccaaatctatcccggcgacggcgacaccaactacaacggcaagttcaagggcagagccacactgaccgccgatacctctagcagcacagcctacatgcagctgagcagcctgaccagcgaagatagcgccgtgtacttctgtgcccggtccatcacaacagtcgtgggctgcgctatggactattggggccagggaacaagcgtgaccgtgtctagtacgcgtatccagaaccctgatcctgccgtgtaccagctgcgggatagcaagagcagcgacaagagcgtgtgtctgttcaccgacttcgacagccagaccaacgtgtcccagagcaaggactccgacgtgtacatcaccgataagaccgtgctggacatgcggagcatggacttcaagagcaactccgccgtggcctggtccaacaagtccgatttcgcctgcgccaacgccttcaacaacagcattatccccgaggacacattcttcccaagccccgagagcagcgactccaccgaccacgtgaagcccaaagagacagagaacaccaagcagcccagcaagagctgccacaagcccaaggccatcgtgcacaccgagaaagtgaacatgatgagcctgaccgtgctgggcctgcggatgctgttcgccaaaaccgtggccgtgaacttcctgctgaccgccaagctgttcttcctcctcaccgcc

SEQ ID NO: 8091 - DNA, 2169 bp, synthetic construct
  source 1..2169: mol_type = other DNA
atggccttaccagtgaccgccttgctcctgccgctggccttgctgctccacgccgccaggccggacatccagatgacacagactacatcctccctgtctgcctctctgggagacagagtcaccatcagttgcagggcaagtcaggacattagtaagtacctgaactggtatcagcagaaaccagatggaactgttaaactcctgatctaccatacatcaagattacactcaggagtcccatcaaggttcagtggcagtgggtctggaacagattattctctcaccattagcaacctggagcaagaagatattgccacttacttttgccaacagggtaatacgcttccgtacacgttcggaggggggaccaagctggagatcacactcgaggacctgaagaacgtgttcccacctgaggtggccgtgttcgagcctagcgaggccgagatcagccacacccagaaagccaccctcgtgtgcctggctaccggcttctaccccgaccatgtggaactgtcttggtgggtcaacggcaaagaggtgcacagcggcgtgtctaccgacccccagccactgaaagaacagcccgccctgaacgacagccggtactgcctgagcagcagactgagagtgtccgccaccttctggcagaacccccggaaccacttcagatgccaggtgcagttctacggcctgagcgagaacgacgagtggacccaggacagagccaagcccgtgacccagatcgtgtctgccgaagcctggggcagagccgatgatgtgattaagatccactggcaggaaaagaagtccaacaccatcctgggcagccaggaaggcaacaccatgaagaccaacgacacctacatgaagttcagctggctgaccgtgcccgagaagtccctggacaaagaacacagatgcatcgtgcggcacgaaaacaacaagaacggcgtggaccaggaaatcatcttcccacccatcaagaccgatgtgattacaatggaccccaaggacaactgctccaaggacgccaacgataccctgctgctccagctgaccaacaccagcgcctactacatgtacttgttgctgctgctgaagtccgtggtgtacttcgccatcatcacatgctgcctgctgatggctatggtcaagcggaaggacagccggggaagggccaagcgatctggatctggagcaacaaacttctcactactcaaacaagcaggtgacgtggaggagaatcccgggcctactagtatggactggatttggcgcatccttttccttgtcggcgctgctaccggcgcgcattccttcgaagtgaaactgcaggagtcaggacctggcctggtggcgccctcacagagcctgtccgtcacatgcactgtctcaggggtctcattacccgactatggtgtaagctggattcgccagcctccacgaaagggtctggagtggctgggagtaatatggggtagtgaaaccacatactataattcagctctcaaatccagactgaccatcatcaaggacaactccaagagccaagttttcttaaaaatgaacagtctgcaaactgatgacacagccatttactactgtgccaaacattattactacggtggtagctatgctatggactactggggccaaggaacctcagtcaccgtctcctcaacgcgtatccagaaccctgatcctgccgtgtaccagctgcgggatagcaagagcagcgacaagagcgtgtgtctgttcaccgacttcgacagccagaccaacgtgtcccagagcaaggactccgacgtgtacatcaccgataagaccgtgctggacatgcggagcatggacttcaagagcaactccgccgtggcctggtccaacaagtccgatttcgcctgcgccaacgccttcaacaacagcattatccccgaggacacattcttcccaagccccgagagcagcgactccaccgaccacgtgaagcccaaagagacagagaacaccaagcagcccagcaagagctgccacaagcccaaggccatcgtgcacaccgagaaagtgaacatgatgagcctgaccgtgctgggcctgcggatgctgttcgccaaaaccgtggccgtgaacttcctgctgaccgccaagctgttcttcctcctcaccgcc

SEQ ID NO: 8092 - DNA, 2172 bp, synthetic construct
  source 1..2172: mol_type = other DNA
atggccttaccagtgaccgccttgctcctgccgctggccttgctgctccacgccgccaggccggagatcgtgatgacccagagccctgccaccctgtctctgagccctggcgaaagagccaccctgagctgtagagccagccaggacatcagcaagtacctgaactggtatcagcagaagcccggccaggcccccagactgctgatctaccacaccagcagactgcacagcggcatccccgccagattttctggctctggcagcggcaccgactacaccctgacaatcagcagcctccagcccgaggacttcgccgtgtacttctgtcagcaaggcaacaccctgccctacaccttcggccagggcaccaagctggaaatcaagctcgaggacctgaagaacgtgttcccacctgaggtggccgtgttcgagcctagcgaggccgagatcagccacacccagaaagccaccctcgtgtgcctggctaccggcttctaccccgaccatgtggaactgtcttggtgggtcaacggcaaagaggtgcacagcggcgtgtctaccgacccccagccactgaaagaacagcccgccctgaacgacagccggtactgcctgagcagcagactgagagtgtccgccaccttctggcagaacccccggaaccacttcagatgccaggtgcagttctacggcctgagcgagaacgacgagtggacccaggacagagccaagcccgtgacccagatcgtgtctgccgaagcctggggcagagccgatgatgtgattaagatccactggcaggaaaagaagtccaacaccatcctgggcagccaggaaggcaacaccatgaagaccaacgacacctacatgaagttcagctggctgaccgtgcccgagaagtccctggacaaagaacacagatgcatcgtgcggcacgaaaacaacaagaacggcgtggaccaggaaatcatcttcccacccatcaagaccgatgtgattacaatggaccccaaggacaactgctccaaggacgccaacgataccctgctgctccagctgaccaacaccagcgcctactacatgtacttgttgctgctgctgaagtccgtggtgtacttcgccatcatcacatgctgcctgctgatggctatggtcaagcggaaggacagccggggaagggccaagcgatctggatctggagcaacaaacttctcactactcaaacaagcaggtgacgtggaggagaatcccgggcctactagtatggactggatttggcgcatccttttccttgtcggcgctgctaccggcgcgcattccttcgaacaggtgcaactccaggaatctggccctggcctcgtgaagcccagcgagacactgagcctgacctgtaccgtgtccggcgtgtccctgcctgactatggcgtgtcctggatcagacagccccctggcaagggcctggaatggatcggagtgatttggggcagcgaaaccacctactacaacagctccctgaagtccagagtgaccatctccaaggacaactccaagaaccaggtgtccctgaagctgagcagcgtgacagccgccgacaccgccgtgtattactgcgccaagcactactactacggcggcagctacgctatggactactggggccagggaaccctcgtgaccgtgtctagtacgcgtatccagaaccctgatcctgccgtgtaccagctgcgggatagcaagagcagcgacaagagcgtgtgtctgttcaccgacttcgacagccagaccaacgtgtcccagagcaaggactccgacgtgtacatcaccgataagaccgtgctggacatgcggagcatggacttcaagagcaactccgccgtggcctggtccaacaagtccgatttcgcctgcgccaacgccttcaacaacagcattatccccgaggacacattcttcccaagccccgagagcagcgactccaccgaccacgtgaagcccaaagagacagagaacaccaagcagcccagcaagagctgccacaagcccaaggccatcgtgcacaccgagaaagtgaacatgatgagcctgaccgtgctgggcctgcggatgctgttcgccaaaaccgtggccgtgaacttcctgctgaccgccaagctgttcttcctcctcaccgcc

SEQ ID NO: 8093 - DNA, 2175 bp, synthetic construct
  source 1..2175: mol_type = other DNA
atggccttaccagtgaccgccttgctcctgccgctggccttgctgctccacgccgccaggccggacgagatcgtgctgacacagagccccgccaccctgtcactgtctccaggcgaaagagccaccctgagctgtagcgccagcagcagcgtgtcctacatgcactggtatcagcagaagcccggccaggcccccagactgctgatctacgataccagcaagctggcctccggcatccccgccagattttctggcagcggctccggcaccgacttcaccctgacaatcagcagcctggaacccgaggacgtggccgtgtactactgttttcaaggcagcgtgtaccccttcaccttcggccagggcaccaagctggaaatcaagagactcgaggacctgaagaacgtgttcccacctgaggtggccgtgttcgagcctagcgaggccgagatcagccacacccagaaagccaccctcgtgtgcctggctaccggcttctaccccgaccatgtggaactgtcttggtgggtcaacggcaaagaggtgcacagcggcgtgtctaccgacccccagccactgaaagaacagcccgccctgaacgacagccggtactgcctgagcagcagactgagagtgtccgccaccttctggcagaacccccggaaccacttcagatgccaggtgcagttctacggcctgagcgagaacgacgagtggacccaggacagagccaagcccgtgacccagatcgtgtctgccgaagcctggggcagagccgatgatgtgattaagatccactggcaggaaaagaagtccaacaccatcctgggcagccaggaaggcaacaccatgaagaccaacgacacctacatgaagttcagctggctgaccgtgcccgagaagtccctggacaaagaacacagatgcatcgtgcggcacgaaaacaacaagaacggcgtggaccaggaaatcatcttcccacccatcaagaccgatgtgattacaatggaccccaaggacaactgctccaaggacgccaacgataccctgctgctccagctgaccaacaccagcgcctactacatgtacttgttgctgctgctgaagtccgtggtgtacttcgccatcatcacatgctgcctgctgatggctatggtcaagcggaaggacagccggggaagggccaagcgatctggatctggagcaacaaacttctcactactcaaacaagcaggtgacgtggaggagaatcccgggcctactagtatggactggatttggcgcatccttttccttgtcggcgctgctaccggcgcgcattccttcgaacaggtgcagctccaggaatctggccctggcctcgtgaagcctagccagaccctgagcctgacctgtaccgtgtctggcggcagcatcagcacaagcggcatgggcgtgggctggatcagacagcaccctggcaagggcctggaatggatcggccacatttggtgggacgacgacaagcggtacaaccccgccctgaagtccagagtgaccatcagcgtggacaccagcaagaaccagttcagcctgaagctgagcagcgtgacagccgccgataccgccgtgtattattgcgcccggatggaactgtggtcctactacttcgactactggggccagggaaccctcgtgaccgtgtctagtacgcgtatccagaaccctgatcctgccgtgtaccagctgcgggatagcaagagcagcgacaagagcgtgtgtctgttcaccgacttcgacagccagaccaacgtgtcccagagcaaggactccgacgtgtacatcaccgataagaccgtgctggacatgcggagcatggacttcaagagcaactccgccgtggcctggtccaacaagtccgatttcgcctgcgccaacgccttcaacaacagcattatccccgaggacacattcttcccaagccccgagagcagcgactccaccgaccacgtgaagcccaaagagacagagaacaccaagcagcccagcaagagctgccacaagcccaaggccatcgtgcacaccgagaaagtgaacatgatgagcctgaccgtgctgggcctgcggatgctgttcgccaaaaccgtggccgtgaacttcctgctgaccgccaagctgttcttcctcctcaccgcc

SEQ ID NO: 8094 - DNA, 2169 bp, synthetic construct
  source 1..2169: mol_type = other DNA
atggccttaccagtgaccgccttgctcctgccgctggccttgctgctccacgccgccaggccggactacatccacgtgacacagagccctagcagcctgtccgtgtccatcggcgatagagtgaccatcaactgccagacctctcaaggcgtgggcagcgacctgcactggtatcagcacaaacctggcagagcccctaagctgctgatccaccatgccagctctgtggaagatggcgtgcccagcagattttccggcaccggatttcacaccagcttcaacctgacaatcaacgacctccaggccgacgacatcggcacctactactgtcaagtgctccagagcttcggcagaggcagcagactggatacaaaactcgaggacctgaagaacgtgttcccacctgaggtggccgtgttcgagcctagcgaggccgagatcagccacacccagaaagccaccctcgtgtgcctggctaccggcttctaccccgaccatgtggaactgtcttggtgggtcaacggcaaagaggtgcacagcggcgtgtctaccgacccccagccactgaaagaacagcccgccctgaacgacagccggtactgcctgagcagcagactgagagtgtccgccaccttctggcagaacccccggaaccacttcagatgccaggtgcagttctacggcctgagcgagaacgacgagtggacccaggacagagccaagcccgtgacccagatcgtgtctgccgaagcctggggcagagccgatgatgtgattaagatccactggcaggaaaagaagtccaacaccatcctgggcagccaggaaggcaacaccatgaagaccaacgacacctacatgaagttcagctggctgaccgtgcccgagaagtccctggacaaagaacacagatgcatcgtgcggcacgaaaacaacaagaacggcgtggaccaggaaatcatcttcccacccatcaagaccgatgtgattacaatggaccccaaggacaactgctccaaggacgccaacgataccctgctgctccagctgaccaacaccagcgcctactacatgtacttgttgctgctgctgaagtccgtggtgtacttcgccatcatcacatgctgcctgctgatggctatggtcaagcggaaggacagccggggaagggccaagcgatctggatctggagcaacaaacttctcactactcaaacaagcaggtgacgtggaggagaatcccgggcctactagtatggactggatttggcgcatccttttccttgtcggcgctgctaccggcgcgcattccttcgaaagggcacacctggtgcagtctggcaccgccatgaagaaacctggcgcttccgtcagagtgtcctgtcagacaagcggctacaccttcacagcccacatcctgttctggttcagacaggccccaggcagaggactggaatgggtcggatggatcaagccccagtacggggccgtgaatttcggcggaggcttcagagacagagtgaccctgaccagggacgtgtaccgggaaatcgcctacatggacatccggggcctgaagcctgatgacaccgccgtgtactactgcgccagggatagaagctacggcgacagctcttgggctctcgatgcttggggacagggcacaacagtggtggtgtctgctacgcgtatccagaaccctgatcctgccgtgtaccagctgcgggatagcaagagcagcgacaagagcgtgtgtctgttcaccgacttcgacagccagaccaacgtgtcccagagcaaggactccgacgtgtacatcaccgataagaccgtgctggacatgcggagcatggacttcaagagcaactccgccgtggcctggtccaacaagtccgatttcgcctgcgccaacgccttcaacaacagcattatccccgaggacacattcttcccaagccccgagagcagcgactccaccgaccacgtgaagcccaaagagacagagaacaccaagcagcccagcaagagctgccacaagcccaaggccatcgtgcacaccgagaaagtgaacatgatgagcctgaccgtgctgggcctgcggatgctgttcgccaaaaccgtggccgtgaacttcctgctgaccgccaagctgttcttcctcctcaccgcc

SEQ ID NO: 8095 - DNA, 2199 bp, synthetic construct
  source 1..2199: mol_type = other DNA
atggccttaccagtgaccgccttgctcctgccgctggccttgctgctccacgccgccaggccggacgtgcagatgatccagacccccgatagcctggccgtgtccctgggacagagagccaccatctcttgcagagccagcgagagcgtggacaactacggcatcagcttcatgcactggtatcagcagaagcccggccagagccccaagctgctgatctacagagcctccaacctggaaagcggcatccccgccagattttccggcagcggcagcagaaccgacttcaccctgaccatcaaccccgtggaaaccgacgacgtggcaacctactactgccagcagaacaacaaggacccccccacctttggcggaggcaccaagctggaaatcaagctcgaggacctgaagaacgtgttcccacctgaggtggccgtgttcgagcctagcgaggccgagatcagccacacccagaaagccaccctcgtgtgcctggctaccggcttctaccccgaccatgtggaactgtcttggtgggtcaacggcaaagaggtgcacagcggcgtgtctaccgacccccagccactgaaagaacagcccgccctgaacgacagccggtactgcctgagcagcagactgagagtgtccgccaccttctggcagaacccccggaaccacttcagatgccaggtgcagttctacggcctgagcgagaacgacgagtggacccaggacagagccaagcccgtgacccagatcgtgtctgccgaagcctggggcagagccgatgatgtgattaagatccactggcaggaaaagaagtccaacaccatcctgggcagccaggaaggcaacaccatgaagaccaacgacacctacatgaagttcagctggctgaccgtgcccgagaagtccctggacaaagaacacagatgcatcgtgcggcacgaaaacaacaagaacggcgtggaccaggaaatcatcttcccacccatcaagaccgatgtgattacaatggaccccaaggacaactgctccaaggacgccaacgataccctgctgctccagctgaccaacaccagcgcctactacatgtacttgttgctgctgctgaagtccgtggtgtacttcgccatcatcacatgctgcctgctgatggctatggtcaagcggaaggacagccggggaagggccaagcgatctggatctggagcaacaaacttctcactactcaaacaagcaggtgacgtggaggagaatcccgggcctactagtatggactggatttggcgcatccttttccttgtcggcgctgctaccggcgcgcattccttcgaagggggaggcggctctcaggtgcaactccagcagtctggcgctgagcttgtgaagcctggggccagcgtgaagattagctgcaaggccagcggctacgccttcagcagctactggatgaactgggtcaagcagcggcctggcaagggcctggaatggatcggccaaatctaccccggcgacggcgacaccacctacaacggcaagttcaagggcaaggccaccctgacagccgacaagagcagcagcaccgtgtacatgcaactgaacagcctgaccagcgaggacagcgccgtgtacttctgcgtgcggtactactacggcagctccggctacttcgactattggggccagggcaccacactgaccgtgtcctctacgcgtatccagaaccctgatcctgccgtgtaccagctgcgggatagcaagagcagcgacaagagcgtgtgtctgttcaccgacttcgacagccagaccaacgtgtcccagagcaaggactccgacgtgtacatcaccgataagaccgtgctggacatgcggagcatggacttcaagagcaactccgccgtggcctggtccaacaagtccgatttcgcctgcgccaacgccttcaacaacagcattatccccgaggacacattcttcccaagccccgagagcagcgactccaccgaccacgtgaagcccaaagagacagagaacaccaagcagcccagcaagagctgccacaagcccaaggccatcgtgcacaccgagaaagtgaacatgatgagcctgaccgtgctgggcctgcggatgctgttcgccaaaaccgtggccgtgaacttcctgctgaccgccaagctgttcttcctcctcaccgcc

SEQ ID NO: 8096 - DNA, 2172 bp, synthetic construct
  source 1..2172: mol_type = other DNA
atggccttaccagtgaccgccttgctcctgccgctggccttgctgctccacgccgccaggccggacgtgcagatgatccagacccccagcagcctgtctgccagcctgggcgatagagtgaccatcagctgtcgggccagccaggacatcggcaactacctgaactggtatcagcagaaacccgacggcaccgtgaagctgctgatctactacaccagcagactgcacagcggcgtgcccagcagattttctggcagcggctctggcaccgagtacagcctgaccatctccaacctggaacaggaagatattgctacctacttctgtcagcaaggcagcgccctgccccctacatttggcggcggaacaaagctggaaatcaacctcgaggacctgaagaacgtgttcccacctgaggtggccgtgttcgagcctagcgaggccgagatcagccacacccagaaagccaccctcgtgtgcctggctaccggcttctaccccgaccatgtggaactgtcttggtgggtcaacggcaaagaggtgcacagcggcgtgtctaccgacccccagccactgaaagaacagcccgccctgaacgacagccggtactgcctgagcagcagactgagagtgtccgccaccttctggcagaacccccggaaccacttcagatgccaggtgcagttctacggcctgagcgagaacgacgagtggacccaggacagagccaagcccgtgacccagatcgtgtctgccgaagcctggggcagagccgatgatgtgattaagatccactggcaggaaaagaagtccaacaccatcctgggcagccaggaaggcaacaccatgaagaccaacgacacctacatgaagttcagctggctgaccgtgcccgagaagtccctggacaaagaacacagatgcatcgtgcggcacgaaaacaacaagaacggcgtggaccaggaaatcatcttcccacccatcaagaccgatgtgattacaatggaccccaaggacaactgctccaaggacgccaacgataccctgctgctccagctgaccaacaccagcgcctactacatgtacttgttgctgctgctgaagtccgtggtgtacttcgccatcatcacatgctgcctgctgatggctatggtcaagcggaaggacagccggggaagggccaagcgatctggatctggagcaacaaacttctcactactcaaacaagcaggtgacgtggaggagaatcccgggcctactagtatggactggatttggcgcatccttttccttgtcggcgctgctaccggcgcgcattccttcgaagctctccagctccagcagtctggcgcagaactcgtgcggcctggcgcttctgtgaccctgagctgtaaagccagcggctacaccttcaccgactacgagatgcactgggtcaagcagacccctgtgcacggcctggaatggatcggagccatcgaccctgagacaggcggcaccgcctacaaccagaagttcgagggcaaggccatcctgaccgccgacaagagcagcagcacagcctacatggaactgcggagcctgacctccgaggacagccccgtgtactactgtgccagacggcggtactacggcagcagctccttcgactattggggccagggcaccaccctgaccgtgtctagtacgcgtatccagaaccctgatcctgccgtgtaccagctgcgggatagcaagagcagcgacaagagcgtgtgtctgttcaccgacttcgacagccagaccaacgtgtcccagagcaaggactccgacgtgtacatcaccgataagaccgtgctggacatgcggagcatggacttcaagagcaactccgccgtggcctggtccaacaagtccgatttcgcctgcgccaacgccttcaacaacagcattatccccgaggacacattcttcccaagccccgagagcagcgactccaccgaccacgtgaagcccaaagagacagagaacaccaagcagcccagcaagagctgccacaagcccaaggccatcgtgcacaccgagaaagtgaacatgatgagcctgaccgtgctgggcctgcggatgctgttcgccaaaaccgtggccgtgaacttcctgctgaccgccaagctgttcttcctcctcaccgcc

SEQ ID NO: 8097 - DNA, 2172 bp, synthetic construct
  source 1..2172: mol_type = other DNA
atggccttaccagtgaccgccttgctcctgccgctggccttgctgctccacgccgccaggccggacatccagatgacacagagccctagcagcctgtctgccagcgtgggagacagagtgaccatcacatgcaaggccagcgaccacatcaacaactggctggcctggtatcagcagaagcctggacaggcccctaagctgctgatctacggcgctaccacactggaaacaggcgtgcccagcagattttctggcagcggctctggcaccgactacaccctgacaatatccagcctccagcctgaggacttcgccacctactactgtcagcagagctggaacaccccttggacattcggccagggcaccaagctggaaatcaagagactcgaggacctgaagaacgtgttcccacctgaggtggccgtgttcgagcctagcgaggccgagatcagccacacccagaaagccaccctcgtgtgcctggctaccggcttctaccccgaccatgtggaactgtcttggtgggtcaacggcaaagaggtgcacagcggcgtgtctaccgacccccagccactgaaagaacagcccgccctgaacgacagccggtactgcctgagcagcagactgagagtgtccgccaccttctggcagaacccccggaaccacttcagatgccaggtgcagttctacggcctgagcgagaacgacgagtggacccaggacagagccaagcccgtgacccagatcgtgtctgccgaagcctggggcagagccgatgatgtgattaagatccactggcaggaaaagaagtccaacaccatcctgggcagccaggaaggcaacaccatgaagaccaacgacacctacatgaagttcagctggctgaccgtgcccgagaagtccctggacaaagaacacagatgcatcgtgcggcacgaaaacaacaagaacggcgtggaccaggaaatcatcttcccacccatcaagaccgatgtgattacaatggaccccaaggacaactgctccaaggacgccaacgataccctgctgctccagctgaccaacaccagcgcctactacatgtacttgttgctgctgctgaagtccgtggtgtacttcgccatcatcacatgctgcctgctgcggagaaccgccttctgctgcaacggcgagaagtctagggccaagcgatctggatctggagcaacaaacttctcactactcaaacaagcaggtgacgtggaggagaatcccgggcctactagtatggactggatttggcgcatccttttccttgtcggcgctgctaccggcgcgcattccttcgaacaagttcagcttcaacagcctggcgctgagctggtcaaacctggcgcttctgtgaagatgagctgcaaagccagcggctacgccttcagcagctactggatcaactggatgaagcagaaacccggccagggactcgaatggatcggccaaatctatcccggcgacggcgacaccaactacaacggcaagttcaagggcagagccacactgaccgccgatacctctagcagcacagcctacatgcagctgagcagcctgaccagcgaagatagcgccgtgtacttctgtgcccggtccatcacaacagtcgtgggctgcgctatggactattggggccagggaacaagcgtgaccgtgtctagtacgcgtatccagaaccctgatcctgccgtgtaccagctgcgggatagcaagagcagcgacaagagcgtgtgtctgttcaccgacttcgacagccagaccaacgtgtcccagagcaaggactccgacgtgtacatcaccgataagaccgtgctggacatgcggagcatggacttcaagagcaactccgccgtggcctggtccaacaagtccgatttcgcctgcgccaacgccttcaacaacagcattatccccgaggacacattcttcccaagccccgagagcagcgactccaccgaccacgtgaagcccaaagagacagagaacaccaagcagcccagcaagagctgccacaagcccaaggccatcgtgcacaccgagaaagtgaacatgatgagcctgaccgtgctgggcctgcggatgctgttcgccaaaaccgtggccgtgaacttcctgctgaccgccaagctgttcttcctc

SEQ ID NO: 8098 - DNA, 2163 bp, synthetic construct
  source 1..2163: mol_type = other DNA
atggccttaccagtgaccgccttgctcctgccgctggccttgctgctccacgccgccaggccggacatccagatgacacagactacatcctccctgtctgcctctctgggagacagagtcaccatcagttgcagggcaagtcaggacattagtaagtacctgaactggtatcagcagaaaccagatggaactgttaaactcctgatctaccatacatcaagattacactcaggagtcccatcaaggttcagtggcagtgggtctggaacagattattctctcaccattagcaacctggagcaagaagatattgccacttacttttgccaacagggtaatacgcttccgtacacgttcggaggggggaccaagctggagatcacactcgaggacctgaagaacgtgttcccacctgaggtggccgtgttcgagcctagcgaggccgagatcagccacacccagaaagccaccctcgtgtgcctggctaccggcttctaccccgaccatgtggaactgtcttggtgggtcaacggcaaagaggtgcacagcggcgtgtctaccgacccccagccactgaaagaacagcccgccctgaacgacagccggtactgcctgagcagcagactgagagtgtccgccaccttctggcagaacccccggaaccacttcagatgccaggtgcagttctacggcctgagcgagaacgacgagtggacccaggacagagccaagcccgtgacccagatcgtgtctgccgaagcctggggcagagccgatgatgtgattaagatccactggcaggaaaagaagtccaacaccatcctgggcagccaggaaggcaacaccatgaagaccaacgacacctacatgaagttcagctggctgaccgtgcccgagaagtccctggacaaagaacacagatgcatcgtgcggcacgaaaacaacaagaacggcgtggaccaggaaatcatcttcccacccatcaagaccgatgtgattacaatggaccccaaggacaactgctccaaggacgccaacgataccctgctgctccagctgaccaacaccagcgcctactacatgtacttgttgctgctgctgaagtccgtggtgtacttcgccatcatcacatgctgcctgctgcggagaaccgccttctgctgcaacggcgagaagtctagggccaagcgatctggatctggagcaacaaacttctcactactcaaacaagcaggtgacgtggaggagaatcccgggcctactagtatggactggatttggcgcatccttttccttgtcggcgctgctaccggcgcgcattccttcgaagtgaaactgcaggagtcaggacctggcctggtggcgccctcacagagcctgtccgtcacatgcactgtctcaggggtctcattacccgactatggtgtaagctggattcgccagcctccacgaaagggtctggagtggctgggagtaatatggggtagtgaaaccacatactataattcagctctcaaatccagactgaccatcatcaaggacaactccaagagccaagttttcttaaaaatgaacagtctgcaaactgatgacacagccatttactactgtgccaaacattattactacggtggtagctatgctatggactactggggccaaggaacctcagtcaccgtctcctcaacgcgtatccagaaccctgatcctgccgtgtaccagctgcgggatagcaagagcagcgacaagagcgtgtgtctgttcaccgacttcgacagccagaccaacgtgtcccagagcaaggactccgacgtgtacatcaccgataagaccgtgctggacatgcggagcatggacttcaagagcaactccgccgtggcctggtccaacaagtccgatttcgcctgcgccaacgccttcaacaacagcattatccccgaggacacattcttcccaagccccgagagcagcgactccaccgaccacgtgaagcccaaagagacagagaacaccaagcagcccagcaagagctgccacaagcccaaggccatcgtgcacaccgagaaagtgaacatgatgagcctgaccgtgctgggcctgcggatgctgttcgccaaaaccgtggccgtgaacttcctgctgaccgccaagctgttcttcctc

SEQ ID NO: 8099 - DNA, 2166 bp, synthetic construct
  source 1..2166: mol_type = other DNA
atggccttaccagtgaccgccttgctcctgccgctggccttgctgctccacgccgccaggccggagatcgtgatgacccagagccctgccaccctgtctctgagccctggcgaaagagccaccctgagctgtagagccagccaggacatcagcaagtacctgaactggtatcagcagaagcccggccaggcccccagactgctgatctaccacaccagcagactgcacagcggcatccccgccagattttctggctctggcagcggcaccgactacaccctgacaatcagcagcctccagcccgaggacttcgccgtgtacttctgtcagcaaggcaacaccctgccctacaccttcggccagggcaccaagctggaaatcaagctcgaggacctgaagaacgtgttcccacctgaggtggccgtgttcgagcctagcgaggccgagatcagccacacccagaaagccaccctcgtgtgcctggctaccggcttctaccccgaccatgtggaactgtcttggtgggtcaacggcaaagaggtgcacagcggcgtgtctaccgacccccagccactgaaagaacagcccgccctgaacgacagccggtactgcctgagcagcagactgagagtgtccgccaccttctggcagaacccccggaaccacttcagatgccaggtgcagttctacggcctgagcgagaacgacgagtggacccaggacagagccaagcccgtgacccagatcgtgtctgccgaagcctggggcagagccgatgatgtgattaagatccactggcaggaaaagaagtccaacaccatcctgggcagccaggaaggcaacaccatgaagaccaacgacacctacatgaagttcagctggctgaccgtgcccgagaagtccctggacaaagaacacagatgcatcgtgcggcacgaaaacaacaagaacggcgtggaccaggaaatcatcttcccacccatcaagaccgatgtgattacaatggaccccaaggacaactgctccaaggacgccaacgataccctgctgctccagctgaccaacaccagcgcctactacatgtacttgttgctgctgctgaagtccgtggtgtacttcgccatcatcacatgctgcctgctgcggagaaccgccttctgctgcaacggcgagaagtctagggccaagcgatctggatctggagcaacaaacttctcactactcaaacaagcaggtgacgtggaggagaatcccgggcctactagtatggactggatttggcgcatccttttccttgtcggcgctgctaccggcgcgcattccttcgaacaggtgcaactccaggaatctggccctggcctcgtgaagcccagcgagacactgagcctgacctgtaccgtgtccggcgtgtccctgcctgactatggcgtgtcctggatcagacagccccctggcaagggcctggaatggatcggagtgatttggggcagcgaaaccacctactacaacagctccctgaagtccagagtgaccatctccaaggacaactccaagaaccaggtgtccctgaagctgagcagcgtgacagccgccgacaccgccgtgtattactgcgccaagcactactactacggcggcagctacgctatggactactggggccagggaaccctcgtgaccgtgtctagtacgcgtatccagaaccctgatcctgccgtgtaccagctgcgggatagcaagagcagcgacaagagcgtgtgtctgttcaccgacttcgacagccagaccaacgtgtcccagagcaaggactccgacgtgtacatcaccgataagaccgtgctggacatgcggagcatggacttcaagagcaactccgccgtggcctggtccaacaagtccgatttcgcctgcgccaacgccttcaacaacagcattatccccgaggacacattcttcccaagccccgagagcagcgactccaccgaccacgtgaagcccaaagagacagagaacaccaagcagcccagcaagagctgccacaagcccaaggccatcgtgcacaccgagaaagtgaacatgatgagcctgaccgtgctgggcctgcggatgctgttcgccaaaaccgtggccgtgaacttcctgctgaccgccaagctgttcttcctc

SEQ ID NO: 8100 - DNA, 2169 bp, synthetic construct
  source 1..2169: mol_type = other DNA
atggccttaccagtgaccgccttgctcctgccgctggccttgctgctccacgccgccaggccggacgagatcgtgctgacacagagccccgccaccctgtcactgtctccaggcgaaagagccaccctgagctgtagcgccagcagcagcgtgtcctacatgcactggtatcagcagaagcccggccaggcccccagactgctgatctacgataccagcaagctggcctccggcatccccgccagattttctggcagcggctccggcaccgacttcaccctgacaatcagcagcctggaacccgaggacgtggccgtgtactactgttttcaaggcagcgtgtaccccttcaccttcggccagggcaccaagctggaaatcaagagactcgaggacctgaagaacgtgttcccacctgaggtggccgtgttcgagcctagcgaggccgagatcagccacacccagaaagccaccctcgtgtgcctggctaccggcttctaccccgaccatgtggaactgtcttggtgggtcaacggcaaagaggtgcacagcggcgtgtctaccgacccccagccactgaaagaacagcccgccctgaacgacagccggtactgcctgagcagcagactgagagtgtccgccaccttctggcagaacccccggaaccacttcagatgccaggtgcagttctacggcctgagcgagaacgacgagtggacccaggacagagccaagcccgtgacccagatcgtgtctgccgaagcctggggcagagccgatgatgtgattaagatccactggcaggaaaagaagtccaacaccatcctgggcagccaggaaggcaacaccatgaagaccaacgacacctacatgaagttcagctggctgaccgtgcccgagaagtccctggacaaagaacacagatgcatcgtgcggcacgaaaacaacaagaacggcgtggaccaggaaatcatcttcccacccatcaagaccgatgtgattacaatggaccccaaggacaactgctccaaggacgccaacgataccctgctgctccagctgaccaacaccagcgcctactacatgtacttgttgctgctgctgaagtccgtggtgtacttcgccatcatcacatgctgcctgctgcggagaaccgccttctgctgcaacggcgagaagtctagggccaagcgatctggatctggagcaacaaacttctcactactcaaacaagcaggtgacgtggaggagaatcccgggcctactagtatggactggatttggcgcatccttttccttgtcggcgctgctaccggcgcgcattccttcgaacaggtgcagctccaggaatctggccctggcctcgtgaagcctagccagaccctgagcctgacctgtaccgtgtctggcggcagcatcagcacaagcggcatgggcgtgggctggatcagacagcaccctggcaagggcctggaatggatcggccacatttggtgggacgacgacaagcggtacaaccccgccctgaagtccagagtgaccatcagcgtggacaccagcaagaaccagttcagcctgaagctgagcagcgtgacagccgccgataccgccgtgtattattgcgcccggatggaactgtggtcctactacttcgactactggggccagggaaccctcgtgaccgtgtctagtacgcgtatccagaaccctgatcctgccgtgtaccagctgcgggatagcaagagcagcgacaagagcgtgtgtctgttcaccgacttcgacagccagaccaacgtgtcccagagcaaggactccgacgtgtacatcaccgataagaccgtgctggacatgcggagcatggacttcaagagcaactccgccgtggcctggtccaacaagtccgatttcgcctgcgccaacgccttcaacaacagcattatccccgaggacacattcttcccaagccccgagagcagcgactccaccgaccacgtgaagcccaaagagacagagaacaccaagcagcccagcaagagctgccacaagcccaaggccatcgtgcacaccgagaaagtgaacatgatgagcctgaccgtgctgggcctgcggatgctgttcgccaaaaccgtggccgtgaacttcctgctgaccgccaagctgttcttcctc

SEQ ID NO: 8101 - DNA, 2163 bp, synthetic construct
  source 1..2163: mol_type = other DNA
atggccttaccagtgaccgccttgctcctgccgctggccttgctgctccacgccgccaggccggactacatccacgtgacacagagccctagcagcctgtccgtgtccatcggcgatagagtgaccatcaactgccagacctctcaaggcgtgggcagcgacctgcactggtatcagcacaaacctggcagagcccctaagctgctgatccaccatgccagctctgtggaagatggcgtgcccagcagattttccggcaccggatttcacaccagcttcaacctgacaatcaacgacctccaggccgacgacatcggcacctactactgtcaagtgctccagagcttcggcagaggcagcagactggatacaaaactcgaggacctgaagaacgtgttcccacctgaggtggccgtgttcgagcctagcgaggccgagatcagccacacccagaaagccaccctcgtgtgcctggctaccggcttctaccccgaccatgtggaactgtcttggtgggtcaacggcaaagaggtgcacagcggcgtgtctaccgacccccagccactgaaagaacagcccgccctgaacgacagccggtactgcctgagcagcagactgagagtgtccgccaccttctggcagaacccccggaaccacttcagatgccaggtgcagttctacggcctgagcgagaacgacgagtggacccaggacagagccaagcccgtgacccagatcgtgtctgccgaagcctggggcagagccgatgatgtgattaagatccactggcaggaaaagaagtccaacaccatcctgggcagccaggaaggcaacaccatgaagaccaacgacacctacatgaagttcagctggctgaccgtgcccgagaagtccctggacaaagaacacagatgcatcgtgcggcacgaaaacaacaagaacggcgtggaccaggaaatcatcttcccacccatcaagaccgatgtgattacaatggaccccaaggacaactgctccaaggacgccaacgataccctgctgctccagctgaccaacaccagcgcctactacatgtacttgttgctgctgctgaagtccgtggtgtacttcgccatcatcacatgctgcctgctgcggagaaccgccttctgctgcaacggcgagaagtctagggccaagcgatctggatctggagcaacaaacttctcactactcaaacaagcaggtgacgtggaggagaatcccgggcctactagtatggactggatttggcgcatccttttccttgtcggcgctgctaccggcgcgcattccttcgaaagggcacacctggtgcagtctggcaccgccatgaagaaacctggcgcttccgtcagagtgtcctgtcagacaagcggctacaccttcacagcccacatcctgttctggttcagacaggccccaggcagaggactggaatgggtcggatggatcaagccccagtacggggccgtgaatttcggcggaggcttcagagacagagtgaccctgaccagggacgtgtaccgggaaatcgcctacatggacatccggggcctgaagcctgatgacaccgccgtgtactactgcgccagggatagaagctacggcgacagctcttgggctctcgatgcttggggacagggcacaacagtggtggtgtctgctacgcgtatccagaaccctgatcctgccgtgtaccagctgcgggatagcaagagcagcgacaagagcgtgtgtctgttcaccgacttcgacagccagaccaacgtgtcccagagcaaggactccgacgtgtacatcaccgataagaccgtgctggacatgcggagcatggacttcaagagcaactccgccgtggcctggtccaacaagtccgatttcgcctgcgccaacgccttcaacaacagcattatccccgaggacacattcttcccaagccccgagagcagcgactccaccgaccacgtgaagcccaaagagacagagaacaccaagcagcccagcaagagctgccacaagcccaaggccatcgtgcacaccgagaaagtgaacatgatgagcctgaccgtgctgggcctgcggatgctgttcgccaaaaccgtggccgtgaacttcctgctgaccgccaagctgttcttcctc

SEQ ID NO: 8102 - DNA, 2193 bp, synthetic construct
  source 1..2193: mol_type = other DNA
atggccttaccagtgaccgccttgctcctgccgctggccttgctgctccacgccgccaggccggacgtgcagatgatccagacccccgatagcctggccgtgtccctgggacagagagccaccatctcttgcagagccagcgagagcgtggacaactacggcatcagcttcatgcactggtatcagcagaagcccggccagagccccaagctgctgatctacagagcctccaacctggaaagcggcatccccgccagattttccggcagcggcagcagaaccgacttcaccctgaccatcaaccccgtggaaaccgacgacgtggcaacctactactgccagcagaacaacaaggacccccccacctttggcggaggcaccaagctggaaatcaagctcgaggacctgaagaacgtgttcccacctgaggtggccgtgttcgagcctagcgaggccgagatcagccacacccagaaagccaccctcgtgtgcctggctaccggcttctaccccgaccatgtggaactgtcttggtgggtcaacggcaaagaggtgcacagcggcgtgtctaccgacccccagccactgaaagaacagcccgccctgaacgacagccggtactgcctgagcagcagactgagagtgtccgccaccttctggcagaacccccggaaccacttcagatgccaggtgcagttctacggcctgagcgagaacgacgagtggacccaggacagagccaagcccgtgacccagatcgtgtctgccgaagcctggggcagagccgatgatgtgattaagatccactggcaggaaaagaagtccaacaccatcctgggcagccaggaaggcaacaccatgaagaccaacgacacctacatgaagttcagctggctgaccgtgcccgagaagtccctggacaaagaacacagatgcatcgtgcggcacgaaaacaacaagaacggcgtggaccaggaaatcatcttcccacccatcaagaccgatgtgattacaatggaccccaaggacaactgctccaaggacgccaacgataccctgctgctccagctgaccaacaccagcgcctactacatgtacttgttgctgctgctgaagtccgtggtgtacttcgccatcatcacatgctgcctgctgcggagaaccgccttctgctgcaacggcgagaagtctagggccaagcgatctggatctggagcaacaaacttctcactactcaaacaagcaggtgacgtggaggagaatcccgggcctactagtatggactggatttggcgcatccttttccttgtcggcgctgctaccggcgcgcattccttcgaagggggaggcggctctcaggtgcaactccagcagtctggcgctgagcttgtgaagcctggggccagcgtgaagattagctgcaaggccagcggctacgccttcagcagctactggatgaactgggtcaagcagcggcctggcaagggcctggaatggatcggccaaatctaccccggcgacggcgacaccacctacaacggcaagttcaagggcaaggccaccctgacagccgacaagagcagcagcaccgtgtacatgcaactgaacagcctgaccagcgaggacagcgccgtgtacttctgcgtgcggtactactacggcagctccggctacttcgactattggggccagggcaccacactgaccgtgtcctctacgcgtatccagaaccctgatcctgccgtgtaccagctgcgggatagcaagagcagcgacaagagcgtgtgtctgttcaccgacttcgacagccagaccaacgtgtcccagagcaaggactccgacgtgtacatcaccgataagaccgtgctggacatgcggagcatggacttcaagagcaactccgccgtggcctggtccaacaagtccgatttcgcctgcgccaacgccttcaacaacagcattatccccgaggacacattcttcccaagccccgagagcagcgactccaccgaccacgtgaagcccaaagagacagagaacaccaagcagcccagcaagagctgccacaagcccaaggccatcgtgcacaccgagaaagtgaacatgatgagcctgaccgtgctgggcctgcggatgctgttcgccaaaaccgtggccgtgaacttcctgctgaccgccaagctgttcttcctc

SEQ ID NO: 8103 - DNA, 2166 bp, synthetic construct
  source 1..2166: mol_type = other DNA
atggccttaccagtgaccgccttgctcctgccgctggccttgctgctccacgccgccaggccggacgtgcagatgatccagacccccagcagcctgtctgccagcctgggcgatagagtgaccatcagctgtcgggccagccaggacatcggcaactacctgaactggtatcagcagaaacccgacggcaccgtgaagctgctgatctactacaccagcagactgcacagcggcgtgcccagcagattttctggcagcggctctggcaccgagtacagcctgaccatctccaacctggaacaggaagatattgctacctacttctgtcagcaaggcagcgccctgccccctacatttggcggcggaacaaagctggaaatcaacctcgaggacctgaagaacgtgttcccacctgaggtggccgtgttcgagcctagcgaggccgagatcagccacacccagaaagccaccctcgtgtgcctggctaccggcttctaccccgaccatgtggaactgtcttggtgggtcaacggcaaagaggtgcacagcggcgtgtctaccgacccccagccactgaaagaacagcccgccctgaacgacagccggtactgcctgagcagcagactgagagtgtccgccaccttctggcagaacccccggaaccacttcagatgccaggtgcagttctacggcctgagcgagaacgacgagtggacccaggacagagccaagcccgtgacccagatcgtgtctgccgaagcctggggcagagccgatgatgtgattaagatccactggcaggaaaagaagtccaacaccatcctgggcagccaggaaggcaacaccatgaagaccaacgacacctacatgaagttcagctggctgaccgtgcccgagaagtccctggacaaagaacacagatgcatcgtgcggcacgaaaacaacaagaacggcgtggaccaggaaatcatcttcccacccatcaagaccgatgtgattacaatggaccccaaggacaactgctccaaggacgccaacgataccctgctgctccagctgaccaacaccagcgcctactacatgtacttgttgctgctgctgaagtccgtggtgtacttcgccatcatcacatgctgcctgctgcggagaaccgccttctgctgcaacggcgagaagtctagggccaagcgatctggatctggagcaacaaacttctcactactcaaacaagcaggtgacgtggaggagaatcccgggcctactagtatggactggatttggcgcatccttttccttgtcggcgctgctaccggcgcgcattccttcgaagctctccagctccagcagtctggcgcagaactcgtgcggcctggcgcttctgtgaccctgagctgtaaagccagcggctacaccttcaccgactacgagatgcactgggtcaagcagacccctgtgcacggcctggaatggatcggagccatcgaccctgagacaggcggcaccgcctacaaccagaagttcgagggcaaggccatcctgaccgccgacaagagcagcagcacagcctacatggaactgcggagcctgacctccgaggacagccccgtgtactactgtgccagacggcggtactacggcagcagctccttcgactattggggccagggcaccaccctgaccgtgtctagtacgcgtatccagaaccctgatcctgccgtgtaccagctgcgggatagcaagagcagcgacaagagcgtgtgtctgttcaccgacttcgacagccagaccaacgtgtcccagagcaaggactccgacgtgtacatcaccgataagaccgtgctggacatgcggagcatggacttcaagagcaactccgccgtggcctggtccaacaagtccgatttcgcctgcgccaacgccttcaacaacagcattatccccgaggacacattcttcccaagccccgagagcagcgactccaccgaccacgtgaagcccaaagagacagagaacaccaagcagcccagcaagagctgccacaagcccaaggccatcgtgcacaccgagaaagtgaacatgatgagcctgaccgtgctgggcctgcggatgctgttcgccaaaaccgtggccgtgaacttcctgctgaccgccaagctgttcttcctc

SEQ ID NO: 8104 - DNA, 26 bp, synthetic construct
  source 1..26: mol_type = other DNA
gggggggggggggggggggggggggg

SEQ ID NO: 8105 - DNA, 26 bp, synthetic construct
  source 1..26: mol_type = other DNA
gggggggggggggggggggggggggg

SEQ ID NO: 8106 - DNA, 2591 bp, synthetic construct
  source 1..2591: mol_type = other DNA
atggccttaccagtgaccgccttgctcctgccgctggccttgctgctccacgccgccaggccgctcgaggaggacctgaagaacgtgttcccacctgaggtggccgtgttcgagcctagcgaggccgagatcagccacacccagaaagccaccctcgtgtgcctggctaccggcttctaccccgaccatgtggaactgtcttggtgggtcaacggcaaagaggtgcacagcggcgtgtgtaccgacccccagccactgaaagaacagcccgccctgaacgacagccggtactgcctgagcagcagactgagagtgtccgccaccttctggcagaacccccggaaccacttcagatgccaggtgcagttctacggcctgagcgagaacgacgagtggacccaggacagagccaagcccgtgacccagatcgtgtctgccgaagcctggggcagagccgattgcgacgtgaagctggtggaaaagagcttcgagacagacaccaacctgaacttccagaacctgagcgtgatcggcttcagaatcctgctgctgaaagtggccggctttaacctgctgatgaccctgcggctgtggtccagcagggccaagcgatctggatctggagcaacaaacttctcactactcaaacaagcaggtgacgtggaggagaatcccgggcctactagcatggccttaccagtgaccgccttgctcctgccgctggccttgctgctccacgccgccaggccggacatccagatgacacagactacatcctccctgtctgcctctctgggagacagagtcaccatcagttgcagggcaagtcaggacattagtaaatatttaaattggtatcagcagaaaccagatggaactgttaaactcctgatctaccatacatcaagattacactcaggagtcccatcaaggttcagtggcagtgggtctggaacagattattctctcaccattagcaacctggagcaagaagatattgccacttacttttgccaacagggtaatacgcttccgtacacgttcggaggggggaccaagctggagatcacaggtggcggtggctcgggcggtggtgggtcgggtggcggcggatctgaggtgaaactgcaggagtcaggacctggcctggtggcgccctcacagagcctgtccgtcacatgcactgtctcaggggtctcattacccgactatggtgtaagctggattcgccagcctccacgaaagggtctggagtggctgggagtaatatggggtagtgaaaccacatactataattcagctctcaaatccagactgaccatcatcaaggacaactccaagagccaagttttcttaaaaatgaacagtctgcaaactgatgacacagccatttactactgtgccaaacattattactacggtggtagctatgctatggactactggggtcaaggaacctcagtcaccgtctcctcaacgcgtatccagaaccctgatcctgccgtgtaccagctgcgggatagcaagagcagcgacaagagcgtgtgtctgttcaccgacttcgacagccagaccaacgtgtcccagagcaaggactccgacgtgtacatcaccgataagtgcgtgctggacatcaacaagtccgattgcggagcatggacttcaagagcaactccgccgtggcctggtccaacaagtccgatttcgcctgcgccaacgccttcaacaacagcattatccccgaggacacattcttcccaagccccgagagcagctgcggctttaccagcgagagctaccagcagaacctgagcgtgatcggcttcagaatcctgctgctgaaagtggccggctttaacctgctgatgaccctgcggctgtggtccagccgcgccaagagaagcggatctggcgtgaagcagaccctgaatttcgacctgctgaagctggctggcgacgtggaatccaacccaggcccttctagaggccatatgaccgagtacaagcccacggtgcgcctcgccacccgcgacgacgtccccagggccgtacgcaccctcgccgccgcgttcgccgactaccccgccacgcgccacaccgtcgatccggaccgccacatcgagcgggtcaccgagctgcaagaactcttcctcacgcgcgtcgggctcgacatcggcaaggtgtgggtcgcggacgacggcgccgcggtggcggtctggaccacgccggagagcgtcgaagcgggggcggtgttcgccgagatcggcccgcgcatggccgagttgagcggttcccggctggccgcgcagcaacagatggaaggcctcctggcgccgcaccggcccaaggagcccgcgtggttcctggccaccgtcggcgtctcgcccgaccaccagggcaagggtctgggcagcgccgtcgtgctccccggagtggaggcggccgagcgcgccggggtgcccgccttcctggagacctccgcgccccgcaacctccccttctacgagcggctcggcttcaccgtcaccgccgacgtcgaggtgcccgaaggaccgcgcacctggtgcatgacccgcaagcccggtgcctga

SEQ ID NO: 8107 - DNA, 2594 bp, synthetic construct
  source 1..2594: mol_type = other DNA
atggccttaccagtgaccgccttgctcctgccgctggccttgctgctccacgccgccaggccgctcgaggaggacctgaagaacgtgttcccacctgaggtggccgtgttcgagcctagcgaggccgagatcagccacacccagaaagccaccctcgtgtgcctggctaccggcttctaccccgaccatgtggaactgtcttggtgggtcaacggcaaagaggtgcacagcggcgtgtgtaccgacccccagccactgaaagaacagcccgccctgaacgacagccggtactgcctgagcagcagactgagagtgtccgccaccttctggcagaacccccggaaccacttcagatgccaggtgcagttctacggcctgagcgagaacgacgagtggacccaggacagagccaagcccgtgacccagatcgtgtctgccgaagcctggggcagagccgattgcgacgtgaagctggtggaaaagagcttcgagacagacaccaacctgaacttccagaacctgagcgtgatcggcttcagaatcctgctgctgaaagtggccggctttaacctgctgatgaccctgcggctgtggtccagcagggccaagcgatctggatctggagcaacaaacttctcactactcaaacaagcaggtgacgtggaggagaatcccgggcctactagcaccatggccttaccagtgaccgccttgctcctgccgctggccttgctgctccacgccgccaggccggagatcgtgatgacccagagccctgccaccctgtctctgagccctggcgaaagagccaccctgagctgtagagccagccaggacatcagcaagtacctgaactggtatcagcagaagcccggccaggcccccagactgctgatctaccacaccagcagactgcacagcggcatccccgccagattttctggctctggcagcggcaccgactacaccctgacaatcagcagcctccagcccgaggacttcgccgtgtacttctgtcagcaaggcaacaccctgccctacaccttcggccagggcaccaagctggaaatcaagggcggaggcggaagtggaggcggaggatctggcggcggaggctctcaggtgcaactccaggaatctggccctggcctcgtgaagcccagcgagacactgagcctgacctgtaccgtgtccggcgtgtccctgcctgactatggcgtgtcctggatcagacagccccctggcaagggcctggaatggatcggagtgatttggggcagcgaaaccacctactacaacagctccctgaagtccagagtgaccatctccaaggacaactccaagaaccaggtgtccctgaagctgagcagcgtgacagccgccgacaccgccgtgtattactgcgccaagcactactactacggcggcagctacgctatggactactggggccagggaaccctcgtgaccgtgtctagtacgcgtatccagaaccctgatcctgccgtgtaccagctgcgggatagcaagagcagcgacaagagcgtgtgtctgttcaccgacttcgacagccagaccaacgtgtcccagagcaaggactccgacgtgtacatcaccgataagtgcgtgctggacatcaacaagtccgattgcggagcatggacttcaagagcaactccgccgtggcctggtccaacaagtccgatttcgcctgcgccaacgccttcaacaacagcattatccccgaggacacattcttcccaagccccgagagcagctgcggctttaccagcgagagctaccagcagaacctgagcgtgatcggcttcagaatcctgctgctgaaagtggccggctttaacctgctgatgaccctgcggctgtggtccagccgcgccaagagaagcggatctggcgtgaagcagaccctgaatttcgacctgctgaagctggctggcgacgtggaatccaacccaggcccttctagaggccatatgaccgagtacaagcccacggtgcgcctcgccacccgcgacgacgtccccagggccgtacgcaccctcgccgccgcgttcgccgactaccccgccacgcgccacaccgtcgatccggaccgccacatcgagcgggtcaccgagctgcaagaactcttcctcacgcgcgtcgggctcgacatcggcaaggtgtgggtcgcggacgacggcgccgcggtggcggtctggaccacgccggagagcgtcgaagcgggggcggtgttcgccgagatcggcccgcgcatggccgagttgagcggttcccggctggccgcgcagcaacagatggaaggcctcctggcgccgcaccggcccaaggagcccgcgtggttcctggccaccgtcggcgtctcgcccgaccaccagggcaagggtctgggcagcgccgtcgtgctccccggagtggaggcggccgagcgcgccggggtgcccgccttcctggagacctccgcgccccgcaacctccccttctacgagcggctcggcttcaccgtcaccgccgacgtcgaggtgcccgaaggaccgcgcacctggtgcatgacccgcaagcccggtgcctga

SEQ ID NO: 8108 - DNA, 2597 bp, synthetic construct
  source 1..2597: mol_type = other DNA
atggccttaccagtgaccgccttgctcctgccgctggccttgctgctccacgccgccaggccgctcgaggaggacctgaagaacgtgttcccacctgaggtggccgtgttcgagcctagcgaggccgagatcagccacacccagaaagccaccctcgtgtgcctggctaccggcttctaccccgaccatgtggaactgtcttggtgggtcaacggcaaagaggtgcacagcggcgtgtgtaccgacccccagccactgaaagaacagcccgccctgaacgacagccggtactgcctgagcagcagactgagagtgtccgccaccttctggcagaacccccggaaccacttcagatgccaggtgcagttctacggcctgagcgagaacgacgagtggacccaggacagagccaagcccgtgacccagatcgtgtctgccgaagcctggggcagagccgattgcgacgtgaagctggtggaaaagagcttcgagacagacaccaacctgaacttccagaacctgagcgtgatcggcttcagaatcctgctgctgaaagtggccggctttaacctgctgatgaccctgcggctgtggtccagcagggccaagcgatctggatctggagcaacaaacttctcactactcaaacaagcaggtgacgtggaggagaatcccgggcctactagcaccatggccttaccagtgaccgccttgctcctgccgctggccttgctgctccacgccgccaggccggacgagatcgtgctgacacagagccccgccaccctgtcactgtctccaggcgaaagagccaccctgagctgtagcgccagcagcagcgtgtcctacatgcactggtatcagcagaagcccggccaggcccccagactgctgatctacgataccagcaagctggcctccggcatccccgccagattttctggcagcggctccggcaccgacttcaccctgacaatcagcagcctggaacccgaggacgtggccgtgtactactgttttcaaggcagcgtgtaccccttcaccttcggccagggcaccaagctggaaatcaagagaggtggcggtggctcgggcggtggtgggtcgggtggcggcggatctcaggtgcagctccaggaatctggccctggcctcgtgaagcctagccagaccctgagcctgacctgtaccgtgtctggcggcagcatcagcacaagcggcatgggcgtgggctggatcagacagcaccctggcaagggcctggaatggatcggccacatttggtgggacgacgacaagcggtacaaccccgccctgaagtccagagtgaccatcagcgtggacaccagcaagaaccagttcagcctgaagctgagcagcgtgacagccgccgataccgccgtgtattattgcgcccggatggaactgtggtcctactacttcgactactggggccagggaaccctcgtgaccgtgtctagtacgcgtatccagaaccctgatcctgccgtgtaccagctgcgggatagcaagagcagcgacaagagcgtgtgtctgttcaccgacttcgacagccagaccaacgtgtcccagagcaaggactccgacgtgtacatcaccgataagtgcgtgctggacatcaacaagtccgattgcggagcatggacttcaagagcaactccgccgtggcctggtccaacaagtccgatttcgcctgcgccaacgccttcaacaacagcattatccccgaggacacattcttcccaagccccgagagcagctgcggctttaccagcgagagctaccagcagaacctgagcgtgatcggcttcagaatcctgctgctgaaagtggccggctttaacctgctgatgaccctgcggctgtggtccagccgcgccaagagaagcggatctggcgtgaagcagaccctgaatttcgacctgctgaagctggctggcgacgtggaatccaacccaggcccttctagaggccatatgaccgagtacaagcccacggtgcgcctcgccacccgcgacgacgtccccagggccgtacgcaccctcgccgccgcgttcgccgactaccccgccacgcgccacaccgtcgatccggaccgccacatcgagcgggtcaccgagctgcaagaactcttcctcacgcgcgtcgggctcgacatcggcaaggtgtgggtcgcggacgacggcgccgcggtggcggtctggaccacgccggagagcgtcgaagcgggggcggtgttcgccgagatcggcccgcgcatggccgagttgagcggttcccggctggccgcgcagcaacagatggaaggcctcctggcgccgcaccggcccaaggagcccgcgtggttcctggccaccgtcggcgtctcgcccgaccaccagggcaagggtctgggcagcgccgtcgtgctccccggagtggaggcggccgagcgcgccggggtgcccgccttcctggagacctccgcgccccgcaacctccccttctacgagcggctcggcttcaccgtcaccgccgacgtcgaggtgcccgaaggaccgcgcacctggtgcatgacccgcaagcccggtgcctga

SEQ ID NO: 8109 - DNA, 2585 bp, synthetic construct
  source 1..2585: mol_type = other DNA
atggccttaccagtgaccgccttgctcctgccgctggccttgctgctccacgccgccaggccgctcgaggaggacctgaagaacgtgttcccacctgaggtggccgtgttcgagcctagcgaggccgagatcagccacacccagaaagccaccctcgtgtgcctggctaccggcttctaccccgaccatgtggaactgtcttggtgggtcaacggcaaagaggtgcacagcggcgtgtgtaccgacccccagccactgaaagaacagcccgccctgaacgacagccggtactgcctgagcagcagactgagagtgtccgccaccttctggcagaacccccggaaccacttcagatgccaggtgcagttctacggcctgagcgagaacgacgagtggacccaggacagagccaagcccgtgacccagatcgtgtctgccgaagcctggggcagagccgattgcgacgtgaagctggtggaaaagagcttcgagacagacaccaacctgaacttccagaacctgagcgtgatcggcttcagaatcctgctgctgaaagtggccggctttaacctgctgatgaccctgcggctgtggtccagcagggccaagcgatctggatctggagcaacaaacttctcactactcaaacaagcaggtgacgtggaggagaatcccgggcctactagcatggccttaccagtgaccgccttgctcctgccgctggccttgctgctccacgccgccaggccggacatccagatgacacagagccctagcagcctgtctgccagcgtgggagacagagtgaccatcacctgtagagccagccaggacatcagcaactacctgaactggtatcagcagaagcccggcaaggcccctaagctgctgatctactacaccagcagactgcacagcggcgtgcccagcagattttctggctctggcagcggcaccgacttcaccctgacaatatctagcctccagcctgaggacttcgccacctactattgccagcagggcaacaccctgccttacacatttggacagggcaccaaggtggaaatcaagagaggcggaggcggaagtggaggcggaggatctggcggcggaggctctgaagtgcagctggttgaatcaggtggcggcctggttcaacctggcggatctctgagactgagctgtgccgccagcggcttcaccttcagcgactactttatgagctgggtccgacaggcccctggcaaaggacttgaatgggtcgccaccatcagcaatggcggcacctacacttactaccccgacagcgtgaagggcagattcaccatctccagagacaacagcaagaacaccctgtacctccagatgaactccctgagagccgaggacaccgccgtgtactactgcgccagattcgacggctacatcttcgactattggggccagggcaccctggtcacagtctcttctacgcgtatccagaaccctgatcctgccgtgtaccagctgcgggatagcaagagcagcgacaagagcgtgtgtctgttcaccgacttcgacagccagaccaacgtgtcccagagcaaggactccgacgtgtacatcaccgataagtgcgtgctggacatcaacaagtccgattgcggagcatggacttcaagagcaactccgccgtggcctggtccaacaagtccgatttcgcctgcgccaacgccttcaacaacagcattatccccgaggacacattcttcccaagccccgagagcagctgcggctttaccagcgagagctaccagcagaacctgagcgtgatcggcttcagaatcctgctgctgaaagtggccggctttaacctgctgatgaccctgcggctgtggtccagccgcgccaagagaagcggatctggcgtgaagcagaccctgaatttcgacctgctgaagctggctggcgacgtggaatccaacccaggcccttctagaggccatatgaccgagtacaagcccacggtgcgcctcgccacccgcgacgacgtccccagggccgtacgcaccctcgccgccgcgttcgccgactaccccgccacgcgccacaccgtcgatccggaccgccacatcgagcgggtcaccgagctgcaagaactcttcctcacgcgcgtcgggctcgacatcggcaaggtgtgggtcgcggacgacggcgccgcggtggcggtctggaccacgccggagagcgtcgaagcgggggcggtgttcgccgagatcggcccgcgcatggccgagttgagcggttcccggctggccgcgcagcaacagatggaaggcctcctggcgccgcaccggcccaaggagcccgcgtggttcctggccaccgtcggcgtctcgcccgaccaccagggcaagggtctgggcagcgccgtcgtgctccccggagtggaggcggccgagcgcgccggggtgcccgccttcctggagacctccgcgccccgcaacctccccttctacgagcggctcggcttcaccgtcaccgccgacgtcgaggtgcccgaaggaccgcgcacctggtgcatgacccgcaagcccggtgcctga

SEQ ID NO: 8110 - DNA, 2597 bp, synthetic construct
  source 1..2597: mol_type = other DNA
atggccttaccagtgaccgccttgctcctgccgctggccttgctgctccacgccgccaggccgctcgaggaggacctgaagaacgtgttcccacctgaggtggccgtgttcgagcctagcgaggccgagatcagccacacccagaaagccaccctcgtgtgcctggctaccggcttctaccccgaccatgtggaactgtcttggtgggtcaacggcaaagaggtgcacagcggcgtgtgtaccgacccccagccactgaaagaacagcccgccctgaacgacagccggtactgcctgagcagcagactgagagtgtccgccaccttctggcagaacccccggaaccacttcagatgccaggtgcagttctacggcctgagcgagaacgacgagtggacccaggacagagccaagcccgtgacccagatcgtgtctgccgaagcctggggcagagccgattgcgacgtgaagctggtggaaaagagcttcgagacagacaccaacctgaacttccagaacctgagcgtgatcggcttcagaatcctgctgctgaaagtggccggctttaacctgctgatgaccctgcggctgtggtccagcagggccaagcgatctggatctggagcaacaaacttctcactactcaaacaagcaggtgacgtggaggagaatcccgggcctactagcatggccttaccagtgaccgccttgctcctgccgctggccttgctgctccacgccgccaggccggacatccagatgacacagagccctagcagcctgtctgccagcgtgggagacagagtgaccatcacatgcaaggccagcgaccacatcaacaactggctggcctggtatcagcagaagcctggacaggcccctaagctgctgatctacggcgctaccacactggaaacaggcgtgcccagcagattttctggcagcggctctggcaccgactacaccctgacaatatccagcctccagcctgaggacttcgccacctactactgtcagcagagctggaacaccccttggacattcggccagggcaccaagctggaaatcaagagaggcggaggcggaagtggaggcggaggatctggcggcggaggctctcaagttcagcttcaacagcctggcgctgagctggtcaaacctggcgcttctgtgaagatgagctgcaaagccagcggctacgccttcagcagctactggatcaactggatgaagcagaaacccggccagggactcgaatggatcggccaaatctatcccggcgacggcgacaccaactacaacggcaagttcaagggcagagccacactgaccgccgatacctctagcagcacagcctacatgcagctgagcagcctgaccagcgaagatagcgccgtgtacttctgtgcccggtccatcacaacagtcgtgggctgcgctatggactattggggccagggaacaagcgtgaccgtgtctagtacgcgtatccagaaccctgatcctgccgtgtaccagctgcgggatagcaagagcagcgacaagagcgtgtgtctgttcaccgacttcgacagccagaccaacgtgtcccagagcaaggactccgacgtgtacatcaccgataagtgcgtgctggacatcaacaagtccgattgcggagcatggacttcaagagcaactccgccgtggcctggtccaacaagtccgatttcgcctgcgccaacgccttcaacaacagcattatccccgaggacacattcttcccaagccccgagagcagctgcggctttaccagcgagagctaccagcagaacctgagcgtgatcggcttcagaatcctgctgctgaaagtggccggctttaacctgctgatgaccctgcggctgtggtccagccgcgccaagagaagcggatctggcgtgaagcagaccctgaatttcgacctgctgaagctggctggcgacgtggaatccaacccaggcccttctagaggccatatgaccgagtacaagcccacggtgcgcctcgccacccgcgacgacgtccccagggccgtacgcaccctcgccgccgcgttcgccgactaccccgccacgcgccacaccgtcgatccggaccgccacatcgagcgggtcaccgagctgcaagaactcttcctcacgcgcgtcgggctcgacatcggcaaggtgtgggtcgcggacgacggcgccgcggtggcggtctggaccacgccggagagcgtcgaagcgggggcggtgttcgccgagatcggcccgcgcatggccgagttgagcggttcccggctggccgcgcagcaacagatggaaggcctcctggcgccgcaccggcccaaggagcccgcgtggttcctggccaccgtcggcgtctcgcccgaccaccagggcaagggtctgggcagcgccgtcgtgctccccggagtggaggcggccgagcgcgccggggtgcccgccttcctggagacctccgcgccccgcaacctccccttctacgagcggctcggcttcaccgtcaccgccgacgtcgaggtgcccgaaggaccgcgcacctggtgcatgacccgcaagcccggtgcctga

SEQ ID NO: 8111 - DNA, 2603 bp, synthetic construct
  source 1..2603: mol_type = other DNA
atggccttaccagtgaccgccttgctcctgccgctggccttgctgctccacgccgccaggccgctcgaggaggacctgaagaacgtgttcccacctgaggtggccgtgttcgagcctagcgaggccgagatcagccacacccagaaagccaccctcgtgtgcctggctaccggcttctaccccgaccatgtggaactgtcttggtgggtcaacggcaaagaggtgcacagcggcgtgtgtaccgacccccagccactgaaagaacagcccgccctgaacgacagccggtactgcctgagcagcagactgagagtgtccgccaccttctggcagaacccccggaaccacttcagatgccaggtgcagttctacggcctgagcgagaacgacgagtggacccaggacagagccaagcccgtgacccagatcgtgtctgccgaagcctggggcagagccgattgcgacgtgaagctggtggaaaagagcttcgagacagacaccaacctgaacttccagaacctgagcgtgatcggcttcagaatcctgctgctgaaagtggccggctttaacctgctgatgaccctgcggctgtggtccagcagggccaagcgatctggatctggagcaacaaacttctcactactcaaacaagcaggtgacgtggaggagaatcccgggcctactagcatggccttaccagtgaccgccttgctcctgccgctggccttgctgctccacgccgccaggccgcagatcgtgctgtctcagtctcctgccatcctgagcgcttccccaggcgagaaagtgaccatgacctgtagagccagcagcagcgtgtcctacatgcactggtatcagcagaagcccggcagcagccctaagccttggatctacgccaccagcaatctggcctctggcgtgccagccagattttctggctctggcagcggcaccagctacagcttcacaatcagcagagtggaagccgaggacgccgccacctactattgtcagcagtggaccttcaatcctcctaccttcggcggaggcacccggctggaaatcaaaagaacagtggctgctggcggaggcggaagtggaggcggaggatctggcggcggaggctctcaggcttatctgcaacagagcggagccgaactcgtcagacctggcgcttctgtgaagatgagctgcaaggccagcggctacaccttcaccagctataatatgcactgggtcaagcagacccctcggcagggactcgaatggatcggcggaatctatcccggcaacggcgacacctcctacaaccagaagttcaagggcaaagccacactgaccgtgggcaagagcagcagcaccgcctatatgcagctcagcagcctgaccagcgaggacagcgccgtgtacttctgcgccagatacgactacaactacgctatggactactggggccagggcaccagcgtgacagttagctctgccagcacgcgtatccagaaccctgatcctgccgtgtaccagctgcgggatagcaagagcagcgacaagagcgtgtgtctgttcaccgacttcgacagccagaccaacgtgtcccagagcaaggactccgacgtgtacatcaccgataagtgcgtgctggacatcaacaagtccgattgcggagcatggacttcaagagcaactccgccgtggcctggtccaacaagtccgatttcgcctgcgccaacgccttcaacaacagcattatccccgaggacacattcttcccaagccccgagagcagctgcggctttaccagcgagagctaccagcagaacctgagcgtgatcggcttcagaatcctgctgctgaaagtggccggctttaacctgctgatgaccctgcggctgtggtccagccgcgccaagagaagcggatctggcgtgaagcagaccctgaatttcgacctgctgaagctggctggcgacgtggaatccaacccaggcccttctagaggccatatgaccgagtacaagcccacggtgcgcctcgccacccgcgacgacgtccccagggccgtacgcaccctcgccgccgcgttcgccgactaccccgccacgcgccacaccgtcgatccggaccgccacatcgagcgggtcaccgagctgcaagaactcttcctcacgcgcgtcgggctcgacatcggcaaggtgtgggtcgcggacgacggcgccgcggtggcggtctggaccacgccggagagcgtcgaagcgggggcggtgttcgccgagatcggcccgcgcatggccgagttgagcggttcccggctggccgcgcagcaacagatggaaggcctcctggcgccgcaccggcccaaggagcccgcgtggttcctggccaccgtcggcgtctcgcccgaccaccagggcaagggtctgggcagcgccgtcgtgctccccggagtggaggcggccgagcgcgccggggtgcccgccttcctggagacctccgcgccccgcaacctccccttctacgagcggctcggcttcaccgtcaccgccgacgtcgaggtgcccgaaggaccgcgcacctggtgcatgacccgcaagcccggtgcctga

SEQ ID NO: 8112 - DNA, 2597 bp, synthetic construct
  source 1..2597: mol_type = other DNA
atggccttaccagtgaccgccttgctcctgccgctggccttgctgctccacgccgccaggccgctcgaggaggacctgaagaacgtgttcccacctgaggtggccgtgttcgagcctagcgaggccgagatcagccacacccagaaagccaccctcgtgtgcctggctaccggcttctaccccgaccatgtggaactgtcttggtgggtcaacggcaaagaggtgcacagcggcgtgtgtaccgacccccagccactgaaagaacagcccgccctgaacgacagccggtactgcctgagcagcagactgagagtgtccgccaccttctggcagaacccccggaaccacttcagatgccaggtgcagttctacggcctgagcgagaacgacgagtggacccaggacagagccaagcccgtgacccagatcgtgtctgccgaagcctggggcagagccgattgcgacgtgaagctggtggaaaagagcttcgagacagacaccaacctgaacttccagaacctgagcgtgatcggcttcagaatcctgctgctgaaagtggccggctttaacctgctgatgaccctgcggctgtggtccagcagggccaagcgatctggatctggagcaacaaacttctcactactcaaacaagcaggtgacgtggaggagaatcccgggcctactagcatggccttaccagtgaccgccttgctcctgccgctggccttgctgctccacgccgccaggccggagatcgtgctgacacagagccctgccaccctgtctctgagccctggcgaaagagccaccctgagctgtagagccagccagagcgtgtccagctacctggcctggtatcagcagaagcccggccaggctccccggctgctgatctacgatgccagcaatagagccaccggcatccccgccagattttccggctctggcagcggcaccgacttcaccctgaccatcagctccctggaacccgaggacttcgccgtgtactactgccagcagcggagcaactggcccatcacattcggccagggcacccggctggaaatcaaaggcggaggcggaagtggaggcggaggatctggcggcggaggctctgaggtgcagcttgttgagtctggcggaggactggtgcagcccgatagaagcctgagactgtcttgtgccgccagcggcttcaccttccacgattatgccatgcactgggtccgacaggcccctggcaaaggacttgaatgggtgtccaccatctcttggaacagcggcacaatcggctacgccgactctgtgaagggcagattcaccatcagccgggacaacgccaagaacagcctgtacctccagatgaactccctgagagccgaggacacagccctgtactactgcgccaaggacatccagtacggcaactactactacggcatggacgtgtggggccagggcacaacagtgacagtctcttctacgcgtatccagaaccctgatcctgccgtgtaccagctgcgggatagcaagagcagcgacaagagcgtgtgtctgttcaccgacttcgacagccagaccaacgtgtcccagagcaaggactccgacgtgtacatcaccgataagtgcgtgctggacatcaacaagtccgattgcggagcatggacttcaagagcaactccgccgtggcctggtccaacaagtccgatttcgcctgcgccaacgccttcaacaacagcattatccccgaggacacattcttcccaagccccgagagcagctgcggctttaccagcgagagctaccagcagaacctgagcgtgatcggcttcagaatcctgctgctgaaagtggccggctttaacctgctgatgaccctgcggctgtggtccagccgcgccaagagaagcggatctggcgtgaagcagaccctgaatttcgacctgctgaagctggctggcgacgtggaatccaacccaggcccttctagaggccatatgaccgagtacaagcccacggtgcgcctcgccacccgcgacgacgtccccagggccgtacgcaccctcgccgccgcgttcgccgactaccccgccacgcgccacaccgtcgatccggaccgccacatcgagcgggtcaccgagctgcaagaactcttcctcacgcgcgtcgggctcgacatcggcaaggtgtgggtcgcggacgacggcgccgcggtggcggtctggaccacgccggagagcgtcgaagcgggggcggtgttcgccgagatcggcccgcgcatggccgagttgagcggttcccggctggccgcgcagcaacagatggaaggcctcctggcgccgcaccggcccaaggagcccgcgtggttcctggccaccgtcggcgtctcgcccgaccaccagggcaagggtctgggcagcgccgtcgtgctccccggagtggaggcggccgagcgcgccggggtgcccgccttcctggagacctccgcgccccgcaacctccccttctacgagcggctcggcttcaccgtcaccgccgacgtcgaggtgcccgaaggaccgcgcacctggtgcatgacccgcaagcccggtgcctga

SEQ ID NO: 8113 - DNA, 2591 bp, synthetic construct
  source 1..2591: mol_type = other DNA
atggccttaccagtgaccgccttgctcctgccgctggccttgctgctccacgccgccaggccgctcgaggaggacctgaagaacgtgttcccacctgaggtggccgtgttcgagcctagcgaggccgagatcagccacacccagaaagccaccctcgtgtgcctggctaccggcttctaccccgaccatgtggaactgtcttggtgggtcaacggcaaagaggtgcacagcggcgtgtgtaccgacccccagccactgaaagaacagcccgccctgaacgacagccggtactgcctgagcagcagactgagagtgtccgccaccttctggcagaacccccggaaccacttcagatgccaggtgcagttctacggcctgagcgagaacgacgagtggacccaggacagagccaagcccgtgacccagatcgtgtctgccgaagcctggggcagagccgattgcgacgtgaagctggtggaaaagagcttcgagacagacaccaacctgaacttccagaacctgagcgtgatcggcttcagaatcctgctgctgaaagtggccggctttaacctgctgatgaccctgcggctgtggtccagcagggccaagcgatctggatctggagcaacaaacttctcactactcaaacaagcaggtgacgtggaggagaatcccgggcctactagcatggccttaccagtgaccgccttgctcctgccgctggccttgctgctccacgccgccaggccggacatccagatgacccagagccccagcagcctgtctgccagcgtgggcgacagagtgaccatcacctgtagagccagccaggacgtgaacaccgccgtggcctggtatcagcagaagcctggcaaggcccccaagctgctgatctacagcgccagcttcctggaaagcggcgtgcccagcagattcagcggaagcagaagcggcaccgacttcaccctgaccatcagctccctccagcccgaggacttcgccacctactactgccagcagcactacaccacccctcccaccttcggccagaccaaggtggaaatcaagagaggcggaggcggaagtggaggcggaggatctggcggcggaggctctgaagtgcaactggtggaatctggcggcggactggtgcagcctggcggatctctgagactgagctgtgccgccagcggcttcaacatcaaggacacctacatccactgggtgcgccaggcccctggaaagggactggaatgggtggcccggatctaccccaccaacggctacaccagatacgccgacagcgtgaagggccggttcaccatcagcgccgacaccagcaagaataccgcctacctccagatgaacagcctgcgggccgaggataccgccgtgtactactgctcaagatggggaggcgacggcttctacgctatggacgtgtggggccagggcacccttgtgaccgtgtcatctacgcgtatccagaaccctgatcctgccgtgtaccagctgcgggatagcaagagcagcgacaagagcgtgtgtctgttcaccgacttcgacagccagaccaacgtgtcccagagcaaggactccgacgtgtacatcaccgataagtgcgtgctggacatcaacaagtccgattgcggagcatggacttcaagagcaactccgccgtggcctggtccaacaagtccgatttcgcctgcgccaacgccttcaacaacagcattatccccgaggacacattcttcccaagccccgagagcagctgcggctttaccagcgagagctaccagcagaacctgagcgtgatcggcttcagaatcctgctgctgaaagtggccggctttaacctgctgatgaccctgcggctgtggtccagccgcgccaagagaagcggatctggcgtgaagcagaccctgaatttcgacctgctgaagctggctggcgacgtggaatccaacccaggcccttctagaggccatatgaccgagtacaagcccacggtgcgcctcgccacccgcgacgacgtccccagggccgtacgcaccctcgccgccgcgttcgccgactaccccgccacgcgccacaccgtcgatccggaccgccacatcgagcgggtcaccgagctgcaagaactcttcctcacgcgcgtcgggctcgacatcggcaaggtgtgggtcgcggacgacggcgccgcggtggcggtctggaccacgccggagagcgtcgaagcgggggcggtgttcgccgagatcggcccgcgcatggccgagttgagcggttcccggctggccgcgcagcaacagatggaaggcctcctggcgccgcaccggcccaaggagcccgcgtggttcctggccaccgtcggcgtctcgcccgaccaccagggcaagggtctgggcagcgccgtcgtgctccccggagtggaggcggccgagcgcgccggggtgcccgccttcctggagacctccgcgccccgcaacctccccttctacgagcggctcggcttcaccgtcaccgccgacgtcgaggtgcccgaaggaccgcgcacctggtgcatgacccgcaagcccggtgcctga

SEQ ID NO: 8114 - DNA, 2228 bp, synthetic construct
  source 1..2228: mol_type = other DNA
atggccttaccagtgaccgccttgctcctgccgctggccttgctgctccacgccgccaggccgctcgaggaggacctgaagaacgtgttcccacctgaggtggccgtgttcgagcctagcgaggccgagatcagccacacccagaaagccaccctcgtgtgcctggctaccggcttctaccccgaccatgtggaactgtcttggtgggtcaacggcaaagaggtgcacagcggcgtgtgtaccgacccccagccactgaaagaacagcccgccctgaacgacagccggtactgcctgagcagcagactgagagtgtccgccaccttctggcagaacccccggaaccacttcagatgccaggtgcagttctacggcctgagcgagaacgacgagtggacccaggacagagccaagcccgtgacccagatcgtgtctgccgaagcctggggcagagccgattgcgacgtgaagctggtggaaaagagcttcgagacagacaccaacctgaacttccagaacctgagcgtgatcggcttcagaatcctgctgctgaaagtggccggctttaacctgctgatgaccctgcggctgtggtccagcagggccaagcgatctggatctggagcaacaaacttctcactactcaaacaagcaggtgacgtggaggagaatcccgggcctactagcatggccctgcccgtgacagccctgctgctgcctctggctctgctgctgcacgccgccagacccgatgaattcgaggtgcaactggtggaaagcggcggaggcctggtgcaggctggcggatctctgagactgagctgtgccgccagcggcatcaccttcagcatcaacacaatgggctggtacagacaggcccctggcaagcagagggaactggtggccctgatctccagcatcggcgacacctactacgccgacagcgtgaagggccggttcaccatcagccgggacaacgccaagaacaccgtgtacctccagatgaacagcctgaagcccgaggacaccgccgtgtactactgcaagcggttcagaacagccgcccagggcaccgattattggggccagggaacacaagtgaccgtgtcctctacgcgtatccagaaccctgatcctgccgtgtaccagctgcgggatagcaagagcagcgacaagagcgtgtgtctgttcaccgacttcgacagccagaccaacgtgtcccagagcaaggactccgacgtgtacatcaccgataagtgcgtgctggacatcaacaagtccgattgcggagcatggacttcaagagcaactccgccgtggcctggtccaacaagtccgatttcgcctgcgccaacgccttcaacaacagcattatccccgaggacacattcttcccaagccccgagagcagctgcggctttaccagcgagagctaccagcagaacctgagcgtgatcggcttcagaatcctgctgctgaaagtggccggctttaacctgctgatgaccctgcggctgtggtccagccgcgccaagagaagcggatctggcgtgaagcagaccctgaatttcgacctgctgaagctggctggcgacgtggaatccaacccaggcccttctagaggccatatgaccgagtacaagcccacggtgcgcctcgccacccgcgacgacgtccccagggccgtacgcaccctcgccgccgcgttcgccgactaccccgccacgcgccacaccgtcgatccggaccgccacatcgagcgggtcaccgagctgcaagaactcttcctcacgcgcgtcgggctcgacatcggcaaggtgtgggtcgcggacgacggcgccgcggtggcggtctggaccacgccggagagcgtcgaagcgggggcggtgttcgccgagatcggcccgcgcatggccgagttgagcggttcccggctggccgcgcagcaacagatggaaggcctcctggcgccgcaccggcccaaggagcccgcgtggttcctggccaccgtcggcgtctcgcccgaccaccagggcaagggtctgggcagcgccgtcgtgctccccggagtggaggcggccgagcgcgccggggtgcccgccttcctggagacctccgcgccccgcaacctccccttctacgagcggctcggcttcaccgtcaccgccgacgtcgaggtgcccgaaggaccgcgcacctggtgcatgacccgcaagcccggtgcctga

SEQ ID NO: 8115 - DNA, 2228 bp, synthetic construct; identical to SEQ ID NO: 8114
  source 1..2228: mol_type = other DNA

SEQ ID NO: 8116 - DNA, 3023 bp, synthetic construct
  source 1..3023: mol_type = other DNA
atggccttaccagtgaccgccttgctcctgccgctggccttgctgctccacgccgccaggccgctcgaggaggacctgaagaacgtgttcccacctgaggtggccgtgttcgagcctagcgaggccgagatcagccacacccagaaagccaccctcgtgtgcctggctaccggcttctaccccgaccatgtggaactgtcttggtgggtcaacggcaaagaggtgcacagcggcgtgtgtaccgacccccagccactgaaagaacagcccgccctgaacgacagccggtactgcctgagcagcagactgagagtgtccgccaccttctggcagaacccccggaaccacttcagatgccaggtgcagttctacggcctgagcgagaacgacgagtggacccaggacagagccaagcccgtgacccagatcgtgtctgccgaagcctggggcagagccgattgcgacgtgaagctggtggaaaagagcttcgagacagacaccaacctgaacttccagaacctgagcgtgatcggcttcagaatcctgctgctgaaagtggccggctttaacctgctgatgaccctgcggctgtggtccagcagggccaagcgatctggatctggagcaacaaacttctcactactcaaacaagcaggtgacgtggaggagaatcccgggcctactagcatggccttaccagtgaccgccttgctcctgccgctggccttgctgctccacgccgccaggccgcaggtccagctcgtcgagtccggcggcggcctcgtccaggccggcgactccgtcaccctctcctgcaccgcctccggccgcaccttctcctcctacgccctcgcctggttccgccagcgccccggcaaggagcgcgagttcgtcgccggcctccgctggggcggccccaccaactacgccgactccgtcaaggaccgcttcaccatctccggcgactccgccaagcacaccatgtacctccagatgaactccctcaagcccgaggacaccgccgtctactactgcggctacaaccccggcggctgggccgtcccctcccagtacgagtacgactcctggggccagggcacccaggtcaccgtctcctccggtaccggcggaggcggatctggcggcggaggtagcggtggcggaggatctgaattcgacatccagatgacacagagccctagcagcctgtctgccagcgtgggagacagagtgaccatcacatgcaaggccagcgaccacatcaacaactggctggcctggtatcagcagaagcctggacaggcccctaagctgctgatctacggcgctaccacactggaaacaggcgtgcccagcagattttctggcagcggctctggcaccgactacaccctgacaatatccagcctccagcctgaggacttcgccacctactactgtcagcagagctggaacaccccttggacattcggccagggcaccaagctggaaatcaagagaggcggaggcggaagtggaggcggaggatctggcggcggaggctctcaagttcagcttcaacagcctggcgctgagctggtcaaacctggcgcttctgtgaagatgagctgcaaagccagcggctacgccttcagcagctactggatcaactggatgaagcagaaacccggccagggactcgaatggatcggccaaatctatcccggcgacggcgacaccaactacaacggcaagttcaagggcagagccacactgaccgccgatacctctagcagcacagcctacatgcagctgagcagcctgaccagcgaagatagcgccgtgtacttctgtgcccggtccatcacaacagtcgtgggctgcgctatggactattggggccagggaacaagcgtgaccgtgtctagtacgcgtatccagaaccctgatcctgccgtgtaccagctgcgggatagcaagagcagcgacaagagcgtgtgtctgttcaccgacttcgacagccagaccaacgtgtcccagagcaaggactccgacgtgtacatcaccgataagtgcgtgctggacatcaacaagtccgattgcggagcatggacttcaagagcaactccgccgtggcctggtccaacaagtccgatttcgcctgcgccaacgccttcaacaacagcattatccccgaggacacattcttcccaagccccgagagcagctgcggctttaccagcgagagctaccagcagaacctgagcgtgatcggcttcagaatcctgctgctgaaagtggccggctttaacctgctgatgaccctgcggctgtggtccagccgcgccaagagaagcggatctggcgtgaagcagaccctgaatttcgacctgctgaagctggctggcgacgtggaatccaacccaggcccttctagaggccatatgaccgagtacaagcccacggtgcgcctcgccacccgcgacgacgtccccagggccgtacgcaccctcgccgccgcgttcgccgactaccccgccacgcgccacaccgtcgatccggaccgccacatcgagcgggtcaccgagctgcaagaactcttcctcacgcgcgtcgggctcgacatcggcaaggtgtgggtcgcggacgacggcgccgcggtggcggtctggaccacgccggagagcgtcgaagcgggggcggtgttcgccgagatcggcccgcgcatggccgagttgagcggttcccggctggccgcgcagcaacagatggaaggcctcctggcgccgcaccggcccaaggagcccgcgtggttcctggccaccgtcggcgtctcgcccgaccaccagggcaagggtctgggcagcgccgtcgtgctccccggagtggaggcggccgagcgcgccggggtgcccgccttcctggagacctccgcgccccgcaacctccccttctacgagcggctcggcttcaccgtcaccgccgacgtcgaggtgcccgaaggaccgcgcacctggtgcatgacccgcaagcccggtgcctga

SEQ ID NO: 8117 - DNA, 3410 bp, synthetic construct
  source 1..3410: mol_type = other DNA
atggccttaccagtgaccgccttgctcctgccgctggccttgctgctccacgccgccaggccgctcgaggaggacctgaagaacgtgttcccacctgaggtggccgtgttcgagcctagcgaggccgagatcagccacacccagaaagccaccctcgtgtgcctggctaccggcttctaccccgaccatgtggaactgtcttggtgggtcaacggcaaagaggtgcacagcggcgtgtgtaccgacccccagccactgaaagaacagcccgccctgaacgacagccggtactgcctgagcagcagactgagagtgtccgccaccttctggcagaacccccggaaccacttcagatgccaggtgcagttctacggcctgagcgagaacgacgagtggacccaggacagagccaagcccgtgacccagatcgtgtctgccgaagcctggggcagagccgattgcgacgtgaagctggtggaaaagagcttcgagacagacaccaacctgaacttccagaacctgagcgtgatcggcttcagaatcctgctgctgaaagtggccggctttaacctgctgatgaccctgcggctgtggtccagcagggccaagcgatctggatctggagcaacaaacttctcactactcaaacaagcaggtgacgtggaggagaatcccgggcctactagcatggccttaccagtgaccgccttgctcctgccgctggccttgctgctccacgccgccaggccggaggttcagctgcttgagtctggcggaggactggttcaacctggcggaagcctgagactgtcttgtgccgccagcggcttcacctttagcagctacgccatgagctgggtccgacaggctcctggcaaaggactggaatgggtgtccagcatcagcggcagcggcgactacatctactacgccgatagcgtgaagggcagattcaccatcagccgggacatcagcaagaacaccctgtacctccagatgaacagcctgagagccgaggacaccgccgtgtactactgtgccaaagaaggcaccggcgctaacagcagcctggccgattatagaggccagggcacactggtcaccgtgtctagtggcggaggaagcggcggaggatctcaggtccagctcgtcgagtccggcggcggcctcgtccaggccggcgactccgtcaccctctcctgcaccgcctccggccgcaccttctcctcctacgccctcgcctggttccgccagcgccccggcaaggagcgcgagttcgtcgccggcctccgctggggcggccccaccaactacgccgactccgtcaaggaccgcttcaccatctccggcgactccgccaagcacaccatgtacctccagatgaactccctcaagcccgaggacaccgccgtctactactgcggctacaaccccggcggctgggccgtcccctcccagtacgagtacgactcctggggccagggcacccaggtcaccgtctcctccggtaccggcggaggcggatctggcggcggaggtagcggtggcggaggatctgaattcgacatccagatgacacagagccctagcagcctgtctgccagcgtgggagacagagtgaccatcacatgcaaggccagcgaccacatcaacaactggctggcctggtatcagcagaagcctggacaggcccctaagctgctgatctacggcgctaccacactggaaacaggcgtgcccagcagattttctggcagcggctctggcaccgactacaccctgacaatatccagcctccagcctgaggacttcgccacctactactgtcagcagagctggaacaccccttggacattcggccagggcaccaagctggaaatcaagagaggcggaggcggaagtggaggcggaggatctggcggcggaggctctcaagttcagcttcaacagcctggcgctgagctggtcaaacctggcgcttctgtgaagatgagctgcaaagccagcggctacgccttcagcagctactggatcaactggatgaagcagaaacccggccagggactcgaatggatcggccaaatctatcccggcgacggcgacaccaactacaacggcaagttcaagggcagagccacactgaccgccgatacctctagcagcacagcctacatgcagctgagcagcctgaccagcgaagatagcgccgtgtacttctgtgcccggtccatcacaacagtcgtgggctgcgctatggactattggggccagggaacaagcgtgaccgtgtctagtacgcgtatccagaaccctgatcctgccgtgtaccagctgcgggatagcaagagcagcgacaagagcgtgtgtctgttcaccgacttcgacagccagaccaacgtgtcccagagcaaggactccgacgtgtacatcaccgataagtgcgtgctggacatcaacaagtccgattgcggagcatggacttcaagagcaactccgccgtggcctggtccaacaagtccgatttcgcctgcgccaacgccttcaacaacagcattatccccgaggacacattcttcccaagccccgagagcagctgcggctttaccagcgagagctaccagcagaacctgagcgtgatcggcttcagaatcctgctgctgaaagtggccggctttaacctgctgatgaccctgcggctgtggtccagccgcgccaagagaagcggatctggcgtgaagcagaccctgaatttcgacctgctgaagctggctggcgacgtggaatccaacccaggcccttctagaggccatatgaccgagtacaagcccacggtgcgcctcgccacccgcgacgacgtccccagggccgtacgcaccctcgccgccgcgttcgccgactaccccgccacgcgccacaccgtcgatccggaccgccacatcgagcgggtcaccgagctgcaagaactcttcctcacgcgcgtcgggctcgacatcggcaaggtgtgggtcgcggacgacggcgccgcggtggcggtctggaccacgccggagagcgtcgaagcgggggcggtgttcgccgagatcggcccgcgcatggccgagttgagcggttcccggctggccgcgcagcaacagatggaaggcctcctggcgccgcaccggcccaaggagcccgcgtggttcctggccaccgtcggcgtctcgcccgaccaccagggcaagggtctgggcagcgccgtcgtgctccccggagtggaggcggccgagcgcgccggggtgcccgccttcctggagacctccgcgccccgcaacctccccttctacgagcggctcggcttcaccgtcaccgccgacgtcgaggtgcccgaaggaccgcgcacctggtgcatgacccgcaagcccggtgcctga

SEQ ID NO: 8118 - DNA, 3410 bp, synthetic construct; identical to SEQ ID NO: 8117
  source 1..3410: mol_type = other DNA

SEQ ID NO: 8119 - DNA, 2246 bp, synthetic construct
  source 1..2246: mol_type = other DNA
atggccttaccagtgaccgccttgctcctgccgctggccttgctgctccacgccgccaggccgctcgaggaggacctgaagaacgtgttcccacctgaggtggccgtgttcgagcctagcgaggccgagatcagccacacccagaaagccaccctcgtgtgcctggctaccggcttctaccccgaccatgtggaactgtcttggtgggtcaacggcaaagaggtgcacagcggcgtgtgtaccgacccccagccactgaaagaacagcccgccctgaacgacagccggtactgcctgagcagcagactgagagtgtccgccaccttctggcagaacccccggaaccacttcagatgccaggtgcagttctacggcctgagcgagaacgacgagtggacccaggacagagccaagcccgtgacccagatcgtgtctgccgaagcctggggcagagccgattgcgacgtgaagctggtggaaaagagcttcgagacagacaccaacctgaacttccagaacctgagcgtgatcggcttcagaatcctgctgctgaaagtggccggctttaacctgctgatgaccctgcggctgtggtccagcagggccaagcgatctggatctggagcaacaaacttctcactactcaaacaagcaggtgacgtggaggagaatcccgggcctactagcatggccctgcccgtgacagccctgctgctgcctctggctctgctgctgcacgccgccagacccgatgaattcggctctgacctgggcatcaagctgctgttcgccgctgccaagggccaggacgacgaagtgcggattctgctggctgctggggccgacgtgaacgccaaggatttcgagggctacacccccctgcacgtggccgcctatgatggacacctggaaatcgtggaagtgctgctgaaggctggcgctgatgtgaatgccaaagacagccagggccggacccctctgcatgaagccgcctacagcggccatctggaaattgtggaagtgctgctgaaagccggggcagacgtgaacgctcaggacgacgctggcgagacaccagccgatctggctgcagcttggggccacgaagatatcgccgaggtgctgcagaagacgcgtatccagaaccctgatcctgccgtgtaccagctgcgggatagcaagagcagcgacaagagcgtgtgtctgttcaccgacttcgacagccagaccaacgtgtcccagagcaaggactccgacgtgtacatcaccgataagtgcgtgctggacatcaacaagtccgattgcggagcatggacttcaagagcaactccgccgtggcctggtccaacaagtccgatttcgcctgcgccaacgccttcaacaacagcattatccccgaggacacattcttcccaagccccgagagcagctgcggctttaccagcgagagctaccagcagaacctgagcgtgatcggcttcagaatcctgctgctgaaagtggccggctttaacctgctgatgaccctgcggctgtggtccagccgcgccaagagaagcggatctggcgtgaagcagaccctgaatttcgacctgctgaagctggctggcgacgtggaatccaacccaggcccttctagaggccatatgaccgagtacaagcccacggtgcgcctcgccacccgcgacgacgtccccagggccgtacgcaccctcgccgccgcgttcgccgactaccccgccacgcgccacaccgtcgatccggaccgccacatcgagcgggtcaccgagctgcaagaactcttcctcacgcgcgtcgggctcgacatcggcaaggtgtgggtcgcggacgacggcgccgcggtggcggtctggaccacgccggagagcgtcgaagcgggggcggtgttcgccgagatcggcccgcgcatggccgagttgagcggttcccggctggccgcgcagcaacagatggaaggcctcctggcgccgcaccggcccaaggagcccgcgtggttcctggccaccgtcggcgtctcgcccgaccaccagggcaagggtctgggcagcgccgtcgtgctccccggagtggaggcggccgagcgcgccggggtgcccgccttcctggagacctccgcgccccgcaacctccccttctacgagcggctcggcttcaccgtcaccgccgacgtcgaggtgcccgaaggaccgcgcacctggtgcatgacccgcaagcccggtgcctga

SEQ ID NO: 8120 - DNA, 2033 bp, synthetic construct
  source 1..2033: mol_type = other DNA
atggccttaccagtgaccgccttgctcctgccgctggccttgctgctccacgccgccaggccgctcgaggaggacctgaagaacgtgttcccacctgaggtggccgtgttcgagcctagcgaggccgagatcagccacacccagaaagccaccctcgtgtgcctggctaccggcttctaccccgaccatgtggaactgtcttggtgggtcaacggcaaagaggtgcacagcggcgtgtgtaccgacccccagccactgaaagaacagcccgccctgaacgacagccggtactgcctgagcagcagactgagagtgtccgccaccttctggcagaacccccggaaccacttcagatgccaggtgcagttctacggcctgagcgagaacgacgagtggacccaggacagagccaagcccgtgacccagatcgtgtctgccgaagcctggggcagagccgattgcgacgtgaagctggtggaaaagagcttcgagacagacaccaacctgaacttccagaacctgagcgtgatcggcttcagaatcctgctgctgaaagtggccggctttaacctgctgatgaccctgcggctgtggtccagcagggccaagcgatctggatctggagcaacaaacttctcactactcaaacaagcaggtgacgtggaggagaatcccgggcctactagcatggactggatttggcgcatccttttccttgtcggcgctgctaccggcgcccattccttcgaaggcagcggattcgaatacgccaaagagatgcggaacgcctactgggagatcgccctgctgcccaatctgaccaaccagcagaagagagcccccatcagaaagctgtacgacgacccctcccagagcagcgagctgctgtctgaggctaaaaaactgaacgatagccagacgcgtatccagaaccctgatcctgccgtgtaccagctgcgggatagcaagagcagcgacaagagcgtgtgtctgttcaccgacttcgacagccagaccaacgtgtcccagagcaaggactccgacgtgtacatcaccgataagtgcgtgctggacatcaacaagtccgattgcggagcatggacttcaagagcaactccgccgtggcctggtccaacaagtccgatttcgcctgcgccaacgccttcaacaacagcattatccccgaggacacattcttcccaagccccgagagcagctgcggctttaccagcgagagctaccagcagaacctgagcgtgatcggcttcagaatcctgctgctgaaagtggccggctttaacctgctgatgaccctgcggctgtggtccagccgcgccaagagaagcggatctggcgtgaagcagaccctgaatttcgacctgctgaagctggctggcgacgtggaatccaacccaggcccttctagaggccatatgaccgagtacaagcccacggtgcgcctcgccacccgcgacgacgtccccagggccgtacgcaccctcgccgccgcgttcgccgactaccccgccacgcgccacaccgtcgatccggaccgccacatcgagcgggtcaccgagctgcaagaactcttcctcacgcgcgtcgggctcgacatcggcaaggtgtgggtcgcggacgacggcgccgcggtggcggtctggaccacgccggagagcgtcgaagcgggggcggtgttcgccgagatcggcccgcgcatggccgagttgagcggttcccggctggccgcgcagcaacagatggaaggcctcctggcgccgcaccggcccaaggagcccgcgtggttcctggccaccgtcggcgtctcgcccgaccaccagggcaagggtctgggcagcgccgtcgtgctccccggagtggaggcggccgagcgcgccggggtgcccgccttcctggagacctccgcgccccgcaacctccccttctacgagcggctcggcttcaccgtcaccgccgacgtcgaggtgcccgaaggaccgcgcacctggtgcatgacccgcaagcccggtgcctga

SEQ ID NO: 8121 - DNA, 2699 bp, synthetic construct
  source 1..2699: mol_type = other DNA
atggccttaccagtgaccgccttgctcctgccgctggccttgctgctccacgccgccaggccgctcgaggaggacctgaagaacgtgttcccacctgaggtggccgtgttcgagcctagcgaggccgagatcagccacacccagaaagccaccctcgtgtgcctggctaccggcttctaccccgaccatgtggaactgtcttggtgggtcaacggcaaagaggtgcacagcggcgtgtgtaccgacccccagccactgaaagaacagcccgccctgaacgacagccggtactgcctgagcagcagactgagagtgtccgccaccttctggcagaacccccggaaccacttcagatgccaggtgcagttctacggcctgagcgagaacgacgagtggacccaggacagagccaagcccgtgacccagatcgtgtctgccgaagcctggggcagagccgattgcgacgtgaagctggtggaaaagagcttcgagacagacaccaacctgaacttccagaacctgagcgtgatcggcttcagaatcctgctgctgaaagtggccggctttaacctgctgatgaccctgcggctgtggtccagcagggccaagcgatctggatctggagcaacaaacttctcactactcaaacaagcaggtgacgtggaggagaatcccgggcctactagcatggccctgcccgtgacagccctgctgctgcctctggctctgctgctgcacgccgccagacccgatgaattcgaggtgcaactggtggaaagcggcggaggcctggtgcaggctggcggatctctgagactgagctgtgccgccagcggcatcaccttcagcatcaacacaatgggctggtacagacaggcccctggcaagcagagggaactggtggccctgatctccagcatcggcgacacctactacgccgacagcgtgaagggccggttcaccatcagccgggacaacgccaagaacaccgtgtacctccagatgaacagcctgaagcccgaggacaccgccgtgtactactgcaagcggttcagaacagccgcccagggcaccgattattggggccagggaacacaagtgaccgtgtcctctctcgagggaggaggcggctccgggggaggcggaagtggaggcggaggatctgggtctggaggaagcggatctggaggctcagggtcagggggctcaggcagtggaggctctttcgaagtgcaactggtggaatctgggggcggactggtgcagccaggcggaagtctgaggctgtcttgtgccgcctccggcagcatcttcggcttcaacgacatggcctggtatcggcaggctcccggaaaacagcgcgagctggtggctctgattagcagagtgggcgtgaccagcagcgccgactctgtgaagggcagattcacaatctccagagtgaacgccaaggatacagtgtacctccagatgaactctctgaaacctgaggatacagcagtgtactattgctacatggaccagcggctggacggcagcacactggcctactggggacagggaactcaagtgacagtgtctagcacgcgtatccagaaccctgatcctgccgtgtaccagctgcgggatagcaagagcagcgacaagagcgtgtgtctgttcaccgacttcgacagccagaccaacgtgtcccagagcaaggactccgacgtgtacatcaccgataagtgcgtgctggacatcaacaagtccgattgcggagcatggacttcaagagcaactccgccgtggcctggtccaacaagtccgatttcgcctgcgccaacgccttcaacaacagcattatccccgaggacacattcttcccaagccccgagagcagctgcggctttaccagcgagagctaccagcagaacctgagcgtgatcggcttcagaatcctgctgctgaaagtggccggctttaacctgctgatgaccctgcggctgtggtccagccgcgccaagagaagcggatctggcgtgaagcagaccctgaatttcgacctgctgaagctggctggcgacgtggaatccaacccaggcccttctagaggccatatgaccgagtacaagcccacggtgcgcctcgccacccgcgacgacgtccccagggccgtacgcaccctcgccgccgcgttcgccgactaccccgccacgcgccacaccgtcgatccggaccgccacatcgagcgggtcaccgagctgcaagaactcttcctcacgcgcgtcgggctcgacatcggcaaggtgtgggtcgcggacgacggcgccgcggtggcggtctggaccacgccggagagcgtcgaagcgggggcggtgttcgccgagatcggcccgcgcatggccgagttgagcggttcccggctggccgcgcagcaacagatggaaggcctcctggcgccgcaccggcccaaggagcccgcgtggttcctggccaccgtcggcgtctcgcccgaccaccagggcaagggtctgggcagcgccgtcgtgctccccggagtggaggcggccgagcgcgccggggtgcccgccttcctggagacctccgcgccccgcaacctccccttctacgagcggctcggcttcaccgtcaccgccgacgtcgaggtgcccgaaggaccgcgcacctggtgcatgacccgcaagcccggtgcctga

SEQ ID NO: 8122 - DNA, 2441 bp, synthetic construct
  source 1..2441: mol_type = other DNA
atggccttaccagtgaccgccttgctcctgccgctggccttgctgctccacgccgccaggccgctcgaggaggacctgaagaacgtgttcccacctgaggtggccgtgttcgagcctagcgaggccgagatcagccacacccagaaagccaccctcgtgtgcctggctaccggcttctaccccgaccatgtggaactgtcttggtgggtcaacggcaaagaggtgcacagcggcgtgtgtaccgacccccagccactgaaagaacagcccgccctgaacgacagccggtactgcctgagcagcagactgagagtgtccgccaccttctggcagaacccccggaaccacttcagatgccaggtgcagttctacggcctgagcgagaacgacgagtggacccaggacagagccaagcccgtgacccagatcgtgtctgccgaagcctggggcagagccgattgcgacgtgaagctggtggaaaagagcttcgagacagacaccaacctgaacttccagaacctgagcgtgatcggcttcagaatcctgctgctgaaagtggccggctttaacctgctgatgaccctgcggctgtggtccagcagggccaagcgatctggatctggagcaacaaacttctcactactcaaacaagcaggtgacgtggaggagaatcccgggcctactagcatggcccttccagtcactgccttgctgttgcctctggcgctcctgctccacgccgctagaccgggcatgagaaccgaggacctgcctaaggccgtggtgttcctggaaccccagtggtacagagtgctggaaaaggacagcgtgaccctgaagtgccagggcgcctacagccccgaggacaatagcacccagtggttccacaacgagagcctgatctccagccaggccagcagctacttcatcgacgccgccaccgtggacgacagcggcgagtatagatgccagaccaacctgagcaccctgagcgaccccgtgcagctggaagtgcacatcggatggctgctgctgcaggcccccagatgggtgttcaaagaagaggaccccatccacctgagatgccactcttggaagaacaccgccctgcacaaagtgacctacctgcagaacggcaagggcagaaagtacttccaccacaacagcgacttctacatccccaaggccaccctgaaggactccggctcctacttctgcagaggcctcgtgggcagcaagaacgtgtccagcgagacagtgaacatcaccatcacccagggcctggccgtgtctaccatcagcagctttttcccacccggctaccagacgcgtatccagaaccctgatcctgccgtgtaccagctgcgggatagcaagagcagcgacaagagcgtgtgtctgttcaccgacttcgacagccagaccaacgtgtcccagagcaaggactccgacgtgtacatcaccgataagtgcgtgctggacatcaacaagtccgattgcggagcatggacttcaagagcaactccgccgtggcctggtccaacaagtccgatttcgcctgcgccaacgccttcaacaacagcattatccccgaggacacattcttcccaagccccgagagcagctgcggctttaccagcgagagctaccagcagaacctgagcgtgatcggcttcagaatcctgctgctgaaagtggccggctttaacctgctgatgaccctgcggctgtggtccagccgcgccaagagaagcggatctggcgtgaagcagaccctgaatttcgacctgctgaagctggctggcgacgtggaatccaacccaggcccttctagaggccatatgaccgagtacaagcccacggtgcgcctcgccacccgcgacgacgtccccagggccgtacgcaccctcgccgccgcgttcgccgactaccccgccacgcgccacaccgtcgatccggaccgccacatcgagcgggtcaccgagctgcaagaactcttcctcacgcgcgtcgggctcgacatcggcaaggtgtgggtcgcggacgacggcgccgcggtggcggtctggaccacgccggagagcgtcgaagcgggggcggtgttcgccgagatcggcccgcgcatggccgagttgagcggttcccggctggccgcgcagcaacagatggaaggcctcctggcgccgcaccggcccaaggagcccgcgtggttcctggccaccgtcggcgtctcgcccgaccaccagggcaagggtctgggcagcgccgtcgtgctccccggagtggaggcggccgagcgcgccggggtgcccgccttcctggagacctccgcgccccgcaacctccccttctacgagcggctcggcttcaccgtcaccgccgacgtcgaggtgcccgaaggaccgcgcacctggtgcatgacccgcaagcccggtgcctga

SEQ ID NO: 8123 - DNA, 2447 bp, synthetic construct
  source 1..2447: mol_type = other DNA
atggccttaccagtgaccgccttgctcctgccgctggccttgctgctccacgccgccaggccgctcgaggaggacctgaagaacgtgttcccacctgaggtggccgtgttcgagcctagcgaggccgagatcagccacacccagaaagccaccctcgtgtgcctggctaccggcttctaccccgaccatgtggaactgtcttggtgggtcaacggcaaagaggtgcacagcggcgtgtgtaccgacccccagccactgaaagaacagcccgccctgaacgacagccggtactgcctgagcagcagactgagagtgtccgccaccttctggcagaacccccggaaccacttcagatgccaggtgcagttctacggcctgagcgagaacgacgagtggacccaggacagagccaagcccgtgacccagatcgtgtctgccgaagcctggggcagagccgattgcgacgtgaagctggtggaaaagagcttcgagacagacaccaacctgaacttccagaacctgagcgtgatcggcttcagaatcctgctgctgaaagtggccggctttaacctgctgatgaccctgcggctgtggtccagcagggccaagcgatctggatctggagcaacaaacttctcactactcaaacaagcaggtgacgtggaggagaatcccgggcctactagcgccaccatggccttaccagtgaccgccttgctcctgccgctggccttgctgctccacgccgccaggccgggcatgcggactgaagacctcccaaaggctgtggtgttcctggagcctcaatggtacagggtgctggagaaggacagtgtgactctgaagtgccagggagcctactcccctgaggacaattccacacagtggtttcacaatgagagcctcatctcaagccaggcctccagctacttcattgacgctgccacagtggacgacagtggagagtacaggtgccagacaaacctctccaccctcagtgacccggtgcagctagaagtccatatcggctggctgttgctccaggcccctcggtgggtgttcaaggaggaagaccctattcacctgaggtgtcacagctggaagaacactgctctgcataaggtcacatatttacagaatggcaaaggcaggaagtattttcatcataattctgacttctacattccaaaagccacactcaaagacagcggctcctacttctgcagggggcttgttgggagtaaaaatgtgtcttcagagactgtgaacatcaccatcactcaaggtttggcagtgtcaaccatctcatcattctttccacctggctaccaaacgcgtatccagaaccctgatcctgccgtgtaccagctgcgggatagcaagagcagcgacaagagcgtgtgtctgttcaccgacttcgacagccagaccaacgtgtcccagagcaaggactccgacgtgtacatcaccgataagtgcgtgctggacatcaacaagtccgattgcggagcatggacttcaagagcaactccgccgtggcctggtccaacaagtccgatttcgcctgcgccaacgccttcaacaacagcattatccccgaggacacattcttcccaagccccgagagcagctgcggctttaccagcgagagctaccagcagaacctgagcgtgatcggcttcagaatcctgctgctgaaagtggccggctttaacctgctgatgaccctgcggctgtggtccagccgcgccaagagaagcggatctggcgtgaagcagaccctgaatttcgacctgctgaagctggctggcgacgtggaatccaacccaggcccttctagaggccatatgaccgagtacaagcccacggtgcgcctcgccacccgcgacgacgtccccagggccgtacgcaccctcgccgccgcgttcgccgactaccccgccacgcgccacaccgtcgatccggaccgccacatcgagcgggtcaccgagctgcaagaactcttcctcacgcgcgtcgggctcgacatcggcaaggtgtgggtcgcggacgacggcgccgcggtggcggtctggaccacgccggagagcgtcgaagcgggggcggtgttcgccgagatcggcccgcgcatggccgagttgagcggttcccggctggccgcgcagcaacagatggaaggcctcctggcgccgcaccggcccaaggagcccgcgtggttcctggccaccgtcggcgtctcgcccgaccaccagggcaagggtctgggcagcgccgtcgtgctccccggagtggaggcggccgagcgcgccggggtgcccgccttcctggagacctccgcgccccgcaacctccccttctacgagcggctcggcttcaccgtcaccgccgacgtcgaggtgcccgaaggaccgcgcacctggtgcatgacccgcaagcccggtgcctga

SEQ ID NO: 8124 - DNA, 2591 bp, synthetic construct
  source 1..2591: mol_type = other DNA
atggccttaccagtgaccgccttgctcctgccgctggccttgctgctccacgccgccaggccgctcgagatccagaaccctgatcctgccgtgtaccagctgcgggatagcaagagcagcgacaagagcgtgtgtctgttcaccgacttcgacagccagaccaacgtgtcccagagcaaggactccgacgtgtacatcaccgataagtgcgtgctggacatcaacaagtccgattgcggagcatggacttcaagagcaactccgccgtggcctggtccaacaagtccgatttcgcctgcgccaacgccttcaacaacagcattatccccgaggacacattcttcccaagccccgagagcagctgcggctttaccagcgagagctaccagcagaacctgagcgtgatcggcttcagaatcctgctgctgaaagtggccggctttaacctgctgatgaccctgcggctgtggtccagcagggccaagcgatctggatctggagcaacaaacttctcactactcaaacaagcaggtgacgtggaggagaatcccgggcctactagcatggccttaccagtgaccgccttgctcctgccgctggccttgctgctccacgccgccaggccggacatccagatgacacagactacatcctccctgtctgcctctctgggagacagagtcaccatcagttgcagggcaagtcaggacattagtaaatatttaaattggtatcagcagaaaccagatggaactgttaaactcctgatctaccatacatcaagattacactcaggagtcccatcaaggttcagtggcagtgggtctggaacagattattctctcaccattagcaacctggagcaagaagatattgccacttacttttgccaacagggtaatacgcttccgtacacgttcggaggggggaccaagctggagatcacaggtggcggtggctcgggcggtggtgggtcgggtggcggcggatctgaggtgaaactgcaggagtcaggacctggcctggtggcgccctcacagagcctgtccgtcacatgcactgtctcaggggtctcattacccgactatggtgtaagctggattcgccagcctccacgaaagggtctggagtggctgggagtaatatggggtagtgaaaccacatactataattcagctctcaaatccagactgaccatcatcaaggacaactccaagagccaagttttcttaaaaatgaacagtctgcaaactgatgacacagccatttactactgtgccaaacattattactacggtggtagctatgctatggactactggggtcaaggaacctcagtcaccgtctcctcaacgcgtgaggacctgaagaacgtgttcccacctgaggtggccgtgttcgagcctagcgaggccgagatcagccacacccagaaagccaccctcgtgtgcctggctaccggcttctaccccgaccatgtggaactgtcttggtgggtcaacggcaaagaggtgcacagcggcgtgtgtaccgacccccagccactgaaagaacagcccgccctgaacgacagccggtactgcctgagcagcagactgagagtgtccgccaccttctggcagaacccccggaaccacttcagatgccaggtgcagttctacggcctgagcgagaacgacgagtggacccaggacagagccaagcccgtgacccagatcgtgtctgccgaagcctggggcagagccgattgcgacgtgaagctggtggaaaagagcttcgagacagacaccaacctgaacttccagaacctgagcgtgatcggcttcagaatcctgctgctgaaagtggccggctttaacctgctgatgaccctgcggctgtggtccagccgcgccaagagaagcggatctggcgtgaagcagaccctgaatttcgacctgctgaagctggctggcgacgtggaatccaacccaggcccttctagaggccatatgaccgagtacaagcccacggtgcgcctcgccacccgcgacgacgtccccagggccgtacgcaccctcgccgccgcgttcgccgactaccccgccacgcgccacaccgtcgatccggaccgccacatcgagcgggtcaccgagctgcaagaactcttcctcacgcgcgtcgggctcgacatcggcaaggtgtgggtcgcggacgacggcgccgcggtggcggtctggaccacgccggagagcgtcgaagcgggggcggtgttcgccgagatcggcccgcgcatggccgagttgagcggttcccggctggccgcgcagcaacagatggaaggcctcctggcgccgcaccggcccaaggagcccgcgtggttcctggccaccgtcggcgtctcgcccgaccaccagggcaagggtctgggcagcgccgtcgtgctccccggagtggaggcggccgagcgcgccggggtgcccgccttcctggagacctccgcgccccgcaacctccccttctacgagcggctcggcttcaccgtcaccgccgacgtcgaggtgcccgaaggaccgcgcacctggtgcatgacccgcaagcccggtgcctga

SEQ ID NO: 8125 - DNA, 2594 bp, synthetic construct
  source 1..2594: mol_type = other DNA
atggccttaccagtgaccgccttgctcctgccgctggccttgctgctccacgccgccaggccgctcgagatccagaaccctgatcctgccgtgtaccagctgcgggatagcaagagcagcgacaagagcgtgtgtctgttcaccgacttcgacagccagaccaacgtgtcccagagcaaggactccgacgtgtacatcaccgataagtgcgtgctggacatcaacaagtccgattgcggagcatggacttcaagagcaactccgccgtggcctggtccaacaagtccgatttcgcctgcgccaacgccttcaacaacagcattatccccgaggacacattcttcccaagccccgagagcagctgcggctttaccagcgagagctaccagcagaacctgagcgtgatcggcttcagaatcctgctgctgaaagtggccggctttaacctgctgatgaccctgcggctgtggtccagcagggccaagcgatctggatctggagcaacaaacttctcactactcaaacaagcaggtgacgtggaggagaatcccgggcctactagcaccatggccttaccagtgaccgccttgctcctgccgctggccttgctgctccacgccgccaggccggagatcgtgatgacccagagccctgccaccctgtctctgagccctggcgaaagagccaccctgagctgtagagccagccaggacatcagcaagtacctgaactggtatcagcagaagcccggccaggcccccagactgctgatctaccacaccagcagactgcacagcggcatccccgccagattttctggctctggcagcggcaccgactacaccctgacaatcagcagcctccagcccgaggacttcgccgtgtacttctgtcagcaaggcaacaccctgccctacaccttcggccagggcaccaagctggaaatcaagggcggaggcggaagtggaggcggaggatctggcggcggaggctctcaggtgcaactccaggaatctggccctggcctcgtgaagcccagcgagacactgagcctgacctgtaccgtgtccggcgtgtccctgcctgactatggcgtgtcctggatcagacagccccctggcaagggcctggaatggatcggagtgatttggggcagcgaaaccacctactacaacagctccctgaagtccagagtgaccatctccaaggacaactccaagaaccaggtgtccctgaagctgagcagcgtgacagccgccgacaccgccgtgtattactgcgccaagcactactactacggcggcagctacgctatggactactggggccagggaaccctcgtgaccgtgtctagtacgcgtgaggacctgaagaacgtgttcccacctgaggtggccgtgttcgagcctagcgaggccgagatcagccacacccagaaagccaccctcgtgtgcctggctaccggcttctaccccgaccatgtggaactgtcttggtgggtcaacggcaaagaggtgcacagcggcgtgtgtaccgacccccagccactgaaagaacagcccgccctgaacgacagccggtactgcctgagcagcagactgagagtgtccgccaccttctggcagaacccccggaaccacttcagatgccaggtgcagttctacggcctgagcgagaacgacgagtggacccaggacagagccaagcccgtgacccagatcgtgtctgccgaagcctggggcagagccgattgcgacgtgaagctggtggaaaagagcttcgagacagacaccaacctgaacttccagaacctgagcgtgatcggcttcagaatcctgctgctgaaagtggccggctttaacctgctgatgaccctgcggctgtggtccagccgcgccaagagaagcggatctggcgtgaagcagaccctgaatttcgacctgctgaagctggctggcgacgtggaatccaacccaggcccttctagaggccatatgaccgagtacaagcccacggtgcgcctcgccacccgcgacgacgtccccagggccgtacgcaccctcgccgccgcgttcgccgactaccccgccacgcgccacaccgtcgatccggaccgccacatcgagcgggtcaccgagctgcaagaactcttcctcacgcgcgtcgggctcgacatcggcaaggtgtgggtcgcggacgacggcgccgcggtggcggtctggaccacgccggagagcgtcgaagcgggggcggtgttcgccgagatcggcccgcgcatggccgagttgagcggttcccggctggccgcgcagcaacagatggaaggcctcctggcgccgcaccggcccaaggagcccgcgtggttcctggccaccgtcggcgtctcgcccgaccaccagggcaagggtctgggcagcgccgtcgtgctccccggagtggaggcggccgagcgcgccggggtgcccgccttcctggagacctccgcgccccgcaacctccccttctacgagcggctcggcttcaccgtcaccgccgacgtcgaggtgcccgaaggaccgcgcacctggtgcatgacccgcaagcccggtgcctga

SEQ ID NO: 8126 - DNA, 2597 bp, synthetic construct
  source 1..2597: mol_type = other DNA
atggccttaccagtgaccgccttgctcctgccgctggccttgctgctccacgccgccaggccgctcgagatccagaaccctgatcctgccgtgtaccagctgcgggatagcaagagcagcgacaagagcgtgtgtctgttcaccgacttcgacagccagaccaacgtgtcccagagcaaggactccgacgtgtacatcaccgataagtgcgtgctggacatcaacaagtccgattgcggagcatggacttcaagagcaactccgccgtggcctggtccaacaagtccgatttcgcctgcgccaacgccttcaacaacagcattatccccgaggacacattcttcccaagccccgagagcagctgcggctttaccagcgagagctaccagcagaacctgagcgtgatcggcttcagaatcctgctgctgaaagtggccggctttaacctgctgatgaccctgcggctgtggtccagcagggccaagcgatctggatctggagcaacaaacttctcactactcaaacaagcaggtgacgtggaggagaatcccgggcctactagcaccatggccttaccagtgaccgccttgctcctgccgctggccttgctgctccacgccgccaggccggacgagatcgtgctgacacagagccccgccaccctgtcactgtctccaggcgaaagagccaccctgagctgtagcgccagcagcagcgtgtcctacatgcactggtatcagcagaagcccggccaggcccccagactgctgatctacgataccagcaagctggcctccggcatccccgccagattttctggcagcggctccggcaccgacttcaccctgacaatcagcagcctggaacccgaggacgtggccgtgtactactgttttcaaggcagcgtgtaccccttcaccttcggccagggcaccaagctggaaatcaagagaggtggcggtggctcgggcggtggtgggtcgggtggcggcggatctcaggtgcagctccaggaatctggccctggcctcgtgaagcctagccagaccctgagcctgacctgtaccgtgtctggcggcagcatcagcacaagcggcatgggcgtgggctggatcagacagcaccctggcaagggcctggaatggatcggccacatttggtgggacgacgacaagcggtacaaccccgccctgaagtccagagtgaccatcagcgtggacaccagcaagaaccagttcagcctgaagctgagcagcgtgacagccgccgataccgccgtgtattattgcgcccggatggaactgtggtcctactacttcgactactggggccagggaaccctcgtgaccgtgtctagtacgcgtgaggacctgaagaacgtgttcccacctgaggtggccgtgttcgagcctagcgaggccgagatcagccacacccagaaagccaccctcgtgtgcctggctaccggcttctaccccgaccatgtggaactgtcttggtgggtcaacggcaaagaggtgcacagcggcgtgtgtaccgacccccagccactgaaagaacagcccgccctgaacgacagccggtactgcctgagcagcagactgagagtgtccgccaccttctggcagaacccccggaaccacttcagatgccaggtgcagttctacggcctgagcgagaacgacgagtggacccaggacagagccaagcccgtgacccagatcgtgtctgccgaagcctggggcagagccgattgcgacgtgaagctggtggaaaagagcttcgagacagacaccaacctgaacttccagaacctgagcgtgatcggcttcagaatcctgctgctgaaagtggccggctttaacctgctgatgaccctgcggctgtggtccagccgcgccaagagaagcggatctggcgtgaagcagaccctgaatttcgacctgctgaagctggctggcgacgtggaatccaacccaggcccttctagaggccatatgaccgagtacaagcccacggtgcgcctcgccacccgcgacgacgtccccagggccgtacgcaccctcgccgccgcgttcgccgactaccccgccacgcgccacaccgtcgatccggaccgccacatcgagcgggtcaccgagctgcaagaactcttcctcacgcgcgtcgggctcgacatcggcaaggtgtgggtcgcggacgacggcgccgcggtggcggtctggaccacgccggagagcgtcgaagcgggggcggtgttcgccgagatcggcccgcgcatggccgagttgagcggttcccggctggccgcgcagcaacagatggaaggcctcctggcgccgcaccggcccaaggagcccgcgtggttcctggccaccgtcggcgtctcgcccgaccaccagggcaagggtctgggcagcgccgtcgtgctccccggagtggaggcggccgagcgcgccggggtgcccgccttcctggagacctccgcgccccgcaacctccccttctacgagcggctcggcttcaccgtcaccgccgacgtcgaggtgcccgaaggaccgcgcacctggtgcatgacccgcaagcccggtgcctga

SEQ ID NO: 8127 - DNA, 2585 bp, synthetic construct
  source 1..2585: mol_type = other DNA
atggccttaccagtgaccgccttgctcctgccgctggccttgctgctccacgccgccaggccgctcgagatccagaaccctgatcctgccgtgtaccagctgcgggatagcaagagcagcgacaagagcgtgtgtctgttcaccgacttcgacagccagaccaacgtgtcccagagcaaggactccgacgtgtacatcaccgataagtgcgtgctggacatcaacaagtccgattgcggagcatggacttcaagagcaactccgccgtggcctggtccaacaagtccgatttcgcctgcgccaacgccttcaacaacagcattatccccgaggacacattcttcccaagccccgagagcagctgcggctttaccagcgagagctaccagcagaacctgagcgtgatcggcttcagaatcctgctgctgaaagtggccggctttaacctgctgatgaccctgcggctgtggtccagcagggccaagcgatctggatctggagcaacaaacttctcactactcaaacaagcaggtgacgtggaggagaatcccgggcctactagcatggccttaccagtgaccgccttgctcctgccgctggccttgctgctccacgccgccaggccggacatccagatgacacagagccctagcagcctgtctgccagcgtgggagacagagtgaccatcacctgtagagccagccaggacatcagcaactacctgaactggtatcagcagaagcccggcaaggcccctaagctgctgatctactacaccagcagactgcacagcggcgtgcccagcagattttctggctctggcagcggcaccgacttcaccctgacaatatctagcctccagcctgaggacttcgccacctactattgccagcagggcaacaccctgccttacacatttggacagggcaccaaggtggaaatcaagagaggcggaggcggaagtggaggcggaggatctggcggcggaggctctgaagtgcagctggttgaatcaggtggcggcctggttcaacctggcggatctctgagactgagctgtgccgccagcggcttcaccttcagcgactactttatgagctgggtccgacaggcccctggcaaaggacttgaatgggtcgccaccatcagcaatggcggcacctacacttactaccccgacagcgtgaagggcagattcaccatctccagagacaacagcaagaacaccctgtacctccagatgaactccctgagagccgaggacaccgccgtgtactactgcgccagattcgacggctacatcttcgactattggggccagggcaccctggtcacagtctcttctacgcgtgaggacctgaagaacgtgttcccacctgaggtggccgtgttcgagcctagcgaggccgagatcagccacacccagaaagccaccctcgtgtgcctggctaccggcttctaccccgaccatgtggaactgtcttggtgggtcaacggcaaagaggtgcacagcggcgtgtgtaccgacccccagccactgaaagaacagcccgccctgaacgacagccggtactgcctgagcagcagactgagagtgtccgccaccttctggcagaacccccggaaccacttcagatgccaggtgcagttctacggcctgagcgagaacgacgagtggacccaggacagagccaagcccgtgacccagatcgtgtctgccgaagcctggggcagagccgattgcgacgtgaagctggtggaaaagagcttcgagacagacaccaacctgaacttccagaacctgagcgtgatcggcttcagaatcctgctgctgaaagtggccggctttaacctgctgatgaccctgcggctgtggtccagccgcgccaagagaagcggatctggcgtgaagcagaccctgaatttcgacctgctgaagctggctggcgacgtggaatccaacccaggcccttctagaggccatatgaccgagtacaagcccacggtgcgcctcgccacccgcgacgacgtccccagggccgtacgcaccctcgccgccgcgttcgccgactaccccgccacgcgccacaccgtcgatccggaccgccacatcgagcgggtcaccgagctgcaagaactcttcctcacgcgcgtcgggctcgacatcggcaaggtgtgggtcgcggacgacggcgccgcggtggcggtctggaccacgccggagagcgtcgaagcgggggcggtgttcgccgagatcggcccgcgcatggccgagttgagcggttcccggctggccgcgcagcaacagatggaaggcctcctggcgccgcaccggcccaaggagcccgcgtggttcctggccaccgtcggcgtctcgcccgaccaccagggcaagggtctgggcagcgccgtcgtgctccccggagtggaggcggccgagcgcgccggggtgcccgccttcctggagacctccgcgccccgcaacctccccttctacgagcggctcggcttcaccgtcaccgccgacgtcgaggtgcccgaaggaccgcgcacctggtgcatgacccgcaagcccggtgcctga

SEQ ID NO: 8128 - DNA, 2597 bp, synthetic construct
  source 1..2597: mol_type = other DNA
atggccttaccagtgaccgccttgctcctgccgctggccttgctgctccacgccgccaggccgctcgagatccagaaccctgatcctgccgtgtaccagctgcgggatagcaagagcagcgacaagagcgtgtgtctgttcaccgacttcgacagccagaccaacgtgtcccagagcaaggactccgacgtgtacatcaccgataagtgcgtgctggacatcaacaagtccgattgcggagcatggacttcaagagcaactccgccgtggcctggtccaacaagtccgatttcgcctgcgccaacgccttcaacaacagcattatccccgaggacacattcttcccaagccccgagagcagctgcggctttaccagcgagagctaccagcagaacctgagcgtgatcggcttcagaatcctgctgctgaaagtggccggctttaacctgctgatgaccctgcggctgtggtccagcagggccaagcgatctggatctggagcaacaaacttctcactactcaaacaagcaggtgacgtggaggagaatcccgggcctactagcatggccttaccagtgaccgccttgctcctgccgctggccttgctgctccacgccgccaggccggacatccagatgacacagagccctagcagcctgtctgccagcgtgggagacagagtgaccatcacatgcaaggccagcgaccacatcaacaactggctggcctggtatcagcagaagcctggacaggcccctaagctgctgatctacggcgctaccacactggaaacaggcgtgcccagcagattttctggcagcggctctggcaccgactacaccctgacaatatccagcctccagcctgaggacttcgccacctactactgtcagcagagctggaacaccccttggacattcggccagggcaccaagctggaaatcaagagaggcggaggcggaagtggaggcggaggatctggcggcggaggctctcaagttcagcttcaacagcctggcgctgagctggtcaaacctggcgcttctgtgaagatgagctgcaaagccagcggctacgccttcagcagctactggatcaactggatgaagcagaaacccggccagggactcgaatggatcggccaaatctatcccggcgacggcgacaccaactacaacggcaagttcaagggcagagccacactgaccgccgatacctctagcagcacagcctacatgcagctgagcagcctgaccagcgaagatagcgccgtgtacttctgtgcccggtccatcacaacagtcgtgggctgcgctatggactattggggccagggaacaagcgtgaccgtgtctagtacgcgtgaggacctgaagaacgtgttcccacctgaggtggccgtgttcgagcctagcgaggccgagatcagccacacccagaaagccaccctcgtgtgcctggctaccggcttctaccccgaccatgtggaactgtcttggtgggtcaacggcaaagaggtgcacagcggcgtgtgtaccgacccccagccactgaaagaacagcccgccctgaacgacagccggtactgcctgagcagcagactgagagtgtccgccaccttctggcagaacccccggaaccacttcagatgccaggtgcagttctacggcctgagcgagaacgacgagtggacccaggacagagccaagcccgtgacccagatcgtgtctgccgaagcctggggcagagccgattgcgacgtgaagctggtggaaaagagcttcgagacagacaccaacctgaacttccagaacctgagcgtgatcggcttcagaatcctgctgctgaaagtggccggctttaacctgctgatgaccctgcggctgtggtccagccgcgccaagagaagcggatctggcgtgaagcagaccctgaatttcgacctgctgaagctggctggcgacgtggaatccaacccaggcccttctagaggccatatgaccgagtacaagcccacggtgcgcctcgccacccgcgacgacgtccccagggccgtacgcaccctcgccgccgcgttcgccgactaccccgccacgcgccacaccgtcgatccggaccgccacatcgagcgggtcaccgagctgcaagaactcttcctcacgcgcgtcgggctcgacatcggcaaggtgtgggtcgcggacgacggcgccgcggtggcggtctggaccacgccggagagcgtcgaagcgggggcggtgttcgccgagatcggcccgcgcatggccgagttgagcggttcccggctggccgcgcagcaacagatggaaggcctcctggcgccgcaccggcccaaggagcccgcgtggttcctggccaccgtcggcgtctcgcccgaccaccagggcaagggtctgggcagcgccgtcgtgctccccggagtggaggcggccgagcgcgccggggtgcccgccttcctggagacctccgcgccccgcaacctccccttctacgagcggctcggcttcaccgtcaccgccgacgtcgaggtgcccgaaggaccgcgcacctggtgcatgacccgcaagcccggtgcctga

SEQ ID NO: 8129 - DNA, 2603 bp, synthetic construct
  source 1..2603: mol_type = other DNA
atggccttaccagtgaccgccttgctcctgccgctggccttgctgctccacgccgccaggccgctcgagatccagaaccctgatcctgccgtgtaccagctgcgggatagcaagagcagcgacaagagcgtgtgtctgttcaccgacttcgacagccagaccaacgtgtcccagagcaaggactccgacgtgtacatcaccgataagtgcgtgctggacatcaacaagtccgattgcggagcatggacttcaagagcaactccgccgtggcctggtccaacaagtccgatttcgcctgcgccaacgccttcaacaacagcattatccccgaggacacattcttcccaagccccgagagcagctgcggctttaccagcgagagctaccagcagaacctgagcgtgatcggcttcagaatcctgctgctgaaagtggccggctttaacctgctgatgaccctgcggctgtggtccagcagggccaagcgatctggatctggagcaacaaacttctcactactcaaacaagcaggtgacgtggaggagaatcccgggcctactagcatggccttaccagtgaccgccttgctcctgccgctggccttgctgctccacgccgccaggccgcagatcgtgctgtctcagtctcctgccatcctgagcgcttccccaggcgagaaagtgaccatgacctgtagagccagcagcagcgtgtcctacatgcactggtatcagcagaagcccggcagcagccctaagccttggatctacgccaccagcaatctggcctctggcgtgccagccagattttctggctctggcagcggcaccagctacagcttcacaatcagcagagtggaagccgaggacgccgccacctactattgtcagcagtggaccttcaatcctcctaccttcggcggaggcacccggctggaaatcaaaagaacagtggctgctggcggaggcggaagtggaggcggaggatctggcggcggaggctctcaggcttatctgcaacagagcggagccgaactcgtcagacctggcgcttctgtgaagatgagctgcaaggccagcggctacaccttcaccagctataatatgcactgggtcaagcagacccctcggcagggactcgaatggatcggcggaatctatcccggcaacggcgacacctcctacaaccagaagttcaagggcaaagccacactgaccgtgggcaagagcagcagcaccgcctatatgcagctcagcagcctgaccagcgaggacagcgccgtgtacttctgcgccagatacgactacaactacgctatggactactggggccagggcaccagcgtgacagttagctctgccagcacgcgtgaggacctgaagaacgtgttcccacctgaggtggccgtgttcgagcctagcgaggccgagatcagccacacccagaaagccaccctcgtgtgcctggctaccggcttctaccccgaccatgtggaactgtcttggtgggtcaacggcaaagaggtgcacagcggcgtgtgtaccgacccccagccactgaaagaacagcccgccctgaacgacagccggtactgcctgagcagcagactgagagtgtccgccaccttctggcagaacccccggaaccacttcagatgccaggtgcagttctacggcctgagcgagaacgacgagtggacccaggacagagccaagcccgtgacccagatcgtgtctgccgaagcctggggcagagccgattgcgacgtgaagctggtggaaaagagcttcgagacagacaccaacctgaacttccagaacctgagcgtgatcggcttcagaatcctgctgctgaaagtggccggctttaacctgctgatgaccctgcggctgtggtccagccgcgccaagagaagcggatctggcgtgaagcagaccctgaatttcgacctgctgaagctggctggcgacgtggaatccaacccaggcccttctagaggccatatgaccgagtacaagcccacggtgcgcctcgccacccgcgacgacgtccccagggccgtacgcaccctcgccgccgcgttcgccgactaccccgccacgcgccacaccgtcgatccggaccgccacatcgagcgggtcaccgagctgcaagaactcttcctcacgcgcgtcgggctcgacatcggcaaggtgtgggtcgcggacgacggcgccgcggtggcggtctggaccacgccggagagcgtcgaagcgggggcggtgttcgccgagatcggcccgcgcatggccgagttgagcggttcccggctggccgcgcagcaacagatggaaggcctcctggcgccgcaccggcccaaggagcccgcgtggttcctggccaccgtcggcgtctcgcccgaccaccagggcaagggtctgggcagcgccgtcgtgctccccggagtggaggcggccgagcgcgccggggtgcccgccttcctggagacctccgcgccccgcaacctccccttctacgagcggctcggcttcaccgtcaccgccgacgtcgaggtgcccgaaggaccgcgcacctggtgcatgacccgcaagcccggtgcctga

SEQ ID NO: 8130 - DNA, 2597 bp, synthetic construct
  source 1..2597: mol_type = other DNA
atggccttaccagtgaccgccttgctcctgccgctggccttgctgctccacgccgccaggccgctcgagatccagaaccctgatcctgccgtgtaccagctgcgggatagcaagagcagcgacaagagcgtgtgtctgttcaccgacttcgacagccagaccaacgtgtcccagagcaaggactccgacgtgtacatcaccgataagtgcgtgctggacatcaacaagtccgattgcggagcatggacttcaagagcaactccgccgtggcctggtccaacaagtccgatttcgcctgcgccaacgccttcaacaacagcattatccccgaggacacattcttcccaagccccgagagcagctgcggctttaccagcgagagctaccagcagaacctgagcgtgatcggcttcagaatcctgctgctgaaagtggccggctttaacctgctgatgaccctgcggctgtggtccagcagggccaagcgatctggatctggagcaacaaacttctcactactcaaacaagcaggtgacgtggaggagaatcccgggcctactagcatggccttaccagtgaccgccttgctcctgccgctggccttgctgctccacgccgccaggccggagatcgtgctgacacagagccctgccaccctgtctctgagccctggcgaaagagccaccctgagctgtagagccagccagagcgtgtccagctacctggcctggtatcagcagaagcccggccaggctccccggctgctgatctacgatgccagcaatagagccaccggcatccccgccagattttccggctctggcagcggcaccgacttcaccctgaccatcagctccctggaacccgaggacttcgccgtgtactactgccagcagcggagcaactggcccatcacattcggccagggcacccggctggaaatcaaaggcggaggcggaagtggaggcggaggatctggcggcggaggctctgaggtgcagcttgttgagtctggcggaggactggtgcagcccgatagaagcctgagactgtcttgtgccgccagcggcttcaccttccacgattatgccatgcactgggtccgacaggcccctggcaaaggacttgaatgggtgtccaccatctcttggaacagcggcacaatcggctacgccgactctgtgaagggcagattcaccatcagccgggacaacgccaagaacagcctgtacctccagatgaactccctgagagccgaggacacagccctgtactactgcgccaaggacatccagtacggcaactactactacggcatggacgtgtggggccagggcacaacagtgacagtctcttctacgcgtgaggacctgaagaacgtgttcccacctgaggtggccgtgttcgagcctagcgaggccgagatcagccacacccagaaagccaccctcgtgtgcctggctaccggcttctaccccgaccatgtggaactgtcttggtgggtcaacggcaaagaggtgcacagcggcgtgtgtaccgacccccagccactgaaagaacagcccgccctgaacgacagccggtactgcctgagcagcagactgagagtgtccgccaccttctggcagaacccccggaaccacttcagatgccaggtgcagttctacggcctgagcgagaacgacgagtggacccaggacagagccaagcccgtgacccagatcgtgtctgccgaagcctggggcagagccgattgcgacgtgaagctggtggaaaagagcttcgagacagacaccaacctgaacttccagaacctgagcgtgatcggcttcagaatcctgctgctgaaagtggccggctttaacctgctgatgaccctgcggctgtggtccagccgcgccaagagaagcggatctggcgtgaagcagaccctgaatttcgacctgctgaagctggctggcgacgtggaatccaacccaggcccttctagaggccatatgaccgagtacaagcccacggtgcgcctcgccacccgcgacgacgtccccagggccgtacgcaccctcgccgccgcgttcgccgactaccccgccacgcgccacaccgtcgatccggaccgccacatcgagcgggtcaccgagctgcaagaactcttcctcacgcgcgtcgggctcgacatcggcaaggtgtgggtcgcggacgacggcgccgcggtggcggtctggaccacgccggagagcgtcgaagcgggggcggtgttcgccgagatcggcccgcgcatggccgagttgagcggttcccggctggccgcgcagcaacagatggaaggcctcctggcgccgcaccggcccaaggagcccgcgtggttcctggccaccgtcggcgtctcgcccgaccaccagggcaagggtctgggcagcgccgtcgtgctccccggagtggaggcggccgagcgcgccggggtgcccgccttcctggagacctccgcgccccgcaacctccccttctacgagcggctcggcttcaccgtcaccgccgacgtcgaggtgcccgaaggaccgcgcacctggtgcatgacccgcaagcccggtgcctga

SEQ ID NO: 8131 - DNA, 2591 bp, synthetic construct
  source 1..2591: mol_type = other DNA
atggccttaccagtgaccgccttgctcctgccgctggccttgctgctccacgccgccaggccgctcgagatccagaaccctgatcctgccgtgtaccagctgcgggatagcaagagcagcgacaagagcgtgtgtctgttcaccgacttcgacagccagaccaacgtgtcccagagcaaggactccgacgtgtacatcaccgataagtgcgtgctggacatcaacaagtccgattgcggagcatggacttcaagagcaactccgccgtggcctggtccaacaagtccgatttcgcctgcgccaacgccttcaacaacagcattatccccgaggacacattcttcccaagccccgagagcagctgcggctttaccagcgagagctaccagcagaacctgagcgtgatcggcttcagaatcctgctgctgaaagtggccggctttaacctgctgatgaccctgcggctgtggtccagcagggccaagcgatctggatctggagcaacaaacttctcactactcaaacaagcaggtgacgtggaggagaatcccgggcctactagcatggccttaccagtgaccgccttgctcctgccgctggccttgctgctccacgccgccaggccggacatccagatgacccagagccccagcagcctgtctgccagcgtgggcgacagagtgaccatcacctgtagagccagccaggacgtgaacaccgccgtggcctggtatcagcagaagcctggcaaggcccccaagctgctgatctacagcgccagcttcctggaaagcggcgtgcccagcagattcagcggaagcagaagcggcaccgacttcaccctgaccatcagctccctccagcccgaggacttcgccacctactactgccagcagcactacaccacccctcccaccttcggccagaccaaggtggaaatcaagagaggcggaggcggaagtggaggcggaggatctggcggcggaggctctgaagtgcaactggtggaatctggcggcggactggtgcagcctggcggatctctgagactgagctgtgccgccagcggcttcaacatcaaggacacctacatccactgggtgcgccaggcccctggaaagggactggaatgggtggcccggatctaccccaccaacggctacaccagatacgccgacagcgtgaagggccggttcaccatcagcgccgacaccagcaagaataccgcctacctccagatgaacagcctgcgggccgaggataccgccgtgtactactgctcaagatggggaggcgacggcttctacgctatggacgtgtggggccagggcacccttgtgaccgtgtcatctacgcgtgaggacctgaagaacgtgttcccacctgaggtggccgtgttcgagcctagcgaggccgagatcagccacacccagaaagccaccctcgtgtgcctggctaccggcttctaccccgaccatgtggaactgtcttggtgggtcaacggcaaagaggtgcacagcggcgtgtgtaccgacccccagccactgaaagaacagcccgccctgaacgacagccggtactgcctgagcagcagactgagagtgtccgccaccttctggcagaacccccggaaccacttcagatgccaggtgcagttctacggcctgagcgagaacgacgagtggacccaggacagagccaagcccgtgacccagatcgtgtctgccgaagcctggggcagagccgattgcgacgtgaagctggtggaaaagagcttcgagacagacaccaacctgaacttccagaacctgagcgtgatcggcttcagaatcctgctgctgaaagtggccggctttaacctgctgatgaccctgcggctgtggtccagccgcgccaagagaagcggatctggcgtgaagcagaccctgaatttcgacctgctgaagctggctggcgacgtggaatccaacccaggcccttctagaggccatatgaccgagtacaagcccacggtgcgcctcgccacccgcgacgacgtccccagggccgtacgcaccctcgccgccgcgttcgccgactaccccgccacgcgccacaccgtcgatccggaccgccacatcgagcgggtcaccgagctgcaagaactcttcctcacgcgcgtcgggctcgacatcggcaaggtgtgggtcgcggacgacggcgccgcggtggcggtctggaccacgccggagagcgtcgaagcgggggcggtgttcgccgagatcggcccgcgcatggccgagttgagcggttcccggctggccgcgcagcaacagatggaaggcctcctggcgccgcaccggcccaaggagcccgcgtggttcctggccaccgtcggcgtctcgcccgaccaccagggcaagggtctgggcagcgccgtcgtgctccccggagtggaggcggccgagcgcgccggggtgcccgccttcctggagacctccgcgccccgcaacctccccttctacgagcggctcggcttcaccgtcaccgccgacgtcgaggtgcccgaaggaccgcgcacctggtgcatgacccgcaagcccggtgcctga

SEQ ID NO: 8132 - DNA, 2228 bp, synthetic construct
  source 1..2228: mol_type = other DNA
atggccttaccagtgaccgccttgctcctgccgctggccttgctgctccacgccgccaggccgctcgagatccagaaccctgatcctgccgtgtaccagctgcgggatagcaagagcagcgacaagagcgtgtgtctgttcaccgacttcgacagccagaccaacgtgtcccagagcaaggactccgacgtgtacatcaccgataagtgcgtgctggacatcaacaagtccgattgcggagcatggacttcaagagcaactccgccgtggcctggtccaacaagtccgatttcgcctgcgccaacgccttcaacaacagcattatccccgaggacacattcttcccaagccccgagagcagctgcggctttaccagcgagagctaccagcagaacctgagcgtgatcggcttcagaatcctgctgctgaaagtggccggctttaacctgctgatgaccctgcggctgtggtccagcagggccaagcgatctggatctggagcaacaaacttctcactactcaaacaagcaggtgacgtggaggagaatcccgggcctactagcatggccctgcccgtgacagccctgctgctgcctctggctctgctgctgcacgccgccagacccgatgaattcgaggtgcaactggtggaaagcggcggaggcctggtgcaggctggcggatctctgagactgagctgtgccgccagcggcatcaccttcagcatcaacacaatgggctggtacagacaggcccctggcaagcagagggaactggtggccctgatctccagcatcggcgacacctactacgccgacagcgtgaagggccggttcaccatcagccgggacaacgccaagaacaccgtgtacctccagatgaacagcctgaagcccgaggacaccgccgtgtactactgcaagcggttcagaacagccgcccagggcaccgattattggggccagggaacacaagtgaccgtgtcctctacgcgtgaggacctgaagaacgtgttcccacctgaggtggccgtgttcgagcctagcgaggccgagatcagccacacccagaaagccaccctcgtgtgcctggctaccggcttctaccccgaccatgtggaactgtcttggtgggtcaacggcaaagaggtgcacagcggcgtgtgtaccgacccccagccactgaaagaacagcccgccctgaacgacagccggtactgcctgagcagcagactgagagtgtccgccaccttctggcagaacccccggaaccacttcagatgccaggtgcagttctacggcctgagcgagaacgacgagtggacccaggacagagccaagcccgtgacccagatcgtgtctgccgaagcctggggcagagccgattgcgacgtgaagctggtggaaaagagcttcgagacagacaccaacctgaacttccagaacctgagcgtgatcggcttcagaatcctgctgctgaaagtggccggctttaacctgctgatgaccctgcggctgtggtccagccgcgccaagagaagcggatctggcgtgaagcagaccctgaatttcgacctgctgaagctggctggcgacgtggaatccaacccaggcccttctagaggccatatgaccgagtacaagcccacggtgcgcctcgccacccgcgacgacgtccccagggccgtacgcaccctcgccgccgcgttcgccgactaccccgccacgcgccacaccgtcgatccggaccgccacatcgagcgggtcaccgagctgcaagaactcttcctcacgcgcgtcgggctcgacatcggcaaggtgtgggtcgcggacgacggcgccgcggtggcggtctggaccacgccggagagcgtcgaagcgggggcggtgttcgccgagatcggcccgcgcatggccgagttgagcggttcccggctggccgcgcagcaacagatggaaggcctcctggcgccgcaccggcccaaggagcccgcgtggttcctggccaccgtcggcgtctcgcccgaccaccagggcaagggtctgggcagcgccgtcgtgctccccggagtggaggcggccgagcgcgccggggtgcccgccttcctggagacctccgcgccccgcaacctccccttctacgagcggctcggcttcaccgtcaccgccgacgtcgaggtgcccgaaggaccgcgcacctggtgcatgacccgcaagcccggtgcctga

SEQ ID NO: 8133 - DNA, 2228 bp, synthetic construct; identical to SEQ ID NO: 8132
  source 1..2228: mol_type = other DNA

SEQ ID NO: 8134 - DNA, 3023 bp, synthetic construct
  source 1..3023: mol_type = other DNA
atggccttaccagtgaccgccttgctcctgccgctggccttgctgctccacgccgccaggccgctcgagatccagaaccctgatcctgccgtgtaccagctgcgggatagcaagagcagcgacaagagcgtgtgtctgttcaccgacttcgacagccagaccaacgtgtcccagagcaaggactccgacgtgtacatcaccgataagtgcgtgctggacatcaacaagtccgattgcggagcatggacttcaagagcaactccgccgtggcctggtccaacaagtccgatttcgcctgcgccaacgccttcaacaacagcattatccccgaggacacattcttcccaagccccgagagcagctgcggctttaccagcgagagctaccagcagaacctgagcgtgatcggcttcagaatcctgctgctgaaagtggccggctttaacctgctgatgaccctgcggctgtggtccagcagggccaagcgatctggatctggagcaacaaacttctcactactcaaacaagcaggtgacgtggaggagaatcccgggcctactagcatggccttaccagtgaccgccttgctcctgccgctggccttgctgctccacgccgccaggccgcaggtccagctcgtcgagtccggcggcggcctcgtccaggccggcgactccgtcaccctctcctgcaccgcctccggccgcaccttctcctcctacgccctcgcctggttccgccagcgccccggcaaggagcgcgagttcgtcgccggcctccgctggggcggccccaccaactacgccgactccgtcaaggaccgcttcaccatctccggcgactccgccaagcacaccatgtacctccagatgaactccctcaagcccgaggacaccgccgtctactactgcggctacaaccccggcggctgggccgtcccctcccagtacgagtacgactcctggggccagggcacccaggtcaccgtctcctccggtaccggcggaggcggatctggcggcggaggtagcggtggcggaggatctgaattcgacatccagatgacacagagccctagcagcctgtctgccagcgtgggagacagagtgaccatcacatgcaaggccagcgaccacatcaacaactggctggcctggtatcagcagaagcctggacaggcccctaagctgctgatctacggcgctaccacactggaaacaggcgtgcccagcagattttctggcagcggctctggcaccgactacaccctgacaatatccagcctccagcctgaggacttcgccacctactactgtcagcagagctggaacaccccttggacattcggccagggcaccaagctggaaatcaagagaggcggaggcggaagtggaggcggaggatctggcggcggaggctctcaagttcagcttcaacagcctggcgctgagctggtcaaacctggcgcttctgtgaagatgagctgcaaagccagcggctacgccttcagcagctactggatcaactggatgaagcagaaacccggccagggactcgaatggatcggccaaatctatcccggcgacggcgacaccaactacaacggcaagttcaagggcagagccacactgaccgccgatacctctagcagcacagcctacatgcagctgagcagcctgaccagcgaagatagcgccgtgtacttctgtgcccggtccatcacaacagtcgtgggctgcgctatggactattggggccagggaacaagcgtgaccgtgtctagtacgcgtgaggacctgaagaacgtgttcccacctgaggtggccgtgttcgagcctagcgaggccgagatcagccacacccagaaagccaccctcgtgtgcctggctaccggcttctaccccgaccatgtggaactgtcttggtgggtcaacggcaaagaggtgcacagcggcgtgtgtaccgacccccagccactgaaagaacagcccgccctgaacgacagccggtactgcctgagcagcagactgagagtgtccgccaccttctggcagaacccccggaaccacttcagatgccaggtgcagttctacggcctgagcgagaacgacgagtggacccaggacagagccaagcccgtgacccagatcgtgtctgccgaagcctggggcagagccgattgcgacgtgaagctggtggaaaagagcttcgagacagacaccaacctgaacttccagaacctgagcgtgatcggcttcagaatcctgctgctgaaagtggccggctttaacctgctgatgaccctgcggctgtggtccagccgcgccaagagaagcggatctggcgtgaagcagaccctgaatttcgacctgctgaagctggctggcgacgtggaatccaacccaggcccttctagaggccatatgaccgagtacaagcccacggtgcgcctcgccacccgcgacgacgtccccagggccgtacgcaccctcgccgccgcgttcgccgactaccccgccacgcgccacaccgtcgatccggaccgccacatcgagcgggtcaccgagctgcaagaactcttcctcacgcgcgtcgggctcgacatcggcaaggtgtgggtcgcggacgacggcgccgcggtggcggtctggaccacgccggagagcgtcgaagcgggggcggtgttcgccgagatcggcccgcgcatggccgagttgagcggttcccggctggccgcgcagcaacagatggaaggcctcctggcgccgcaccggcccaaggagcccgcgtggttcctggccaccgtcggcgtctcgcccgaccaccagggcaagggtctgggcagcgccgtcgtgctccccggagtggaggcggccgagcgcgccggggtgcccgccttcctggagacctccgcgccccgcaacctccccttctacgagcggctcggcttcaccgtcaccgccgacgtcgaggtgcccgaaggaccgcgcacctggtgcatgacccgcaagcccggtgcctga

SEQ ID NO: 8135 - DNA, 3410 bp, synthetic construct
  source 1..3410: mol_type = other DNA
atggccttaccagtgaccgccttgctcctgccgctggccttgctgctccacgccgccaggccgctcgagatccagaaccctgatcctgccgtgtaccagctgcgggatagcaagagcagcgacaagagcgtgtgtctgttcaccgacttcgacagccagaccaacgtgtcccagagcaaggactccgacgtgtacatcaccgataagtgcgtgctggacatcaacaagtccgattgcggagcatggacttcaagagcaactccgccgtggcctggtccaacaagtccgatttcgcctgcgccaacgccttcaacaacagcattatccccgaggacacattcttcccaagccccgagagcagctgcggctttaccagcgagagctaccagcagaacctgagcgtgatcggcttcagaatcctgctgctgaaagtggccggctttaacctgctgatgaccctgcggctgtggtccagcagggccaagcgatctggatctggagcaacaaacttctcactactcaaacaagcaggtgacgtggaggagaatcccgggcctactagcatggccttaccagtgaccgccttgctcctgccgctggccttgctgctccacgccgccaggccggaggttcagctgcttgagtctggcggaggactggttcaacctggcggaagcctgagactgtcttgtgccgccagcggcttcacctttagcagctacgccatgagctgggtccgacaggctcctggcaaaggactggaatgggtgtccagcatcagcggcagcggcgactacatctactacgccgatagcgtgaagggcagattcaccatcagccgggacatcagcaagaacaccctgtacctccagatgaacagcctgagagccgaggacaccgccgtgtactactgtgccaaagaaggcaccggcgctaacagcagcctggccgattatagaggccagggcacactggtcaccgtgtctagtggcggaggaagcggcggaggatctcaggtccagctcgtcgagtccggcggcggcctcgtccaggccggcgactccgtcaccctctcctgcaccgcctccggccgcaccttctcctcctacgccctcgcctggttccgccagcgccccggcaaggagcgcgagttcgtcgccggcctccgctggggcggccccaccaactacgccgactccgtcaaggaccgcttcaccatctccggcgactccgccaagcacaccatgtacctccagatgaactccctcaagcccgaggacaccgccgtctactactgcggctacaaccccggcggctgggccgtcccctcccagtacgagtacgactcctggggccagggcacccaggtcaccgtctcctccggtaccggcggaggcggatctggcggcggaggtagcggtggcggaggatctgaattcgacatccagatgacacagagccctagcagcctgtctgccagcgtgggagacagagtgaccatcacatgcaaggccagcgaccacatcaacaactggctggcctggtatcagcagaagcctggacaggcccctaagctgctgatctacggcgctaccacactggaaacaggcgtgcccagcagattttctggcagcggctctggcaccgactacaccctgacaatatccagcctccagcctgaggacttcgccacctactactgtcagcagagctggaacaccccttggacattcggccagggcaccaagctggaaatcaagagaggcggaggcggaagtggaggcggaggatctggcggcggaggctctcaagttcagcttcaacagcctggcgctgagctggtcaaacctggcgcttctgtgaagatgagctgcaaagccagcggctacgccttcagcagctactggatcaactggatgaagcagaaacccggccagggactcgaatggatcggccaaatctatcccggcgacggcgacaccaactacaacggcaagttcaagggcagagccacactgaccgccgatacctctagcagcacagcctacatgcagctgagcagcctgaccagcgaagatagcgccgtgtacttctgtgcccggtccatcacaacagtcgtgggctgcgctatggactattggggccagggaacaagcgtgaccgtgtctagtacgcgtgaggacctgaagaacgtgttcccacctgaggtggccgtgttcgagcctagcgaggccgagatcagccacacccagaaagccaccctcgtgtgcctggctaccggcttctaccccgaccatgtggaactgtcttggtgggtcaacggcaaagaggtgcacagcggcgtgtgtaccgacccccagccactgaaagaacagcccgccctgaacgacagccggtactgcctgagcagcagactgagagtgtccgccaccttctggcagaacccccggaaccacttcagatgccaggtgcagttctacggcctgagcgagaacgacgagtggacccaggacagagccaagcccgtgacccagatcgtgtctgccgaagcctggggcagagccgattgcgacgtgaagctggtggaaaagagcttcgagacagacaccaacctgaacttccagaacctgagcgtgatcggcttcagaatcctgctgctgaaagtggccggctttaacctgctgatgaccctgcggctgtggtccagccgcgccaagagaagcggatctggcgtgaagcagaccctgaatttcgacctgctgaagctggctggcgacgtggaatccaacccaggcccttctagaggccatatgaccgagtacaagcccacggtgcgcctcgccacccgcgacgacgtccccagggccgtacgcaccctcgccgccgcgttcgccgactaccccgccacgcgccacaccgtcgatccggaccgccacatcgagcgggtcaccgagctgcaagaactcttcctcacgcgcgtcgggctcgacatcggcaaggtgtgggtcgcggacgacggcgccgcggtggcggtctggaccacgccggagagcgtcgaagcgggggcggtgttcgccgagatcggcccgcgcatggccgagttgagcggttcccggctggccgcgcagcaacagatggaaggcctcctggcgccgcaccggcccaaggagcccgcgtggttcctggccaccgtcggcgtctcgcccgaccaccagggcaagggtctgggcagcgccgtcgtgctccccggagtggaggcggccgagcgcgccggggtgcccgccttcctggagacctccgcgccccgcaacctccccttctacgagcggctcggcttcaccgtcaccgccgacgtcgaggtgcccgaaggaccgcgcacctggtgcatgacccgcaagcccggtgcctga

SEQ ID NO: 8136 - DNA, 3410 bp, synthetic construct; identical to SEQ ID NO: 8135
  source 1..3410: mol_type = other DNA

SEQ ID NO: 8137 - DNA, 2246 bp, synthetic construct
  source 1..2246: mol_type = other DNA
atggccttaccagtgaccgccttgctcctgccgctggccttgctgctccacgccgccaggccgctcgagatccagaaccctgatcctgccgtgtaccagctgcgggatagcaagagcagcgacaagagcgtgtgtctgttcaccgacttcgacagccagaccaacgtgtcccagagcaaggactccgacgtgtacatcaccgataagtgcgtgctggacatcaacaagtccgattgcggagcatggacttcaagagcaactccgccgtggcctggtccaacaagtccgatttcgcctgcgccaacgccttcaacaacagcattatccccgaggacacattcttcccaagccccgagagcagctgcggctttaccagcgagagctaccagcagaacctgagcgtgatcggcttcagaatcctgctgctgaaagtggccggctttaacctgctgatgaccctgcggctgtggtccagcagggccaagcgatctggatctggagcaacaaacttctcactactcaaacaagcaggtgacgtggaggagaatcccgggcctactagcatggccctgcccgtgacagccctgctgctgcctctggctctgctgctgcacgccgccagacccgatgaattcggctctgacctgggcatcaagctgctgttcgccgctgccaagggccaggacgacgaagtgcggattctgctggctgctggggccgacgtgaacgccaaggatttcgagggctacacccccctgcacgtggccgcctatgatggacacctggaaatcgtggaagtgctgctgaaggctggcgctgatgtgaatgccaaagacagccagggccggacccctctgcatgaagccgcctacagcggccatctggaaattgtggaagtgctgctgaaagccggggcagacgtgaacgctcaggacgacgctggcgagacaccagccgatctggctgcagcttggggccacgaagatatcgccgaggtgctgcagaagacgcgtgaggacctgaagaacgtgttcccacctgaggtggccgtgttcgagcctagcgaggccgagatcagccacacccagaaagccaccctcgtgtgcctggctaccggcttctaccccgaccatgtggaactgtcttggtgggtcaacggcaaagaggtgcacagcggcgtgtgtaccgacccccagccactgaaagaacagcccgccctgaacgacagccggtactgcctgagcagcagactgagagtgtccgccaccttctggcagaacccccggaaccacttcagatgccaggtgcagttctacggcctgagcgagaacgacgagtggacccaggacagagccaagcccgtgacccagatcgtgtctgccgaagcctggggcagagccgattgcgacgtgaagctggtggaaaagagcttcgagacagacaccaacctgaacttccagaacctgagcgtgatcggcttcagaatcctgctgctgaaagtggccggctttaacctgctgatgaccctgcggctgtggtccagccgcgccaagagaagcggatctggcgtgaagcagaccctgaatttcgacctgctgaagctggctggcgacgtggaatccaacccaggcccttctagaggccatatgaccgagtacaagcccacggtgcgcctcgccacccgcgacgacgtccccagggccgtacgcaccctcgccgccgcgttcgccgactaccccgccacgcgccacaccgtcgatccggaccgccacatcgagcgggtcaccgagctgcaagaactcttcctcacgcgcgtcgggctcgacatcggcaaggtgtgggtcgcggacgacggcgccgcggtggcggtctggaccacgccggagagcgtcgaagcgggggcggtgttcgccgagatcggcccgcgcatggccgagttgagcggttcccggctggccgcgcagcaacagatggaaggcctcctggcgccgcaccggcccaaggagcccgcgtggttcctggccaccgtcggcgtctcgcccgaccaccagggcaagggtctgggcagcgccgtcgtgctccccggagtggaggcggccgagcgcgccggggtgcccgccttcctggagacctccgcgccccgcaacctccccttctacgagcggctcggcttcaccgtcaccgccgacgtcgaggtgcccgaaggaccgcgcacctggtgcatgacccgcaagcccggtgcctga

SEQ ID NO: 8138 - DNA, 2033 bp, synthetic construct
  source 1..2033: mol_type = other DNA
atggccttaccagtgaccgccttgctcctgccgctggccttgctgctccacgccgccaggccgctcgagatccagaaccctgatcctgccgtgtaccagctgcgggatagcaagagcagcgacaagagcgtgtgtctgttcaccgacttcgacagccagaccaacgtgtcccagagcaaggactccgacgtgtacatcaccgataagtgcgtgctggacatcaacaagtccgattgcggagcatggacttcaagagcaactccgccgtggcctggtccaacaagtccgatttcgcctgcgccaacgccttcaacaacagcattatccccgaggacacattcttcccaagccccgagagcagctgcggctttaccagcgagagctaccagcagaacctgagcgtgatcggcttcagaatcctgctgctgaaagtggccggctttaacctgctgatgaccctgcggctgtggtccagcagggccaagcgatctggatctggagcaacaaacttctcactactcaaacaagcaggtgacgtggaggagaatcccgggcctactagcatggactggatttggcgcatccttttccttgtcggcgctgctaccggcgcccattccttcgaaggcagcggattcgaatacgccaaagagatgcggaacgcctactgggagatcgccctgctgcccaatctgaccaaccagcagaagagagcccccatcagaaagctgtacgacgacccctcccagagcagcgagctgctgtctgaggctaaaaaactgaacgatagccagacgcgtgaggacctgaagaacgtgttcccacctgaggtggccgtgttcgagcctagcgaggccgagatcagccacacccagaaagccaccctcgtgtgcctggctaccggcttctaccccgaccatgtggaactgtcttggtgggtcaacggcaaagaggtgcacagcggcgtgtgtaccgacccccagccactgaaagaacagcccgccctgaacgacagccggtactgcctgagcagcagactgagagtgtccgccaccttctggcagaacccccggaaccacttcagatgccaggtgcagttctacggcctgagcgagaacgacgagtggacccaggacagagccaagcccgtgacccagatcgtgtctgccgaagcctggggcagagccgattgcgacgtgaagctggtggaaaagagcttcgagacagacaccaacctgaacttccagaacctgagcgtgatcggcttcagaatcctgctgctgaaagtggccggctttaacctgctgatgaccctgcggctgtggtccagccgcgccaagagaagcggatctggcgtgaagcagaccctgaatttcgacctgctgaagctggctggcgacgtggaatccaacccaggcccttctagaggccatatgaccgagtacaagcccacggtgcgcctcgccacccgcgacgacgtccccagggccgtacgcaccctcgccgccgcgttcgccgactaccccgccacgcgccacaccgtcgatccggaccgccacatcgagcgggtcaccgagctgcaagaactcttcctcacgcgcgtcgggctcgacatcggcaaggtgtgggtcgcggacgacggcgccgcggtggcggtctggaccacgccggagagcgtcgaagcgggggcggtgttcgccgagatcggcccgcgcatggccgagttgagcggttcccggctggccgcgcagcaacagatggaaggcctcctggcgccgcaccggcccaaggagcccgcgtggttcctggccaccgtcggcgtctcgcccgaccaccagggcaagggtctgggcagcgccgtcgtgctccccggagtggaggcggccgagcgcgccggggtgcccgccttcctggagacctccgcgccccgcaacctccccttctacgagcggctcggcttcaccgtcaccgccgacgtcgaggtgcccgaaggaccgcgcacctggtgcatgacccgcaagcccggtgcctga

SEQ ID NO: 8139 - DNA, 2699 bp, synthetic construct
  source 1..2699: mol_type = other DNA
atggccttaccagtgaccgccttgctcctgccgctggccttgctgctccacgccgccaggccgctcgagatccagaaccctgatcctgccgtgtaccagctgcgggatagcaagagcagcgacaagagcgtgtgtctgttcaccgacttcgacagccagaccaacgtgtcccagagcaaggactccgacgtgtacatcaccgataagtgcgtgctggacatcaacaagtccgattgcggagcatggacttcaagagcaactccgccgtggcctggtccaacaagtccgatttcgcctgcgccaacgccttcaacaacagcattatccccgaggacacattcttcccaagccccgagagcagctgcggctttaccagcgagagctaccagcagaacctgagcgtgatcggcttcagaatcctgctgctgaaagtggccggctttaacctgctgatgaccctgcggctgtggtccagcagggccaagcgatctggatctggagcaacaaacttctcactactcaaacaagcaggtgacgtggaggagaatcccgggcctactagcatggccctgcccgtgacagccctgctgctgcctctggctctgctgctgcacgccgccagacccgatgaattcgaggtgcaactggtggaaagcggcggaggcctggtgcaggctggcggatctctgagactgagctgtgccgccagcggcatcaccttcagcatcaacacaatgggctggtacagacaggcccctggcaagcagagggaactggtggccctgatctccagcatcggcgacacctactacgccgacagcgtgaagggccggttcaccatcagccgggacaacgccaagaacaccgtgtacctccagatgaacagcctgaagcccgaggacaccgccgtgtactactgcaagcggttcagaacagccgcccagggcaccgattattggggccagggaacacaagtgaccgtgtcctctctcgagggaggaggcggctccgggggaggcggaagtggaggcggaggatctgggtctggaggaagcggatctggaggctcagggtcagggggctcaggcagtggaggctctttcgaagtgcaactggtggaatctgggggcggactggtgcagccaggcggaagtctgaggctgtcttgtgccgcctccggcagcatcttcggcttcaacgacatggcctggtatcggcaggctcccggaaaacagcgcgagctggtggctctgattagcagagtgggcgtgaccagcagcgccgactctgtgaagggcagattcacaatctccagagtgaacgccaaggatacagtgtacctccagatgaactctctgaaacctgaggatacagcagtgtactattgctacatggaccagcggctggacggcagcacactggcctactggggacagggaactcaagtgacagtgtctagcacgcgtgaggacctgaagaacgtgttcccacctgaggtggccgtgttcgagcctagcgaggccgagatcagccacacccagaaagccaccctcgtgtgcctggctaccggcttctaccccgaccatgtggaactgtcttggtgggtcaacggcaaagaggtgcacagcggcgtgtgtaccgacccccagccactgaaagaacagcccgccctgaacgacagccggtactgcctgagcagcagactgagagtgtccgccaccttctggcagaacccccggaaccacttcagatgccaggtgcagttctacggcctgagcgagaacgacgagtggacccaggacagagccaagcccgtgacccagatcgtgtctgccgaagcctggggcagagccgattgcgacgtgaagctggtggaaaagagcttcgagacagacaccaacctgaacttccagaacctgagcgtgatcggcttcagaatcctgctgctgaaagtggccggctttaacctgctgatgaccctgcggctgtggtccagccgcgccaagagaagcggatctggcgtgaagcagaccctgaatttcgacctgctgaagctggctggcgacgtggaatccaacccaggcccttctagaggccatatgaccgagtacaagcccacggtgcgcctcgccacccgcgacgacgtccccagggccgtacgcaccctcgccgccgcgttcgccgactaccccgccacgcgccacaccgtcgatccggaccgccacatcgagcgggtcaccgagctgcaagaactcttcctcacgcgcgtcgggctcgacatcggcaaggtgtgggtcgcggacgacggcgccgcggtggcggtctggaccacgccggagagcgtcgaagcgggggcggtgttcgccgagatcggcccgcgcatggccgagttgagcggttcccggctggccgcgcagcaacagatggaaggcctcctggcgccgcaccggcccaaggagcccgcgtggttcctggccaccgtcggcgtctcgcccgaccaccagggcaagggtctgggcagcgccgtcgtgctccccggagtggaggcggccgagcgcgccggggtgcccgccttcctggagacctccgcgccccgcaacctccccttctacgagcggctcggcttcaccgtcaccgccgacgtcgaggtgcccgaaggaccgcgcacctggtgcatgacccgcaagcccggtgcctga

SEQ ID NO: 8140 - DNA, 2441 bp, synthetic construct
  source 1..2441: mol_type = other DNA
atggccttaccagtgaccgccttgctcctgccgctggccttgctgctccacgccgccaggccgctcgagatccagaaccctgatcctgccgtgtaccagctgcgggatagcaagagcagcgacaagagcgtgtgtctgttcaccgacttcgacagccagaccaacgtgtcccagagcaaggactccgacgtgtacatcaccgataagtgcgtgctggacatcaacaagtccgattgcggagcatggacttcaagagcaactccgccgtggcctggtccaacaagtccgatttcgcctgcgccaacgccttcaacaacagcattatccccgaggacacattcttcccaagccccgagagcagctgcggctttaccagcgagagctaccagcagaacctgagcgtgatcggcttcagaatcctgctgctgaaagtggccggctttaacctgctgatgaccctgcggctgtggtccagcagggccaagcgatctggatctggagcaacaaacttctcactactcaaacaagcaggtgacgtggaggagaatcccgggcctactagcatggcccttccagtcactgccttgctgttgcctctggcgctcctgctccacgccgctagaccgggcatgagaaccgaggacctgcctaaggccgtggtgttcctggaaccccagtggtacagagtgctggaaaaggacagcgtgaccctgaagtgccagggcgcctacagccccgaggacaatagcacccagtggttccacaacgagagcctgatctccagccaggccagcagctacttcatcgacgccgccaccgtggacgacagcggcgagtatagatgccagaccaacctgagcaccctgagcgaccccgtgcagctggaagtgcacatcggatggctgctgctgcaggcccccagatgggtgttcaaagaagaggaccccatccacctgagatgccactcttggaagaacaccgccctgcacaaagtgacctacctgcagaacggcaagggcagaaagtacttccaccacaacagcgacttctacatccccaaggccaccctgaaggactccggctcctacttctgcagaggcctcgtgggcagcaagaacgtgtccagcgagacagtgaacatcaccatcacccagggcctggccgtgtctaccatcagcagctttttcccacccggctaccagacgcgtgaggacctgaagaacgtgttcccacctgaggtggccgtgttcgagcctagcgaggccgagatcagccacacccagaaagccaccctcgtgtgcctggctaccggcttctaccccgaccatgtggaactgtcttggtgggtcaacggcaaagaggtgcacagcggcgtgtgtaccgacccccagccactgaaagaacagcccgccctgaacgacagccggtactgcctgagcagcagactgagagtgtccgccaccttctggcagaacccccggaaccacttcagatgccaggtgcagttctacggcctgagcgagaacgacgagtggacccaggacagagccaagcccgtgacccagatcgtgtctgccgaagcctggggcagagccgattgcgacgtgaagctggtggaaaagagcttcgagacagacaccaacctgaacttccagaacctgagcgtgatcggcttcagaatcctgctgctgaaagtggccggctttaacctgctgatgaccctgcggctgtggtccagccgcgccaagagaagcggatctggcgtgaagcagaccctgaatttcgacctgctgaagctggctggcgacgtggaatccaacccaggcccttctagaggccatatgaccgagtacaagcccacggtgcgcctcgccacccgcgacgacgtccccagggccgtacgcaccctcgccgccgcgttcgccgactaccccgccacgcgccacaccgtcgatccggaccgccacatcgagcgggtcaccgagctgcaagaactcttcctcacgcgcgtcgggctcgacatcggcaaggtgtgggtcgcggacgacggcgccgcggtggcggtctggaccacgccggagagcgtcgaagcgggggcggtgttcgccgagatcggcccgcgcatggccgagttgagcggttcccggctggccgcgcagcaacagatggaaggcctcctggcgccgcaccggcccaaggagcccgcgtggttcctggccaccgtcggcgtctcgcccgaccaccagggcaagggtctgggcagcgccgtcgtgctccccggagtggaggcggccgagcgcgccggggtgcccgccttcctggagacctccgcgccccgcaacctccccttctacgagcggctcggcttcaccgtcaccgccgacgtcgaggtgcccgaaggaccgcgcacctggtgcatgacccgcaagcccggtgcctga

SEQ ID NO: 8141 - DNA, 2447 bp, synthetic construct
  source 1..2447: mol_type = other DNA
atggccttaccagtgaccgccttgctcctgccgctggccttgctgctccacgccgccaggccgctcgagatccagaaccctgatcctgccgtgtaccagctgcgggatagcaagagcagcgacaagagcgtgtgtctgttcaccgacttcgacagccagaccaacgtgtcccagagcaaggactccgacgtgtacatcaccgataagtgcgtgctggacatcaacaagtccgattgcggagcatggacttcaagagcaactccgccgtggcctggtccaacaagtccgatttcgcctgcgccaacgccttcaacaacagcattatccccgaggacacattcttcccaagccccgagagcagctgcggctttaccagcgagagctaccagcagaacctgagcgtgatcggcttcagaatcctgctgctgaaagtggccggctttaacctgctgatgaccctgcggctgtggtccagcagggccaagcgatctggatctggagcaacaaacttctcactactcaaacaagcaggtgacgtggaggagaatcccgggcctactagcgccaccatggccttaccagtgaccgccttgctcctgccgctggccttgctgctccacgccgccaggccgggcatgcggactgaagacctcccaaaggctgtggtgttcctggagcctcaatggtacagggtgctggagaaggacagtgtgactctgaagtgccagggagcctactcccctgaggacaattccacacagtggtttcacaatgagagcctcatctcaagccaggcctccagctacttcattgacgctgccacagtggacgacagtggagagtacaggtgccagacaaacctctccaccctcagtgacccggtgcagctagaagtccatatcggctggctgttgctccaggcccctcggtgggtgttcaaggaggaagaccctattcacctgaggtgtcacagctggaagaacactgctctgcataaggtcacatatttacagaatggcaaaggcaggaagtattttcatcataattctgacttctacattccaaaagccacactcaaagacagcggctcctacttctgcagggggcttgttgggagtaaaaatgtgtcttcagagactgtgaacatcaccatcactcaaggtttggcagtgtcaaccatctcatcattctttccacctggctaccaaacgcgtgaggacctgaagaacgtgttcccacctgaggtggccgtgttcgagcctagcgaggccgagatcagccacacccagaaagccaccctcgtgtgcctggctaccggcttctaccccgaccatgtggaactgtcttggtgggtcaacggcaaagaggtgcacagcggcgtgtgtaccgacccccagccactgaaagaacagcccgccctgaacgacagccggtactgcctgagcagcagactgagagtgtccgccaccttctggcagaacccccggaaccacttcagatgccaggtgcagttctacggcctgagcgagaacgacgagtggacccaggacagagccaagcccgtgacccagatcgtgtctgccgaagcctggggcagagccgattgcgacgtgaagctggtggaaaagagcttcgagacagacaccaacctgaacttccagaacctgagcgtgatcggcttcagaatcctgctgctgaaagtggccggctttaacctgctgatgaccctgcggctgtggtccagccgcgccaagagaagcggatctggcgtgaagcagaccctgaatttcgacctgctgaagctggctggcgacgtggaatccaacccaggcccttctagaggccatatgaccgagtacaagcccacggtgcgcctcgccacccgcgacgacgtccccagggccgtacgcaccctcgccgccgcgttcgccgactaccccgccacgcgccacaccgtcgatccggaccgccacatcgagcgggtcaccgagctgcaagaactcttcctcacgcgcgtcgggctcgacatcggcaaggtgtgggtcgcggacgacggcgccgcggtggcggtctggaccacgccggagagcgtcgaagcgggggcggtgttcgccgagatcggcccgcgcatggccgagttgagcggttcccggctggccgcgcagcaacagatggaaggcctcctggcgccgcaccggcccaaggagcccgcgtggttcctggccaccgtcggcgtctcgcccgaccaccagggcaagggtctgggcagcgccgtcgtgctccccggagtggaggcggccgagcgcgccggggtgcccgccttcctggagacctccgcgccccgcaacctccccttctacgagcggctcggcttcaccgtcaccgccgacgtcgaggtgcccgaaggaccgcgcacctggtgcatgacccgcaagcccggtgcctga

SEQ ID NO: 8142 - DNA, 2598 bp, synthetic construct
  source 1..2598: mol_type = other DNA
atggccttaccagtgaccgccttgctcctgccgctggccttgctgctccacgccgccaggccgctcgaggaggacctgaagaacgtgttcccacctgaggtggccgtgttcgagcctagcgaggccgagatcagccacacccagaaagccaccctcgtgtgcctggctaccggcttctaccccgaccatgtggaactgtcttggtgggtcaacggcaaagaggtgcacagcggcgtgtgtaccgacccccagccactgaaagaacagcccgccctgaacgacagccggtactgcctgagcagcagactgagagtgtccgccaccttctggcagaacccccggaaccacttcagatgccaggtgcagttctacggcctgagcgagaacgacgagtggacccaggacagagccaagcccgtgacccagatcgtgtctgccgaagcctggggcagagccgattgcggctttaccagcgagagctaccagcagggcgtgctgagcgccaccaacctgagcgtgatcggcttcagaatcctgctgctgaaagtggccggctttaacctgctgatgaccctgcggctgtggtccagcagggccaagcgatctggatctggagcaacaaacttctcactactcaaacaagcaggtgacgtggaggagaatcccgggcctactagcatggccttaccagtgaccgccttgctcctgccgctggccttgctgctccacgccgccaggccggacatccagatgacacagactacatcctccctgtctgcctctctgggagacagagtcaccatcagttgcagggcaagtcaggacattagtaaatatttaaattggtatcagcagaaaccagatggaactgttaaactcctgatctaccatacatcaagattacactcaggagtcccatcaaggttcagtggcagtgggtctggaacagattattctctcaccattagcaacctggagcaagaagatattgccacttacttttgccaacagggtaatacgcttccgtacacgttcggaggggggaccaagctggagatcacaggtggcggtggctcgggcggtggtgggtcgggtggcggcggatctgaggtgaaactgcaggagtcaggacctggcctggtggcgccctcacagagcctgtccgtcacatgcactgtctcaggggtctcattacccgactatggtgtaagctggattcgccagcctccacgaaagggtctggagtggctgggagtaatatggggtagtgaaaccacatactataattcagctctcaaatccagactgaccatcatcaaggacaactccaagagccaagttttcttaaaaatgaacagtctgcaaactgatgacacagccatttactactgtgccaaacattattactacggtggtagctatgctatggactactggggtcaaggaacctcagtcaccgtctcctcaacgcgtatccagaaccctgatcctgccgtgtaccagctgcgggatagcaagagcagcgacaagagcgtgtgtctgttcaccgacttcgacagccagaccaacgtgtcccagagcaaggactccgacgtgtacatcaccgataagtgcgtgctggacatgcggagcatggacttcaagagcaactccgccgtggcctggtccaacaagtccgatttcgcctgcgccaacgccttcaacaacagcattatccccgaggacacattcttcccaagccccgagagcagctgcgacgtgaagctggtggaaaagagcttcgagacagacaccaacctgaacttccagatcctgtacgaggtgatcggcttcagaatcctgctgctgaaagtggccggctttaacctgctgatgaccctgcggctgtggtccagccgcgccaagagaagcggatctggcgtgaagcagaccctgaatttcgacctgctgaagctggctggcgacgtggaatccaacccaggcccttctagaggccatatgaccgagtacaagcccacggtgcgcctcgccacccgcgacgacgtccccagggccgtacgcaccctcgccgccgcgttcgccgactaccccgccacgcgccacaccgtcgatccggaccgccacatcgagcgggtcaccgagctgcaagaactcttcctcacgcgcgtcgggctcgacatcggcaaggtgtgggtcgcggacgacggcgccgcggtggcggtctggaccacgccggagagcgtcgaagcgggggcggtgttcgccgagatcggcccgcgcatggccgagttgagcggttcccggctggccgcgcagcaacagatggaaggcctcctggcgccgcaccggcccaaggagcccgcgtggttcctggccaccgtcggcgtctcgcccgaccaccagggcaagggtctgggcagcgccgtcgtgctccccggagtggaggcggccgagcgcgccggggtgcccgccttcctggagacctccgcgccccgcaacctccccttctacgagcggctcggcttcaccgtcaccgccgacgtcgaggtgcccgaaggaccgcgcacctggtgcatgacccgcaagcccggtgcctga

SEQ ID NO: 8143 - DNA, 2601 bp, synthetic construct
  source 1..2601: mol_type = other DNA
atggccttaccagtgaccgccttgctcctgccgctggccttgctgctccacgccgccaggccgctcgaggaggacctgaagaacgtgttcccacctgaggtggccgtgttcgagcctagcgaggccgagatcagccacacccagaaagccaccctcgtgtgcctggctaccggcttctaccccgaccatgtggaactgtcttggtgggtcaacggcaaagaggtgcacagcggcgtgtgtaccgacccccagccactgaaagaacagcccgccctgaacgacagccggtactgcctgagcagcagactgagagtgtccgccaccttctggcagaacccccggaaccacttcagatgccaggtgcagttctacggcctgagcgagaacgacgagtggacccaggacagagccaagcccgtgacccagatcgtgtctgccgaagcctggggcagagccgattgcggctttaccagcgagagctaccagcagggcgtgctgagcgccaccaacctgagcgtgatcggcttcagaatcctgctgctgaaagtggccggctttaacctgctgatgaccctgcggctgtggtccagcagggccaagcgatctggatctggagcaacaaacttctcactactcaaacaagcaggtgacgtggaggagaatcccgggcctactagcaccatggccttaccagtgaccgccttgctcctgccgctggccttgctgctccacgccgccaggccggagatcgtgatgacccagagccctgccaccctgtctctgagccctggcgaaagagccaccctgagctgtagagccagccaggacatcagcaagtacctgaactggtatcagcagaagcccggccaggcccccagactgctgatctaccacaccagcagactgcacagcggcatccccgccagattttctggctctggcagcggcaccgactacaccctgacaatcagcagcctccagcccgaggacttcgccgtgtacttctgtcagcaaggcaacaccctgccctacaccttcggccagggcaccaagctggaaatcaagggcggaggcggaagtggaggcggaggatctggcggcggaggctctcaggtgcaactccaggaatctggccctggcctcgtgaagcccagcgagacactgagcctgacctgtaccgtgtccggcgtgtccctgcctgactatggcgtgtcctggatcagacagccccctggcaagggcctggaatggatcggagtgatttggggcagcgaaaccacctactacaacagctccctgaagtccagagtgaccatctccaaggacaactccaagaaccaggtgtccctgaagctgagcagcgtgacagccgccgacaccgccgtgtattactgcgccaagcactactactacggcggcagctacgctatggactactggggccagggaaccctcgtgaccgtgtctagtacgcgtatccagaaccctgatcctgccgtgtaccagctgcgggatagcaagagcagcgacaagagcgtgtgtctgttcaccgacttcgacagccagaccaacgtgtcccagagcaaggactccgacgtgtacatcaccgataagtgcgtgctggacatgcggagcatggacttcaagagcaactccgccgtggcctggtccaacaagtccgatttcgcctgcgccaacgccttcaacaacagcattatccccgaggacacattcttcccaagccccgagagcagctgcgacgtgaagctggtggaaaagagcttcgagacagacaccaacctgaacttccagatcctgtacgaggtgatcggcttcagaatcctgctgctgaaagtggccggctttaacctgctgatgaccctgcggctgtggtccagccgcgccaagagaagcggatctggcgtgaagcagaccctgaatttcgacctgctgaagctggctggcgacgtggaatccaacccaggcccttctagaggccatatgaccgagtacaagcccacggtgcgcctcgccacccgcgacgacgtccccagggccgtacgcaccctcgccgccgcgttcgccgactaccccgccacgcgccacaccgtcgatccggaccgccacatcgagcgggtcaccgagctgcaagaactcttcctcacgcgcgtcgggctcgacatcggcaaggtgtgggtcgcggacgacggcgccgcggtggcggtctggaccacgccggagagcgtcgaagcgggggcggtgttcgccgagatcggcccgcgcatggccgagttgagcggttcccggctggccgcgcagcaacagatggaaggcctcctggcgccgcaccggcccaaggagcccgcgtggttcctggccaccgtcggcgtctcgcccgaccaccagggcaagggtctgggcagcgccgtcgtgctccccggagtggaggcggccgagcgcgccggggtgcccgccttcctggagacctccgcgccccgcaacctccccttctacgagcggctcggcttcaccgtcaccgccgacgtcgaggtgcccgaaggaccgcgcacctggtgcatgacccgcaagcccggtgcctga

SEQ ID NO: 8144 - DNA, 2604 bp, synthetic construct
  source 1..2604: mol_type = other DNA
atggccttaccagtgaccgccttgctcctgccgctggccttgctgctccacgccgccaggccgctcgaggaggacctgaagaacgtgttcccacctgaggtggccgtgttcgagcctagcgaggccgagatcagccacacccagaaagccaccctcgtgtgcctggctaccggcttctaccccgaccatgtggaactgtcttggtgggtcaacggcaaagaggtgcacagcggcgtgtgtaccgacccccagccactgaaagaacagcccgccctgaacgacagccggtactgcctgagcagcagactgagagtgtccgccaccttctggcagaacccccggaaccacttcagatgccaggtgcagttctacggcctgagcgagaacgacgagtggacccaggacagagccaagcccgtgacccagatcgtgtctgccgaagcctggggcagagccgattgcggctttaccagcgagagctaccagcagggcgtgctgagcgccaccaacctgagcgtgatcggcttcagaatcctgctgctgaaagtggccggctttaacctgctgatgaccctgcggctgtggtccagcagggccaagcgatctggatctggagcaacaaacttctcactactcaaacaagcaggtgacgtggaggagaatcccgggcctactagcaccatggccttaccagtgaccgccttgctcctgccgctggccttgctgctccacgccgccaggccggacgagatcgtgctgacacagagccccgccaccctgtcactgtctccaggcgaaagagccaccctgagctgtagcgccagcagcagcgtgtcctacatgcactggtatcagcagaagcccggccaggcccccagactgctgatctacgataccagcaagctggcctccggcatccccgccagattttctggcagcggctccggcaccgacttcaccctgacaatcagcagcctggaacccgaggacgtggccgtgtactactgttttcaaggcagcgtgtaccccttcaccttcggccagggcaccaagctggaaatcaagagaggtggcggtggctcgggcggtggtgggtcgggtggcggcggatctcaggtgcagctccaggaatctggccctggcctcgtgaagcctagccagaccctgagcctgacctgtaccgtgtctggcggcagcatcagcacaagcggcatgggcgtgggctggatcagacagcaccctggcaagggcctggaatggatcggccacatttggtgggacgacgacaagcggtacaaccccgccctgaagtccagagtgaccatcagcgtggacaccagcaagaaccagttcagcctgaagctgagcagcgtgacagccgccgataccgccgtgtattattgcgcccggatggaactgtggtcctactacttcgactactggggccagggaaccctcgtgaccgtgtctagtacgcgtatccagaaccctgatcctgccgtgtaccagctgcgggatagcaagagcagcgacaagagcgtgtgtctgttcaccgacttcgacagccagaccaacgtgtcccagagcaaggactccgacgtgtacatcaccgataagtgcgtgctggacatgcggagcatggacttcaagagcaactccgccgtggcctggtccaacaagtccgatttcgcctgcgccaacgccttcaacaacagcattatccccgaggacacattcttcccaagccccgagagcagctgcgacgtgaagctggtggaaaagagcttcgagacagacaccaacctgaacttccagatcctgtacgaggtgatcggcttcagaatcctgctgctgaaagtggccggctttaacctgctgatgaccctgcggctgtggtccagccgcgccaagagaagcggatctggcgtgaagcagaccctgaatttcgacctgctgaagctggctggcgacgtggaatccaacccaggcccttctagaggccatatgaccgagtacaagcccacggtgcgcctcgccacccgcgacgacgtccccagggccgtacgcaccctcgccgccgcgttcgccgactaccccgccacgcgccacaccgtcgatccggaccgccacatcgagcgggtcaccgagctgcaagaactcttcctcacgcgcgtcgggctcgacatcggcaaggtgtgggtcgcggacgacggcgccgcggtggcggtctggaccacgccggagagcgtcgaagcgggggcggtgttcgccgagatcggcccgcgcatggccgagttgagcggttcccggctggccgcgcagcaacagatggaaggcctcctggcgccgcaccggcccaaggagcccgcgtggttcctggccaccgtcggcgtctcgcccgaccaccagggcaagggtctgggcagcgccgtcgtgctccccggagtggaggcggccgagcgcgccggggtgcccgccttcctggagacctccgcgccccgcaacctccccttctacgagcggctcggcttcaccgtcaccgccgacgtcgaggtgcccgaaggaccgcgcacctggtgcatgacccgcaagcccggtgcctga

SEQ ID NO: 8145 - DNA, 2592 bp, synthetic construct
  source 1..2592: mol_type = other DNA
atggccttaccagtgaccgccttgctcctgccgctggccttgctgctccacgccgccaggccgctcgaggaggacctgaagaacgtgttcccacctgaggtggccgtgttcgagcctagcgaggccgagatcagccacacccagaaagccaccctcgtgtgcctggctaccggcttctaccccgaccatgtggaactgtcttggtgggtcaacggcaaagaggtgcacagcggcgtgtgtaccgacccccagccactgaaagaacagcccgccctgaacgacagccggtactgcctgagcagcagactgagagtgtccgccaccttctggcagaacccccggaaccacttcagatgccaggtgcagttctacggcctgagcgagaacgacgagtggacccaggacagagccaagcccgtgacccagatcgtgtctgccgaagcctggggcagagccgattgcggctttaccagcgagagctaccagcagggcgtgctgagcgccaccaacctgagcgtgatcggcttcagaatcctgctgctgaaagtggccggctttaacctgctgatgaccctgcggctgtggtccagcagggccaagcgatctggatctggagcaacaaacttctcactactcaaacaagcaggtgacgtggaggagaatcccgggcctactagcatggccttaccagtgaccgccttgctcctgccgctggccttgctgctccacgccgccaggccggacatccagatgacacagagccctagcagcctgtctgccagcgtgggagacagagtgaccatcacctgtagagccagccaggacatcagcaactacctgaactggtatcagcagaagcccggcaaggcccctaagctgctgatctactacaccagcagactgcacagcggcgtgcccagcagattttctggctctggcagcggcaccgacttcaccctgacaatatctagcctccagcctgaggacttcgccacctactattgccagcagggcaacaccctgccttacacatttggacagggcaccaaggtggaaatcaagagaggcggaggcggaagtggaggcggaggatctggcggcggaggctctgaagtgcagctggttgaatcaggtggcggcctggttcaacctggcggatctctgagactgagctgtgccgccagcggcttcaccttcagcgactactttatgagctgggtccgacaggcccctggcaaaggacttgaatgggtcgccaccatcagcaatggcggcacctacacttactaccccgacagcgtgaagggcagattcaccatctccagagacaacagcaagaacaccctgtacctccagatgaactccctgagagccgaggacaccgccgtgtactactgcgccagattcgacggctacatcttcgactattggggccagggcaccctggtcacagtctcttctacgcgtatccagaaccctgatcctgccgtgtaccagctgcgggatagcaagagcagcgacaagagcgtgtgtctgttcaccgacttcgacagccagaccaacgtgtcccagagcaaggactccgacgtgtacatcaccgataagtgcgtgctggacatgcggagcatggacttcaagagcaactccgccgtggcctggtccaacaagtccgatttcgcctgcgccaacgccttcaacaacagcattatccccgaggacacattcttcccaagccccgagagcagctgcgacgtgaagctggtggaaaagagcttcgagacagacaccaacctgaacttccagatcctgtacgaggtgatcggcttcagaatcctgctgctgaaagtggccggctttaacctgctgatgaccctgcggctgtggtccagccgcgccaagagaagcggatctggcgtgaagcagaccctgaatttcgacctgctgaagctggctggcgacgtggaatccaacccaggcccttctagaggccatatgaccgagtacaagcccacggtgcgcctcgccacccgcgacgacgtccccagggccgtacgcaccctcgccgccgcgttcgccgactaccccgccacgcgccacaccgtcgatccggaccgccacatcgagcgggtcaccgagctgcaagaactcttcctcacgcgcgtcgggctcgacatcggcaaggtgtgggtcgcggacgacggcgccgcggtggcggtctggaccacgccggagagcgtcgaagcgggggcggtgttcgccgagatcggcccgcgcatggccgagttgagcggttcccggctggccgcgcagcaacagatggaaggcctcctggcgccgcaccggcccaaggagcccgcgtggttcctggccaccgtcggcgtctcgcccgaccaccagggcaagggtctgggcagcgccgtcgtgctccccggagtggaggcggccgagcgcgccggggtgcccgccttcctggagacctccgcgccccgcaacctccccttctacgagcggctcggcttcaccgtcaccgccgacgtcgaggtgcccgaaggaccgcgcacctggtgcatgacccgcaagcccggtgcctga

SEQ ID NO: 8146 - DNA, 2604 bp, synthetic construct
  source 1..2604: mol_type = other DNA
atggccttaccagtgaccgccttgctcctgccgctggccttgctgctccacgccgccaggccgctcgaggaggacctgaagaacgtgttcccacctgaggtggccgtgttcgagcctagcgaggccgagatcagccacacccagaaagccaccctcgtgtgcctggctaccggcttctaccccgaccatgtggaactgtcttggtgggtcaacggcaaagaggtgcacagcggcgtgtgtaccgacccccagccactgaaagaacagcccgccctgaacgacagccggtactgcctgagcagcagactgagagtgtccgccaccttctggcagaacccccggaaccacttcagatgccaggtgcagttctacggcctgagcgagaacgacgagtggacccaggacagagccaagcccgtgacccagatcgtgtctgccgaagcctggggcagagccgattgcggctttaccagcgagagctaccagcagggcgtgctgagcgccaccaacctgagcgtgatcggcttcagaatcctgctgctgaaagtggccggctttaacctgctgatgaccctgcggctgtggtccagcagggccaagcgatctggatctggagcaacaaacttctcactactcaaacaagcaggtgacgtggaggagaatcccgggcctactagcatggccttaccagtgaccgccttgctcctgccgctggccttgctgctccacgccgccaggccggacatccagatgacacagagccctagcagcctgtctgccagcgtgggagacagagtgaccatcacatgcaaggccagcgaccacatcaacaactggctggcctggtatcagcagaagcctggacaggcccctaagctgctgatctacggcgctaccacactggaaacaggcgtgcccagcagattttctggcagcggctctggcaccgactacaccctgacaatatccagcctccagcctgaggacttcgccacctactactgtcagcagagctggaacaccccttggacattcggccagggcaccaagctggaaatcaagagaggcggaggcggaagtggaggcggaggatctggcggcggaggctctcaagttcagcttcaacagcctggcgctgagctggtcaaacctggcgcttctgtgaagatgagctgcaaagccagcggctacgccttcagcagctactggatcaactggatgaagcagaaacccggccagggactcgaatggatcggccaaatctatcccggcgacggcgacaccaactacaacggcaagttcaagggcagagccacactgaccgccgatacctctagcagcacagcctacatgcagctgagcagcctgaccagcgaagatagcgccgtgtacttctgtgcccggtccatcacaacagtcgtgggctgcgctatggactattggggccagggaacaagcgtgaccgtgtctagtacgcgtatccagaaccctgatcctgccgtgtaccagctgcgggatagcaagagcagcgacaagagcgtgtgtctgttcaccgacttcgacagccagaccaacgtgtcccagagcaaggactccgacgtgtacatcaccgataagtgcgtgctggacatgcggagcatggacttcaagagcaactccgccgtggcctggtccaacaagtccgatttcgcctgcgccaacgccttcaacaacagcattatccccgaggacacattcttcccaagccccgagagcagctgcgacgtgaagctggtggaaaagagcttcgagacagacaccaacctgaacttccagatcctgtacgaggtgatcggcttcagaatcctgctgctgaaagtggccggctttaacctgctgatgaccctgcggctgtggtccagccgcgccaagagaagcggatctggcgtgaagcagaccctgaatttcgacctgctgaagctggctggcgacgtggaatccaacccaggcccttctagaggccatatgaccgagtacaagcccacggtgcgcctcgccacccgcgacgacgtccccagggccgtacgcaccctcgccgccgcgttcgccgactaccccgccacgcgccacaccgtcgatccggaccgccacatcgagcgggtcaccgagctgcaagaactcttcctcacgcgcgtcgggctcgacatcggcaaggtgtgggtcgcggacgacggcgccgcggtggcggtctggaccacgccggagagcgtcgaagcgggggcggtgttcgccgagatcggcccgcgcatggccgagttgagcggttcccggctggccgcgcagcaacagatggaaggcctcctggcgccgcaccggcccaaggagcccgcgtggttcctggccaccgtcggcgtctcgcccgaccaccagggcaagggtctgggcagcgccgtcgtgctccccggagtggaggcggccgagcgcgccggggtgcccgccttcctggagacctccgcgccccgcaacctccccttctacgagcggctcggcttcaccgtcaccgccgacgtcgaggtgcccgaaggaccgcgcacctggtgcatgacccgcaagcccggtgcctga

SEQ ID NO: 8147 - DNA, 2610 bp, synthetic construct
  source 1..2610: mol_type = other DNA
atggccttaccagtgaccgccttgctcctgccgctggccttgctgctccacgccgccaggccgctcgaggaggacctgaagaacgtgttcccacctgaggtggccgtgttcgagcctagcgaggccgagatcagccacacccagaaagccaccctcgtgtgcctggctaccggcttctaccccgaccatgtggaactgtcttggtgggtcaacggcaaagaggtgcacagcggcgtgtgtaccgacccccagccactgaaagaacagcccgccctgaacgacagccggtactgcctgagcagcagactgagagtgtccgccaccttctggcagaacccccggaaccacttcagatgccaggtgcagttctacggcctgagcgagaacgacgagtggacccaggacagagccaagcccgtgacccagatcgtgtctgccgaagcctggggcagagccgattgcggctttaccagcgagagctaccagcagggcgtgctgagcgccaccaacctgagcgtgatcggcttcagaatcctgctgctgaaagtggccggctttaacctgctgatgaccctgcggctgtggtccagcagggccaagcgatctggatctggagcaacaaacttctcactactcaaacaagcaggtgacgtggaggagaatcccgggcctactagcatggccttaccagtgaccgccttgctcctgccgctggccttgctgctccacgccgccaggccgcagatcgtgctgtctcagtctcctgccatcctgagcgcttccccaggcgagaaagtgaccatgacctgtagagccagcagcagcgtgtcctacatgcactggtatcagcagaagcccggcagcagccctaagccttggatctacgccaccagcaatctggcctctggcgtgccagccagattttctggctctggcagcggcaccagctacagcttcacaatcagcagagtggaagccgaggacgccgccacctactattgtcagcagtggaccttcaatcctcctaccttcggcggaggcacccggctggaaatcaaaagaacagtggctgctggcggaggcggaagtggaggcggaggatctggcggcggaggctctcaggcttatctgcaacagagcggagccgaactcgtcagacctggcgcttctgtgaagatgagctgcaaggccagcggctacaccttcaccagctataatatgcactgggtcaagcagacccctcggcagggactcgaatggatcggcggaatctatcccggcaacggcgacacctcctacaaccagaagttcaagggcaaagccacactgaccgtgggcaagagcagcagcaccgcctatatgcagctcagcagcctgaccagcgaggacagcgccgtgtacttctgcgccagatacgactacaactacgctatggactactggggccagggcaccagcgtgacagttagctctgccagcacgcgtatccagaaccctgatcctgccgtgtaccagctgcgggatagcaagagcagcgacaagagcgtgtgtctgttcaccgacttcgacagccagaccaacgtgtcccagagcaaggactccgacgtgtacatcaccgataagtgcgtgctggacatgcggagcatggacttcaagagcaactccgccgtggcctggtccaacaagtccgatttcgcctgcgccaacgccttcaacaacagcattatccccgaggacacattcttcccaagccccgagagcagctgcgacgtgaagctggtggaaaagagcttcgagacagacaccaacctgaacttccagatcctgtacgaggtgatcggcttcagaatcctgctgctgaaagtggccggctttaacctgctgatgaccctgcggctgtggtccagccgcgccaagagaagcggatctggcgtgaagcagaccctgaatttcgacctgctgaagctggctggcgacgtggaatccaacccaggcccttctagaggccatatgaccgagtacaagcccacggtgcgcctcgccacccgcgacgacgtccccagggccgtacgcaccctcgccgccgcgttcgccgactaccccgccacgcgccacaccgtcgatccggaccgccacatcgagcgggtcaccgagctgcaagaactcttcctcacgcgcgtcgggctcgacatcggcaaggtgtgggtcgcggacgacggcgccgcggtggcggtctggaccacgccggagagcgtcgaagcgggggcggtgttcgccgagatcggcccgcgcatggccgagttgagcggttcccggctggccgcgcagcaacagatggaaggcctcctggcgccgcaccggcccaaggagcccgcgtggttcctggccaccgtcggcgtctcgcccgaccaccagggcaagggtctgggcagcgccgtcgtgctccccggagtggaggcggccgagcgcgccggggtgcccgccttcctggagacctccgcgccccgcaacctccccttctacgagcggctcggcttcaccgtcaccgccgacgtcgaggtgcccgaaggaccgcgcacctggtgcatgacccgcaagcccggtgcctga

SEQ ID NO: 8148 - DNA, 2604 bp, synthetic construct
  source 1..2604: mol_type = other DNA
atggccttaccagtgaccgccttgctcctgccgctggccttgctgctccacgccgccaggccgctcgaggaggacctgaagaacgtgttcccacctgaggtggccgtgttcgagcctagcgaggccgagatcagccacacccagaaagccaccctcgtgtgcctggctaccggcttctaccccgaccatgtggaactgtcttggtgggtcaacggcaaagaggtgcacagcggcgtgtgtaccgacccccagccactgaaagaacagcccgccctgaacgacagccggtactgcctgagcagcagactgagagtgtccgccaccttctggcagaacccccggaaccacttcagatgccaggtgcagttctacggcctgagcgagaacgacgagtggacccaggacagagccaagcccgtgacccagatcgtgtctgccgaagcctggggcagagccgattgcggctttaccagcgagagctaccagcagggcgtgctgagcgccaccaacctgagcgtgatcggcttcagaatcctgctgctgaaagtggccggctttaacctgctgatgaccctgcggctgtggtccagcagggccaagcgatctggatctggagcaacaaacttctcactactcaaacaagcaggtgacgtggaggagaatcccgggcctactagcatggccttaccagtgaccgccttgctcctgccgctggccttgctgctccacgccgccaggccggagatcgtgctgacacagagccctgccaccctgtctctgagccctggcgaaagagccaccctgagctgtagagccagccagagcgtgtccagctacctggcctggtatcagcagaagcccggccaggctccccggctgctgatctacgatgccagcaatagagccaccggcatccccgccagattttccggctctggcagcggcaccgacttcaccctgaccatcagctccctggaacccgaggacttcgccgtgtactactgccagcagcggagcaactggcccatcacattcggccagggcacccggctggaaatcaaaggcggaggcggaagtggaggcggaggatctggcggcggaggctctgaggtgcagcttgttgagtctggcggaggactggtgcagcccgatagaagcctgagactgtcttgtgccgccagcggcttcaccttccacgattatgccatgcactgggtccgacaggcccctggcaaaggacttgaatgggtgtccaccatctcttggaacagcggcacaatcggctacgccgactctgtgaagggcagattcaccatcagccgggacaacgccaagaacagcctgtacctccagatgaactccctgagagccgaggacacagccctgtactactgcgccaaggacatccagtacggcaactactactacggcatggacgtgtggggccagggcacaacagtgacagtctcttctacgcgtatccagaaccctgatcctgccgtgtaccagctgcgggatagcaagagcagcgacaagagcgtgtgtctgttcaccgacttcgacagccagaccaacgtgtcccagagcaaggactccgacgtgtacatcaccgataagtgcgtgctggacatgcggagcatggacttcaagagcaactccgccgtggcctggtccaacaagtccgatttcgcctgcgccaacgccttcaacaacagcattatccccgaggacacattcttcccaagccccgagagcagctgcgacgtgaagctggtggaaaagagcttcgagacagacaccaacctgaacttccagatcctgtacgaggtgatcggcttcagaatcctgctgctgaaagtggccggctttaacctgctgatgaccctgcggctgtggtccagccgcgccaagagaagcggatctggcgtgaagcagaccctgaatttcgacctgctgaagctggctggcgacgtggaatccaacccaggcccttctagaggccatatgaccgagtacaagcccacggtgcgcctcgccacccgcgacgacgtccccagggccgtacgcaccctcgccgccgcgttcgccgactaccccgccacgcgccacaccgtcgatccggaccgccacatcgagcgggtcaccgagctgcaagaactcttcctcacgcgcgtcgggctcgacatcggcaaggtgtgggtcgcggacgacggcgccgcggtggcggtctggaccacgccggagagcgtcgaagcgggggcggtgttcgccgagatcggcccgcgcatggccgagttgagcggttcccggctggccgcgcagcaacagatggaaggcctcctggcgccgcaccggcccaaggagcccgcgtggttcctggccaccgtcggcgtctcgcccgaccaccagggcaagggtctgggcagcgccgtcgtgctccccggagtggaggcggccgagcgcgccggggtgcccgccttcctggagacctccgcgccccgcaacctccccttctacgagcggctcggcttcaccgtcaccgccgacgtcgaggtgcccgaaggaccgcgcacctggtgcatgacccgcaagcccggtgcctga

SEQ ID NO: 8149 - DNA, 2598 bp, synthetic construct
  source 1..2598: mol_type = other DNA
atggccttaccagtgaccgccttgctcctgccgctggccttgctgctccacgccgccaggccgctcgaggaggacctgaagaacgtgttcccacctgaggtggccgtgttcgagcctagcgaggccgagatcagccacacccagaaagccaccctcgtgtgcctggctaccggcttctaccccgaccatgtggaactgtcttggtgggtcaacggcaaagaggtgcacagcggcgtgtgtaccgacccccagccactgaaagaacagcccgccctgaacgacagccggtactgcctgagcagcagactgagagtgtccgccaccttctggcagaacccccggaaccacttcagatgccaggtgcagttctacggcctgagcgagaacgacgagtggacccaggacagagccaagcccgtgacccagatcgtgtctgccgaagcctggggcagagccgattgcggctttaccagcgagagctaccagcagggcgtgctgagcgccaccaacctgagcgtgatcggcttcagaatcctgctgctgaaagtggccggctttaacctgctgatgaccctgcggctgtggtccagcagggccaagcgatctggatctggagcaacaaacttctcactactcaaacaagcaggtgacgtggaggagaatcccgggcctactagcatggccttaccagtgaccgccttgctcctgccgctggccttgctgctccacgccgccaggccggacatccagatgacccagagccccagcagcctgtctgccagcgtgggcgacagagtgaccatcacctgtagagccagccaggacgtgaacaccgccgtggcctggtatcagcagaagcctggcaaggcccccaagctgctgatctacagcgccagcttcctggaaagcggcgtgcccagcagattcagcggaagcagaagcggcaccgacttcaccctgaccatcagctccctccagcccgaggacttcgccacctactactgccagcagcactacaccacccctcccaccttcggccagaccaaggtggaaatcaagagaggcggaggcggaagtggaggcggaggatctggcggcggaggctctgaagtgcaactggtggaatctggcggcggactggtgcagcctggcggatctctgagactgagctgtgccgccagcggcttcaacatcaaggacacctacatccactgggtgcgccaggcccctggaaagggactggaatgggtggcccggatctaccccaccaacggctacaccagatacgccgacagcgtgaagggccggttcaccatcagcgccgacaccagcaagaataccgcctacctccagatgaacagcctgcgggccgaggataccgccgtgtactactgctcaagatggggaggcgacggcttctacgctatggacgtgtggggccagggcacccttgtgaccgtgtcatctacgcgtatccagaaccctgatcctgccgtgtaccagctgcgggatagcaagagcagcgacaagagcgtgtgtctgttcaccgacttcgacagccagaccaacgtgtcccagagcaaggactccgacgtgtacatcaccgataagtgcgtgctggacatgcggagcatggacttcaagagcaactccgccgtggcctggtccaacaagtccgatttcgcctgcgccaacgccttcaacaacagcattatccccgaggacacattcttcccaagccccgagagcagctgcgacgtgaagctggtggaaaagagcttcgagacagacaccaacctgaacttccagatcctgtacgaggtgatcggcttcagaatcctgctgctgaaagtggccggctttaacctgctgatgaccctgcggctgtggtccagccgcgccaagagaagcggatctggcgtgaagcagaccctgaatttcgacctgctgaagctggctggcgacgtggaatccaacccaggcccttctagaggccatatgaccgagtacaagcccacggtgcgcctcgccacccgcgacgacgtccccagggccgtacgcaccctcgccgccgcgttcgccgactaccccgccacgcgccacaccgtcgatccggaccgccacatcgagcgggtcaccgagctgcaagaactcttcctcacgcgcgtcgggctcgacatcggcaaggtgtgggtcgcggacgacggcgccgcggtggcggtctggaccacgccggagagcgtcgaagcgggggcggtgttcgccgagatcggcccgcgcatggccgagttgagcggttcccggctggccgcgcagcaacagatggaaggcctcctggcgccgcaccggcccaaggagcccgcgtggttcctggccaccgtcggcgtctcgcccgaccaccagggcaagggtctgggcagcgccgtcgtgctccccggagtggaggcggccgagcgcgccggggtgcccgccttcctggagacctccgcgccccgcaacctccccttctacgagcggctcggcttcaccgtcaccgccgacgtcgaggtgcccgaaggaccgcgcacctggtgcatgacccgcaagcccggtgcctga

SEQ ID NO: 8150 - DNA, 2235 bp, synthetic construct
  source 1..2235: mol_type = other DNA
atggccttaccagtgaccgccttgctcctgccgctggccttgctgctccacgccgccaggccgctcgaggaggacctgaagaacgtgttcccacctgaggtggccgtgttcgagcctagcgaggccgagatcagccacacccagaaagccaccctcgtgtgcctggctaccggcttctaccccgaccatgtggaactgtcttggtgggtcaacggcaaagaggtgcacagcggcgtgtgtaccgacccccagccactgaaagaacagcccgccctgaacgacagccggtactgcctgagcagcagactgagagtgtccgccaccttctggcagaacccccggaaccacttcagatgccaggtgcagttctacggcctgagcgagaacgacgagtggacccaggacagagccaagcccgtgacccagatcgtgtctgccgaagcctggggcagagccgattgcggctttaccagcgagagctaccagcagggcgtgctgagcgccaccaacctgagcgtgatcggcttcagaatcctgctgctgaaagtggccggctttaacctgctgatgaccctgcggctgtggtccagcagggccaagcgatctggatctggagcaacaaacttctcactactcaaacaagcaggtgacgtggaggagaatcccgggcctactagcatggccctgcccgtgacagccctgctgctgcctctggctctgctgctgcacgccgccagacccgatgaattcgaggtgcaactggtggaaagcggcggaggcctggtgcaggctggcggatctctgagactgagctgtgccgccagcggcatcaccttcagcatcaacacaatgggctggtacagacaggcccctggcaagcagagggaactggtggccctgatctccagcatcggcgacacctactacgccgacagcgtgaagggccggttcaccatcagccgggacaacgccaagaacaccgtgtacctccagatgaacagcctgaagcccgaggacaccgccgtgtactactgcaagcggttcagaacagccgcccagggcaccgattattggggccagggaacacaagtgaccgtgtcctctacgcgtatccagaaccctgatcctgccgtgtaccagctgcgggatagcaagagcagcgacaagagcgtgtgtctgttcaccgacttcgacagccagaccaacgtgtcccagagcaaggactccgacgtgtacatcaccgataagtgcgtgctggacatgcggagcatggacttcaagagcaactccgccgtggcctggtccaacaagtccgatttcgcctgcgccaacgccttcaacaacagcattatccccgaggacacattcttcccaagccccgagagcagctgcgacgtgaagctggtggaaaagagcttcgagacagacaccaacctgaacttccagatcctgtacgaggtgatcggcttcagaatcctgctgctgaaagtggccggctttaacctgctgatgaccctgcggctgtggtccagccgcgccaagagaagcggatctggcgtgaagcagaccctgaatttcgacctgctgaagctggctggcgacgtggaatccaacccaggcccttctagaggccatatgaccgagtacaagcccacggtgcgcctcgccacccgcgacgacgtccccagggccgtacgcaccctcgccgccgcgttcgccgactaccccgccacgcgccacaccgtcgatccggaccgccacatcgagcgggtcaccgagctgcaagaactcttcctcacgcgcgtcgggctcgacatcggcaaggtgtgggtcgcggacgacggcgccgcggtggcggtctggaccacgccggagagcgtcgaagcgggggcggtgttcgccgagatcggcccgcgcatggccgagttgagcggttcccggctggccgcgcagcaacagatggaaggcctcctggcgccgcaccggcccaaggagcccgcgtggttcctggccaccgtcggcgtctcgcccgaccaccagggcaagggtctgggcagcgccgtcgtgctccccggagtggaggcggccgagcgcgccggggtgcccgccttcctggagacctccgcgccccgcaacctccccttctacgagcggctcggcttcaccgtcaccgccgacgtcgaggtgcccgaaggaccgcgcacctggtgcatgacccgcaagcccggtgcctga

SEQ ID NO: 8151 - DNA, 2235 bp, synthetic construct; identical to SEQ ID NO: 8150
  source 1..2235: mol_type = other DNA

SEQ ID NO: 8152 - DNA, 3030 bp, synthetic construct
  source 1..3030: mol_type = other DNA
atggccttaccagtgaccgccttgctcctgccgctggccttgctgctccacgccgccaggccgctcgaggaggacctgaagaacgtgttcccacctgaggtggccgtgttcgagcctagcgaggccgagatcagccacacccagaaagccaccctcgtgtgcctggctaccggcttctaccccgaccatgtggaactgtcttggtgggtcaacggcaaagaggtgcacagcggcgtgtgtaccgacccccagccactgaaagaacagcccgccctgaacgacagccggtactgcctgagcagcagactgagagtgtccgccaccttctggcagaacccccggaaccacttcagatgccaggtgcagttctacggcctgagcgagaacgacgagtggacccaggacagagccaagcccgtgacccagatcgtgtctgccgaagcctggggcagagccgattgcggctttaccagcgagagctaccagcagggcgtgctgagcgccaccaacctgagcgtgatcggcttcagaatcctgctgctgaaagtggccggctttaacctgctgatgaccctgcggctgtggtccagcagggccaagcgatctggatctggagcaacaaacttctcactactcaaacaagcaggtgacgtggaggagaatcccgggcctactagcatggccttaccagtgaccgccttgctcctgccgctggccttgctgctccacgccgccaggccgcaggtccagctcgtcgagtccggcggcggcctcgtccaggccggcgactccgtcaccctctcctgcaccgcctccggccgcaccttctcctcctacgccctcgcctggttccgccagcgccccggcaaggagcgcgagttcgtcgccggcctccgctggggcggccccaccaactacgccgactccgtcaaggaccgcttcaccatctccggcgactccgccaagcacaccatgtacctccagatgaactccctcaagcccgaggacaccgccgtctactactgcggctacaaccccggcggctgggccgtcccctcccagtacgagtacgactcctggggccagggcacccaggtcaccgtctcctccggtaccggcggaggcggatctggcggcggaggtagcggtggcggaggatctgaattcgacatccagatgacacagagccctagcagcctgtctgccagcgtgggagacagagtgaccatcacatgcaaggccagcgaccacatcaacaactggctggcctggtatcagcagaagcctggacaggcccctaagctgctgatctacggcgctaccacactggaaacaggcgtgcccagcagattttctggcagcggctctggcaccgactacaccctgacaatatccagcctccagcctgaggacttcgccacctactactgtcagcagagctggaacaccccttggacattcggccagggcaccaagctggaaatcaagagaggcggaggcggaagtggaggcggaggatctggcggcggaggctctcaagttcagcttcaacagcctggcgctgagctggtcaaacctggcgcttctgtgaagatgagctgcaaagccagcggctacgccttcagcagctactggatcaactggatgaagcagaaacccggccagggactcgaatggatcggccaaatctatcccggcgacggcgacaccaactacaacggcaagttcaagggcagagccacactgaccgccgatacctctagcagcacagcctacatgcagctgagcagcctgaccagcgaagatagcgccgtgtacttctgtgcccggtccatcacaacagtcgtgggctgcgctatggactattggggccagggaacaagcgtgaccgtgtctagtacgcgtatccagaaccctgatcctgccgtgtaccagctgcgggatagcaagagcagcgacaagagcgtgtgtctgttcaccgacttcgacagccagaccaacgtgtcccagagcaaggactccgacgtgtacatcaccgataagtgcgtgctggacatgcggagcatggacttcaagagcaactccgccgtggcctggtccaacaagtccgatttcgcctgcgccaacgccttcaacaacagcattatccccgaggacacattcttcccaagccccgagagcagctgcgacgtgaagctggtggaaaagagcttcgagacagacaccaacctgaacttccagatcctgtacgaggtgatcggcttcagaatcctgctgctgaaagtggccggctttaacctgctgatgaccctgcggctgtggtccagccgcgccaagagaagcggatctggcgtgaagcagaccctgaatttcgacctgctgaagctggctggcgacgtggaatccaacccaggcccttctagaggccatatgaccgagtacaagcccacggtgcgcctcgccacccgcgacgacgtccccagggccgtacgcaccctcgccgccgcgttcgccgactaccccgccacgcgccacaccgtcgatccggaccgccacatcgagcgggtcaccgagctgcaagaactcttcctcacgcgcgtcgggctcgacatcggcaaggtgtgggtcgcggacgacggcgccgcggtggcggtctggaccacgccggagagcgtcgaagcgggggcggtgttcgccgagatcggcccgcgcatggccgagttgagcggttcccggctggccgcgcagcaacagatggaaggcctcctggcgccgcaccggcccaaggagcccgcgtggttcctggccaccgtcggcgtctcgcccgaccaccagggcaagggtctgggcagcgccgtcgtgctccccggagtggaggcggccgagcgcgccggggtgcccgccttcctggagacctccgcgccccgcaacctccccttctacgagcggctcggcttcaccgtcaccgccgacgtcgaggtgcccgaaggaccgcgcacctggtgcatgacccgcaagcccggtgcctga

SEQ ID NO: 8153 - DNA, 3417 bp, synthetic construct
  source 1..3417: mol_type = other DNA
atggccttaccagtgaccgccttgctcctgccgctggccttgctgctccacgccgccaggccgctcgaggaggacctgaagaacgtgttcccacctgaggtggccgtgttcgagcctagcgaggccgagatcagccacacccagaaagccaccctcgtgtgcctggctaccggcttctaccccgaccatgtggaactgtcttggtgggtcaacggcaaagaggtgcacagcggcgtgtgtaccgacccccagccactgaaagaacagcccgccctgaacgacagccggtactgcctgagcagcagactgagagtgtccgccaccttctggcagaacccccggaaccacttcagatgccaggtgcagttctacggcctgagcgagaacgacgagtggacccaggacagagccaagcccgtgacccagatcgtgtctgccgaagcctggggcagagccgattgcggctttaccagcgagagctaccagcagggcgtgctgagcgccaccaacctgagcgtgatcggcttcagaatcctgctgctgaaagtggccggctttaacctgctgatgaccctgcggctgtggtccagcagggccaagcgatctggatctggagcaacaaacttctcactactcaaacaagcaggtgacgtggaggagaatcccgggcctactagcatggccttaccagtgaccgccttgctcctgccgctggccttgctgctccacgccgccaggccggaggttcagctgcttgagtctggcggaggactggttcaacctggcggaagcctgagactgtcttgtgccgccagcggcttcacctttagcagctacgccatgagctgggtccgacaggctcctggcaaaggactggaatgggtgtccagcatcagcggcagcggcgactacatctactacgccgatagcgtgaagggcagattcaccatcagccgggacatcagcaagaacaccctgtacctccagatgaacagcctgagagccgaggacaccgccgtgtactactgtgccaaagaaggcaccggcgctaacagcagcctggccgattatagaggccagggcacactggtcaccgtgtctagtggcggaggaagcggcggaggatctcaggtccagctcgtcgagtccggcggcggcctcgtccaggccggcgactccgtcaccctctcctgcaccgcctccggccgcaccttctcctcctacgccctcgcctggttccgccagcgccccggcaaggagcgcgagttcgtcgccggcctccgctggggcggccccaccaactacgccgactccgtcaaggaccgcttcaccatctccggcgactccgccaagcacaccatgtacctccagatgaactccctcaagcccgaggacaccgccgtctactactgcggctacaaccccggcggctgggccgtcccctcccagtacgagtacgactcctggggccagggcacccaggtcaccgtctcctccggtaccggcggaggcggatctggcggcggaggtagcggtggcggaggatctgaattcgacatccagatgacacagagccctagcagcctgtctgccagcgtgggagacagagtgaccatcacatgcaaggccagcgaccacatcaacaactggctggcctggtatcagcagaagcctggacaggcccctaagctgctgatctacggcgctaccacactggaaacaggcgtgcccagcagattttctggcagcggctctggcaccgactacaccctgacaatatccagcctccagcctgaggacttcgccacctactactgtcagcagagctggaacaccccttggacattcggccagggcaccaagctggaaatcaagagaggcggaggcggaagtggaggcggaggatctggcggcggaggctctcaagttcagcttcaacagcctggcgctgagctggtcaaacctggcgcttctgtgaagatgagctgcaaagccagcggctacgccttcagcagctactggatcaactggatgaagcagaaacccggccagggactcgaatggatcggccaaatctatcccggcgacggcgacaccaactacaacggcaagttcaagggcagagccacactgaccgccgatacctctagcagcacagcctacatgcagctgagcagcctgaccagcgaagatagcgccgtgtacttctgtgcccggtccatcacaacagtcgtgggctgcgctatggactattggggccagggaacaagcgtgaccgtgtctagtacgcgtatccagaaccctgatcctgccgtgtaccagctgcgggatagcaagagcagcgacaagagcgtgtgtctgttcaccgacttcgacagccagaccaacgtgtcccagagcaaggactccgacgtgtacatcaccgataagtgcgtgctggacatgcggagcatggacttcaagagcaactccgccgtggcctggtccaacaagtccgatttcgcctgcgccaacgccttcaacaacagcattatccccgaggacacattcttcccaagccccgagagcagctgcgacgtgaagctggtggaaaagagcttcgagacagacaccaacctgaacttccagatcctgtacgaggtgatcggcttcagaatcctgctgctgaaagtggccggctttaacctgctgatgaccctgcggctgtggtccagccgcgccaagagaagcggatctggcgtgaagcagaccctgaatttcgacctgctgaagctggctggcgacgtggaatccaacccaggcccttctagaggccatatgaccgagtacaagcccacggtgcgcctcgccacccgcgacgacgtccccagggccgtacgcaccctcgccgccgcgttcgccgactaccccgccacgcgccacaccgtcgatccggaccgccacatcgagcgggtcaccgagctgcaagaactcttcctcacgcgcgtcgggctcgacatcggcaaggtgtgggtcgcggacgacggcgccgcggtggcggtctggaccacgccggagagcgtcgaagcgggggcggtgttcgccgagatcggcccgcgcatggccgagttgagcggttcccggctggccgcgcagcaacagatggaaggcctcctggcgccgcaccggcccaaggagcccgcgtggttcctggccaccgtcggcgtctcgcccgaccaccagggcaagggtctgggcagcgccgtcgtgctccccggagtggaggcggccgagcgcgccggggtgcccgccttcctggagacctccgcgccccgcaacctccccttctacgagcggctcggcttcaccgtcaccgccgacgtcgaggtgcccgaaggaccgcgcacctggtgcatgacccgcaagcccggtgcctga

SEQ ID NO: 8154 - DNA, 3417 bp, synthetic construct; identical to SEQ ID NO: 8153
  source 1..3417: mol_type = other DNA

SEQ ID NO: 8155 - DNA, 2253 bp, synthetic construct
  source 1..2253: mol_type = other DNA
atggccttaccagtgaccgccttgctcctgccgctggccttgctgctccacgccgccaggccgctcgaggaggacctgaagaacgtgttcccacctgaggtggccgtgttcgagcctagcgaggccgagatcagccacacccagaaagccaccctcgtgtgcctggctaccggcttctaccccgaccatgtggaactgtcttggtgggtcaacggcaaagaggtgcacagcggcgtgtgtaccgacccccagccactgaaagaacagcccgccctgaacgacagccggtactgcctgagcagcagactgagagtgtccgccaccttctggcagaacccccggaaccacttcagatgccaggtgcagttctacggcctgagcgagaacgacgagtggacccaggacagagccaagcccgtgacccagatcgtgtctgccgaagcctggggcagagccgattgcggctttaccagcgagagctaccagcagggcgtgctgagcgccaccaacctgagcgtgatcggcttcagaatcctgctgctgaaagtggccggctttaacctgctgatgaccctgcggctgtggtccagcagggccaagcgatctggatctggagcaacaaacttctcactactcaaacaagcaggtgacgtggaggagaatcccgggcctactagcatggccctgcccgtgacagccctgctgctgcctctggctctgctgctgcacgccgccagacccgatgaattcggctctgacctgggcatcaagctgctgttcgccgctgccaagggccaggacgacgaagtgcggattctgctggctgctggggccgacgtgaacgccaaggatttcgagggctacacccccctgcacgtggccgcctatgatggacacctggaaatcgtggaagtgctgctgaaggctggcgctgatgtgaatgccaaagacagccagggccggacccctctgcatgaagccgcctacagcggccatctggaaattgtggaagtgctgctgaaagccggggcagacgtgaacgctcaggacgacgctggcgagacaccagccgatctggctgcagcttggggccacgaagatatcgccgaggtgctgcagaagacgcgtatccagaaccctgatcctgccgtgtaccagctgcgggatagcaagagcagcgacaagagcgtgtgtctgttcaccgacttcgacagccagaccaacgtgtcccagagcaaggactccgacgtgtacatcaccgataagtgcgtgctggacatgcggagcatggacttcaagagcaactccgccgtggcctggtccaacaagtccgatttcgcctgcgccaacgccttcaacaacagcattatccccgaggacacattcttcccaagccccgagagcagctgcgacgtgaagctggtggaaaagagcttcgagacagacaccaacctgaacttccagatcctgtacgaggtgatcggcttcagaatcctgctgctgaaagtggccggctttaacctgctgatgaccctgcggctgtggtccagccgcgccaagagaagcggatctggcgtgaagcagaccctgaatttcgacctgctgaagctggctggcgacgtggaatccaacccaggcccttctagaggccatatgaccgagtacaagcccacggtgcgcctcgccacccgcgacgacgtccccagggccgtacgcaccctcgccgccgcgttcgccgactaccccgccacgcgccacaccgtcgatccggaccgccacatcgagcgggtcaccgagctgcaagaactcttcctcacgcgcgtcgggctcgacatcggcaaggtgtgggtcgcggacgacggcgccgcggtggcggtctggaccacgccggagagcgtcgaagcgggggcggtgttcgccgagatcggcccgcgcatggccgagttgagcggttcccggctggccgcgcagcaacagatggaaggcctcctggcgccgcaccggcccaaggagcccgcgtggttcctggccaccgtcggcgtctcgcccgaccaccagggcaagggtctgggcagcgccgtcgtgctccccggagtggaggcggccgagcgcgccggggtgcccgccttcctggagacctccgcgccccgcaacctccccttctacgagcggctcggcttcaccgtcaccgccgacgtcgaggtgcccgaaggaccgcgcacctggtgcatgacccgcaagcccggtgcctga

SEQ ID NO: 8156 - DNA, 2040 bp, synthetic construct
  source 1..2040: mol_type = other DNA
atggccttaccagtgaccgccttgctcctgccgctggccttgctgctccacgccgccaggccgctcgaggaggacctgaagaacgtgttcccacctgaggtggccgtgttcgagcctagcgaggccgagatcagccacacccagaaagccaccctcgtgtgcctggctaccggcttctaccccgaccatgtggaactgtcttggtgggtcaacggcaaagaggtgcacagcggcgtgtgtaccgacccccagccactgaaagaacagcccgccctgaacgacagccggtactgcctgagcagcagactgagagtgtccgccaccttctggcagaacccccggaaccacttcagatgccaggtgcagttctacggcctgagcgagaacgacgagtggacccaggacagagccaagcccgtgacccagatcgtgtctgccgaagcctggggcagagccgattgcggctttaccagcgagagctaccagcagggcgtgctgagcgccaccaacctgagcgtgatcggcttcagaatcctgctgctgaaagtggccggctttaacctgctgatgaccctgcggctgtggtccagcagggccaagcgatctggatctggagcaacaaacttctcactactcaaacaagcaggtgacgtggaggagaatcccgggcctactagcatggactggatttggcgcatccttttccttgtcggcgctgctaccggcgcccattccttcgaaggcagcggattcgaatacgccaaagagatgcggaacgcctactgggagatcgccctgctgcccaatctgaccaaccagcagaagagagcccccatcagaaagctgtacgacgacccctcccagagcagcgagctgctgtctgaggctaaaaaactgaacgatagccagacgcgtatccagaaccctgatcctgccgtgtaccagctgcgggatagcaagagcagcgacaagagcgtgtgtctgttcaccgacttcgacagccagaccaacgtgtcccagagcaaggactccgacgtgtacatcaccgataagtgcgtgctggacatgcggagcatggacttcaagagcaactccgccgtggcctggtccaacaagtccgatttcgcctgcgccaacgccttcaacaacagcattatccccgaggacacattcttcccaagccccgagagcagctgcgacgtgaagctggtggaaaagagcttcgagacagacaccaacctgaacttccagatcctgtacgaggtgatcggcttcagaatcctgctgctgaaagtggccggctttaacctgctgatgaccctgcggctgtggtccagccgcgccaagagaagcggatctggcgtgaagcagaccctgaatttcgacctgctgaagctggctggcgacgtggaatccaacccaggcccttctagaggccatatgaccgagtacaagcccacggtgcgcctcgccacccgcgacgacgtccccagggccgtacgcaccctcgccgccgcgttcgccgactaccccgccacgcgccacaccgtcgatccggaccgccacatcgagcgggtcaccgagctgcaagaactcttcctcacgcgcgtcgggctcgacatcggcaaggtgtgggtcgcggacgacggcgccgcggtggcggtctggaccacgccggagagcgtcgaagcgggggcggtgttcgccgagatcggcccgcgcatggccgagttgagcggttcccggctggccgcgcagcaacagatggaaggcctcctggcgccgcaccggcccaaggagcccgcgtggttcctggccaccgtcggcgtctcgcccgaccaccagggcaagggtctgggcagcgccgtcgtgctccccggagtggaggcggccgagcgcgccggggtgcccgccttcctggagacctccgcgccccgcaacctccccttctacgagcggctcggcttcaccgtcaccgccgacgtcgaggtgcccgaaggaccgcgcacctggtgcatgacccgcaagcccggtgcctga

SEQ ID NO: 8157 - DNA, 2706 bp, synthetic construct
  source 1..2706: mol_type = other DNA
atggccttaccagtgaccgccttgctcctgccgctggccttgctgctccacgccgccaggccgctcgaggaggacctgaagaacgtgttcccacctgaggtggccgtgttcgagcctagcgaggccgagatcagccacacccagaaagccaccctcgtgtgcctggctaccggcttctaccccgaccatgtggaactgtcttggtgggtcaacggcaaagaggtgcacagcggcgtgtgtaccgacccccagccactgaaagaacagcccgccctgaacgacagccggtactgcctgagcagcagactgagagtgtccgccaccttctggcagaacccccggaaccacttcagatgccaggtgcagttctacggcctgagcgagaacgacgagtggacccaggacagagccaagcccgtgacccagatcgtgtctgccgaagcctggggcagagccgattgcggctttaccagcgagagctaccagcagggcgtgctgagcgccaccaacctgagcgtgatcggcttcagaatcctgctgctgaaagtggccggctttaacctgctgatgaccctgcggctgtggtccagcagggccaagcgatctggatctggagcaacaaacttctcactactcaaacaagcaggtgacgtggaggagaatcccgggcctactagcatggccctgcccgtgacagccctgctgctgcctctggctctgctgctgcacgccgccagacccgatgaattcgaggtgcaactggtggaaagcggcggaggcctggtgcaggctggcggatctctgagactgagctgtgccgccagcggcatcaccttcagcatcaacacaatgggctggtacagacaggcccctggcaagcagagggaactggtggccctgatctccagcatcggcgacacctactacgccgacagcgtgaagggccggttcaccatcagccgggacaacgccaagaacaccgtgtacctccagatgaacagcctgaagcccgaggacaccgccgtgtactactgcaagcggttcagaacagccgcccagggcaccgattattggggccagggaacacaagtgaccgtgtcctctctcgagggaggaggcggctccgggggaggcggaagtggaggcggaggatctgggtctggaggaagcggatctggaggctcagggtcagggggctcaggcagtggaggctctttcgaagtgcaactggtggaatctgggggcggactggtgcagccaggcggaagtctgaggctgtcttgtgccgcctccggcagcatcttcggcttcaacgacatggcctggtatcggcaggctcccggaaaacagcgcgagctggtggctctgattagcagagtgggcgtgaccagcagcgccgactctgtgaagggcagattcacaatctccagagtgaacgccaaggatacagtgtacctccagatgaactctctgaaacctgaggatacagcagtgtactattgctacatggaccagcggctggacggcagcacactggcctactggggacagggaactcaagtgacagtgtctagcacgcgtatccagaaccctgatcctgccgtgtaccagctgcgggatagcaagagcagcgacaagagcgtgtgtctgttcaccgacttcgacagccagaccaacgtgtcccagagcaaggactccgacgtgtacatcaccgataagtgcgtgctggacatgcggagcatggacttcaagagcaactccgccgtggcctggtccaacaagtccgatttcgcctgcgccaacgccttcaacaacagcattatccccgaggacacattcttcccaagccccgagagcagctgcgacgtgaagctggtggaaaagagcttcgagacagacaccaacctgaacttccagatcctgtacgaggtgatcggcttcagaatcctgctgctgaaagtggccggctttaacctgctgatgaccctgcggctgtggtccagccgcgccaagagaagcggatctggcgtgaagcagaccctgaatttcgacctgctgaagctggctggcgacgtggaatccaacccaggcccttctagaggccatatgaccgagtacaagcccacggtgcgcctcgccacccgcgacgacgtccccagggccgtacgcaccctcgccgccgcgttcgccgactaccccgccacgcgccacaccgtcgatccggaccgccacatcgagcgggtcaccgagctgcaagaactcttcctcacgcgcgtcgggctcgacatcggcaaggtgtgggtcgcggacgacggcgccgcggtggcggtctggaccacgccggagagcgtcgaagcgggggcggtgttcgccgagatcggcccgcgcatggccgagttgagcggttcccggctggccgcgcagcaacagatggaaggcctcctggcgccgcaccggcccaaggagcccgcgtggttcctggccaccgtcggcgtctcgcccgaccaccagggcaagggtctgggcagcgccgtcgtgctccccggagtggaggcggccgagcgcgccggggtgcccgccttcctggagacctccgcgccccgcaacctccccttctacgagcggctcggcttcaccgtcaccgccgacgtcgaggtgcccgaaggaccgcgcacctggtgcatgacccgcaagcccggtgcctga

SEQ ID NO: 8158 - DNA, 2448 bp, synthetic construct
  source 1..2448: mol_type = other DNA
atggccttaccagtgaccgccttgctcctgccgctggccttgctgctccacgccgccaggccgctcgaggaggacctgaagaacgtgttcccacctgaggtggccgtgttcgagcctagcgaggccgagatcagccacacccagaaagccaccctcgtgtgcctggctaccggcttctaccccgaccatgtggaactgtcttggtgggtcaacggcaaagaggtgcacagcggcgtgtgtaccgacccccagccactgaaagaacagcccgccctgaacgacagccggtactgcctgagcagcagactgagagtgtccgccaccttctggcagaacccccggaaccacttcagatgccaggtgcagttctacggcctgagcgagaacgacgagtggacccaggacagagccaagcccgtgacccagatcgtgtctgccgaagcctggggcagagccgattgcggctttaccagcgagagctaccagcagggcgtgctgagcgccaccaacctgagcgtgatcggcttcagaatcctgctgctgaaagtggccggctttaacctgctgatgaccctgcggctgtggtccagcagggccaagcgatctggatctggagcaacaaacttctcactactcaaacaagcaggtgacgtggaggagaatcccgggcctactagcatggcccttccagtcactgccttgctgttgcctctggcgctcctgctccacgccgctagaccgggcatgagaaccgaggacctgcctaaggccgtggtgttcctggaaccccagtggtacagagtgctggaaaaggacagcgtgaccctgaagtgccagggcgcctacagccccgaggacaatagcacccagtggttccacaacgagagcctgatctccagccaggccagcagctacttcatcgacgccgccaccgtggacgacagcggcgagtatagatgccagaccaacctgagcaccctgagcgaccccgtgcagctggaagtgcacatcggatggctgctgctgcaggcccccagatgggtgttcaaagaagaggaccccatccacctgagatgccactcttggaagaacaccgccctgcacaaagtgacctacctgcagaacggcaagggcagaaagtacttccaccacaacagcgacttctacatccccaaggccaccctgaaggactccggctcctacttctgcagaggcctcgtgggcagcaagaacgtgtccagcgagacagtgaacatcaccatcacccagggcctggccgtgtctaccatcagcagctttttcccacccggctaccagacgcgtatccagaaccctgatcctgccgtgtaccagctgcgggatagcaagagcagcgacaagagcgtgtgtctgttcaccgacttcgacagccagaccaacgtgtcccagagcaaggactccgacgtgtacatcaccgataagtgcgtgctggacatgcggagcatggacttcaagagcaactccgccgtggcctggtccaacaagtccgatttcgcctgcgccaacgccttcaacaacagcattatccccgaggacacattcttcccaagccccgagagcagctgcgacgtgaagctggtggaaaagagcttcgagacagacaccaacctgaacttccagatcctgtacgaggtgatcggcttcagaatcctgctgctgaaagtggccggctttaacctgctgatgaccctgcggctgtggtccagccgcgccaagagaagcggatctggcgtgaagcagaccctgaatttcgacctgctgaagctggctggcgacgtggaatccaacccaggcccttctagaggccatatgaccgagtacaagcccacggtgcgcctcgccacccgcgacgacgtccccagggccgtacgcaccctcgccgccgcgttcgccgactaccccgccacgcgccacaccgtcgatccggaccgccacatcgagcgggtcaccgagctgcaagaactcttcctcacgcgcgtcgggctcgacatcggcaaggtgtgggtcgcggacgacggcgccgcggtggcggtctggaccacgccggagagcgtcgaagcgggggcggtgttcgccgagatcggcccgcgcatggccgagttgagcggttcccggctggccgcgcagcaacagatggaaggcctcctggcgccgcaccggcccaaggagcccgcgtggttcctggccaccgtcggcgtctcgcccgaccaccagggcaagggtctgggcagcgccgtcgtgctccccggagtggaggcggccgagcgcgccggggtgcccgccttcctggagacctccgcgccccgcaacctccccttctacgagcggctcggcttcaccgtcaccgccgacgtcgaggtgcccgaaggaccgcgcacctggtgcatgacccgcaagcccggtgcctga

SEQ ID NO: 8159 - DNA, 2454 bp, synthetic construct
  source 1..2454: mol_type = other DNA
atggccttaccagtgaccgccttgctcctgccgctggccttgctgctccacgccgccaggccgctcgaggaggacctgaagaacgtgttcccacctgaggtggccgtgttcgagcctagcgaggccgagatcagccacacccagaaagccaccctcgtgtgcctggctaccggcttctaccccgaccatgtggaactgtcttggtgggtcaacggcaaagaggtgcacagcggcgtgtgtaccgacccccagccactgaaagaacagcccgccctgaacgacagccggtactgcctgagcagcagactgagagtgtccgccaccttctggcagaacccccggaaccacttcagatgccaggtgcagttctacggcctgagcgagaacgacgagtggacccaggacagagccaagcccgtgacccagatcgtgtctgccgaagcctggggcagagccgattgcggctttaccagcgagagctaccagcagggcgtgctgagcgccaccaacctgagcgtgatcggcttcagaatcctgctgctgaaagtggccggctttaacctgctgatgaccctgcggctgtggtccagcagggccaagcgatctggatctggagcaacaaacttctcactactcaaacaagcaggtgacgtggaggagaatcccgggcctactagcgccaccatggccttaccagtgaccgccttgctcctgccgctggccttgctgctccacgccgccaggccgggcatgcggactgaagacctcccaaaggctgtggtgttcctggagcctcaatggtacagggtgctggagaaggacagtgtgactctgaagtgccagggagcctactcccctgaggacaattccacacagtggtttcacaatgagagcctcatctcaagccaggcctccagctacttcattgacgctgccacagtggacgacagtggagagtacaggtgccagacaaacctctccaccctcagtgacccggtgcagctagaagtccatatcggctggctgttgctccaggcccctcggtgggtgttcaaggaggaagaccctattcacctgaggtgtcacagctggaagaacactgctctgcataaggtcacatatttacagaatggcaaaggcaggaagtattttcatcataattctgacttctacattccaaaagccacactcaaagacagcggctcctacttctgcagggggcttgttgggagtaaaaatgtgtcttcagagactgtgaacatcaccatcactcaaggtttggcagtgtcaaccatctcatcattctttccacctggctaccaaacgcgtatccagaaccctgatcctgccgtgtaccagctgcgggatagcaagagcagcgacaagagcgtgtgtctgttcaccgacttcgacagccagaccaacgtgtcccagagcaaggactccgacgtgtacatcaccgataagtgcgtgctggacatgcggagcatggacttcaagagcaactccgccgtggcctggtccaacaagtccgatttcgcctgcgccaacgccttcaacaacagcattatccccgaggacacattcttcccaagccccgagagcagctgcgacgtgaagctggtggaaaagagcttcgagacagacaccaacctgaacttccagatcctgtacgaggtgatcggcttcagaatcctgctgctgaaagtggccggctttaacctgctgatgaccctgcggctgtggtccagccgcgccaagagaagcggatctggcgtgaagcagaccctgaatttcgacctgctgaagctggctggcgacgtggaatccaacccaggcccttctagaggccatatgaccgagtacaagcccacggtgcgcctcgccacccgcgacgacgtccccagggccgtacgcaccctcgccgccgcgttcgccgactaccccgccacgcgccacaccgtcgatccggaccgccacatcgagcgggtcaccgagctgcaagaactcttcctcacgcgcgtcgggctcgacatcggcaaggtgtgggtcgcggacgacggcgccgcggtggcggtctggaccacgccggagagcgtcgaagcgggggcggtgttcgccgagatcggcccgcgcatggccgagttgagcggttcccggctggccgcgcagcaacagatggaaggcctcctggcgccgcaccggcccaaggagcccgcgtggttcctggccaccgtcggcgtctcgcccgaccaccagggcaagggtctgggcagcgccgtcgtgctccccggagtggaggcggccgagcgcgccggggtgcccgccttcctggagacctccgcgccccgcaacctccccttctacgagcggctcggcttcaccgtcaccgccgacgtcgaggtgcccgaaggaccgcgcacctggtgcatgacccgcaagcccggtgcctga

SEQ ID NO: 8160 - DNA, 2598 bp, synthetic construct
  source 1..2598: mol_type = other DNA
atggccttaccagtgaccgccttgctcctgccgctggccttgctgctccacgccgccaggccgctcgagatccagaaccctgatcctgccgtgtaccagctgcgggatagcaagagcagcgacaagagcgtgtgtctgttcaccgacttcgacagccagaccaacgtgtcccagagcaaggactccgacgtgtacatcaccgataagtgcgtgctggacatgcggagcatggacttcaagagcaactccgccgtggcctggtccaacaagtccgatttcgcctgcgccaacgccttcaacaacagcattatccccgaggacacattcttcccaagccccgagagcagctgcgacgtgaagctggtggaaaagagcttcgagacagacaccaacctgaacttccagatcctgtacgaggtgatcggcttcagaatcctgctgctgaaagtggccggctttaacctgctgatgaccctgcggctgtggtccagcagggccaagcgatctggatctggagcaacaaacttctcactactcaaacaagcaggtgacgtggaggagaatcccgggcctactagcatggccttaccagtgaccgccttgctcctgccgctggccttgctgctccacgccgccaggccggacatccagatgacacagactacatcctccctgtctgcctctctgggagacagagtcaccatcagttgcagggcaagtcaggacattagtaaatatttaaattggtatcagcagaaaccagatggaactgttaaactcctgatctaccatacatcaagattacactcaggagtcccatcaaggttcagtggcagtgggtctggaacagattattctctcaccattagcaacctggagcaagaagatattgccacttacttttgccaacagggtaatacgcttccgtacacgttcggaggggggaccaagctggagatcacaggtggcggtggctcgggcggtggtgggtcgggtggcggcggatctgaggtgaaactgcaggagtcaggacctggcctggtggcgccctcacagagcctgtccgtcacatgcactgtctcaggggtctcattacccgactatggtgtaagctggattcgccagcctccacgaaagggtctggagtggctgggagtaatatggggtagtgaaaccacatactataattcagctctcaaatccagactgaccatcatcaaggacaactccaagagccaagttttcttaaaaatgaacagtctgcaaactgatgacacagccatttactactgtgccaaacattattactacggtggtagctatgctatggactactggggtcaaggaacctcagtcaccgtctcctcaacgcgtgaggacctgaagaacgtgttcccacctgaggtggccgtgttcgagcctagcgaggccgagatcagccacacccagaaagccaccctcgtgtgcctggctaccggcttctaccccgaccatgtggaactgtcttggtgggtcaacggcaaagaggtgcacagcggcgtgtgtaccgacccccagccactgaaagaacagcccgccctgaacgacagccggtactgcctgagcagcagactgagagtgtccgccaccttctggcagaacccccggaaccacttcagatgccaggtgcagttctacggcctgagcgagaacgacgagtggacccaggacagagccaagcccgtgacccagatcgtgtctgccgaagcctggggcagagccgattgcggctttaccagcgagagctaccagcagggcgtgctgagcgccaccaacctgagcgtgatcggcttcagaatcctgctgctgaaagtggccggctttaacctgctgatgaccctgcggctgtggtccagccgcgccaagagaagcggatctggcgtgaagcagaccctgaatttcgacctgctgaagctggctggcgacgtggaatccaacccaggcccttctagaggccatatgaccgagtacaagcccacggtgcgcctcgccacccgcgacgacgtccccagggccgtacgcaccctcgccgccgcgttcgccgactaccccgccacgcgccacaccgtcgatccggaccgccacatcgagcgggtcaccgagctgcaagaactcttcctcacgcgcgtcgggctcgacatcggcaaggtgtgggtcgcggacgacggcgccgcggtggcggtctggaccacgccggagagcgtcgaagcgggggcggtgttcgccgagatcggcccgcgcatggccgagttgagcggttcccggctggccgcgcagcaacagatggaaggcctcctggcgccgcaccggcccaaggagcccgcgtggttcctggccaccgtcggcgtctcgcccgaccaccagggcaagggtctgggcagcgccgtcgtgctccccggagtggaggcggccgagcgcgccggggtgcccgccttcctggagacctccgcgccccgcaacctccccttctacgagcggctcggcttcaccgtcaccgccgacgtcgaggtgcccgaaggaccgcgcacctggtgcatgacccgcaagcccggtgcctga

SEQ ID NO: 8161 - DNA, 2601 bp, synthetic construct
  source 1..2601: mol_type = other DNA
atggccttaccagtgaccgccttgctcctgccgctggccttgctgctccacgccgccaggccgctcgagatccagaaccctgatcctgccgtgtaccagctgcgggatagcaagagcagcgacaagagcgtgtgtctgttcaccgacttcgacagccagaccaacgtgtcccagagcaaggactccgacgtgtacatcaccgataagtgcgtgctggacatgcggagcatggacttcaagagcaactccgccgtggcctggtccaacaagtccgatttcgcctgcgccaacgccttcaacaacagcattatccccgaggacacattcttcccaagccccgagagcagctgcgacgtgaagctggtggaaaagagcttcgagacagacaccaacctgaacttccagatcctgtacgaggtgatcggcttcagaatcctgctgctgaaagtggccggctttaacctgctgatgaccctgcggctgtggtccagcagggccaagcgatctggatctggagcaacaaacttctcactactcaaacaagcaggtgacgtggaggagaatcccgggcctactagcaccatggccttaccagtgaccgccttgctcctgccgctggccttgctgctccacgccgccaggccggagatcgtgatgacccagagccctgccaccctgtctctgagccctggcgaaagagccaccctgagctgtagagccagccaggacatcagcaagtacctgaactggtatcagcagaagcccggccaggcccccagactgctgatctaccacaccagcagactgcacagcggcatccccgccagattttctggctctggcagcggcaccgactacaccctgacaatcagcagcctccagcccgaggacttcgccgtgtacttctgtcagcaaggcaacaccctgccctacaccttcggccagggcaccaagctggaaatcaagggcggaggcggaagtggaggcggaggatctggcggcggaggctctcaggtgcaactccaggaatctggccctggcctcgtgaagcccagcgagacactgagcctgacctgtaccgtgtccggcgtgtccctgcctgactatggcgtgtcctggatcagacagccccctggcaagggcctggaatggatcggagtgatttggggcagcgaaaccacctactacaacagctccctgaagtccagagtgaccatctccaaggacaactccaagaaccaggtgtccctgaagctgagcagcgtgacagccgccgacaccgccgtgtattactgcgccaagcactactactacggcggcagctacgctatggactactggggccagggaaccctcgtgaccgtgtctagtacgcgtgaggacctgaagaacgtgttcccacctgaggtggccgtgttcgagcctagcgaggccgagatcagccacacccagaaagccaccctcgtgtgcctggctaccggcttctaccccgaccatgtggaactgtcttggtgggtcaacggcaaagaggtgcacagcggcgtgtgtaccgacccccagccactgaaagaacagcccgccctgaacgacagccggtactgcctgagcagcagactgagagtgtccgccaccttctggcagaacccccggaaccacttcagatgccaggtgcagttctacggcctgagcgagaacgacgagtggacccaggacagagccaagcccgtgacccagatcgtgtctgccgaagcctggggcagagccgattgcggctttaccagcgagagctaccagcagggcgtgctgagcgccaccaacctgagcgtgatcggcttcagaatcctgctgctgaaagtggccggctttaacctgctgatgaccctgcggctgtggtccagccgcgccaagagaagcggatctggcgtgaagcagaccctgaatttcgacctgctgaagctggctggcgacgtggaatccaacccaggcccttctagaggccatatgaccgagtacaagcccacggtgcgcctcgccacccgcgacgacgtccccagggccgtacgcaccctcgccgccgcgttcgccgactaccccgccacgcgccacaccgtcgatccggaccgccacatcgagcgggtcaccgagctgcaagaactcttcctcacgcgcgtcgggctcgacatcggcaaggtgtgggtcgcggacgacggcgccgcggtggcggtctggaccacgccggagagcgtcgaagcgggggcggtgttcgccgagatcggcccgcgcatggccgagttgagcggttcccggctggccgcgcagcaacagatggaaggcctcctggcgccgcaccggcccaaggagcccgcgtggttcctggccaccgtcggcgtctcgcccgaccaccagggcaagggtctgggcagcgccgtcgtgctccccggagtggaggcggccgagcgcgccggggtgcccgccttcctggagacctccgcgccccgcaacctccccttctacgagcggctcggcttcaccgtcaccgccgacgtcgaggtgcccgaaggaccgcgcacctggtgcatgacccgcaagcccggtgcctga

SEQ ID NO: 8162 - DNA, 2604 bp, synthetic construct
  source 1..2604: mol_type = other DNA
atggccttaccagtgaccgccttgctcctgccgctggccttgctgctccacgccgccaggccgctcgagatccagaaccctgatcctgccgtgtaccagctgcgggatagcaagagcagcgacaagagcgtgtgtctgttcaccgacttcgacagccagaccaacgtgtcccagagcaaggactccgacgtgtacatcaccgataagtgcgtgctggacatgcggagcatggacttcaagagcaactccgccgtggcctggtccaacaagtccgatttcgcctgcgccaacgccttcaacaacagcattatccccgaggacacattcttcccaagccccgagagcagctgcgacgtgaagctggtggaaaagagcttcgagacagacaccaacctgaacttccagatcctgtacgaggtgatcggcttcagaatcctgctgctgaaagtggccggctttaacctgctgatgaccctgcggctgtggtccagcagggccaagcgatctggatctggagcaacaaacttctcactactcaaacaagcaggtgacgtggaggagaatcccgggcctactagcaccatggccttaccagtgaccgccttgctcctgccgctggccttgctgctccacgccgccaggccggacgagatcgtgctgacacagagccccgccaccctgtcactgtctccaggcgaaagagccaccctgagctgtagcgccagcagcagcgtgtcctacatgcactggtatcagcagaagcccggccaggcccccagactgctgatctacgataccagcaagctggcctccggcatccccgccagattttctggcagcggctccggcaccgacttcaccctgacaatcagcagcctggaacccgaggacgtggccgtgtactactgttttcaaggcagcgtgtaccccttcaccttcggccagggcaccaagctggaaatcaagagaggtggcggtggctcgggcggtggtgggtcgggtggcggcggatctcaggtgcagctccaggaatctggccctggcctcgtgaagcctagccagaccctgagcctgacctgtaccgtgtctggcggcagcatcagcacaagcggcatgggcgtgggctggatcagacagcaccctggcaagggcctggaatggatcggccacatttggtgggacgacgacaagcggtacaaccccgccctgaagtccagagtgaccatcagcgtggacaccagcaagaaccagttcagcctgaagctgagcagcgtgacagccgccgataccgccgtgtattattgcgcccggatggaactgtggtcctactacttcgactactggggccagggaaccctcgtgaccgtgtctagtacgcgtgaggacctgaagaacgtgttcccacctgaggtggccgtgttcgagcctagcgaggccgagatcagccacacccagaaagccaccctcgtgtgcctggctaccggcttctaccccgaccatgtggaactgtcttggtgggtcaacggcaaagaggtgcacagcggcgtgtgtaccgacccccagccactgaaagaacagcccgccctgaacgacagccggtactgcctgagcagcagactgagagtgtccgccaccttctggcagaacccccggaaccacttcagatgccaggtgcagttctacggcctgagcgagaacgacgagtggacccaggacagagccaagcccgtgacccagatcgtgtctgccgaagcctggggcagagccgattgcggctttaccagcgagagctaccagcagggcgtgctgagcgccaccaacctgagcgtgatcggcttcagaatcctgctgctgaaagtggccggctttaacctgctgatgaccctgcggctgtggtccagccgcgccaagagaagcggatctggcgtgaagcagaccctgaatttcgacctgctgaagctggctggcgacgtggaatccaacccaggcccttctagaggccatatgaccgagtacaagcccacggtgcgcctcgccacccgcgacgacgtccccagggccgtacgcaccctcgccgccgcgttcgccgactaccccgccacgcgccacaccgtcgatccggaccgccacatcgagcgggtcaccgagctgcaagaactcttcctcacgcgcgtcgggctcgacatcggcaaggtgtgggtcgcggacgacggcgccgcggtggcggtctggaccacgccggagagcgtcgaagcgggggcggtgttcgccgagatcggcccgcgcatggccgagttgagcggttcccggctggccgcgcagcaacagatggaaggcctcctggcgccgcaccggcccaaggagcccgcgtggttcctggccaccgtcggcgtctcgcccgaccaccagggcaagggtctgggcagcgccgtcgtgctccccggagtggaggcggccgagcgcgccggggtgcccgccttcctggagacctccgcgccccgcaacctccccttctacgagcggctcggcttcaccgtcaccgccgacgtcgaggtgcccgaaggaccgcgcacctggtgcatgacccgcaagcccggtgcctga

SEQ ID NO: 8163 - DNA, 2592 bp, synthetic construct
  source 1..2592: mol_type = other DNA
atggccttaccagtgaccgccttgctcctgccgctggccttgctgctccacgccgccaggccgctcgagatccagaaccctgatcctgccgtgtaccagctgcgggatagcaagagcagcgacaagagcgtgtgtctgttcaccgacttcgacagccagaccaacgtgtcccagagcaaggactccgacgtgtacatcaccgataagtgcgtgctggacatgcggagcatggacttcaagagcaactccgccgtggcctggtccaacaagtccgatttcgcctgcgccaacgccttcaacaacagcattatccccgaggacacattcttcccaagccccgagagcagctgcgacgtgaagctggtggaaaagagcttcgagacagacaccaacctgaacttccagatcctgtacgaggtgatcggcttcagaatcctgctgctgaaagtggccggctttaacctgctgatgaccctgcggctgtggtccagcagggccaagcgatctggatctggagcaacaaacttctcactactcaaacaagcaggtgacgtggaggagaatcccgggcctactagcatggccttaccagtgaccgccttgctcctgccgctggccttgctgctccacgccgccaggccggacatccagatgacacagagccctagcagcctgtctgccagcgtgggagacagagtgaccatcacctgtagagccagccaggacatcagcaactacctgaactggtatcagcagaagcccggcaaggcccctaagctgctgatctactacaccagcagactgcacagcggcgtgcccagcagattttctggctctggcagcggcaccgacttcaccctgacaatatctagcctccagcctgaggacttcgccacctactattgccagcagggcaacaccctgccttacacatttggacagggcaccaaggtggaaatcaagagaggcggaggcggaagtggaggcggaggatctggcggcggaggctctgaagtgcagctggttgaatcaggtggcggcctggttcaacctggcggatctctgagactgagctgtgccgccagcggcttcaccttcagcgactactttatgagctgggtccgacaggcccctggcaaaggacttgaatgggtcgccaccatcagcaatggcggcacctacacttactaccccgacagcgtgaagggcagattcaccatctccagagacaacagcaagaacaccctgtacctccagatgaactccctgagagccgaggacaccgccgtgtactactgcgccagattcgacggctacatcttcgactattggggccagggcaccctggtcacagtctcttctacgcgtgaggacctgaagaacgtgttcccacctgaggtggccgtgttcgagcctagcgaggccgagatcagccacacccagaaagccaccctcgtgtgcctggctaccggcttctaccccgaccatgtggaactgtcttggtgggtcaacggcaaagaggtgcacagcggcgtgtgtaccgacccccagccactgaaagaacagcccgccctgaacgacagccggtactgcctgagcagcagactgagagtgtccgccaccttctggcagaacccccggaaccacttcagatgccaggtgcagttctacggcctgagcgagaacgacgagtggacccaggacagagccaagcccgtgacccagatcgtgtctgccgaagcctggggcagagccgattgcggctttaccagcgagagctaccagcagggcgtgctgagcgccaccaacctgagcgtgatcggcttcagaatcctgctgctgaaagtggccggctttaacctgctgatgaccctgcggctgtggtccagccgcgccaagagaagcggatctggcgtgaagcagaccctgaatttcgacctgctgaagctggctggcgacgtggaatccaacccaggcccttctagaggccatatgaccgagtacaagcccacggtgcgcctcgccacccgcgacgacgtccccagggccgtacgcaccctcgccgccgcgttcgccgactaccccgccacgcgccacaccgtcgatccggaccgccacatcgagcgggtcaccgagctgcaagaactcttcctcacgcgcgtcgggctcgacatcggcaaggtgtgggtcgcggacgacggcgccgcggtggcggtctggaccacgccggagagcgtcgaagcgggggcggtgttcgccgagatcggcccgcgcatggccgagttgagcggttcccggctggccgcgcagcaacagatggaaggcctcctggcgccgcaccggcccaaggagcccgcgtggttcctggccaccgtcggcgtctcgcccgaccaccagggcaagggtctgggcagcgccgtcgtgctccccggagtggaggcggccgagcgcgccggggtgcccgccttcctggagacctccgcgccccgcaacctccccttctacgagcggctcggcttcaccgtcaccgccgacgtcgaggtgcccgaaggaccgcgcacctggtgcatgacccgcaagcccggtgcctga

SEQ ID NO: 8164 - DNA, 2604 bp, synthetic construct
  source 1..2604: mol_type = other DNA
atggccttaccagtgaccgccttgctcctgccgctggccttgctgctccacgccgccaggccgctcgagatccagaaccctgatcctgccgtgtaccagctgcgggatagcaagagcagcgacaagagcgtgtgtctgttcaccgacttcgacagccagaccaacgtgtcccagagcaaggactccgacgtgtacatcaccgataagtgcgtgctggacatgcggagcatggacttcaagagcaactccgccgtggcctggtccaacaagtccgatttcgcctgcgccaacgccttcaacaacagcattatccccgaggacacattcttcccaagccccgagagcagctgcgacgtgaagctggtggaaaagagcttcgagacagacaccaacctgaacttccagatcctgtacgaggtgatcggcttcagaatcctgctgctgaaagtggccggctttaacctgctgatgaccctgcggctgtggtccagcagggccaagcgatctggatctggagcaacaaacttctcactactcaaacaagcaggtgacgtggaggagaatcccgggcctactagcatggccttaccagtgaccgccttgctcctgccgctggccttgctgctccacgccgccaggccggacatccagatgacacagagccctagcagcctgtctgccagcgtgggagacagagtgaccatcacatgcaaggccagcgaccacatcaacaactggctggcctggtatcagcagaagcctggacaggcccctaagctgctgatctacggcgctaccacactggaaacaggcgtgcccagcagattttctggcagcggctctggcaccgactacaccctgacaatatccagcctccagcctgaggacttcgccacctactactgtcagcagagctggaacaccccttggacattcggccagggcaccaagctggaaatcaagagaggcggaggcggaagtggaggcggaggatctggcggcggaggctctcaagttcagcttcaacagcctggcgctgagctggtcaaacctggcgcttctgtgaagatgagctgcaaagccagcggctacgccttcagcagctactggatcaactggatgaagcagaaacccggccagggactcgaatggatcggccaaatctatcccggcgacggcgacaccaactacaacggcaagttcaagggcagagccacactgaccgccgatacctctagcagcacagcctacatgcagctgagcagcctgaccagcgaagatagcgccgtgtacttctgtgcccggtccatcacaacagtcgtgggctgcgctatggactattggggccagggaacaagcgtgaccgtgtctagtacgcgtgaggacctgaagaacgtgttcccacctgaggtggccgtgttcgagcctagcgaggccgagatcagccacacccagaaagccaccctcgtgtgcctggctaccggcttctaccccgaccatgtggaactgtcttggtgggtcaacggcaaagaggtgcacagcggcgtgtgtaccgacccccagccactgaaagaacagcccgccctgaacgacagccggtactgcctgagcagcagactgagagtgtccgccaccttctggcagaacccccggaaccacttcagatgccaggtgcagttctacggcctgagcgagaacgacgagtggacccaggacagagccaagcccgtgacccagatcgtgtctgccgaagcctggggcagagccgattgcggctttaccagcgagagctaccagcagggcgtgctgagcgccaccaacctgagcgtgatcggcttcagaatcctgctgctgaaagtggccggctttaacctgctgatgaccctgcggctgtggtccagccgcgccaagagaagcggatctggcgtgaagcagaccctgaatttcgacctgctgaagctggctggcgacgtggaatccaacccaggcccttctagaggccatatgaccgagtacaagcccacggtgcgcctcgccacccgcgacgacgtccccagggccgtacgcaccctcgccgccgcgttcgccgactaccccgccacgcgccacaccgtcgatccggaccgccacatcgagcgggtcaccgagctgcaagaactcttcctcacgcgcgtcgggctcgacatcggcaaggtgtgggtcgcggacgacggcgccgcggtggcggtctggaccacgccggagagcgtcgaagcgggggcggtgttcgccgagatcggcccgcgcatggccgagttgagcggttcccggctggccgcgcagcaacagatggaaggcctcctggcgccgcaccggcccaaggagcccgcgtggttcctggccaccgtcggcgtctcgcccgaccaccagggcaagggtctgggcagcgccgtcgtgctccccggagtggaggcggccgagcgcgccggggtgcccgccttcctggagacctccgcgccccgcaacctccccttctacgagcggctcggcttcaccgtcaccgccgacgtcgaggtgcccgaaggaccgcgcacctggtgcatgacccgcaagcccggtgcctga

SEQ ID NO: 8165 - DNA, 2610 bp, synthetic construct
  source 1..2610: mol_type = other DNA
atggccttaccagtgaccgccttgctcctgccgctggccttgctgctccacgccgccaggccgctcgagatccagaaccctgatcctgccgtgtaccagctgcgggatagcaagagcagcgacaagagcgtgtgtctgttcaccgacttcgacagccagaccaacgtgtcccagagcaaggactccgacgtgtacatcaccgataagtgcgtgctggacatgcggagcatggacttcaagagcaactccgccgtggcctggtccaacaagtccgatttcgcctgcgccaacgccttcaacaacagcattatccccgaggacacattcttcccaagccccgagagcagctgcgacgtgaagctggtggaaaagagcttcgagacagacaccaacctgaacttccagatcctgtacgaggtgatcggcttcagaatcctgctgctgaaagtggccggctttaacctgctgatgaccctgcggctgtggtccagcagggccaagcgatctggatctggagcaacaaacttctcactactcaaacaagcaggtgacgtggaggagaatcccgggcctactagcatggccttaccagtgaccgccttgctcctgccgctggccttgctgctccacgccgccaggccgcagatcgtgctgtctcagtctcctgccatcctgagcgcttccccaggcgagaaagtgaccatgacctgtagagccagcagcagcgtgtcctacatgcactggtatcagcagaagcccggcagcagccctaagccttggatctacgccaccagcaatctggcctctggcgtgccagccagattttctggctctggcagcggcaccagctacagcttcacaatcagcagagtggaagccgaggacgccgccacctactattgtcagcagtggaccttcaatcctcctaccttcggcggaggcacccggctggaaatcaaaagaacagtggctgctggcggaggcggaagtggaggcggaggatctggcggcggaggctctcaggcttatctgcaacagagcggagccgaactcgtcagacctggcgcttctgtgaagatgagctgcaaggccagcggctacaccttcaccagctataatatgcactgggtcaagcagacccctcggcagggactcgaatggatcggcggaatctatcccggcaacggcgacacctcctacaaccagaagttcaagggcaaagccacactgaccgtgggcaagagcagcagcaccgcctatatgcagctcagcagcctgaccagcgaggacagcgccgtgtacttctgcgccagatacgactacaactacgctatggactactggggccagggcaccagcgtgacagttagctctgccagcacgcgtgaggacctgaagaacgtgttcccacctgaggtggccgtgttcgagcctagcgaggccgagatcagccacacccagaaagccaccctcgtgtgcctggctaccggcttctaccccgaccatgtggaactgtcttggtgggtcaacggcaaagaggtgcacagcggcgtgtgtaccgacccccagccactgaaagaacagcccgccctgaacgacagccggtactgcctgagcagcagactgagagtgtccgccaccttctggcagaacccccggaaccacttcagatgccaggtgcagttctacggcctgagcgagaacgacgagtggacccaggacagagccaagcccgtgacccagatcgtgtctgccgaagcctggggcagagccgattgcggctttaccagcgagagctaccagcagggcgtgctgagcgccaccaacctgagcgtgatcggcttcagaatcctgctgctgaaagtggccggctttaacctgctgatgaccctgcggctgtggtccagccgcgccaagagaagcggatctggcgtgaagcagaccctgaatttcgacctgctgaagctggctggcgacgtggaatccaacccaggcccttctagaggccatatgaccgagtacaagcccacggtgcgcctcgccacccgcgacgacgtccccagggccgtacgcaccctcgccgccgcgttcgccgactaccccgccacgcgccacaccgtcgatccggaccgccacatcgagcgggtcaccgagctgcaagaactcttcctcacgcgcgtcgggctcgacatcggcaaggtgtgggtcgcggacgacggcgccgcggtggcggtctggaccacgccggagagcgtcgaagcgggggcggtgttcgccgagatcggcccgcgcatggccgagttgagcggttcccggctggccgcgcagcaacagatggaaggcctcctggcgccgcaccggcccaaggagcccgcgtggttcctggccaccgtcggcgtctcgcccgaccaccagggcaagggtctgggcagcgccgtcgtgctccccggagtggaggcggccgagcgcgccggggtgcccgccttcctggagacctccgcgccccgcaacctccccttctacgagcggctcggcttcaccgtcaccgccgacgtcgaggtgcccgaaggaccgcgcacctggtgcatgacccgcaagcccggtgcctga

SEQ ID NO: 8166 - DNA, 2604 bp, synthetic construct
  source 1..2604: mol_type = other DNA
atggccttaccagtgaccgccttgctcctgccgctggccttgctgctccacgccgccaggccgctcgagatccagaaccctgatcctgccgtgtaccagctgcgggatagcaagagcagcgacaagagcgtgtgtctgttcaccgacttcgacagccagaccaacgtgtcccagagcaaggactccgacgtgtacatcaccgataagtgcgtgctggacatgcggagcatggacttcaagagcaactccgccgtggcctggtccaacaagtccgatttcgcctgcgccaacgccttcaacaacagcattatccccgaggacacattcttcccaagccccgagagcagctgcgacgtgaagctggtggaaaagagcttcgagacagacaccaacctgaacttccagatcctgtacgaggtgatcggcttcagaatcctgctgctgaaagtggccggctttaacctgctgatgaccctgcggctgtggtccagcagggccaagcgatctggatctggagcaacaaacttctcactactcaaacaagcaggtgacgtggaggagaatcccgggcctactagcatggccttaccagtgaccgccttgctcctgccgctggccttgctgctccacgccgccaggccggagatcgtgctgacacagagccctgccaccctgtctctgagccctggcgaaagagccaccctgagctgtagagccagccagagcgtgtccagctacctggcctggtatcagcagaagcccggccaggctccccggctgctgatctacgatgccagcaatagagccaccggcatccccgccagattttccggctctggcagcggcaccgacttcaccctgaccatcagctccctggaacccgaggacttcgccgtgtactactgccagcagcggagcaactggcccatcacattcggccagggcacccggctggaaatcaaaggcggaggcggaagtggaggcggaggatctggcggcggaggctctgaggtgcagcttgttgagtctggcggaggactggtgcagcccgatagaagcctgagactgtcttgtgccgccagcggcttcaccttccacgattatgccatgcactgggtccgacaggcccctggcaaaggacttgaatgggtgtccaccatctcttggaacagcggcacaatcggctacgccgactctgtgaagggcagattcaccatcagccgggacaacgccaagaacagcctgtacctccagatgaactccctgagagccgaggacacagccctgtactactgcgccaaggacatccagtacggcaactactactacggcatggacgtgtggggccagggcacaacagtgacagtctcttctacgcgtgaggacctgaagaacgtgttcccacctgaggtggccgtgttcgagcctagcgaggccgagatcagccacacccagaaagccaccctcgtgtgcctggctaccggcttctaccccgaccatgtggaactgtcttggtgggtcaacggcaaagaggtgcacagcggcgtgtgtaccgacccccagccactgaaagaacagcccgccctgaacgacagccggtactgcctgagcagcagactgagagtgtccgccaccttctggcagaacccccggaaccacttcagatgccaggtgcagttctacggcctgagcgagaacgacgagtggacccaggacagagccaagcccgtgacccagatcgtgtctgccgaagcctggggcagagccgattgcggctttaccagcgagagctaccagcagggcgtgctgagcgccaccaacctgagcgtgatcggcttcagaatcctgctgctgaaagtggccggctttaacctgctgatgaccctgcggctgtggtccagccgcgccaagagaagcggatctggcgtgaagcagaccctgaatttcgacctgctgaagctggctggcgacgtggaatccaacccaggcccttctagaggccatatgaccgagtacaagcccacggtgcgcctcgccacccgcgacgacgtccccagggccgtacgcaccctcgccgccgcgttcgccgactaccccgccacgcgccacaccgtcgatccggaccgccacatcgagcgggtcaccgagctgcaagaactcttcctcacgcgcgtcgggctcgacatcggcaaggtgtgggtcgcggacgacggcgccgcggtggcggtctggaccacgccggagagcgtcgaagcgggggcggtgttcgccgagatcggcccgcgcatggccgagttgagcggttcccggctggccgcgcagcaacagatggaaggcctcctggcgccgcaccggcccaaggagcccgcgtggttcctggccaccgtcggcgtctcgcccgaccaccagggcaagggtctgggcagcgccgtcgtgctccccggagtggaggcggccgagcgcgccggggtgcccgccttcctggagacctccgcgccccgcaacctccccttctacgagcggctcggcttcaccgtcaccgccgacgtcgaggtgcccgaaggaccgcgcacctggtgcatgacccgcaagcccggtgcctga

SEQ ID NO: 8167 - DNA, 2598 bp, synthetic construct
  source 1..2598: mol_type = other DNA
atggccttaccagtgaccgccttgctcctgccgctggccttgctgctccacgccgccaggccgctcgagatccagaaccctgatcctgccgtgtaccagctgcgggatagcaagagcagcgacaagagcgtgtgtctgttcaccgacttcgacagccagaccaacgtgtcccagagcaaggactccgacgtgtacatcaccgataagtgcgtgctggacatgcggagcatggacttcaagagcaactccgccgtggcctggtccaacaagtccgatttcgcctgcgccaacgccttcaacaacagcattatccccgaggacacattcttcccaagccccgagagcagctgcgacgtgaagctggtggaaaagagcttcgagacagacaccaacctgaacttccagatcctgtacgaggtgatcggcttcagaatcctgctgctgaaagtggccggctttaacctgctgatgaccctgcggctgtggtccagcagggccaagcgatctggatctggagcaacaaacttctcactactcaaacaagcaggtgacgtggaggagaatcccgggcctactagcatggccttaccagtgaccgccttgctcctgccgctggccttgctgctccacgccgccaggccggacatccagatgacccagagccccagcagcctgtctgccagcgtgggcgacagagtgaccatcacctgtagagccagccaggacgtgaacaccgccgtggcctggtatcagcagaagcctggcaaggcccccaagctgctgatctacagcgccagcttcctggaaagcggcgtgcccagcagattcagcggaagcagaagcggcaccgacttcaccctgaccatcagctccctccagcccgaggacttcgccacctactactgccagcagcactacaccacccctcccaccttcggccagaccaaggtggaaatcaagagaggcggaggcggaagtggaggcggaggatctggcggcggaggctctgaagtgcaactggtggaatctggcggcggactggtgcagcctggcggatctctgagactgagctgtgccgccagcggcttcaacatcaaggacacctacatccactgggtgcgccaggcccctggaaagggactggaatgggtggcccggatctaccccaccaacggctacaccagatacgccgacagcgtgaagggccggttcaccatcagcgccgacaccagcaagaataccgcctacctccagatgaacagcctgcgggccgaggataccgccgtgtactactgctcaagatggggaggcgacggcttctacgctatggacgtgtggggccagggcacccttgtgaccgtgtcatctacgcgtgaggacctgaagaacgtgttcccacctgaggtggccgtgttcgagcctagcgaggccgagatcagccacacccagaaagccaccctcgtgtgcctggctaccggcttctaccccgaccatgtggaactgtcttggtgggtcaacggcaaagaggtgcacagcggcgtgtgtaccgacccccagccactgaaagaacagcccgccctgaacgacagccggtactgcctgagcagcagactgagagtgtccgccaccttctggcagaacccccggaaccacttcagatgccaggtgcagttctacggcctgagcgagaacgacgagtggacccaggacagagccaagcccgtgacccagatcgtgtctgccgaagcctggggcagagccgattgcggctttaccagcgagagctaccagcagggcgtgctgagcgccaccaacctgagcgtgatcggcttcagaatcctgctgctgaaagtggccggctttaacctgctgatgaccctgcggctgtggtccagccgcgccaagagaagcggatctggcgtgaagcagaccctgaatttcgacctgctgaagctggctggcgacgtggaatccaacccaggcccttctagaggccatatgaccgagtacaagcccacggtgcgcctcgccacccgcgacgacgtccccagggccgtacgcaccctcgccgccgcgttcgccgactaccccgccacgcgccacaccgtcgatccggaccgccacatcgagcgggtcaccgagctgcaagaactcttcctcacgcgcgtcgggctcgacatcggcaaggtgtgggtcgcggacgacggcgccgcggtggcggtctggaccacgccggagagcgtcgaagcgggggcggtgttcgccgagatcggcccgcgcatggccgagttgagcggttcccggctggccgcgcagcaacagatggaaggcctcctggcgccgcaccggcccaaggagcccgcgtggttcctggccaccgtcggcgtctcgcccgaccaccagggcaagggtctgggcagcgccgtcgtgctccccggagtggaggcggccgagcgcgccggggtgcccgccttcctggagacctccgcgccccgcaacctccccttctacgagcggctcggcttcaccgtcaccgccgacgtcgaggtgcccgaaggaccgcgcacctggtgcatgacccgcaagcccggtgcctga

SEQ ID NO: 8168 - DNA, 2235 bp, synthetic construct
  source 1..2235: mol_type = other DNA
atggccttaccagtgaccgccttgctcctgccgctggccttgctgctccacgccgccaggccgctcgagatccagaaccctgatcctgccgtgtaccagctgcgggatagcaagagcagcgacaagagcgtgtgtctgttcaccgacttcgacagccagaccaacgtgtcccagagcaaggactccgacgtgtacatcaccgataagtgcgtgctggacatgcggagcatggacttcaagagcaactccgccgtggcctggtccaacaagtccgatttcgcctgcgccaacgccttcaacaacagcattatccccgaggacacattcttcccaagccccgagagcagctgcgacgtgaagctggtggaaaagagcttcgagacagacaccaacctgaacttccagatcctgtacgaggtgatcggcttcagaatcctgctgctgaaagtggccggctttaacctgctgatgaccctgcggctgtggtccagcagggccaagcgatctggatctggagcaacaaacttctcactactcaaacaagcaggtgacgtggaggagaatcccgggcctactagcatggccctgcccgtgacagccctgctgctgcctctggctctgctgctgcacgccgccagacccgatgaattcgaggtgcaactggtggaaagcggcggaggcctggtgcaggctggcggatctctgagactgagctgtgccgccagcggcatcaccttcagcatcaacacaatgggctggtacagacaggcccctggcaagcagagggaactggtggccctgatctccagcatcggcgacacctactacgccgacagcgtgaagggccggttcaccatcagccgggacaacgccaagaacaccgtgtacctccagatgaacagcctgaagcccgaggacaccgccgtgtactactgcaagcggttcagaacagccgcccagggcaccgattattggggccagggaacacaagtgaccgtgtcctctacgcgtgaggacctgaagaacgtgttcccacctgaggtggccgtgttcgagcctagcgaggccgagatcagccacacccagaaagccaccctcgtgtgcctggctaccggcttctaccccgaccatgtggaactgtcttggtgggtcaacggcaaagaggtgcacagcggcgtgtgtaccgacccccagccactgaaagaacagcccgccctgaacgacagccggtactgcctgagcagcagactgagagtgtccgccaccttctggcagaacccccggaaccacttcagatgccaggtgcagttctacggcctgagcgagaacgacgagtggacccaggacagagccaagcccgtgacccagatcgtgtctgccgaagcctggggcagagccgattgcggctttaccagcgagagctaccagcagggcgtgctgagcgccaccaacctgagcgtgatcggcttcagaatcctgctgctgaaagtggccggctttaacctgctgatgaccctgcggctgtggtccagccgcgccaagagaagcggatctggcgtgaagcagaccctgaatttcgacctgctgaagctggctggcgacgtggaatccaacccaggcccttctagaggccatatgaccgagtacaagcccacggtgcgcctcgccacccgcgacgacgtccccagggccgtacgcaccctcgccgccgcgttcgccgactaccccgccacgcgccacaccgtcgatccggaccgccacatcgagcgggtcaccgagctgcaagaactcttcctcacgcgcgtcgggctcgacatcggcaaggtgtgggtcgcggacgacggcgccgcggtggcggtctggaccacgccggagagcgtcgaagcgggggcggtgttcgccgagatcggcccgcgcatggccgagttgagcggttcccggctggccgcgcagcaacagatggaaggcctcctggcgccgcaccggcccaaggagcccgcgtggttcctggccaccgtcggcgtctcgcccgaccaccagggcaagggtctgggcagcgccgtcgtgctccccggagtggaggcggccgagcgcgccggggtgcccgccttcctggagacctccgcgccccgcaacctccccttctacgagcggctcggcttcaccgtcaccgccgacgtcgaggtgcccgaaggaccgcgcacctggtgcatgacccgcaagcccggtgcctga

SEQ ID NO: 8169 - DNA, 2235 bp, synthetic construct; identical to SEQ ID NO: 8168
  source 1..2235: mol_type = other DNA

SEQ ID NO: 8170 - DNA, 3030 bp, synthetic construct
  source 1..3030: mol_type = other DNA
atggccttaccagtgaccgccttgctcctgccgctggccttgctgctccacgccgccaggccgctcgagatccagaaccctgatcctgccgtgtaccagctgcgggatagcaagagcagcgacaagagcgtgtgtctgttcaccgacttcgacagccagaccaacgtgtcccagagcaaggactccgacgtgtacatcaccgataagtgcgtgctggacatgcggagcatggacttcaagagcaactccgccgtggcctggtccaacaagtccgatttcgcctgcgccaacgccttcaacaacagcattatccccgaggacacattcttcccaagccccgagagcagctgcgacgtgaagctggtggaaaagagcttcgagacagacaccaacctgaacttccagatcctgtacgaggtgatcggcttcagaatcctgctgctgaaagtggccggctttaacctgctgatgaccctgcggctgtggtccagcagggccaagcgatctggatctggagcaacaaacttctcactactcaaacaagcaggtgacgtggaggagaatcccgggcctactagcatggccttaccagtgaccgccttgctcctgccgctggccttgctgctccacgccgccaggccgcaggtccagctcgtcgagtccggcggcggcctcgtccaggccggcgactccgtcaccctctcctgcaccgcctccggccgcaccttctcctcctacgccctcgcctggttccgccagcgccccggcaaggagcgcgagttcgtcgccggcctccgctggggcggccccaccaactacgccgactccgtcaaggaccgcttcaccatctccggcgactccgccaagcacaccatgtacctccagatgaactccctcaagcccgaggacaccgccgtctactactgcggctacaaccccggcggctgggccgtcccctcccagtacgagtacgactcctggggccagggcacccaggtcaccgtctcctccggtaccggcggaggcggatctggcggcggaggtagcggtggcggaggatctgaattcgacatccagatgacacagagccctagcagcctgtctgccagcgtgggagacagagtgaccatcacatgcaaggccagcgaccacatcaacaactggctggcctggtatcagcagaagcctggacaggcccctaagctgctgatctacggcgctaccacactggaaacaggcgtgcccagcagattttctggcagcggctctggcaccgactacaccctgacaatatccagcctccagcctgaggacttcgccacctactactgtcagcagagctggaacaccccttggacattcggccagggcaccaagctggaaatcaagagaggcggaggcggaagtggaggcggaggatctggcggcggaggctctcaagttcagcttcaacagcctggcgctgagctggtcaaacctggcgcttctgtgaagatgagctgcaaagccagcggctacgccttcagcagctactggatcaactggatgaagcagaaacccggccagggactcgaatggatcggccaaatctatcccggcgacggcgacaccaactacaacggcaagttcaagggcagagccacactgaccgccgatacctctagcagcacagcctacatgcagctgagcagcctgaccagcgaagatagcgccgtgtacttctgtgcccggtccatcacaacagtcgtgggctgcgctatggactattggggccagggaacaagcgtgaccgtgtctagtacgcgtgaggacctgaagaacgtgttcccacctgaggtggccgtgttcgagcctagcgaggccgagatcagccacacccagaaagccaccctcgtgtgcctggctaccggcttctaccccgaccatgtggaactgtcttggtgggtcaacggcaaagaggtgcacagcggcgtgtgtaccgacccccagccactgaaagaacagcccgccctgaacgacagccggtactgcctgagcagcagactgagagtgtccgccaccttctggcagaacccccggaaccacttcagatgccaggtgcagttctacggcctgagcgagaacgacgagtggacccaggacagagccaagcccgtgacccagatcgtgtctgccgaagcctggggcagagccgattgcggctttaccagcgagagctaccagcagggcgtgctgagcgccaccaacctgagcgtgatcggcttcagaatcctgctgctgaaagtggccggctttaacctgctgatgaccctgcggctgtggtccagccgcgccaagagaagcggatctggcgtgaagcagaccctgaatttcgacctgctgaagctggctggcgacgtggaatccaacccaggcccttctagaggccatatgaccgagtacaagcccacggtgcgcctcgccacccgcgacgacgtccccagggccgtacgcaccctcgccgccgcgttcgccgactaccccgccacgcgccacaccgtcgatccggaccgccacatcgagcgggtcaccgagctgcaagaactcttcctcacgcgcgtcgggctcgacatcggcaaggtgtgggtcgcggacgacggcgccgcggtggcggtctggaccacgccggagagcgtcgaagcgggggcggtgttcgccgagatcggcccgcgcatggccgagttgagcggttcccggctggccgcgcagcaacagatggaaggcctcctggcgccgcaccggcccaaggagcccgcgtggttcctggccaccgtcggcgtctcgcccgaccaccagggcaagggtctgggcagcgccgtcgtgctccccggagtggaggcggccgagcgcgccggggtgcccgccttcctggagacctccgcgccccgcaacctccccttctacgagcggctcggcttcaccgtcaccgccgacgtcgaggtgcccgaaggaccgcgcacctggtgcatgacccgcaagcccggtgcctga

SEQ ID NO: 8171 - DNA, 3417 bp, synthetic construct
  source 1..3417: mol_type = other DNA
atggccttaccagtgaccgccttgctcctgccgctggccttgctgctccacgccgccaggccgctcgagatccagaaccctgatcctgccgtgtaccagctgcgggatagcaagagcagcgacaagagcgtgtgtctgttcaccgacttcgacagccagaccaacgtgtcccagagcaaggactccgacgtgtacatcaccgataagtgcgtgctggacatgcggagcatggacttcaagagcaactccgccgtggcctggtccaacaagtccgatttcgcctgcgccaacgccttcaacaacagcattatccccgaggacacattcttcccaagccccgagagcagctgcgacgtgaagctggtggaaaagagcttcgagacagacaccaacctgaacttccagatcctgtacgaggtgatcggcttcagaatcctgctgctgaaagtggccggctttaacctgctgatgaccctgcggctgtggtccagcagggccaagcgatctggatctggagcaacaaacttctcactactcaaacaagcaggtgacgtggaggagaatcccgggcctactagcatggccttaccagtgaccgccttgctcctgccgctggccttgctgctccacgccgccaggccggaggttcagctgcttgagtctggcggaggactggttcaacctggcggaagcctgagactgtcttgtgccgccagcggcttcacctttagcagctacgccatgagctgggtccgacaggctcctggcaaaggactggaatgggtgtccagcatcagcggcagcggcgactacatctactacgccgatagcgtgaagggcagattcaccatcagccgggacatcagcaagaacaccctgtacctccagatgaacagcctgagagccgaggacaccgccgtgtactactgtgccaaagaaggcaccggcgctaacagcagcctggccgattatagaggccagggcacactggtcaccgtgtctagtggcggaggaagcggcggaggatctcaggtccagctcgtcgagtccggcggcggcctcgtccaggccggcgactccgtcaccctctcctgcaccgcctccggccgcaccttctcctcctacgccctcgcctggttccgccagcgccccggcaaggagcgcgagttcgtcgccggcctccgctggggcggccccaccaactacgccgactccgtcaaggaccgcttcaccatctccggcgactccgccaagcacaccatgtacctccagatgaactccctcaagcccgaggacaccgccgtctactactgcggctacaaccccggcggctgggccgtcccctcccagtacgagtacgactcctggggccagggcacccaggtcaccgtctcctccggtaccggcggaggcggatctggcggcggaggtagcggtggcggaggatctgaattcgacatccagatgacacagagccctagcagcctgtctgccagcgtgggagacagagtgaccatcacatgcaaggccagcgaccacatcaacaactggctggcctggtatcagcagaagcctggacaggcccctaagctgctgatctacggcgctaccacactggaaacaggcgtgcccagcagattttctggcagcggctctggcaccgactacaccctgacaatatccagcctccagcctgaggacttcgccacctactactgtcagcagagctggaacaccccttggacattcggccagggcaccaagctggaaatcaagagaggcggaggcggaagtggaggcggaggatctggcggcggaggctctcaagttcagcttcaacagcctggcgctgagctggtcaaacctggcgcttctgtgaagatgagctgcaaagccagcggctacgccttcagcagctactggatcaactggatgaagcagaaacccggccagggactcgaatggatcggccaaatctatcccggcgacggcgacaccaactacaacggcaagttcaagggcagagccacactgaccgccgatacctctagcagcacagcctacatgcagctgagcagcctgaccagcgaagatagcgccgtgtacttctgtgcccggtccatcacaacagtcgtgggctgcgctatggactattggggccagggaacaagcgtgaccgtgtctagtacgcgtgaggacctgaagaacgtgttcccacctgaggtggccgtgttcgagcctagcgaggccgagatcagccacacccagaaagccaccctcgtgtgcctggctaccggcttctaccccgaccatgtggaactgtcttggtgggtcaacggcaaagaggtgcacagcggcgtgtgtaccgacccccagccactgaaagaacagcccgccctgaacgacagccggtactgcctgagcagcagactgagagtgtccgccaccttctggcagaacccccggaaccacttcagatgccaggtgcagttctacggcctgagcgagaacgacgagtggacccaggacagagccaagcccgtgacccagatcgtgtctgccgaagcctggggcagagccgattgcggctttaccagcgagagctaccagcagggcgtgctgagcgccaccaacctgagcgtgatcggcttcagaatcctgctgctgaaagtggccggctttaacctgctgatgaccctgcggctgtggtccagccgcgccaagagaagcggatctggcgtgaagcagaccctgaatttcgacctgctgaagctggctggcgacgtggaatccaacccaggcccttctagaggccatatgaccgagtacaagcccacggtgcgcctcgccacccgcgacgacgtccccagggccgtacgcaccctcgccgccgcgttcgccgactaccccgccacgcgccacaccgtcgatccggaccgccacatcgagcgggtcaccgagctgcaagaactcttcctcacgcgcgtcgggctcgacatcggcaaggtgtgggtcgcggacgacggcgccgcggtggcggtctggaccacgccggagagcgtcgaagcgggggcggtgttcgccgagatcggcccgcgcatggccgagttgagcggttcccggctggccgcgcagcaacagatggaaggcctcctggcgccgcaccggcccaaggagcccgcgtggttcctggccaccgtcggcgtctcgcccgaccaccagggcaagggtctgggcagcgccgtcgtgctccccggagtggaggcggccgagcgcgccggggtgcccgccttcctggagacctccgcgccccgcaacctccccttctacgagcggctcggcttcaccgtcaccgccgacgtcgaggtgcccgaaggaccgcgcacctggtgcatgacccgcaagcccggtgcctga

SEQ ID NO: 8172 - DNA, 3417 bp, synthetic construct; identical to SEQ ID NO: 8171
  source 1..3417: mol_type = other DNA

SEQ ID NO: 8173 - DNA, 2253 bp, synthetic construct
  source 1..2253: mol_type = other DNA
atggccttaccagtgaccgccttgctcctgccgctggccttgctgctccacgccgccaggccgctcgagatccagaaccctgatcctgccgtgtaccagctgcgggatagcaagagcagcgacaagagcgtgtgtctgttcaccgacttcgacagccagaccaacgtgtcccagagcaaggactccgacgtgtacatcaccgataagtgcgtgctggacatgcggagcatggacttcaagagcaactccgccgtggcctggtccaacaagtccgatttcgcctgcgccaacgccttcaacaacagcattatccccgaggacacattcttcccaagccccgagagcagctgcgacgtgaagctggtggaaaagagcttcgagacagacaccaacctgaacttccagatcctgtacgaggtgatcggcttcagaatcctgctgctgaaagtggccggctttaacctgctgatgaccctgcggctgtggtccagcagggccaagcgatctggatctggagcaacaaacttctcactactcaaacaagcaggtgacgtggaggagaatcccgggcctactagcatggccctgcccgtgacagccctgctgctgcctctggctctgctgctgcacgccgccagacccgatgaattcggctctgacctgggcatcaagctgctgttcgccgctgccaagggccaggacgacgaagtgcggattctgctggctgctggggccgacgtgaacgccaaggatttcgagggctacacccccctgcacgtggccgcctatgatggacacctggaaatcgtggaagtgctgctgaaggctggcgctgatgtgaatgccaaagacagccagggccggacccctctgcatgaagccgcctacagcggccatctggaaattgtggaagtgctgctgaaagccggggcagacgtgaacgctcaggacgacgctggcgagacaccagccgatctggctgcagcttggggccacgaagatatcgccgaggtgctgcagaagacgcgtgaggacctgaagaacgtgttcccacctgaggtggccgtgttcgagcctagcgaggccgagatcagccacacccagaaagccaccctcgtgtgcctggctaccggcttctaccccgaccatgtggaactgtcttggtgggtcaacggcaaagaggtgcacagcggcgtgtgtaccgacccccagccactgaaagaacagcccgccctgaacgacagccggtactgcctgagcagcagactgagagtgtccgccaccttctggcagaacccccggaaccacttcagatgccaggtgcagttctacggcctgagcgagaacgacgagtggacccaggacagagccaagcccgtgacccagatcgtgtctgccgaagcctggggcagagccgattgcggctttaccagcgagagctaccagcagggcgtgctgagcgccaccaacctgagcgtgatcggcttcagaatcctgctgctgaaagtggccggctttaacctgctgatgaccctgcggctgtggtccagccgcgccaagagaagcggatctggcgtgaagcagaccctgaatttcgacctgctgaagctggctggcgacgtggaatccaacccaggcccttctagaggccatatgaccgagtacaagcccacggtgcgcctcgccacccgcgacgacgtccccagggccgtacgcaccctcgccgccgcgttcgccgactaccccgccacgcgccacaccgtcgatccggaccgccacatcgagcgggtcaccgagctgcaagaactcttcctcacgcgcgtcgggctcgacatcggcaaggtgtgggtcgcggacgacggcgccgcggtggcggtctggaccacgccggagagcgtcgaagcgggggcggtgttcgccgagatcggcccgcgcatggccgagttgagcggttcccggctggccgcgcagcaacagatggaaggcctcctggcgccgcaccggcccaaggagcccgcgtggttcctggccaccgtcggcgtctcgcccgaccaccagggcaagggtctgggcagcgccgtcgtgctccccggagtggaggcggccgagcgcgccggggtgcccgccttcctggagacctccgcgccccgcaacctccccttctacgagcggctcggcttcaccgtcaccgccgacgtcgaggtgcccgaaggaccgcgcacctggtgcatgacccgcaagcccggtgcctga

SEQ ID NO: 8174 - DNA, 2040 bp, synthetic construct
  source 1..2040: mol_type = other DNA
atggccttaccagtgaccgccttgctcctgccgctggccttgctgctccacgccgccaggccgctcgagatccagaaccctgatcctgccgtgtaccagctgcgggatagcaagagcagcgacaagagcgtgtgtctgttcaccgacttcgacagccagaccaacgtgtcccagagcaaggactccgacgtgtacatcaccgataagtgcgtgctggacatgcggagcatggacttcaagagcaactccgccgtggcctggtccaacaagtccgatttcgcctgcgccaacgccttcaacaacagcattatccccgaggacacattcttcccaagccccgagagcagctgcgacgtgaagctggtggaaaagagcttcgagacagacaccaacctgaacttccagatcctgtacgaggtgatcggcttcagaatcctgctgctgaaagtggccggctttaacctgctgatgaccctgcggctgtggtccagcagggccaagcgatctggatctggagcaacaaacttctcactactcaaacaagcaggtgacgtggaggagaatcccgggcctactagcatggactggatttggcgcatccttttccttgtcggcgctgctaccggcgcccattccttcgaaggcagcggattcgaatacgccaaagagatgcggaacgcctactgggagatcgccctgctgcccaatctgaccaaccagcagaagagagcccccatcagaaagctgtacgacgacccctcccagagcagcgagctgctgtctgaggctaaaaaactgaacgatagccagacgcgtgaggacctgaagaacgtgttcccacctgaggtggccgtgttcgagcctagcgaggccgagatcagccacacccagaaagccaccctcgtgtgcctggctaccggcttctaccccgaccatgtggaactgtcttggtgggtcaacggcaaagaggtgcacagcggcgtgtgtaccgacccccagccactgaaagaacagcccgccctgaacgacagccggtactgcctgagcagcagactgagagtgtccgccaccttctggcagaacccccggaaccacttcagatgccaggtgcagttctacggcctgagcgagaacgacgagtggacccaggacagagccaagcccgtgacccagatcgtgtctgccgaagcctggggcagagccgattgcggctttaccagcgagagctaccagcagggcgtgctgagcgccaccaacctgagcgtgatcggcttcagaatcctgctgctgaaagtggccggctttaacctgctgatgaccctgcggctgtggtccagccgcgccaagagaagcggatctggcgtgaagcagaccctgaatttcgacctgctgaagctggctggcgacgtggaatccaacccaggcccttctagaggccatatgaccgagtacaagcccacggtgcgcctcgccacccgcgacgacgtccccagggccgtacgcaccctcgccgccgcgttcgccgactaccccgccacgcgccacaccgtcgatccggaccgccacatcgagcgggtcaccgagctgcaagaactcttcctcacgcgcgtcgggctcgacatcggcaaggtgtgggtcgcggacgacggcgccgcggtggcggtctggaccacgccggagagcgtcgaagcgggggcggtgttcgccgagatcggcccgcgcatggccgagttgagcggttcccggctggccgcgcagcaacagatggaaggcctcctggcgccgcaccggcccaaggagcccgcgtggttcctggccaccgtcggcgtctcgcccgaccaccagggcaagggtctgggcagcgccgtcgtgctccccggagtggaggcggccgagcgcgccggggtgcccgccttcctggagacctccgcgccccgcaacctccccttctacgagcggctcggcttcaccgtcaccgccgacgtcgaggtgcccgaaggaccgcgcacctggtgcatgacccgcaagcccggtgcctga

SEQ ID NO: 8175 - DNA, 2706 bp, synthetic construct
  source 1..2706: mol_type = other DNA
atggccttaccagtgaccgccttgctcctgccgctggccttgctgctccacgccgccaggccgctcgagatccagaaccctgatcctgccgtgtaccagctgcgggatagcaagagcagcgacaagagcgtgtgtctgttcaccgacttcgacagccagaccaacgtgtcccagagcaaggactccgacgtgtacatcaccgataagtgcgtgctggacatgcggagcatggacttcaagagcaactccgccgtggcctggtccaacaagtccgatttcgcctgcgccaacgccttcaacaacagcattatccccgaggacacattcttcccaagccccgagagcagctgcgacgtgaagctggtggaaaagagcttcgagacagacaccaacctgaacttccagatcctgtacgaggtgatcggcttcagaatcctgctgctgaaagtggccggctttaacctgctgatgaccctgcggctgtggtccagcagggccaagcgatctggatctggagcaacaaacttctcactactcaaacaagcaggtgacgtggaggagaatcccgggcctactagcatggccctgcccgtgacagccctgctgctgcctctggctctgctgctgcacgccgccagacccgatgaattcgaggtgcaactggtggaaagcggcggaggcctggtgcaggctggcggatctctgagactgagctgtgccgccagcggcatcaccttcagcatcaacacaatgggctggtacagacaggcccctggcaagcagagggaactggtggccctgatctccagcatcggcgacacctactacgccgacagcgtgaagggccggttcaccatcagccgggacaacgccaagaacaccgtgtacctccagatgaacagcctgaagcccgaggacaccgccgtgtactactgcaagcggttcagaacagccgcccagggcaccgattattggggccagggaacacaagtgaccgtgtcctctctcgagggaggaggcggctccgggggaggcggaagtggaggcggaggatctgggtctggaggaagcggatctggaggctcagggtcagggggctcaggcagtggaggctctttcgaagtgcaactggtggaatctgggggcggactggtgcagccaggcggaagtctgaggctgtcttgtgccgcctccggcagcatcttcggcttcaacgacatggcctggtatcggcaggctcccggaaaacagcgcgagctggtggctctgattagcagagtgggcgtgaccagcagcgccgactctgtgaagggcagattcacaatctccagagtgaacgccaaggatacagtgtacctccagatgaactctctgaaacctgaggatacagcagtgtactattgctacatggaccagcggctggacggcagcacactggcctactggggacagggaactcaagtgacagtgtctagcacgcgtgaggacctgaagaacgtgttcccacctgaggtggccgtgttcgagcctagcgaggccgagatcagccacacccagaaagccaccctcgtgtgcctggctaccggcttctaccccgaccatgtggaactgtcttggtgggtcaacggcaaagaggtgcacagcggcgtgtgtaccgacccccagccactgaaagaacagcccgccctgaacgacagccggtactgcctgagcagcagactgagagtgtccgccaccttctggcagaacccccggaaccacttcagatgccaggtgcagttctacggcctgagcgagaacgacgagtggacccaggacagagccaagcccgtgacccagatcgtgtctgccgaagcctggggcagagccgattgcggctttaccagcgagagctaccagcagggcgtgctgagcgccaccaacctgagcgtgatcggcttcagaatcctgctgctgaaagtggccggctttaacctgctgatgaccctgcggctgtggtccagccgcgccaagagaagcggatctggcgtgaagcagaccctgaatttcgacctgctgaagctggctggcgacgtggaatccaacccaggcccttctagaggccatatgaccgagtacaagcccacggtgcgcctcgccacccgcgacgacgtccccagggccgtacgcaccctcgccgccgcgttcgccgactaccccgccacgcgccacaccgtcgatccggaccgccacatcgagcgggtcaccgagctgcaagaactcttcctcacgcgcgtcgggctcgacatcggcaaggtgtgggtcgcggacgacggcgccgcggtggcggtctggaccacgccggagagcgtcgaagcgggggcggtgttcgccgagatcggcccgcgcatggccgagttgagcggttcccggctggccgcgcagcaacagatggaaggcctcctggcgccgcaccggcccaaggagcccgcgtggttcctggccaccgtcggcgtctcgcccgaccaccagggcaagggtctgggcagcgccgtcgtgctccccggagtggaggcggccgagcgcgccggggtgcccgccttcctggagacctccgcgccccgcaacctccccttctacgagcggctcggcttcaccgtcaccgccgacgtcgaggtgcccgaaggaccgcgcacctggtgcatgacccgcaagcccggtgcctga

SEQ ID NO: 8176 - DNA, 2448 bp, synthetic construct
  source 1..2448: mol_type = other DNA
atggccttaccagtgaccgccttgctcctgccgctggccttgctgctccacgccgccaggccgctcgagatccagaaccctgatcctgccgtgtaccagctgcgggatagcaagagcagcgacaagagcgtgtgtctgttcaccgacttcgacagccagaccaacgtgtcccagagcaaggactccgacgtgtacatcaccgataagtgcgtgctggacatgcggagcatggacttcaagagcaactccgccgtggcctggtccaacaagtccgatttcgcctgcgccaacgccttcaacaacagcattatccccgaggacacattcttcccaagccccgagagcagctgcgacgtgaagctggtggaaaagagcttcgagacagacaccaacctgaacttccagatcctgtacgaggtgatcggcttcagaatcctgctgctgaaagtggccggctttaacctgctgatgaccctgcggctgtggtccagcagggccaagcgatctggatctggagcaacaaacttctcactactcaaacaagcaggtgacgtggaggagaatcccgggcctactagcatggcccttccagtcactgccttgctgttgcctctggcgctcctgctccacgccgctagaccgggcatgagaaccgaggacctgcctaaggccgtggtgttcctggaaccccagtggtacagagtgctggaaaaggacagcgtgaccctgaagtgccagggcgcctacagccccgaggacaatagcacccagtggttccacaacgagagcctgatctccagccaggccagcagctacttcatcgacgccgccaccgtggacgacagcggcgagtatagatgccagaccaacctgagcaccctgagcgaccccgtgcagctggaagtgcacatcggatggctgctgctgcaggcccccagatgggtgttcaaagaagaggaccccatccacctgagatgccactcttggaagaacaccgccctgcacaaagtgacctacctgcagaacggcaagggcagaaagtacttccaccacaacagcgacttctacatccccaaggccaccctgaaggactccggctcctacttctgcagaggcctcgtgggcagcaagaacgtgtccagcgagacagtgaacatcaccatcacccagggcctggccgtgtctaccatcagcagctttttcccacccggctaccagacgcgtgaggacctgaagaacgtgttcccacctgaggtggccgtgttcgagcctagcgaggccgagatcagccacacccagaaagccaccctcgtgtgcctggctaccggcttctaccccgaccatgtggaactgtcttggtgggtcaacggcaaagaggtgcacagcggcgtgtgtaccgacccccagccactgaaagaacagcccgccctgaacgacagccggtactgcctgagcagcagactgagagtgtccgccaccttctggcagaacccccggaaccacttcagatgccaggtgcagttctacggcctgagcgagaacgacgagtggacccaggacagagccaagcccgtgacccagatcgtgtctgccgaagcctggggcagagccgattgcggctttaccagcgagagctaccagcagggcgtgctgagcgccaccaacctgagcgtgatcggcttcagaatcctgctgctgaaagtggccggctttaacctgctgatgaccctgcggctgtggtccagccgcgccaagagaagcggatctggcgtgaagcagaccctgaatttcgacctgctgaagctggctggcgacgtggaatccaacccaggcccttctagaggccatatgaccgagtacaagcccacggtgcgcctcgccacccgcgacgacgtccccagggccgtacgcaccctcgccgccgcgttcgccgactaccccgccacgcgccacaccgtcgatccggaccgccacatcgagcgggtcaccgagctgcaagaactcttcctcacgcgcgtcgggctcgacatcggcaaggtgtgggtcgcggacgacggcgccgcggtggcggtctggaccacgccggagagcgtcgaagcgggggcggtgttcgccgagatcggcccgcgcatggccgagttgagcggttcccggctggccgcgcagcaacagatggaaggcctcctggcgccgcaccggcccaaggagcccgcgtggttcctggccaccgtcggcgtctcgcccgaccaccagggcaagggtctgggcagcgccgtcgtgctccccggagtggaggcggccgagcgcgccggggtgcccgccttcctggagacctccgcgccccgcaacctccccttctacgagcggctcggcttcaccgtcaccgccgacgtcgaggtgcccgaaggaccgcgcacctggtgcatgacccgcaagcccggtgcctga

SEQ ID NO: 8177 - DNA, 2454 bp, synthetic construct
  source 1..2454: mol_type = other DNA
atggccttaccagtgaccgccttgctcctgccgctggccttgctgctccacgccgccaggccgctcgagatccagaaccctgatcctgccgtgtaccagctgcgggatagcaagagcagcgacaagagcgtgtgtctgttcaccgacttcgacagccagaccaacgtgtcccagagcaaggactccgacgtgtacatcaccgataagtgcgtgctggacatgcggagcatggacttcaagagcaactccgccgtggcctggtccaacaagtccgatttcgcctgcgccaacgccttcaacaacagcattatccccgaggacacattcttcccaagccccgagagcagctgcgacgtgaagctggtggaaaagagcttcgagacagacaccaacctgaacttccagatcctgtacgaggtgatcggcttcagaatcctgctgctgaaagtggccggctttaacctgctgatgaccctgcggctgtggtccagcagggccaagcgatctggatctggagcaacaaacttctcactactcaaacaagcaggtgacgtggaggagaatcccgggcctactagcgccaccatggccttaccagtgaccgccttgctcctgccgctggccttgctgctccacgccgccaggccgggcatgcggactgaagacctcccaaaggctgtggtgttcctggagcctcaatggtacagggtgctggagaaggacagtgtgactctgaagtgccagggagcctactcccctgaggacaattccacacagtggtttcacaatgagagcctcatctcaagccaggcctccagctacttcattgacgctgccacagtggacgacagtggagagtacaggtgccagacaaacctctccaccctcagtgacccggtgcagctagaagtccatatcggctggctgttgctccaggcccctcggtgggtgttcaaggaggaagaccctattcacctgaggtgtcacagctggaagaacactgctctgcataaggtcacatatttacagaatggcaaaggcaggaagtattttcatcataattctgacttctacattccaaaagccacactcaaagacagcggctcctacttctgcagggggcttgttgggagtaaaaatgtgtcttcagagactgtgaacatcaccatcactcaaggtttggcagtgtcaaccatctcatcattctttccacctggctaccaaacgcgtgaggacctgaagaacgtgttcccacctgaggtggccgtgttcgagcctagcgaggccgagatcagccacacccagaaagccaccctcgtgtgcctggctaccggcttctaccccgaccatgtggaactgtcttggtgggtcaacggcaaagaggtgcacagcggcgtgtgtaccgacccccagccactgaaagaacagcccgccctgaacgacagccggtactgcctgagcagcagactgagagtgtccgccaccttctggcagaacccccggaaccacttcagatgccaggtgcagttctacggcctgagcgagaacgacgagtggacccaggacagagccaagcccgtgacccagatcgtgtctgccgaagcctggggcagagccgattgcggctttaccagcgagagctaccagcagggcgtgctgagcgccaccaacctgagcgtgatcggcttcagaatcctgctgctgaaagtggccggctttaacctgctgatgaccctgcggctgtggtccagccgcgccaagagaagcggatctggcgtgaagcagaccctgaatttcgacctgctgaagctggctggcgacgtggaatccaacccaggcccttctagaggccatatgaccgagtacaagcccacggtgcgcctcgccacccgcgacgacgtccccagggccgtacgcaccctcgccgccgcgttcgccgactaccccgccacgcgccacaccgtcgatccggaccgccacatcgagcgggtcaccgagctgcaagaactcttcctcacgcgcgtcgggctcgacatcggcaaggtgtgggtcgcggacgacggcgccgcggtggcggtctggaccacgccggagagcgtcgaagcgggggcggtgttcgccgagatcggcccgcgcatggccgagttgagcggttcccggctggccgcgcagcaacagatggaaggcctcctggcgccgcaccggcccaaggagcccgcgtggttcctggccaccgtcggcgtctcgcccgaccaccagggcaagggtctgggcagcgccgtcgtgctccccggagtggaggcggccgagcgcgccggggtgcccgccttcctggagacctccgcgccccgcaacctccccttctacgagcggctcggcttcaccgtcaccgccgacgtcgaggtgcccgaaggaccgcgcacctggtgcatgacccgcaagcccggtgcctga

SEQ ID NO: 8178 - DNA, 2598 bp, synthetic construct; identical to SEQ ID NO: 8142
  source 1..2598: mol_type = other DNA

SEQ ID NO: 8179 - DNA, 2601 bp, synthetic construct; identical to SEQ ID NO: 8143
  source 1..2601: mol_type = other DNA

SEQ ID NO: 8180 - DNA, 2604 bp, synthetic construct; identical to SEQ ID NO: 8144
  source 1..2604: mol_type = other DNA

SEQ ID NO: 8181 - DNA, 2592 bp, synthetic construct; identical to SEQ ID NO: 8145
  source 1..2592: mol_type = other DNA

SEQ ID NO: 8182 - DNA, 2604 bp, synthetic construct; identical to SEQ ID NO: 8146
  source 1..2604: mol_type = other DNA

SEQ ID NO: 8183 - DNA, 2610 bp, synthetic construct; identical to SEQ ID NO: 8147
  source 1..2610: mol_type = other DNA

SEQ ID NO: 8184 - DNA, 2604 bp, synthetic construct; identical to SEQ ID NO: 8148
  source 1..2604: mol_type = other DNA

SEQ ID NO: 8185 - DNA, 2598 bp, synthetic construct; identical to SEQ ID NO: 8149
  source 1..2598: mol_type = other DNA

SEQ ID NO: 8186 - DNA, 2235 bp, synthetic construct; identical to SEQ ID NO: 8150
  source 1..2235: mol_type = other DNA

SEQ ID NO: 8187 - DNA, 2235 bp, synthetic construct; identical to SEQ ID NO: 8150
  source 1..2235: mol_type = other DNA

SEQ ID NO: 8188 - DNA, 3030 bp, synthetic construct; identical to SEQ ID NO: 8152
  source 1..3030: mol_type = other DNA

SEQ ID NO: 8189 - DNA, 3417 bp, synthetic construct; identical to SEQ ID NO: 8153
  source 1..3417: mol_type = other DNA

SEQ ID NO: 8190 - DNA, 3417 bp, synthetic construct; identical to SEQ ID NO: 8153
  source 1..3417: mol_type = other DNA

SEQ ID NO: 8191 - DNA, 2253 bp, synthetic construct; identical to SEQ ID NO: 8155
  source 1..2253: mol_type = other DNA

SEQ ID NO: 8192 - DNA, 2040 bp, synthetic construct; identical to SEQ ID NO: 8156
  source 1..2040: mol_type = other DNA

SEQ ID NO: 8193 - DNA, 2706 bp, synthetic construct; identical to SEQ ID NO: 8157
  source 1..2706: mol_type = other DNA

SEQ ID NO: 8194 - DNA, 2448 bp, synthetic construct; identical to SEQ ID NO: 8158
  source 1..2448: mol_type = other DNA

SEQ ID NO: 8195 - DNA, 2454 bp, synthetic construct; identical to SEQ ID NO: 8159
  source 1..2454: mol_type = other DNA

SEQ ID NO: 8196 - DNA, 2598 bp, synthetic construct; identical to SEQ ID NO: 8160
  source 1..2598: mol_type = other DNA

SEQ ID NO: 8197 - DNA, 2601 bp, synthetic construct; identical to SEQ ID NO: 8161
  source 1..2601: mol_type = other DNA

SEQ ID NO: 8198 - DNA, 2604 bp, synthetic construct; identical to SEQ ID NO: 8162
  source 1..2604: mol_type = other DNA

SEQ ID NO: 8199 - DNA, 2592 bp, synthetic construct; identical to SEQ ID NO: 8163
  source 1..2592: mol_type = other DNA

SEQ ID NO: 8200 - DNA, 2604 bp, synthetic construct; identical to SEQ ID NO: 8164
  source 1..2604: mol_type = other DNA

SEQ ID NO: 8201 - DNA, 2610 bp, synthetic construct; identical to SEQ ID NO: 8165
  source 1..2610: mol_type = other DNA

SEQ ID NO: 8202 - DNA, 2604 bp, synthetic construct; identical to SEQ ID NO: 8166
  source 1..2604: mol_type = other DNA

SEQ ID NO: 8203 - DNA, 2598 bp, synthetic construct; identical to SEQ ID NO: 8167
  source 1..2598: mol_type = other DNA

SEQ ID NO: 8204 - DNA, 2235 bp, synthetic construct; identical to SEQ ID NO: 8168
  source 1..2235: mol_type = other DNA

SEQ ID NO: 8205 - DNA, 2235 bp, synthetic construct; identical to SEQ ID NO: 8168
  source 1..2235: mol_type = other DNA

SEQ ID NO: 8206 - DNA, 3030 bp, synthetic construct; identical to SEQ ID NO: 8170
  source 1..3030: mol_type = other DNA

SEQ ID NO: 8207 - DNA, 3417 bp, synthetic construct; identical to SEQ ID NO: 8171
  source 1..3417: mol_type = other DNA

SEQ ID NO: 8208 - DNA, 3417 bp, synthetic construct; identical to SEQ ID NO: 8171
  source 1..3417: mol_type = other DNA

SEQ ID NO: 8209 - DNA, 2253 bp, synthetic construct; identical to SEQ ID NO: 8173
  source 1..2253: mol_type = other DNA

SEQ ID NO: 8210 - DNA, 2040 bp, synthetic construct; identical to SEQ ID NO: 8174
  source 1..2040: mol_type = other DNA

SEQ ID NO: 8211 - DNA, 2706 bp, synthetic construct; identical to SEQ ID NO: 8175
  source 1..2706: mol_type = other DNA

SEQ ID NO: 8212 - DNA, 2448 bp, synthetic construct; identical to SEQ ID NO: 8176
  source 1..2448: mol_type = other DNA

SEQ ID NO: 8213 - DNA, 2454 bp, synthetic construct; identical to SEQ ID NO: 8177
  source 1..2454: mol_type = other DNA

SEQ ID NO: 8214 - DNA, 2606 bp, synthetic construct
  source 1..2606: mol_type = other DNA
atggccttaccagtgaccgccttgctcctgccgctggccttgctgctccacgccgccaggccgctcgaggaggacctgaagaacgtgttcccacctgaggtggccgtgttcgagcctagcgaggccgagatcagccacacccagaaagccaccctcgtgtgcctggctaccggcttctaccccgaccatgtggaactgtcttggtgggtcaacggcaaagaggtgcacagcggcgtgtctaccgacccccagccactgaaagaacagcccgccctgaacgacagccggtactgcctgagcagcagactgagagtgtccgccaccttctggcagaacccccggaaccacttcagatgccaggtgcagttctacggcctgagcgagaacgacgagtggacccaggacagagccaagcccgtgacccagatcgtgtctgccgaagcctggggcagagccgattgcgacgtgaagctggtggaaaagagcttcgagacagacaccaacctgaacttccagaacctgagcgtgatcggcttcagaatcctgctgctgaaagtggccggctttaacctgctgatgaccctgcggctgtggtccagcagggccaagcgatctggatctggagcaacaaacttctcactactcaaacaagcaggtgacgtggaggagaatcccgggcctactagcatggccttaccagtgaccgccttgctcctgccgctggccttgctgctccacgccgccaggccggacatccagatgacacagactacatcctccctgtctgcctctctgggagacagagtcaccatcagttgcagggcaagtcaggacattagtaaatatttaaattggtatcagcagaaaccagatggaactgttaaactcctgatctaccatacatcaagattacactcaggagtcccatcaaggttcagtggcagtgggtctggaacagattattctctcaccattagcaacctggagcaagaagatattgccacttacttttgccaacagggtaatacgcttccgtacacgttcggaggggggaccaagctggagatcacaggtggcggtggctcgggcggtggtgggtcgggtggcggcggatctgaggtgaaactgcaggagtcaggacctggcctggtggcgccctcacagagcctgtccgtcacatgcactgtctcaggggtctcattacccgactatggtgtaagctggattcgccagcctccacgaaagggtctggagtggctgggagtaatatggggtagtgaaaccacatactataattcagctctcaaatccagactgaccatcatcaaggacaactccaagagccaagttttcttaaaaatgaacagtctgcaaactgatgacacagccatttactactgtgccaaacattattactacggtggtagctatgctatggactactggggtcaaggaacctcagtcaccgtctcctcaacgcgtatccagaaccctgatcctgccgtgtaccagctgcgggatagcaagagcagcgacaagagcgtgtgtctgttcaccgacttcgacagccagaccaacgtgtcccagagcaaggactccgacgtgtacatcaccgataagaccgtgctggacatgcggagcatggacttcaagagcaactccgccgtggcctggtccaacaagtccgatttcgcctgcgccaacgccttcaacaacagcattatccccgaggacacattcttcccaagccccgagagcagctgcggctttaccagcgagagctaccagcagggcgtgctgagcgccaccatcctgtacgagacctgagcgtgatcggcttcagaatcctgctgctgaaagtggccggctttaacctgctgatgaccctgcggctgtggtccagccgcgccaagagaagcggatctggcgtgaagcagaccctgaatttcgacctgctgaagctggctggcgacgtggaatccaacccaggcccttctagaggccatatgaccgagtacaagcccacggtgcgcctcgccacccgcgacgacgtccccagggccgtacgcaccctcgccgccgcgttcgccgactaccccgccacgcgccacaccgtcgatccggaccgccacatcgagcgggtcaccgagctgcaagaactcttcctcacgcgcgtcgggctcgacatcggcaaggtgtgggtcgcggacgacggcgccgcggtggcggtctggaccacgccggagagcgtcgaagcgggggcggtgttcgccgagatcggcccgcgcatggccgagttgagcggttcccggctggccgcgcagcaacagatggaaggcctcctggcgccgcaccggcccaaggagcccgcgtggttcctggccaccgtcggcgtctcgcccgaccaccagggcaagggtctgggcagcgccgtcgtgctccccggagtggaggcggccgagcgcgccggggtgcccgccttcctggagacctccgcgccccgcaacctccccttctacgagcggctcggcttcaccgtcaccgccgacgtcgaggtgcccgaaggaccgcgcacctggtgcatgacccgcaagcccggtgcctga

SEQ ID NO: 8215 - DNA, 2609 bp, synthetic construct
  source 1..2609: mol_type = other DNA
atggccttaccagtgaccgccttgctcctgccgctggccttgctgctccacgccgccaggccgctcgaggaggacctgaagaacgtgttcccacctgaggtggccgtgttcgagcctagcgaggccgagatcagccacacccagaaagccaccctcgtgtgcctggctaccggcttctaccccgaccatgtggaactgtcttggtgggtcaacggcaaagaggtgcacagcggcgtgtctaccgacccccagccactgaaagaacagcccgccctgaacgacagccggtactgcctgagcagcagactgagagtgtccgccaccttctggcagaacccccggaaccacttcagatgccaggtgcagttctacggcctgagcgagaacgacgagtggacccaggacagagccaagcccgtgacccagatcgtgtctgccgaagcctggggcagagccgattgcgacgtgaagctggtggaaaagagcttcgagacagacaccaacctgaacttccagaacctgagcgtgatcggcttcagaatcctgctgctgaaagtggccggctttaacctgctgatgaccctgcggctgtggtccagcagggccaagcgatctggatctggagcaacaaacttctcactactcaaacaagcaggtgacgtggaggagaatcccgggcctactagcaccatggccttaccagtgaccgccttgctcctgccgctggccttgctgctccacgccgccaggccggagatcgtgatgacccagagccctgccaccctgtctctgagccctggcgaaagagccaccctgagctgtagagccagccaggacatcagcaagtacctgaactggtatcagcagaagcccggccaggcccccagactgctgatctaccacaccagcagactgcacagcggcatccccgccagattttctggctctggcagcggcaccgactacaccctgacaatcagcagcctccagcccgaggacttcgccgtgtacttctgtcagcaaggcaacaccctgccctacaccttcggccagggcaccaagctggaaatcaagggcggaggcggaagtggaggcggaggatctggcggcggaggctctcaggtgcaactccaggaatctggccctggcctcgtgaagcccagcgagacactgagcctgacctgtaccgtgtccggcgtgtccctgcctgactatggcgtgtcctggatcagacagccccctggcaagggcctggaatggatcggagtgatttggggcagcgaaaccacctactacaacagctccctgaagtccagagtgaccatctccaaggacaactccaagaaccaggtgtccctgaagctgagcagcgtgacagccgccgacaccgccgtgtattactgcgccaagcactactactacggcggcagctacgctatggactactggggccagggaaccctcgtgaccgtgtctagtacgcgtatccagaaccctgatcctgccgtgtaccagctgcgggatagcaagagcagcgacaagagcgtgtgtctgttcaccgacttcgacagccagaccaacgtgtcccagagcaaggactccgacgtgtacatcaccgataagaccgtgctggacatgcggagcatggacttcaagagcaactccgccgtggcctggtccaacaagtccgatttcgcctgcgccaacgccttcaacaacagcattatccccgaggacacattcttcccaagccccgagagcagctgcggctttaccagcgagagctaccagcagggcgtgctgagcgccaccatcctgtacgagacctgagcgtgatcggcttcagaatcctgctgctgaaagtggccggctttaacctgctgatgaccctgcggctgtggtccagccgcgccaagagaagcggatctggcgtgaagcagaccctgaatttcgacctgctgaagctggctggcgacgtggaatccaacccaggcccttctagaggccatatgaccgagtacaagcccacggtgcgcctcgccacccgcgacgacgtccccagggccgtacgcaccctcgccgccgcgttcgccgactaccccgccacgcgccacaccgtcgatccggaccgccacatcgagcgggtcaccgagctgcaagaactcttcctcacgcgcgtcgggctcgacatcggcaaggtgtgggtcgcggacgacggcgccgcggtggcggtctggaccacgccggagagcgtcgaagcgggggcggtgttcgccgagatcggcccgcgcatggccgagttgagcggttcccggctggccgcgcagcaacagatggaaggcctcctggcgccgcaccggcccaaggagcccgcgtggttcctggccaccgtcggcgtctcgcccgaccaccagggcaagggtctgggcagcgccgtcgtgctccccggagtggaggcggccgagcgcgccggggtgcccgccttcctggagacctccgcgccccgcaacctccccttctacgagcggctcggcttcaccgtcaccgccgacgtcgaggtgcccgaaggaccgcgcacctggtgcatgacccgcaagcccggtgcctga

SEQ ID NO: 8216 - DNA, 2612 bp, synthetic construct
  source 1..2612: mol_type = other DNA
atggccttaccagtgaccgccttgctcctgccgctggccttgctgctccacgccgccaggccgctcgaggaggacctgaagaacgtgttcccacctgaggtggccgtgttcgagcctagcgaggccgagatcagccacacccagaaagccaccctcgtgtgcctggctaccggcttctaccccgaccatgtggaactgtcttggtgggtcaacggcaaagaggtgcacagcggcgtgtctaccgacccccagccactgaaagaacagcccgccctgaacgacagccggtactgcctgagcagcagactgagagtgtccgccaccttctggcagaacccccggaaccacttcagatgccaggtgcagttctacggcctgagcgagaacgacgagtggacccaggacagagccaagcccgtgacccagatcgtgtctgccgaagcctggggcagagccgattgcgacgtgaagctggtggaaaagagcttcgagacagacaccaacctgaacttccagaacctgagcgtgatcggcttcagaatcctgctgctgaaagtggccggctttaacctgctgatgaccctgcggctgtggtccagcagggccaagcgatctggatctggagcaacaaacttctcactactcaaacaagcaggtgacgtggaggagaatcccgggcctactagcaccatggccttaccagtgaccgccttgctcctgccgctggccttgctgctccacgccgccaggccggacgagatcgtgctgacacagagccccgccaccctgtcactgtctccaggcgaaagagccaccctgagctgtagcgccagcagcagcgtgtcctacatgcactggtatcagcagaagcccggccaggcccccagactgctgatctacgataccagcaagctggcctccggcatccccgccagattttctggcagcggctccggcaccgacttcaccctgacaatcagcagcctggaacccgaggacgtggccgtgtactactgttttcaaggcagcgtgtaccccttcaccttcggccagggcaccaagctggaaatcaagagaggtggcggtggctcgggcggtggtgggtcgggtggcggcggatctcaggtgcagctccaggaatctggccctggcctcgtgaagcctagccagaccctgagcctgacctgtaccgtgtctggcggcagcatcagcacaagcggcatgggcgtgggctggatcagacagcaccctggcaagggcctggaatggatcggccacatttggtgggacgacgacaagcggtacaaccccgccctgaagtccagagtgaccatcagcgtggacaccagcaagaaccagttcagcctgaagctgagcagcgtgacagccgccgataccgccgtgtattattgcgcccggatggaactgtggtcctactacttcgactactggggccagggaaccctcgtgaccgtgtctagtacgcgtatccagaaccctgatcctgccgtgtaccagctgcgggatagcaagagcagcgacaagagcgtgtgtctgttcaccgacttcgacagccagaccaacgtgtcccagagcaaggactccgacgtgtacatcaccgataagaccgtgctggacatgcggagcatggacttcaagagcaactccgccgtggcctggtccaacaagtccgatttcgcctgcgccaacgccttcaacaacagcattatccccgaggacacattcttcccaagccccgagagcagctgcggctttaccagcgagagctaccagcagggcgtgctgagcgccaccatcctgtacgagacctgagcgtgatcggcttcagaatcctgctgctgaaagtggccggctttaacctgctgatgaccctgcggctgtggtccagccgcgccaagagaagcggatctggcgtgaagcagaccctgaatttcgacctgctgaagctggctggcgacgtggaatccaacccaggcccttctagaggccatatgaccgagtacaagcccacggtgcgcctcgccacccgcgacgacgtccccagggccgtacgcaccctcgccgccgcgttcgccgactaccccgccacgcgccacaccgtcgatccggaccgccacatcgagcgggtcaccgagctgcaagaactcttcctcacgcgcgtcgggctcgacatcggcaaggtgtgggtcgcggacgacggcgccgcggtggcggtctggaccacgccggagagcgtcgaagcgggggcggtgttcgccgagatcggcccgcgcatggccgagttgagcggttcccggctggccgcgcagcaacagatggaaggcctcctggcgccgcaccggcccaaggagcccgcgtggttcctggccaccgtcggcgtctcgcccgaccaccagggcaagggtctgggcagcgccgtcgtgctccccggagtggaggcggccgagcgcgccggggtgcccgccttcctggagacctccgcgccccgcaacctccccttctacgagcggctcggcttcaccgtcaccgccgacgtcgaggtgcccgaaggaccgcgcacctggtgcatgacccgcaagcccggtgcctga

SEQ ID NO: 8217 - DNA, 2600 bp, synthetic construct
  source 1..2600: mol_type = other DNA
atggccttaccagtgaccgccttgctcctgccgctggccttgctgctccacgccgccaggccgctcgaggaggacctgaagaacgtgttcccacctgaggtggccgtgttcgagcctagcgaggccgagatcagccacacccagaaagccaccctcgtgtgcctggctaccggcttctaccccgaccatgtggaactgtcttggtgggtcaacggcaaagaggtgcacagcggcgtgtctaccgacccccagccactgaaagaacagcccgccctgaacgacagccggtactgcctgagcagcagactgagagtgtccgccaccttctggcagaacccccggaaccacttcagatgccaggtgcagttctacggcctgagcgagaacgacgagtggacccaggacagagccaagcccgtgacccagatcgtgtctgccgaagcctggggcagagccgattgcgacgtgaagctggtggaaaagagcttcgagacagacaccaacctgaacttccagaacctgagcgtgatcggcttcagaatcctgctgctgaaagtggccggctttaacctgctgatgaccctgcggctgtggtccagcagggccaagcgatctggatctggagcaacaaacttctcactactcaaacaagcaggtgacgtggaggagaatcccgggcctactagcatggccttaccagtgaccgccttgctcctgccgctggccttgctgctccacgccgccaggccggacatccagatgacacagagccctagcagcctgtctgccagcgtgggagacagagtgaccatcacctgtagagccagccaggacatcagcaactacctgaactggtatcagcagaagcccggcaaggcccctaagctgctgatctactacaccagcagactgcacagcggcgtgcccagcagattttctggctctggcagcggcaccgacttcaccctgacaatatctagcctccagcctgaggacttcgccacctactattgccagcagggcaacaccctgccttacacatttggacagggcaccaaggtggaaatcaagagaggcggaggcggaagtggaggcggaggatctggcggcggaggctctgaagtgcagctggttgaatcaggtggcggcctggttcaacctggcggatctctgagactgagctgtgccgccagcggcttcaccttcagcgactactttatgagctgggtccgacaggcccctggcaaaggacttgaatgggtcgccaccatcagcaatggcggcacctacacttactaccccgacagcgtgaagggcagattcaccatctccagagacaacagcaagaacaccctgtacctccagatgaactccctgagagccgaggacaccgccgtgtactactgcgccagattcgacggctacatcttcgactattggggccagggcaccctggtcacagtctcttctacgcgtatccagaaccctgatcctgccgtgtaccagctgcgggatagcaagagcagcgacaagagcgtgtgtctgttcaccgacttcgacagccagaccaacgtgtcccagagcaaggactccgacgtgtacatcaccgataagaccgtgctggacatgcggagcatggacttcaagagcaactccgccgtggcctggtccaacaagtccgatttcgcctgcgccaacgccttcaacaacagcattatccccgaggacacattcttcccaagccccgagagcagctgcggctttaccagcgagagctaccagcagggcgtgctgagcgccaccatcctgtacgagacctgagcgtgatcggcttcagaatcctgctgctgaaagtggccggctttaacctgctgatgaccctgcggctgtggtccagccgcgccaagagaagcggatctggcgtgaagcagaccctgaatttcgacctgctgaagctggctggcgacgtggaatccaacccaggcccttctagaggccatatgaccgagtacaagcccacggtgcgcctcgccacccgcgacgacgtccccagggccgtacgcaccctcgccgccgcgttcgccgactaccccgccacgcgccacaccgtcgatccggaccgccacatcgagcgggtcaccgagctgcaagaactcttcctcacgcgcgtcgggctcgacatcggcaaggtgtgggtcgcggacgacggcgccgcggtggcggtctggaccacgccggagagcgtcgaagcgggggcggtgttcgccgagatcggcccgcgcatggccgagttgagcggttcccggctggccgcgcagcaacagatggaaggcctcctggcgccgcaccggcccaaggagcccgcgtggttcctggccaccgtcggcgtctcgcccgaccaccagggcaagggtctgggcagcgccgtcgtgctccccggagtggaggcggccgagcgcgccggggtgcccgccttcctggagacctccgcgccccgcaacctccccttctacgagcggctcggcttcaccgtcaccgccgacgtcgaggtgcccgaaggaccgcgcacctggtgcatgacccgcaagcccggtgcctga

SEQ ID NO: 8218 - DNA, 2612 bp, synthetic construct
  source 1..2612: mol_type = other DNA
atggccttaccagtgaccgccttgctcctgccgctggccttgctgctccacgccgccaggccgctcgaggaggacctgaagaacgtgttcccacctgaggtggccgtgttcgagcctagcgaggccgagatcagccacacccagaaagccaccctcgtgtgcctggctaccggcttctaccccgaccatgtggaactgtcttggtgggtcaacggcaaagaggtgcacagcggcgtgtctaccgacccccagccactgaaagaacagcccgccctgaacgacagccggtactgcctgagcagcagactgagagtgtccgccaccttctggcagaacccccggaaccacttcagatgccaggtgcagttctacggcctgagcgagaacgacgagtggacccaggacagagccaagcccgtgacccagatcgtgtctgccgaagcctggggcagagccgattgcgacgtgaagctggtggaaaagagcttcgagacagacaccaacctgaacttccagaacctgagcgtgatcggcttcagaatcctgctgctgaaagtggccggctttaacctgctgatgaccctgcggctgtggtccagcagggccaagcgatctggatctggagcaacaaacttctcactactcaaacaagcaggtgacgtggaggagaatcccgggcctactagcatggccttaccagtgaccgccttgctcctgccgctggccttgctgctccacgccgccaggccggacatccagatgacacagagccctagcagcctgtctgccagcgtgggagacagagtgaccatcacatgcaaggccagcgaccacatcaacaactggctggcctggtatcagcagaagcctggacaggcccctaagctgctgatctacggcgctaccacactggaaacaggcgtgcccagcagattttctggcagcggctctggcaccgactacaccctgacaatatccagcctccagcctgaggacttcgccacctactactgtcagcagagctggaacaccccttggacattcggccagggcaccaagctggaaatcaagagaggcggaggcggaagtggaggcggaggatctggcggcggaggctctcaagttcagcttcaacagcctggcgctgagctggtcaaacctggcgcttctgtgaagatgagctgcaaagccagcggctacgccttcagcagctactggatcaactggatgaagcagaaacccggccagggactcgaatggatcggccaaatctatcccggcgacggcgacaccaactacaacggcaagttcaagggcagagccacactgaccgccgatacctctagcagcacagcctacatgcagctgagcagcctgaccagcgaagatagcgccgtgtacttctgtgcccggtccatcacaacagtcgtgggctgcgctatggactattggggccagggaacaagcgtgaccgtgtctagtacgcgtatccagaaccctgatcctgccgtgtaccagctgcgggatagcaagagcagcgacaagagcgtgtgtctgttcaccgacttcgacagccagaccaacgtgtcccagagcaaggactccgacgtgtacatcaccgataagaccgtgctggacatgcggagcatggacttcaagagcaactccgccgtggcctggtccaacaagtccgatttcgcctgcgccaacgccttcaacaacagcattatccccgaggacacattcttcccaagccccgagagcagctgcggctttaccagcgagagctaccagcagggcgtgctgagcgccaccatcctgtacgagacctgagcgtgatcggcttcagaatcctgctgctgaaagtggccggctttaacctgctgatgaccctgcggctgtggtccagccgcgccaagagaagcggatctggcgtgaagcagaccctgaatttcgacctgctgaagctggctggcgacgtggaatccaacccaggcccttctagaggccatatgaccgagtacaagcccacggtgcgcctcgccacccgcgacgacgtccccagggccgtacgcaccctcgccgccgcgttcgccgactaccccgccacgcgccacaccgtcgatccggaccgccacatcgagcgggtcaccgagctgcaagaactcttcctcacgcgcgtcgggctcgacatcggcaaggtgtgggtcgcggacgacggcgccgcggtggcggtctggaccacgccggagagcgtcgaagcgggggcggtgttcgccgagatcggcccgcgcatggccgagttgagcggttcccggctggccgcgcagcaacagatggaaggcctcctggcgccgcaccggcccaaggagcccgcgtggttcctggccaccgtcggcgtctcgcccgaccaccagggcaagggtctgggcagcgccgtcgtgctccccggagtggaggcggccgagcgcgccggggtgcccgccttcctggagacctccgcgccccgcaacctccccttctacgagcggctcggcttcaccgtcaccgccgacgtcgaggtgcccgaaggaccgcgcacctggtgcatgacccgcaagcccggtgcctga

SEQ ID NO: 8219 - DNA, 2618 bp, synthetic construct
  source 1..2618: mol_type = other DNA
atggccttaccagtgaccgccttgctcctgccgctggccttgctgctccacgccgccaggccgctcgaggaggacctgaagaacgtgttcccacctgaggtggccgtgttcgagcctagcgaggccgagatcagccacacccagaaagccaccctcgtgtgcctggctaccggcttctaccccgaccatgtggaactgtcttggtgggtcaacggcaaagaggtgcacagcggcgtgtctaccgacccccagccactgaaagaacagcccgccctgaacgacagccggtactgcctgagcagcagactgagagtgtccgccaccttctggcagaacccccggaaccacttcagatgccaggtgcagttctacggcctgagcgagaacgacgagtggacccaggacagagccaagcccgtgacccagatcgtgtctgccgaagcctggggcagagccgattgcgacgtgaagctggtggaaaagagcttcgagacagacaccaacctgaacttccagaacctgagcgtgatcggcttcagaatcctgctgctgaaagtggccggctttaacctgctgatgaccctgcggctgtggtccagcagggccaagcgatctggatctggagcaacaaacttctcactactcaaacaagcaggtgacgtggaggagaatcccgggcctactagcatggccttaccagtgaccgccttgctcctgccgctggccttgctgctccacgccgccaggccgcagatcgtgctgtctcagtctcctgccatcctgagcgcttccccaggcgagaaagtgaccatgacctgtagagccagcagcagcgtgtcctacatgcactggtatcagcagaagcccggcagcagccctaagccttggatctacgccaccagcaatctggcctctggcgtgccagccagattttctggctctggcagcggcaccagctacagcttcacaatcagcagagtggaagccgaggacgccgccacctactattgtcagcagtggaccttcaatcctcctaccttcggcggaggcacccggctggaaatcaaaagaacagtggctgctggcggaggcggaagtggaggcggaggatctggcggcggaggctctcaggcttatctgcaacagagcggagccgaactcgtcagacctggcgcttctgtgaagatgagctgcaaggccagcggctacaccttcaccagctataatatgcactgggtcaagcagacccctcggcagggactcgaatggatcggcggaatctatcccggcaacggcgacacctcctacaaccagaagttcaagggcaaagccacactgaccgtgggcaagagcagcagcaccgcctatatgcagctcagcagcctgaccagcgaggacagcgccgtgtacttctgcgccagatacgactacaactacgctatggactactggggccagggcaccagcgtgacagttagctctgccagcacgcgtatccagaaccctgatcctgccgtgtaccagctgcgggatagcaagagcagcgacaagagcgtgtgtctgttcaccgacttcgacagccagaccaacgtgtcccagagcaaggactccgacgtgtacatcaccgataagaccgtgctggacatgcggagcatggacttcaagagcaactccgccgtggcctggtccaacaagtccgatttcgcctgcgccaacgccttcaacaacagcattatccccgaggacacattcttcccaagccccgagagcagctgcggctttaccagcgagagctaccagcagggcgtgctgagcgccaccatcctgtacgagacctgagcgtgatcggcttcagaatcctgctgctgaaagtggccggctttaacctgctgatgaccctgcggctgtggtccagccgcgccaagagaagcggatctggcgtgaagcagaccctgaatttcgacctgctgaagctggctggcgacgtggaatccaacccaggcccttctagaggccatatgaccgagtacaagcccacggtgcgcctcgccacccgcgacgacgtccccagggccgtacgcaccctcgccgccgcgttcgccgactaccccgccacgcgccacaccgtcgatccggaccgccacatcgagcgggtcaccgagctgcaagaactcttcctcacgcgcgtcgggctcgacatcggcaaggtgtgggtcgcggacgacggcgccgcggtggcggtctggaccacgccggagagcgtcgaagcgggggcggtgttcgccgagatcggcccgcgcatggccgagttgagcggttcccggctggccgcgcagcaacagatggaaggcctcctggcgccgcaccggcccaaggagcccgcgtggttcctggccaccgtcggcgtctcgcccgaccaccagggcaagggtctgggcagcgccgtcgtgctccccggagtggaggcggccgagcgcgccggggtgcccgccttcctggagacctccgcgccccgcaacctccccttctacgagcggctcggcttcaccgtcaccgccgacgtcgaggtgcccgaaggaccgcgcacctggtgcatgacccgcaagcccggtgcctga

SEQ ID NO: 8220 - DNA, 2612 bp, synthetic construct
  source 1..2612: mol_type = other DNA
atggccttaccagtgaccgccttgctcctgccgctggccttgctgctccacgccgccaggccgctcgaggaggacctgaagaacgtgttcccacctgaggtggccgtgttcgagcctagcgaggccgagatcagccacacccagaaagccaccctcgtgtgcctggctaccggcttctaccccgaccatgtggaactgtcttggtgggtcaacggcaaagaggtgcacagcggcgtgtctaccgacccccagccactgaaagaacagcccgccctgaacgacagccggtactgcctgagcagcagactgagagtgtccgccaccttctggcagaacccccggaaccacttcagatgccaggtgcagttctacggcctgagcgagaacgacgagtggacccaggacagagccaagcccgtgacccagatcgtgtctgccgaagcctggggcagagccgattgcgacgtgaagctggtggaaaagagcttcgagacagacaccaacctgaacttccagaacctgagcgtgatcggcttcagaatcctgctgctgaaagtggccggctttaacctgctgatgaccctgcggctgtggtccagcagggccaagcgatctggatctggagcaacaaacttctcactactcaaacaagcaggtgacgtggaggagaatcccgggcctactagcatggccttaccagtgaccgccttgctcctgccgctggccttgctgctccacgccgccaggccggagatcgtgctgacacagagccctgccaccctgtctctgagccctggcgaaagagccaccctgagctgtagagccagccagagcgtgtccagctacctggcctggtatcagcagaagcccggccaggctccccggctgctgatctacgatgccagcaatagagccaccggcatccccgccagattttccggctctggcagcggcaccgacttcaccctgaccatcagctccctggaacccgaggacttcgccgtgtactactgccagcagcggagcaactggcccatcacattcggccagggcacccggctggaaatcaaaggcggaggcggaagtggaggcggaggatctggcggcggaggctctgaggtgcagcttgttgagtctggcggaggactggtgcagcccgatagaagcctgagactgtcttgtgccgccagcggcttcaccttccacgattatgccatgcactgggtccgacaggcccctggcaaaggacttgaatgggtgtccaccatctcttggaacagcggcacaatcggctacgccgactctgtgaagggcagattcaccatcagccgggacaacgccaagaacagcctgtacctccagatgaactccctgagagccgaggacacagccctgtactactgcgccaaggacatccagtacggcaactactactacggcatggacgtgtggggccagggcacaacagtgacagtctcttctacgcgtatccagaaccctgatcctgccgtgtaccagctgcgggatagcaagagcagcgacaagagcgtgtgtctgttcaccgacttcgacagccagaccaacgtgtcccagagcaaggactccgacgtgtacatcaccgataagaccgtgctggacatgcggagcatggacttcaagagcaactccgccgtggcctggtccaacaagtccgatttcgcctgcgccaacgccttcaacaacagcattatccccgaggacacattcttcccaagccccgagagcagctgcggctttaccagcgagagctaccagcagggcgtgctgagcgccaccatcctgtacgagacctgagcgtgatcggcttcagaatcctgctgctgaaagtggccggctttaacctgctgatgaccctgcggctgtggtccagccgcgccaagagaagcggatctggcgtgaagcagaccctgaatttcgacctgctgaagctggctggcgacgtggaatccaacccaggcccttctagaggccatatgaccgagtacaagcccacggtgcgcctcgccacccgcgacgacgtccccagggccgtacgcaccctcgccgccgcgttcgccgactaccccgccacgcgccacaccgtcgatccggaccgccacatcgagcgggtcaccgagctgcaagaactcttcctcacgcgcgtcgggctcgacatcggcaaggtgtgggtcgcggacgacggcgccgcggtggcggtctggaccacgccggagagcgtcgaagcgggggcggtgttcgccgagatcggcccgcgcatggccgagttgagcggttcccggctggccgcgcagcaacagatggaaggcctcctggcgccgcaccggcccaaggagcccgcgtggttcctggccaccgtcggcgtctcgcccgaccaccagggcaagggtctgggcagcgccgtcgtgctccccggagtggaggcggccgagcgcgccggggtgcccgccttcctggagacctccgcgccccgcaacctccccttctacgagcggctcggcttcaccgtcaccgccgacgtcgaggtgcccgaaggaccgcgcacctggtgcatgacccgcaagcccggtgcctga

SEQ ID NO: 8221 - DNA, 2606 bp, synthetic construct
  source 1..2606: mol_type = other DNA
atggccttaccagtgaccgccttgctcctgccgctggccttgctgctccacgccgccaggccgctcgaggaggacctgaagaacgtgttcccacctgaggtggccgtgttcgagcctagcgaggccgagatcagccacacccagaaagccaccctcgtgtgcctggctaccggcttctaccccgaccatgtggaactgtcttggtgggtcaacggcaaagaggtgcacagcggcgtgtctaccgacccccagccactgaaagaacagcccgccctgaacgacagccggtactgcctgagcagcagactgagagtgtccgccaccttctggcagaacccccggaaccacttcagatgccaggtgcagttctacggcctgagcgagaacgacgagtggacccaggacagagccaagcccgtgacccagatcgtgtctgccgaagcctggggcagagccgattgcgacgtgaagctggtggaaaagagcttcgagacagacaccaacctgaacttccagaacctgagcgtgatcggcttcagaatcctgctgctgaaagtggccggctttaacctgctgatgaccctgcggctgtggtccagcagggccaagcgatctggatctggagcaacaaacttctcactactcaaacaagcaggtgacgtggaggagaatcccgggcctactagcatggccttaccagtgaccgccttgctcctgccgctggccttgctgctccacgccgccaggccggacatccagatgacccagagccccagcagcctgtctgccagcgtgggcgacagagtgaccatcacctgtagagccagccaggacgtgaacaccgccgtggcctggtatcagcagaagcctggcaaggcccccaagctgctgatctacagcgccagcttcctggaaagcggcgtgcccagcagattcagcggaagcagaagcggcaccgacttcaccctgaccatcagctccctccagcccgaggacttcgccacctactactgccagcagcactacaccacccctcccaccttcggccagaccaaggtggaaatcaagagaggcggaggcggaagtggaggcggaggatctggcggcggaggctctgaagtgcaactggtggaatctggcggcggactggtgcagcctggcggatctctgagactgagctgtgccgccagcggcttcaacatcaaggacacctacatccactgggtgcgccaggcccctggaaagggactggaatgggtggcccggatctaccccaccaacggctacaccagatacgccgacagcgtgaagggccggttcaccatcagcgccgacaccagcaagaataccgcctacctccagatgaacagcctgcgggccgaggataccgccgtgtactactgctcaagatggggaggcgacggcttctacgctatggacgtgtggggccagggcacccttgtgaccgtgtcatctacgcgtatccagaaccctgatcctgccgtgtaccagctgcgggatagcaagagcagcgacaagagcgtgtgtctgttcaccgacttcgacagccagaccaacgtgtcccagagcaaggactccgacgtgtacatcaccgataagaccgtgctggacatgcggagcatggacttcaagagcaactccgccgtggcctggtccaacaagtccgatttcgcctgcgccaacgccttcaacaacagcattatccccgaggacacattcttcccaagccccgagagcagctgcggctttaccagcgagagctaccagcagggcgtgctgagcgccaccatcctgtacgagacctgagcgtgatcggcttcagaatcctgctgctgaaagtggccggctttaacctgctgatgaccctgcggctgtggtccagccgcgccaagagaagcggatctggcgtgaagcagaccctgaatttcgacctgctgaagctggctggcgacgtggaatccaacccaggcccttctagaggccatatgaccgagtacaagcccacggtgcgcctcgccacccgcgacgacgtccccagggccgtacgcaccctcgccgccgcgttcgccgactaccccgccacgcgccacaccgtcgatccggaccgccacatcgagcgggtcaccgagctgcaagaactcttcctcacgcgcgtcgggctcgacatcggcaaggtgtgggtcgcggacgacggcgccgcggtggcggtctggaccacgccggagagcgtcgaagcgggggcggtgttcgccgagatcggcccgcgcatggccgagttgagcggttcccggctggccgcgcagcaacagatggaaggcctcctggcgccgcaccggcccaaggagcccgcgtggttcctggccaccgtcggcgtctcgcccgaccaccagggcaagggtctgggcagcgccgtcgtgctccccggagtggaggcggccgagcgcgccggggtgcccgccttcctggagacctccgcgccccgcaacctccccttctacgagcggctcggcttcaccgtcaccgccgacgtcgaggtgcccgaaggaccgcgcacctggtgcatgacccgcaagcccggtgcctga

SEQ ID NO: 8222 - DNA, 2243 bp, synthetic construct
  source 1..2243: mol_type = other DNA
atggccttaccagtgaccgccttgctcctgccgctggccttgctgctccacgccgccaggccgctcgaggaggacctgaagaacgtgttcccacctgaggtggccgtgttcgagcctagcgaggccgagatcagccacacccagaaagccaccctcgtgtgcctggctaccggcttctaccccgaccatgtggaactgtcttggtgggtcaacggcaaagaggtgcacagcggcgtgtctaccgacccccagccactgaaagaacagcccgccctgaacgacagccggtactgcctgagcagcagactgagagtgtccgccaccttctggcagaacccccggaaccacttcagatgccaggtgcagttctacggcctgagcgagaacgacgagtggacccaggacagagccaagcccgtgacccagatcgtgtctgccgaagcctggggcagagccgattgcgacgtgaagctggtggaaaagagcttcgagacagacaccaacctgaacttccagaacctgagcgtgatcggcttcagaatcctgctgctgaaagtggccggctttaacctgctgatgaccctgcggctgtggtccagcagggccaagcgatctggatctggagcaacaaacttctcactactcaaacaagcaggtgacgtggaggagaatcccgggcctactagcatggccctgcccgtgacagccctgctgctgcctctggctctgctgctgcacgccgccagacccgatgaattcgaggtgcaactggtggaaagcggcggaggcctggtgcaggctggcggatctctgagactgagctgtgccgccagcggcatcaccttcagcatcaacacaatgggctggtacagacaggcccctggcaagcagagggaactggtggccctgatctccagcatcggcgacacctactacgccgacagcgtgaagggccggttcaccatcagccgggacaacgccaagaacaccgtgtacctccagatgaacagcctgaagcccgaggacaccgccgtgtactactgcaagcggttcagaacagccgcccagggcaccgattattggggccagggaacacaagtgaccgtgtcctctacgcgtatccagaaccctgatcctgccgtgtaccagctgcgggatagcaagagcagcgacaagagcgtgtgtctgttcaccgacttcgacagccagaccaacgtgtcccagagcaaggactccgacgtgtacatcaccgataagaccgtgctggacatgcggagcatggacttcaagagcaactccgccgtggcctggtccaacaagtccgatttcgcctgcgccaacgccttcaacaacagcattatccccgaggacacattcttcccaagccccgagagcagctgcggctttaccagcgagagctaccagcagggcgtgctgagcgccaccatcctgtacgagacctgagcgtgatcggcttcagaatcctgctgctgaaagtggccggctttaacctgctgatgaccctgcggctgtggtccagccgcgccaagagaagcggatctggcgtgaagcagaccctgaatttcgacctgctgaagctggctggcgacgtggaatccaacccaggcccttctagaggccatatgaccgagtacaagcccacggtgcgcctcgccacccgcgacgacgtccccagggccgtacgcaccctcgccgccgcgttcgccgactaccccgccacgcgccacaccgtcgatccggaccgccacatcgagcgggtcaccgagctgcaagaactcttcctcacgcgcgtcgggctcgacatcggcaaggtgtgggtcgcggacgacggcgccgcggtggcggtctggaccacgccggagagcgtcgaagcgggggcggtgttcgccgagatcggcccgcgcatggccgagttgagcggttcccggctggccgcgcagcaacagatggaaggcctcctggcgccgcaccggcccaaggagcccgcgtggttcctggccaccgtcggcgtctcgcccgaccaccagggcaagggtctgggcagcgccgtcgtgctccccggagtggaggcggccgagcgcgccggggtgcccgccttcctggagacctccgcgccccgcaacctccccttctacgagcggctcggcttcaccgtcaccgccgacgtcgaggtgcccgaaggaccgcgcacctggtgcatgacccgcaagcccggtgcctga

SEQ ID NO: 8223 - DNA, 2243 bp, synthetic construct; identical to SEQ ID NO: 8222
  source 1..2243: mol_type = other DNA

SEQ ID NO: 8224 - DNA, 3038 bp, synthetic construct
  source 1..3038: mol_type = other DNA
atggccttaccagtgaccgccttgctcctgccgctggccttgctgctccacgccgccaggccgctcgaggaggacctgaagaacgtgttcccacctgaggtggccgtgttcgagcctagcgaggccgagatcagccacacccagaaagccaccctcgtgtgcctggctaccggcttctaccccgaccatgtggaactgtcttggtgggtcaacggcaaagaggtgcacagcggcgtgtctaccgacccccagccactgaaagaacagcccgccctgaacgacagccggtactgcctgagcagcagactgagagtgtccgccaccttctggcagaacccccggaaccacttcagatgccaggtgcagttctacggcctgagcgagaacgacgagtggacccaggacagagccaagcccgtgacccagatcgtgtctgccgaagcctggggcagagccgattgcgacgtgaagctggtggaaaagagcttcgagacagacaccaacctgaacttccagaacctgagcgtgatcggcttcagaatcctgctgctgaaagtggccggctttaacctgctgatgaccctgcggctgtggtccagcagggccaagcgatctggatctggagcaacaaacttctcactactcaaacaagcaggtgacgtggaggagaatcccgggcctactagcatggccttaccagtgaccgccttgctcctgccgctggccttgctgctccacgccgccaggccgcaggtccagctcgtcgagtccggcggcggcctcgtccaggccggcgactccgtcaccctctcctgcaccgcctccggccgcaccttctcctcctacgccctcgcctggttccgccagcgccccggcaaggagcgcgagttcgtcgccggcctccgctggggcggccccaccaactacgccgactccgtcaaggaccgcttcaccatctccggcgactccgccaagcacaccatgtacctccagatgaactccctcaagcccgaggacaccgccgtctactactgcggctacaaccccggcggctgggccgtcccctcccagtacgagtacgactcctggggccagggcacccaggtcaccgtctcctccggtaccggcggaggcggatctggcggcggaggtagcggtggcggaggatctgaattcgacatccagatgacacagagccctagcagcctgtctgccagcgtgggagacagagtgaccatcacatgcaaggccagcgaccacatcaacaactggctggcctggtatcagcagaagcctggacaggcccctaagctgctgatctacggcgctaccacactggaaacaggcgtgcccagcagattttctggcagcggctctggcaccgactacaccctgacaatatccagcctccagcctgaggacttcgccacctactactgtcagcagagctggaacaccccttggacattcggccagggcaccaagctggaaatcaagagaggcggaggcggaagtggaggcggaggatctggcggcggaggctctcaagttcagcttcaacagcctggcgctgagctggtcaaacctggcgcttctgtgaagatgagctgcaaagccagcggctacgccttcagcagctactggatcaactggatgaagcagaaacccggccagggactcgaatggatcggccaaatctatcccggcgacggcgacaccaactacaacggcaagttcaagggcagagccacactgaccgccgatacctctagcagcacagcctacatgcagctgagcagcctgaccagcgaagatagcgccgtgtacttctgtgcccggtccatcacaacagtcgtgggctgcgctatggactattggggccagggaacaagcgtgaccgtgtctagtacgcgtatccagaaccctgatcctgccgtgtaccagctgcgggatagcaagagcagcgacaagagcgtgtgtctgttcaccgacttcgacagccagaccaacgtgtcccagagcaaggactccgacgtgtacatcaccgataagaccgtgctggacatgcggagcatggacttcaagagcaactccgccgtggcctggtccaacaagtccgatttcgcctgcgccaacgccttcaacaacagcattatccccgaggacacattcttcccaagccccgagagcagctgcggctttaccagcgagagctaccagcagggcgtgctgagcgccaccatcctgtacgagacctgagcgtgatcggcttcagaatcctgctgctgaaagtggccggctttaacctgctgatgaccctgcggctgtggtccagccgcgccaagagaagcggatctggcgtgaagcagaccctgaatttcgacctgctgaagctggctggcgacgtggaatccaacccaggcccttctagaggccatatgaccgagtacaagcccacggtgcgcctcgccacccgcgacgacgtccccagggccgtacgcaccctcgccgccgcgttcgccgactaccccgccacgcgccacaccgtcgatccggaccgccacatcgagcgggtcaccgagctgcaagaactcttcctcacgcgcgtcgggctcgacatcggcaaggtgtgggtcgcggacgacggcgccgcggtggcggtctggaccacgccggagagcgtcgaagcgggggcggtgttcgccgagatcggcccgcgcatggccgagttgagcggttcccggctggccgcgcagcaacagatggaaggcctcctggcgccgcaccggcccaaggagcccgcgtggttcctggccaccgtcggcgtctcgcccgaccaccagggcaagggtctgggcagcgccgtcgtgctccccggagtggaggcggccgagcgcgccggggtgcccgccttcctggagacctccgcgccccgcaacctccccttctacgagcggctcggcttcaccgtcaccgccgacgtcgaggtgcccgaaggaccgcgcacctggtgcatgacccgcaagcccggtgcctga

SEQ ID NO: 8225 - DNA, 3425 bp, synthetic construct
  source 1..3425: mol_type = other DNA
atggccttaccagtgaccgccttgctcctgccgctggccttgctgctccacgccgccaggccgctcgaggaggacctgaagaacgtgttcccacctgaggtggccgtgttcgagcctagcgaggccgagatcagccacacccagaaagccaccctcgtgtgcctggctaccggcttctaccccgaccatgtggaactgtcttggtgggtcaacggcaaagaggtgcacagcggcgtgtctaccgacccccagccactgaaagaacagcccgccctgaacgacagccggtactgcctgagcagcagactgagagtgtccgccaccttctggcagaacccccggaaccacttcagatgccaggtgcagttctacggcctgagcgagaacgacgagtggacccaggacagagccaagcccgtgacccagatcgtgtctgccgaagcctggggcagagccgattgcgacgtgaagctggtggaaaagagcttcgagacagacaccaacctgaacttccagaacctgagcgtgatcggcttcagaatcctgctgctgaaagtggccggctttaacctgctgatgaccctgcggctgtggtccagcagggccaagcgatctggatctggagcaacaaacttctcactactcaaacaagcaggtgacgtggaggagaatcccgggcctactagcatggccttaccagtgaccgccttgctcctgccgctggccttgctgctccacgccgccaggccggaggttcagctgcttgagtctggcggaggactggttcaacctggcggaagcctgagactgtcttgtgccgccagcggcttcacctttagcagctacgccatgagctgggtccgacaggctcctggcaaaggactggaatgggtgtccagcatcagcggcagcggcgactacatctactacgccgatagcgtgaagggcagattcaccatcagccgggacatcagcaagaacaccctgtacctccagatgaacagcctgagagccgaggacaccgccgtgtactactgtgccaaagaaggcaccggcgctaacagcagcctggccgattatagaggccagggcacactggtcaccgtgtctagtggcggaggaagcggcggaggatctcaggtccagctcgtcgagtccggcggcggcctcgtccaggccggcgactccgtcaccctctcctgcaccgcctccggccgcaccttctcctcctacgccctcgcctggttccgccagcgccccggcaaggagcgcgagttcgtcgccggcctccgctggggcggccccaccaactacgccgactccgtcaaggaccgcttcaccatctccggcgactccgccaagcacaccatgtacctccagatgaactccctcaagcccgaggacaccgccgtctactactgcggctacaaccccggcggctgggccgtcccctcccagtacgagtacgactcctggggccagggcacccaggtcaccgtctcctccggtaccggcggaggcggatctggcggcggaggtagcggtggcggaggatctgaattcgacatccagatgacacagagccctagcagcctgtctgccagcgtgggagacagagtgaccatcacatgcaaggccagcgaccacatcaacaactggctggcctggtatcagcagaagcctggacaggcccctaagctgctgatctacggcgctaccacactggaaacaggcgtgcccagcagattttctggcagcggctctggcaccgactacaccctgacaatatccagcctccagcctgaggacttcgccacctactactgtcagcagagctggaacaccccttggacattcggccagggcaccaagctggaaatcaagagaggcggaggcggaagtggaggcggaggatctggcggcggaggctctcaagttcagcttcaacagcctggcgctgagctggtcaaacctggcgcttctgtgaagatgagctgcaaagccagcggctacgccttcagcagctactggatcaactggatgaagcagaaacccggccagggactcgaatggatcggccaaatctatcccggcgacggcgacaccaactacaacggcaagttcaagggcagagccacactgaccgccgatacctctagcagcacagcctacatgcagctgagcagcctgaccagcgaagatagcgccgtgtacttctgtgcccggtccatcacaacagtcgtgggctgcgctatggactattggggccagggaacaagcgtgaccgtgtctagtacgcgtatccagaaccctgatcctgccgtgtaccagctgcgggatagcaagagcagcgacaagagcgtgtgtctgttcaccgacttcgacagccagaccaacgtgtcccagagcaaggactccgacgtgtacatcaccgataagaccgtgctggacatgcggagcatggacttcaagagcaactccgccgtggcctggtccaacaagtccgatttcgcctgcgccaacgccttcaacaacagcattatccccgaggacacattcttcccaagccccgagagcagctgcggctttaccagcgagagctaccagcagggcgtgctgagcgccaccatcctgtacgagacctgagcgtgatcggcttcagaatcctgctgctgaaagtggccggctttaacctgctgatgaccctgcggctgtggtccagccgcgccaagagaagcggatctggcgtgaagcagaccctgaatttcgacctgctgaagctggctggcgacgtggaatccaacccaggcccttctagaggccatatgaccgagtacaagcccacggtgcgcctcgccacccgcgacgacgtccccagggccgtacgcaccctcgccgccgcgttcgccgactaccccgccacgcgccacaccgtcgatccggaccgccacatcgagcgggtcaccgagctgcaagaactcttcctcacgcgcgtcgggctcgacatcggcaaggtgtgggtcgcggacgacggcgccgcggtggcggtctggaccacgccggagagcgtcgaagcgggggcggtgttcgccgagatcggcccgcgcatggccgagttgagcggttcccggctggccgcgcagcaacagatggaaggcctcctggcgccgcaccggcccaaggagcccgcgtggttcctggccaccgtcggcgtctcgcccgaccaccagggcaagggtctgggcagcgccgtcgtgctccccggagtggaggcggccgagcgcgccggggtgcccgccttcctggagacctccgcgccccgcaacctccccttctacgagcggctcggcttcaccgtcaccgccgacgtcgaggtgcccgaaggaccgcgcacctggtgcatgacccgcaagcccggtgcctga

SEQ ID NO: 8226 - DNA, 3425 bp, synthetic construct; identical to SEQ ID NO: 8225
  source 1..3425: mol_type = other DNA

SEQ ID NO: 8227 - DNA, 2261 bp, synthetic construct
  source 1..2261: mol_type = other DNA
atggccttaccagtgaccgccttgctcctgccgctggccttgctgctccacgccgccaggccgctcgaggaggacctgaagaacgtgttcccacctgaggtggccgtgttcgagcctagcgaggccgagatcagccacacccagaaagccaccctcgtgtgcctggctaccggcttctaccccgaccatgtggaactgtcttggtgggtcaacggcaaagaggtgcacagcggcgtgtctaccgacccccagccactgaaagaacagcccgccctgaacgacagccggtactgcctgagcagcagactgagagtgtccgccaccttctggcagaacccccggaaccacttcagatgccaggtgcagttctacggcctgagcgagaacgacgagtggacccaggacagagccaagcccgtgacccagatcgtgtctgccgaagcctggggcagagccgattgcgacgtgaagctggtggaaaagagcttcgagacagacaccaacctgaacttccagaacctgagcgtgatcggcttcagaatcctgctgctgaaagtggccggctttaacctgctgatgaccctgcggctgtggtccagcagggccaagcgatctggatctggagcaacaaacttctcactactcaaacaagcaggtgacgtggaggagaatcccgggcctactagcatggccctgcccgtgacagccctgctgctgcctctggctctgctgctgcacgccgccagacccgatgaattcggctctgacctgggcatcaagctgctgttcgccgctgccaagggccaggacgacgaagtgcggattctgctggctgctggggccgacgtgaacgccaaggatttcgagggctacacccccctgcacgtggccgcctatgatggacacctggaaatcgtggaagtgctgctgaaggctggcgctgatgtgaatgccaaagacagccagggccggacccctctgcatgaagccgcctacagcggccatctggaaattgtggaagtgctgctgaaagccggggcagacgtgaacgctcaggacgacgctggcgagacaccagccgatctggctgcagcttggggccacgaagatatcgccgaggtgctgcagaagacgcgtatccagaaccctgatcctgccgtgtaccagctgcgggatagcaagagcagcgacaagagcgtgtgtctgttcaccgacttcgacagccagaccaacgtgtcccagagcaaggactccgacgtgtacatcaccgataagaccgtgctggacatgcggagcatggacttcaagagcaactccgccgtggcctggtccaacaagtccgatttcgcctgcgccaacgccttcaacaacagcattatccccgaggacacattcttcccaagccccgagagcagctgcggctttaccagcgagagctaccagcagggcgtgctgagcgccaccatcctgtacgagacctgagcgtgatcggcttcagaatcctgctgctgaaagtggccggctttaacctgctgatgaccctgcggctgtggtccagccgcgccaagagaagcggatctggcgtgaagcagaccctgaatttcgacctgctgaagctggctggcgacgtggaatccaacccaggcccttctagaggccatatgaccgagtacaagcccacggtgcgcctcgccacccgcgacgacgtccccagggccgtacgcaccctcgccgccgcgttcgccgactaccccgccacgcgccacaccgtcgatccggaccgccacatcgagcgggtcaccgagctgcaagaactcttcctcacgcgcgtcgggctcgacatcggcaaggtgtgggtcgcggacgacggcgccgcggtggcggtctggaccacgccggagagcgtcgaagcgggggcggtgttcgccgagatcggcccgcgcatggccgagttgagcggttcccggctggccgcgcagcaacagatggaaggcctcctggcgccgcaccggcccaaggagcccgcgtggttcctggccaccgtcggcgtctcgcccgaccaccagggcaagggtctgggcagcgccgtcgtgctccccggagtggaggcggccgagcgcgccggggtgcccgccttcctggagacctccgcgccccgcaacctccccttctacgagcggctcggcttcaccgtcaccgccgacgtcgaggtgcccgaaggaccgcgcacctggtgcatgacccgcaagcccggtgcctga

SEQ ID NO: 8228 - DNA, 2048 bp, synthetic construct
  source 1..2048: mol_type = other DNA
atggccttaccagtgaccgccttgctcctgccgctggccttgctgctccacgccgccaggccgctcgaggaggacctgaagaacgtgttcccacctgaggtggccgtgttcgagcctagcgaggccgagatcagccacacccagaaagccaccctcgtgtgcctggctaccggcttctaccccgaccatgtggaactgtcttggtgggtcaacggcaaagaggtgcacagcggcgtgtctaccgacccccagccactgaaagaacagcccgccctgaacgacagccggtactgcctgagcagcagactgagagtgtccgccaccttctggcagaacccccggaaccacttcagatgccaggtgcagttctacggcctgagcgagaacgacgagtggacccaggacagagccaagcccgtgacccagatcgtgtctgccgaagcctggggcagagccgattgcgacgtgaagctggtggaaaagagcttcgagacagacaccaacctgaacttccagaacctgagcgtgatcggcttcagaatcctgctgctgaaagtggccggctttaacctgctgatgaccctgcggctgtggtccagcagggccaagcgatctggatctggagcaacaaacttctcactactcaaacaagcaggtgacgtggaggagaatcccgggcctactagcatggactggatttggcgcatccttttccttgtcggcgctgctaccggcgcccattccttcgaaggcagcggattcgaatacgccaaagagatgcggaacgcctactgggagatcgccctgctgcccaatctgaccaaccagcagaagagagcccccatcagaaagctgtacgacgacccctcccagagcagcgagctgctgtctgaggctaaaaaactgaacgatagccagacgcgtatccagaaccctgatcctgccgtgtaccagctgcgggatagcaagagcagcgacaagagcgtgtgtctgttcaccgacttcgacagccagaccaacgtgtcccagagcaaggactccgacgtgtacatcaccgataagaccgtgctggacatgcggagcatggacttcaagagcaactccgccgtggcctggtccaacaagtccgatttcgcctgcgccaacgccttcaacaacagcattatccccgaggacacattcttcccaagccccgagagcagctgcggctttaccagcgagagctaccagcagggcgtgctgagcgccaccatcctgtacgagacctgagcgtgatcggcttcagaatcctgctgctgaaagtggccggctttaacctgctgatgaccctgcggctgtggtccagccgcgccaagagaagcggatctggcgtgaagcagaccctgaatttcgacctgctgaagctggctggcgacgtggaatccaacccaggcccttctagaggccatatgaccgagtacaagcccacggtgcgcctcgccacccgcgacgacgtccccagggccgtacgcaccctcgccgccgcgttcgccgactaccccgccacgcgccacaccgtcgatccggaccgccacatcgagcgggtcaccgagctgcaagaactcttcctcacgcgcgtcgggctcgacatcggcaaggtgtgggtcgcggacgacggcgccgcggtggcggtctggaccacgccggagagcgtcgaagcgggggcggtgttcgccgagatcggcccgcgcatggccgagttgagcggttcccggctggccgcgcagcaacagatggaaggcctcctggcgccgcaccggcccaaggagcccgcgtggttcctggccaccgtcggcgtctcgcccgaccaccagggcaagggtctgggcagcgccgtcgtgctccccggagtggaggcggccgagcgcgccggggtgcccgccttcctggagacctccgcgccccgcaacctccccttctacgagcggctcggcttcaccgtcaccgccgacgtcgaggtgcccgaaggaccgcgcacctggtgcatgacccgcaagcccggtgcctga

SEQ ID NO: 8229 - DNA, 2714 bp, synthetic construct
  source 1..2714: mol_type = other DNA
atggccttaccagtgaccgccttgctcctgccgctggccttgctgctccacgccgccaggccgctcgaggaggacctgaagaacgtgttcccacctgaggtggccgtgttcgagcctagcgaggccgagatcagccacacccagaaagccaccctcgtgtgcctggctaccggcttctaccccgaccatgtggaactgtcttggtgggtcaacggcaaagaggtgcacagcggcgtgtctaccgacccccagccactgaaagaacagcccgccctgaacgacagccggtactgcctgagcagcagactgagagtgtccgccaccttctggcagaacccccggaaccacttcagatgccaggtgcagttctacggcctgagcgagaacgacgagtggacccaggacagagccaagcccgtgacccagatcgtgtctgccgaagcctggggcagagccgattgcgacgtgaagctggtggaaaagagcttcgagacagacaccaacctgaacttccagaacctgagcgtgatcggcttcagaatcctgctgctgaaagtggccggctttaacctgctgatgaccctgcggctgtggtccagcagggccaagcgatctggatctggagcaacaaacttctcactactcaaacaagcaggtgacgtggaggagaatcccgggcctactagcatggccctgcccgtgacagccctgctgctgcctctggctctgctgctgcacgccgccagacccgatgaattcgaggtgcaactggtggaaagcggcggaggcctggtgcaggctggcggatctctgagactgagctgtgccgccagcggcatcaccttcagcatcaacacaatgggctggtacagacaggcccctggcaagcagagggaactggtggccctgatctccagcatcggcgacacctactacgccgacagcgtgaagggccggttcaccatcagccgggacaacgccaagaacaccgtgtacctccagatgaacagcctgaagcccgaggacaccgccgtgtactactgcaagcggttcagaacagccgcccagggcaccgattattggggccagggaacacaagtgaccgtgtcctctctcgagggaggaggcggctccgggggaggcggaagtggaggcggaggatctgggtctggaggaagcggatctggaggctcagggtcagggggctcaggcagtggaggctctttcgaagtgcaactggtggaatctgggggcggactggtgcagccaggcggaagtctgaggctgtcttgtgccgcctccggcagcatcttcggcttcaacgacatggcctggtatcggcaggctcccggaaaacagcgcgagctggtggctctgattagcagagtgggcgtgaccagcagcgccgactctgtgaagggcagattcacaatctccagagtgaacgccaaggatacagtgtacctccagatgaactctctgaaacctgaggatacagcagtgtactattgctacatggaccagcggctggacggcagcacactggcctactggggacagggaactcaagtgacagtgtctagcacgcgtatccagaaccctgatcctgccgtgtaccagctgcgggatagcaagagcagcgacaagagcgtgtgtctgttcaccgacttcgacagccagaccaacgtgtcccagagcaaggactccgacgtgtacatcaccgataagaccgtgctggacatgcggagcatggacttcaagagcaactccgccgtggcctggtccaacaagtccgatttcgcctgcgccaacgccttcaacaacagcattatccccgaggacacattcttcccaagccccgagagcagctgcggctttaccagcgagagctaccagcagggcgtgctgagcgccaccatcctgtacgagacctgagcgtgatcggcttcagaatcctgctgctgaaagtggccggctttaacctgctgatgaccctgcggctgtggtccagccgcgccaagagaagcggatctggcgtgaagcagaccctgaatttcgacctgctgaagctggctggcgacgtggaatccaacccaggcccttctagaggccatatgaccgagtacaagcccacggtgcgcctcgccacccgcgacgacgtccccagggccgtacgcaccctcgccgccgcgttcgccgactaccccgccacgcgccacaccgtcgatccggaccgccacatcgagcgggtcaccgagctgcaagaactcttcctcacgcgcgtcgggctcgacatcggcaaggtgtgggtcgcggacgacggcgccgcggtggcggtctggaccacgccggagagcgtcgaagcgggggcggtgttcgccgagatcggcccgcgcatggccgagttgagcggttcccggctggccgcgcagcaacagatggaaggcctcctggcgccgcaccggcccaaggagcccgcgtggttcctggccaccgtcggcgtctcgcccgaccaccagggcaagggtctgggcagcgccgtcgtgctccccggagtggaggcggccgagcgcgccggggtgcccgccttcctggagacctccgcgccccgcaacctccccttctacgagcggctcggcttcaccgtcaccgccgacgtcgaggtgcccgaaggaccgcgcacctggtgcatgacccgcaagcccggtgcctga

SEQ ID NO: 8230 - DNA, 2456 bp, synthetic construct
  source 1..2456: mol_type = other DNA
atggccttaccagtgaccgccttgctcctgccgctggccttgctgctccacgccgccaggccgctcgaggaggacctgaagaacgtgttcccacctgaggtggccgtgttcgagcctagcgaggccgagatcagccacacccagaaagccaccctcgtgtgcctggctaccggcttctaccccgaccatgtggaactgtcttggtgggtcaacggcaaagaggtgcacagcggcgtgtctaccgacccccagccactgaaagaacagcccgccctgaacgacagccggtactgcctgagcagcagactgagagtgtccgccaccttctggcagaacccccggaaccacttcagatgccaggtgcagttctacggcctgagcgagaacgacgagtggacccaggacagagccaagcccgtgacccagatcgtgtctgccgaagcctggggcagagccgattgcgacgtgaagctggtggaaaagagcttcgagacagacaccaacctgaacttccagaacctgagcgtgatcggcttcagaatcctgctgctgaaagtggccggctttaacctgctgatgaccctgcggctgtggtccagcagggccaagcgatctggatctggagcaacaaacttctcactactcaaacaagcaggtgacgtggaggagaatcccgggcctactagcatggcccttccagtcactgccttgctgttgcctctggcgctcctgctccacgccgctagaccgggcatgagaaccgaggacctgcctaaggccgtggtgttcctggaaccccagtggtacagagtgctggaaaaggacagcgtgaccctgaagtgccagggcgcctacagccccgaggacaatagcacccagtggttccacaacgagagcctgatctccagccaggccagcagctacttcatcgacgccgccaccgtggacgacagcggcgagtatagatgccagaccaacctgagcaccctgagcgaccccgtgcagctggaagtgcacatcggatggctgctgctgcaggcccccagatgggtgttcaaagaagaggaccccatccacctgagatgccactcttggaagaacaccgccctgcacaaagtgacctacctgcagaacggcaagggcagaaagtacttccaccacaacagcgacttctacatccccaaggccaccctgaaggactccggctcctacttctgcagaggcctcgtgggcagcaagaacgtgtccagcgagacagtgaacatcaccatcacccagggcctggccgtgtctaccatcagcagctttttcccacccggctaccagacgcgtatccagaaccctgatcctgccgtgtaccagctgcgggatagcaagagcagcgacaagagcgtgtgtctgttcaccgacttcgacagccagaccaacgtgtcccagagcaaggactccgacgtgtacatcaccgataagaccgtgctggacatgcggagcatggacttcaagagcaactccgccgtggcctggtccaacaagtccgatttcgcctgcgccaacgccttcaacaacagcattatccccgaggacacattcttcccaagccccgagagcagctgcggctttaccagcgagagctaccagcagggcgtgctgagcgccaccatcctgtacgagacctgagcgtgatcggcttcagaatcctgctgctgaaagtggccggctttaacctgctgatgaccctgcggctgtggtccagccgcgccaagagaagcggatctggcgtgaagcagaccctgaatttcgacctgctgaagctggctggcgacgtggaatccaacccaggcccttctagaggccatatgaccgagtacaagcccacggtgcgcctcgccacccgcgacgacgtccccagggccgtacgcaccctcgccgccgcgttcgccgactaccccgccacgcgccacaccgtcgatccggaccgccacatcgagcgggtcaccgagctgcaagaactcttcctcacgcgcgtcgggctcgacatcggcaaggtgtgggtcgcggacgacggcgccgcggtggcggtctggaccacgccggagagcgtcgaagcgggggcggtgttcgccgagatcggcccgcgcatggccgagttgagcggttcccggctggccgcgcagcaacagatggaaggcctcctggcgccgcaccggcccaaggagcccgcgtggttcctggccaccgtcggcgtctcgcccgaccaccagggcaagggtctgggcagcgccgtcgtgctccccggagtggaggcggccgagcgcgccggggtgcccgccttcctggagacctccgcgccccgcaacctccccttctacgagcggctcggcttcaccgtcaccgccgacgtcgaggtgcccgaaggaccgcgcacctggtgcatgacccgcaagcccggtgcctga

SEQ ID NO: 8231 - DNA, 2462 bp, synthetic construct
  source 1..2462: mol_type = other DNA
atggccttaccagtgaccgccttgctcctgccgctggccttgctgctccacgccgccaggccgctcgaggaggacctgaagaacgtgttcccacctgaggtggccgtgttcgagcctagcgaggccgagatcagccacacccagaaagccaccctcgtgtgcctggctaccggcttctaccccgaccatgtggaactgtcttggtgggtcaacggcaaagaggtgcacagcggcgtgtctaccgacccccagccactgaaagaacagcccgccctgaacgacagccggtactgcctgagcagcagactgagagtgtccgccaccttctggcagaacccccggaaccacttcagatgccaggtgcagttctacggcctgagcgagaacgacgagtggacccaggacagagccaagcccgtgacccagatcgtgtctgccgaagcctggggcagagccgattgcgacgtgaagctggtggaaaagagcttcgagacagacaccaacctgaacttccagaacctgagcgtgatcggcttcagaatcctgctgctgaaagtggccggctttaacctgctgatgaccctgcggctgtggtccagcagggccaagcgatctggatctggagcaacaaacttctcactactcaaacaagcaggtgacgtggaggagaatcccgggcctactagcgccaccatggccttaccagtgaccgccttgctcctgccgctggccttgctgctccacgccgccaggccgggcatgcggactgaagacctcccaaaggctgtggtgttcctggagcctcaatggtacagggtgctggagaaggacagtgtgactctgaagtgccagggagcctactcccctgaggacaattccacacagtggtttcacaatgagagcctcatctcaagccaggcctccagctacttcattgacgctgccacagtggacgacagtggagagtacaggtgccagacaaacctctccaccctcagtgacccggtgcagctagaagtccatatcggctggctgttgctccaggcccctcggtgggtgttcaaggaggaagaccctattcacctgaggtgtcacagctggaagaacactgctctgcataaggtcacatatttacagaatggcaaaggcaggaagtattttcatcataattctgacttctacattccaaaagccacactcaaagacagcggctcctacttctgcagggggcttgttgggagtaaaaatgtgtcttcagagactgtgaacatcaccatcactcaaggtttggcagtgtcaaccatctcatcattctttccacctggctaccaaacgcgtatccagaaccctgatcctgccgtgtaccagctgcgggatagcaagagcagcgacaagagcgtgtgtctgttcaccgacttcgacagccagaccaacgtgtcccagagcaaggactccgacgtgtacatcaccgataagaccgtgctggacatgcggagcatggacttcaagagcaactccgccgtggcctggtccaacaagtccgatttcgcctgcgccaacgccttcaacaacagcattatccccgaggacacattcttcccaagccccgagagcagctgcggctttaccagcgagagctaccagcagggcgtgctgagcgccaccatcctgtacgagacctgagcgtgatcggcttcagaatcctgctgctgaaagtggccggctttaacctgctgatgaccctgcggctgtggtccagccgcgccaagagaagcggatctggcgtgaagcagaccctgaatttcgacctgctgaagctggctggcgacgtggaatccaacccaggcccttctagaggccatatgaccgagtacaagcccacggtgcgcctcgccacccgcgacgacgtccccagggccgtacgcaccctcgccgccgcgttcgccgactaccccgccacgcgccacaccgtcgatccggaccgccacatcgagcgggtcaccgagctgcaagaactcttcctcacgcgcgtcgggctcgacatcggcaaggtgtgggtcgcggacgacggcgccgcggtggcggtctggaccacgccggagagcgtcgaagcgggggcggtgttcgccgagatcggcccgcgcatggccgagttgagcggttcccggctggccgcgcagcaacagatggaaggcctcctggcgccgcaccggcccaaggagcccgcgtggttcctggccaccgtcggcgtctcgcccgaccaccagggcaagggtctgggcagcgccgtcgtgctccccggagtggaggcggccgagcgcgccggggtgcccgccttcctggagacctccgcgccccgcaacctccccttctacgagcggctcggcttcaccgtcaccgccgacgtcgaggtgcccgaaggaccgcgcacctggtgcatgacccgcaagcccggtgcctga

SEQ ID NO: 8232 - DNA, 2606 bp, synthetic construct
  source 1..2606: mol_type = other DNA
atggccttaccagtgaccgccttgctcctgccgctggccttgctgctccacgccgccaggccgctcgagatccagaaccctgatcctgccgtgtaccagctgcgggatagcaagagcagcgacaagagcgtgtgtctgttcaccgacttcgacagccagaccaacgtgtcccagagcaaggactccgacgtgtacatcaccgataagaccgtgctggacatgcggagcatggacttcaagagcaactccgccgtggcctggtccaacaagtccgatttcgcctgcgccaacgccttcaacaacagcattatccccgaggacacattcttcccaagccccgagagcagctgcggctttaccagcgagagctaccagcagggcgtgctgagcgccaccatcctgtacgagacctgagcgtgatcggcttcagaatcctgctgctgaaagtggccggctttaacctgctgatgaccctgcggctgtggtccagcagggccaagcgatctggatctggagcaacaaacttctcactactcaaacaagcaggtgacgtggaggagaatcccgggcctactagcatggccttaccagtgaccgccttgctcctgccgctggccttgctgctccacgccgccaggccggacatccagatgacacagactacatcctccctgtctgcctctctgggagacagagtcaccatcagttgcagggcaagtcaggacattagtaaatatttaaattggtatcagcagaaaccagatggaactgttaaactcctgatctaccatacatcaagattacactcaggagtcccatcaaggttcagtggcagtgggtctggaacagattattctctcaccattagcaacctggagcaagaagatattgccacttacttttgccaacagggtaatacgcttccgtacacgttcggaggggggaccaagctggagatcacaggtggcggtggctcgggcggtggtgggtcgggtggcggcggatctgaggtgaaactgcaggagtcaggacctggcctggtggcgccctcacagagcctgtccgtcacatgcactgtctcaggggtctcattacccgactatggtgtaagctggattcgccagcctccacgaaagggtctggagtggctgggagtaatatggggtagtgaaaccacatactataattcagctctcaaatccagactgaccatcatcaaggacaactccaagagccaagttttcttaaaaatgaacagtctgcaaactgatgacacagccatttactactgtgccaaacattattactacggtggtagctatgctatggactactggggtcaaggaacctcagtcaccgtctcctcaacgcgtgaggacctgaagaacgtgttcccacctgaggtggccgtgttcgagcctagcgaggccgagatcagccacacccagaaagccaccctcgtgtgcctggctaccggcttctaccccgaccatgtggaactgtcttggtgggtcaacggcaaagaggtgcacagcggcgtgtctaccgacccccagccactgaaagaacagcccgccctgaacgacagccggtactgcctgagcagcagactgagagtgtccgccaccttctggcagaacccccggaaccacttcagatgccaggtgcagttctacggcctgagcgagaacgacgagtggacccaggacagagccaagcccgtgacccagatcgtgtctgccgaagcctggggcagagccgattgcgacgtgaagctggtggaaaagagcttcgagacagacaccaacctgaacttccagaacctgagcgtgatcggcttcagaatcctgctgctgaaagtggccggctttaacctgctgatgaccctgcggctgtggtccagccgcgccaagagaagcggatctggcgtgaagcagaccctgaatttcgacctgctgaagctggctggcgacgtggaatccaacccaggcccttctagaggccatatgaccgagtacaagcccacggtgcgcctcgccacccgcgacgacgtccccagggccgtacgcaccctcgccgccgcgttcgccgactaccccgccacgcgccacaccgtcgatccggaccgccacatcgagcgggtcaccgagctgcaagaactcttcctcacgcgcgtcgggctcgacatcggcaaggtgtgggtcgcggacgacggcgccgcggtggcggtctggaccacgccggagagcgtcgaagcgggggcggtgttcgccgagatcggcccgcgcatggccgagttgagcggttcccggctggccgcgcagcaacagatggaaggcctcctggcgccgcaccggcccaaggagcccgcgtggttcctggccaccgtcggcgtctcgcccgaccaccagggcaagggtctgggcagcgccgtcgtgctccccggagtggaggcggccgagcgcgccggggtgcccgccttcctggagacctccgcgccccgcaacctccccttctacgagcggctcggcttcaccgtcaccgccgacgtcgaggtgcccgaaggaccgcgcacctggtgcatgacccgcaagcccggtgcctga

SEQ ID NO: 8233 - DNA, 2609 bp, synthetic construct
  source 1..2609: mol_type = other DNA
atggccttaccagtgaccgccttgctcctgccgctggccttgctgctccacgccgccaggccgctcgagatccagaaccctgatcctgccgtgtaccagctgcgggatagcaagagcagcgacaagagcgtgtgtctgttcaccgacttcgacagccagaccaacgtgtcccagagcaaggactccgacgtgtacatcaccgataagaccgtgctggacatgcggagcatggacttcaagagcaactccgccgtggcctggtccaacaagtccgatttcgcctgcgccaacgccttcaacaacagcattatccccgaggacacattcttcccaagccccgagagcagctgcggctttaccagcgagagctaccagcagggcgtgctgagcgccaccatcctgtacgagacctgagcgtgatcggcttcagaatcctgctgctgaaagtggccggctttaacctgctgatgaccctgcggctgtggtccagcagggccaagcgatctggatctggagcaacaaacttctcactactcaaacaagcaggtgacgtggaggagaatcccgggcctactagcaccatggccttaccagtgaccgccttgctcctgccgctggccttgctgctccacgccgccaggccggagatcgtgatgacccagagccctgccaccctgtctctgagccctggcgaaagagccaccctgagctgtagagccagccaggacatcagcaagtacctgaactggtatcagcagaagcccggccaggcccccagactgctgatctaccacaccagcagactgcacagcggcatccccgccagattttctggctctggcagcggcaccgactacaccctgacaatcagcagcctccagcccgaggacttcgccgtgtacttctgtcagcaaggcaacaccctgccctacaccttcggccagggcaccaagctggaaatcaagggcggaggcggaagtggaggcggaggatctggcggcggaggctctcaggtgcaactccaggaatctggccctggcctcgtgaagcccagcgagacactgagcctgacctgtaccgtgtccggcgtgtccctgcctgactatggcgtgtcctggatcagacagccccctggcaagggcctggaatggatcggagtgatttggggcagcgaaaccacctactacaacagctccctgaagtccagagtgaccatctccaaggacaactccaagaaccaggtgtccctgaagctgagcagcgtgacagccgccgacaccgccgtgtattactgcgccaagcactactactacggcggcagctacgctatggactactggggccagggaaccctcgtgaccgtgtctagtacgcgtgaggacctgaagaacgtgttcccacctgaggtggccgtgttcgagcctagcgaggccgagatcagccacacccagaaagccaccctcgtgtgcctggctaccggcttctaccccgaccatgtggaactgtcttggtgggtcaacggcaaagaggtgcacagcggcgtgtctaccgacccccagccactgaaagaacagcccgccctgaacgacagccggtactgcctgagcagcagactgagagtgtccgccaccttctggcagaacccccggaaccacttcagatgccaggtgcagttctacggcctgagcgagaacgacgagtggacccaggacagagccaagcccgtgacccagatcgtgtctgccgaagcctggggcagagccgattgcgacgtgaagctggtggaaaagagcttcgagacagacaccaacctgaacttccagaacctgagcgtgatcggcttcagaatcctgctgctgaaagtggccggctttaacctgctgatgaccctgcggctgtggtccagccgcgccaagagaagcggatctggcgtgaagcagaccctgaatttcgacctgctgaagctggctggcgacgtggaatccaacccaggcccttctagaggccatatgaccgagtacaagcccacggtgcgcctcgccacccgcgacgacgtccccagggccgtacgcaccctcgccgccgcgttcgccgactaccccgccacgcgccacaccgtcgatccggaccgccacatcgagcgggtcaccgagctgcaagaactcttcctcacgcgcgtcgggctcgacatcggcaaggtgtgggtcgcggacgacggcgccgcggtggcggtctggaccacgccggagagcgtcgaagcgggggcggtgttcgccgagatcggcccgcgcatggccgagttgagcggttcccggctggccgcgcagcaacagatggaaggcctcctggcgccgcaccggcccaaggagcccgcgtggttcctggccaccgtcggcgtctcgcccgaccaccagggcaagggtctgggcagcgccgtcgtgctccccggagtggaggcggccgagcgcgccggggtgcccgccttcctggagacctccgcgccccgcaacctccccttctacgagcggctcggcttcaccgtcaccgccgacgtcgaggtgcccgaaggaccgcgcacctggtgcatgacccgcaagcccggtgcctga

SEQ ID NO: 8234 - DNA, 2612 bp, synthetic construct
  source 1..2612: mol_type = other DNA
atggccttaccagtgaccgccttgctcctgccgctggccttgctgctccacgccgccaggccgctcgagatccagaaccctgatcctgccgtgtaccagctgcgggatagcaagagcagcgacaagagcgtgtgtctgttcaccgacttcgacagccagaccaacgtgtcccagagcaaggactccgacgtgtacatcaccgataagaccgtgctggacatgcggagcatggacttcaagagcaactccgccgtggcctggtccaacaagtccgatttcgcctgcgccaacgccttcaacaacagcattatccccgaggacacattcttcccaagccccgagagcagctgcggctttaccagcgagagctaccagcagggcgtgctgagcgccaccatcctgtacgagacctgagcgtgatcggcttcagaatcctgctgctgaaagtggccggctttaacctgctgatgaccctgcggctgtggtccagcagggccaagcgatctggatctggagcaacaaacttctcactactcaaacaagcaggtgacgtggaggagaatcccgggcctactagcaccatggccttaccagtgaccgccttgctcctgccgctggccttgctgctccacgccgccaggccggacgagatcgtgctgacacagagccccgccaccctgtcactgtctccaggcgaaagagccaccctgagctgtagcgccagcagcagcgtgtcctacatgcactggtatcagcagaagcccggccaggcccccagactgctgatctacgataccagcaagctggcctccggcatccccgccagattttctggcagcggctccggcaccgacttcaccctgacaatcagcagcctggaacccgaggacgtggccgtgtactactgttttcaaggcagcgtgtaccccttcaccttcggccagggcaccaagctggaaatcaagagaggtggcggtggctcgggcggtggtgggtcgggtggcggcggatctcaggtgcagctccaggaatctggccctggcctcgtgaagcctagccagaccctgagcctgacctgtaccgtgtctggcggcagcatcagcacaagcggcatgggcgtgggctggatcagacagcaccctggcaagggcctggaatggatcggccacatttggtgggacgacgacaagcggtacaaccccgccctgaagtccagagtgaccatcagcgtggacaccagcaagaaccagttcagcctgaagctgagcagcgtgacagccgccgataccgccgtgtattattgcgcccggatggaactgtggtcctactacttcgactactggggccagggaaccctcgtgaccgtgtctagtacgcgtgaggacctgaagaacgtgttcccacctgaggtggccgtgttcgagcctagcgaggccgagatcagccacacccagaaagccaccctcgtgtgcctggctaccggcttctaccccgaccatgtggaactgtcttggtgggtcaacggcaaagaggtgcacagcggcgtgtctaccgacccccagccactgaaagaacagcccgccctgaacgacagccggtactgcctgagcagcagactgagagtgtccgccaccttctggcagaacccccggaaccacttcagatgccaggtgcagttctacggcctgagcgagaacgacgagtggacccaggacagagccaagcccgtgacccagatcgtgtctgccgaagcctggggcagagccgattgcgacgtgaagctggtggaaaagagcttcgagacagacaccaacctgaacttccagaacctgagcgtgatcggcttcagaatcctgctgctgaaagtggccggctttaacctgctgatgaccctgcggctgtggtccagccgcgccaagagaagcggatctggcgtgaagcagaccctgaatttcgacctgctgaagctggctggcgacgtggaatccaacccaggcccttctagaggccatatgaccgagtacaagcccacggtgcgcctcgccacccgcgacgacgtccccagggccgtacgcaccctcgccgccgcgttcgccgactaccccgccacgcgccacaccgtcgatccggaccgccacatcgagcgggtcaccgagctgcaagaactcttcctcacgcgcgtcgggctcgacatcggcaaggtgtgggtcgcggacgacggcgccgcggtggcggtctggaccacgccggagagcgtcgaagcgggggcggtgttcgccgagatcggcccgcgcatggccgagttgagcggttcccggctggccgcgcagcaacagatggaaggcctcctggcgccgcaccggcccaaggagcccgcgtggttcctggccaccgtcggcgtctcgcccgaccaccagggcaagggtctgggcagcgccgtcgtgctccccggagtggaggcggccgagcgcgccggggtgcccgccttcctggagacctccgcgccccgcaacctccccttctacgagcggctcggcttcaccgtcaccgccgacgtcgaggtgcccgaaggaccgcgcacctggtgcatgacccgcaagcccggtgcctga

SEQ ID NO: 8235 - DNA, 2600 bp, synthetic construct
  source 1..2600: mol_type = other DNA
atggccttaccagtgaccgccttgctcctgccgctggccttgctgctccacgccgccaggccgctcgagatccagaaccctgatcctgccgtgtaccagctgcgggatagcaagagcagcgacaagagcgtgtgtctgttcaccgacttcgacagccagaccaacgtgtcccagagcaaggactccgacgtgtacatcaccgataagaccgtgctggacatgcggagcatggacttcaagagcaactccgccgtggcctggtccaacaagtccgatttcgcctgcgccaacgccttcaacaacagcattatccccgaggacacattcttcccaagccccgagagcagctgcggctttaccagcgagagctaccagcagggcgtgctgagcgccaccatcctgtacgagacctgagcgtgatcggcttcagaatcctgctgctgaaagtggccggctttaacctgctgatgaccctgcggctgtggtccagcagggccaagcgatctggatctggagcaacaaacttctcactactcaaacaagcaggtgacgtggaggagaatcccgggcctactagcatggccttaccagtgaccgccttgctcctgccgctggccttgctgctccacgccgccaggccggacatccagatgacacagagccctagcagcctgtctgccagcgtgggagacagagtgaccatcacctgtagagccagccaggacatcagcaactacctgaactggtatcagcagaagcccggcaaggcccctaagctgctgatctactacaccagcagactgcacagcggcgtgcccagcagattttctggctctggcagcggcaccgacttcaccctgacaatatctagcctccagcctgaggacttcgccacctactattgccagcagggcaacaccctgccttacacatttggacagggcaccaaggtggaaatcaagagaggcggaggcggaagtggaggcggaggatctggcggcggaggctctgaagtgcagctggttgaatcaggtggcggcctggttcaacctggcggatctctgagactgagctgtgccgccagcggcttcaccttcagcgactactttatgagctgggtccgacaggcccctggcaaaggacttgaatgggtcgccaccatcagcaatggcggcacctacacttactaccccgacagcgtgaagggcagattcaccatctccagagacaacagcaagaacaccctgtacctccagatgaactccctgagagccgaggacaccgccgtgtactactgcgccagattcgacggctacatcttcgactattggggccagggcaccctggtcacagtctcttctacgcgtgaggacctgaagaacgtgttcccacctgaggtggccgtgttcgagcctagcgaggccgagatcagccacacccagaaagccaccctcgtgtgcctggctaccggcttctaccccgaccatgtggaactgtcttggtgggtcaacggcaaagaggtgcacagcggcgtgtctaccgacccccagccactgaaagaacagcccgccctgaacgacagccggtactgcctgagcagcagactgagagtgtccgccaccttctggcagaacccccggaaccacttcagatgccaggtgcagttctacggcctgagcgagaacgacgagtggacccaggacagagccaagcccgtgacccagatcgtgtctgccgaagcctggggcagagccgattgcgacgtgaagctggtggaaaagagcttcgagacagacaccaacctgaacttccagaacctgagcgtgatcggcttcagaatcctgctgctgaaagtggccggctttaacctgctgatgaccctgcggctgtggtccagccgcgccaagagaagcggatctggcgtgaagcagaccctgaatttcgacctgctgaagctggctggcgacgtggaatccaacccaggcccttctagaggccatatgaccgagtacaagcccacggtgcgcctcgccacccgcgacgacgtccccagggccgtacgcaccctcgccgccgcgttcgccgactaccccgccacgcgccacaccgtcgatccggaccgccacatcgagcgggtcaccgagctgcaagaactcttcctcacgcgcgtcgggctcgacatcggcaaggtgtgggtcgcggacgacggcgccgcggtggcggtctggaccacgccggagagcgtcgaagcgggggcggtgttcgccgagatcggcccgcgcatggccgagttgagcggttcccggctggccgcgcagcaacagatggaaggcctcctggcgccgcaccggcccaaggagcccgcgtggttcctggccaccgtcggcgtctcgcccgaccaccagggcaagggtctgggcagcgccgtcgtgctccccggagtggaggcggccgagcgcgccggggtgcccgccttcctggagacctccgcgccccgcaacctccccttctacgagcggctcggcttcaccgtcaccgccgacgtcgaggtgcccgaaggaccgcgcacctggtgcatgacccgcaagcccggtgcctga

SEQ ID NO: 8236 - DNA, 2612 bp, synthetic construct
  source 1..2612: mol_type = other DNA
atggccttaccagtgaccgccttgctcctgccgctggccttgctgctccacgccgccaggccgctcgagatccagaaccctgatcctgccgtgtaccagctgcgggatagcaagagcagcgacaagagcgtgtgtctgttcaccgacttcgacagccagaccaacgtgtcccagagcaaggactccgacgtgtacatcaccgataagaccgtgctggacatgcggagcatggacttcaagagcaactccgccgtggcctggtccaacaagtccgatttcgcctgcgccaacgccttcaacaacagcattatccccgaggacacattcttcccaagccccgagagcagctgcggctttaccagcgagagctaccagcagggcgtgctgagcgccaccatcctgtacgagacctgagcgtgatcggcttcagaatcctgctgctgaaagtggccggctttaacctgctgatgaccctgcggctgtggtccagcagggccaagcgatctggatctggagcaacaaacttctcactactcaaacaagcaggtgacgtggaggagaatcccgggcctactagcatggccttaccagtgaccgccttgctcctgccgctggccttgctgctccacgccgccaggccggacatccagatgacacagagccctagcagcctgtctgccagcgtgggagacagagtgaccatcacatgcaaggccagcgaccacatcaacaactggctggcctggtatcagcagaagcctggacaggcccctaagctgctgatctacggcgctaccacactggaaacaggcgtgcccagcagattttctggcagcggctctggcaccgactacaccctgacaatatccagcctccagcctgaggacttcgccacctactactgtcagcagagctggaacaccccttggacattcggccagggcaccaagctggaaatcaagagaggcggaggcggaagtggaggcggaggatctggcggcggaggctctcaagttcagcttcaacagcctggcgctgagctggtcaaacctggcgcttctgtgaagatgagctgcaaagccagcggctacgccttcagcagctactggatcaactggatgaagcagaaacccggccagggactcgaatggatcggccaaatctatcccggcgacggcgacaccaactacaacggcaagttcaagggcagagccacactgaccgccgatacctctagcagcacagcctacatgcagctgagcagcctgaccagcgaagatagcgccgtgtacttctgtgcccggtccatcacaacagtcgtgggctgcgctatggactattggggccagggaacaagcgtgaccgtgtctagtacgcgtgaggacctgaagaacgtgttcccacctgaggtggccgtgttcgagcctagcgaggccgagatcagccacacccagaaagccaccctcgtgtgcctggctaccggcttctaccccgaccatgtggaactgtcttggtgggtcaacggcaaagaggtgcacagcggcgtgtctaccgacccccagccactgaaagaacagcccgccctgaacgacagccggtactgcctgagcagcagactgagagtgtccgccaccttctggcagaacccccggaaccacttcagatgccaggtgcagttctacggcctgagcgagaacgacgagtggacccaggacagagccaagcccgtgacccagatcgtgtctgccgaagcctggggcagagccgattgcgacgtgaagctggtggaaaagagcttcgagacagacaccaacctgaacttccagaacctgagcgtgatcggcttcagaatcctgctgctgaaagtggccggctttaacctgctgatgaccctgcggctgtggtccagccgcgccaagagaagcggatctggcgtgaagcagaccctgaatttcgacctgctgaagctggctggcgacgtggaatccaacccaggcccttctagaggccatatgaccgagtacaagcccacggtgcgcctcgccacccgcgacgacgtccccagggccgtacgcaccctcgccgccgcgttcgccgactaccccgccacgcgccacaccgtcgatccggaccgccacatcgagcgggtcaccgagctgcaagaactcttcctcacgcgcgtcgggctcgacatcggcaaggtgtgggtcgcggacgacggcgccgcggtggcggtctggaccacgccggagagcgtcgaagcgggggcggtgttcgccgagatcggcccgcgcatggccgagttgagcggttcccggctggccgcgcagcaacagatggaaggcctcctggcgccgcaccggcccaaggagcccgcgtggttcctggccaccgtcggcgtctcgcccgaccaccagggcaagggtctgggcagcgccgtcgtgctccccggagtggaggcggccgagcgcgccggggtgcccgccttcctggagacctccgcgccccgcaacctccccttctacgagcggctcggcttcaccgtcaccgccgacgtcgaggtgcccgaaggaccgcgcacctggtgcatgacccgcaagcccggtgcctga

SEQ ID NO: 8237 - DNA, 2618 bp, synthetic construct
  source 1..2618: mol_type = other DNA
atggccttaccagtgaccgccttgctcctgccgctggccttgctgctccacgccgccaggccgctcgagatccagaaccctgatcctgccgtgtaccagctgcgggatagcaagagcagcgacaagagcgtgtgtctgttcaccgacttcgacagccagaccaacgtgtcccagagcaaggactccgacgtgtacatcaccgataagaccgtgctggacatgcggagcatggacttcaagagcaactccgccgtggcctggtccaacaagtccgatttcgcctgcgccaacgccttcaacaacagcattatccccgaggacacattcttcccaagccccgagagcagctgcggctttaccagcgagagctaccagcagggcgtgctgagcgccaccatcctgtacgagacctgagcgtgatcggcttcagaatcctgctgctgaaagtggccggctttaacctgctgatgaccctgcggctgtggtccagcagggccaagcgatctggatctggagcaacaaacttctcactactcaaacaagcaggtgacgtggaggagaatcccgggcctactagcatggccttaccagtgaccgccttgctcctgccgctggccttgctgctccacgccgccaggccgcagatcgtgctgtctcagtctcctgccatcctgagcgcttccccaggcgagaaagtgaccatgacctgtagagccagcagcagcgtgtcctacatgcactggtatcagcagaagcccggcagcagccctaagccttggatctacgccaccagcaatctggcctctggcgtgccagccagattttctggctctggcagcggcaccagctacagcttcacaatcagcagagtggaagccgaggacgccgccacctactattgtcagcagtggaccttcaatcctcctaccttcggcggaggcacccggctggaaatcaaaagaacagtggctgctggcggaggcggaagtggaggcggaggatctggcggcggaggctctcaggcttatctgcaacagagcggagccgaactcgtcagacctggcgcttctgtgaagatgagctgcaaggccagcggctacaccttcaccagctataatatgcactgggtcaagcagacccctcggcagggactcgaatggatcggcggaatctatcccggcaacggcgacacctcctacaaccagaagttcaagggcaaagccacactgaccgtgggcaagagcagcagcaccgcctatatgcagctcagcagcctgaccagcgaggacagcgccgtgtacttctgcgccagatacgactacaactacgctatggactactggggccagggcaccagcgtgacagttagctctgccagcacgcgtgaggacctgaagaacgtgttcccacctgaggtggccgtgttcgagcctagcgaggccgagatcagccacacccagaaagccaccctcgtgtgcctggctaccggcttctaccccgaccatgtggaactgtcttggtgggtcaacggcaaagaggtgcacagcggcgtgtctaccgacccccagccactgaaagaacagcccgccctgaacgacagccggtactgcctgagcagcagactgagagtgtccgccaccttctggcagaacccccggaaccacttcagatgccaggtgcagttctacggcctgagcgagaacgacgagtggacccaggacagagccaagcccgtgacccagatcgtgtctgccgaagcctggggcagagccgattgcgacgtgaagctggtggaaaagagcttcgagacagacaccaacctgaacttccagaacctgagcgtgatcggcttcagaatcctgctgctgaaagtggccggctttaacctgctgatgaccctgcggctgtggtccagccgcgccaagagaagcggatctggcgtgaagcagaccctgaatttcgacctgctgaagctggctggcgacgtggaatccaacccaggcccttctagaggccatatgaccgagtacaagcccacggtgcgcctcgccacccgcgacgacgtccccagggccgtacgcaccctcgccgccgcgttcgccgactaccccgccacgcgccacaccgtcgatccggaccgccacatcgagcgggtcaccgagctgcaagaactcttcctcacgcgcgtcgggctcgacatcggcaaggtgtgggtcgcggacgacggcgccgcggtggcggtctggaccacgccggagagcgtcgaagcgggggcggtgttcgccgagatcggcccgcgcatggccgagttgagcggttcccggctggccgcgcagcaacagatggaaggcctcctggcgccgcaccggcccaaggagcccgcgtggttcctggccaccgtcggcgtctcgcccgaccaccagggcaagggtctgggcagcgccgtcgtgctccccggagtggaggcggccgagcgcgccggggtgcccgccttcctggagacctccgcgccccgcaacctccccttctacgagcggctcggcttcaccgtcaccgccgacgtcgaggtgcccgaaggaccgcgcacctggtgcatgacccgcaagcccggtgcctga

SEQ ID NO: 8238 - DNA, 2612 bp, synthetic construct
  source 1..2612: mol_type = other DNA
atggccttaccagtgaccgccttgctcctgccgctggccttgctgctccacgccgccaggccgctcgagatccagaaccctgatcctgccgtgtaccagctgcgggatagcaagagcagcgacaagagcgtgtgtctgttcaccgacttcgacagccagaccaacgtgtcccagagcaaggactccgacgtgtacatcaccgataagaccgtgctggacatgcggagcatggacttcaagagcaactccgccgtggcctggtccaacaagtccgatttcgcctgcgccaacgccttcaacaacagcattatccccgaggacacattcttcccaagccccgagagcagctgcggctttaccagcgagagctaccagcagggcgtgctgagcgccaccatcctgtacgagacctgagcgtgatcggcttcagaatcctgctgctgaaagtggccggctttaacctgctgatgaccctgcggctgtggtccagcagggccaagcgatctggatctggagcaacaaacttctcactactcaaacaagcaggtgacgtggaggagaatcccgggcctactagcatggccttaccagtgaccgccttgctcctgccgctggccttgctgctccacgccgccaggccggagatcgtgctgacacagagccctgccaccctgtctctgagccctggcgaaagagccaccctgagctgtagagccagccagagcgtgtccagctacctggcctggtatcagcagaagcccggccaggctccccggctgctgatctacgatgccagcaatagagccaccggcatccccgccagattttccggctctggcagcggcaccgacttcaccctgaccatcagctccctggaacccgaggacttcgccgtgtactactgccagcagcggagcaactggcccatcacattcggccagggcacccggctggaaatcaaaggcggaggcggaagtggaggcggaggatctggcggcggaggctctgaggtgcagcttgttgagtctggcggaggactggtgcagcccgatagaagcctgagactgtcttgtgccgccagcggcttcaccttccacgattatgccatgcactgggtccgacaggcccctggcaaaggacttgaatgggtgtccaccatctcttggaacagcggcacaatcggctacgccgactctgtgaagggcagattcaccatcagccgggacaacgccaagaacagcctgtacctccagatgaactccctgagagccgaggacacagccctgtactactgcgccaaggacatccagtacggcaactactactacggcatggacgtgtggggccagggcacaacagtgacagtctcttctacgcgtgaggacctgaagaacgtgttcccacctgaggtggccgtgttcgagcctagcgaggccgagatcagccacacccagaaagccaccctcgtgtgcctggctaccggcttctaccccgaccatgtggaactgtcttggtgggtcaacggcaaagaggtgcacagcggcgtgtctaccgacccccagccactgaaagaacagcccgccctgaacgacagccggtactgcctgagcagcagactgagagtgtccgccaccttctggcagaacccccggaaccacttcagatgccaggtgcagttctacggcctgagcgagaacgacgagtggacccaggacagagccaagcccgtgacccagatcgtgtctgccgaagcctggggcagagccgattgcgacgtgaagctggtggaaaagagcttcgagacagacaccaacctgaacttccagaacctgagcgtgatcggcttcagaatcctgctgctgaaagtggccggctttaacctgctgatgaccctgcggctgtggtccagccgcgccaagagaagcggatctggcgtgaagcagaccctgaatttcgacctgctgaagctggctggcgacgtggaatccaacccaggcccttctagaggccatatgaccgagtacaagcccacggtgcgcctcgccacccgcgacgacgtccccagggccgtacgcaccctcgccgccgcgttcgccgactaccccgccacgcgccacaccgtcgatccggaccgccacatcgagcgggtcaccgagctgcaagaactcttcctcacgcgcgtcgggctcgacatcggcaaggtgtgggtcgcggacgacggcgccgcggtggcggtctggaccacgccggagagcgtcgaagcgggggcggtgttcgccgagatcggcccgcgcatggccgagttgagcggttcccggctggccgcgcagcaacagatggaaggcctcctggcgccgcaccggcccaaggagcccgcgtggttcctggccaccgtcggcgtctcgcccgaccaccagggcaagggtctgggcagcgccgtcgtgctccccggagtggaggcggccgagcgcgccggggtgcccgccttcctggagacctccgcgccccgcaacctccccttctacgagcggctcggcttcaccgtcaccgccgacgtcgaggtgcccgaaggaccgcgcacctggtgcatgacccgcaagcccggtgcctga

SEQ ID NO: 8239 - DNA, 2606 bp, synthetic construct
  source 1..2606: mol_type = other DNA
atggccttaccagtgaccgccttgctcctgccgctggccttgctgctccacgccgccaggccgctcgagatccagaaccctgatcctgccgtgtaccagctgcgggatagcaagagcagcgacaagagcgtgtgtctgttcaccgacttcgacagccagaccaacgtgtcccagagcaaggactccgacgtgtacatcaccgataagaccgtgctggacatgcggagcatggacttcaagagcaactccgccgtggcctggtccaacaagtccgatttcgcctgcgccaacgccttcaacaacagcattatccccgaggacacattcttcccaagccccgagagcagctgcggctttaccagcgagagctaccagcagggcgtgctgagcgccaccatcctgtacgagacctgagcgtgatcggcttcagaatcctgctgctgaaagtggccggctttaacctgctgatgaccctgcggctgtggtccagcagggccaagcgatctggatctggagcaacaaacttctcactactcaaacaagcaggtgacgtggaggagaatcccgggcctactagcatggccttaccagtgaccgccttgctcctgccgctggccttgctgctccacgccgccaggccggacatccagatgacccagagccccagcagcctgtctgccagcgtgggcgacagagtgaccatcacctgtagagccagccaggacgtgaacaccgccgtggcctggtatcagcagaagcctggcaaggcccccaagctgctgatctacagcgccagcttcctggaaagcggcgtgcccagcagattcagcggaagcagaagcggcaccgacttcaccctgaccatcagctccctccagcccgaggacttcgccacctactactgccagcagcactacaccacccctcccaccttcggccagaccaaggtggaaatcaagagaggcggaggcggaagtggaggcggaggatctggcggcggaggctctgaagtgcaactggtggaatctggcggcggactggtgcagcctggcggatctctgagactgagctgtgccgccagcggcttcaacatcaaggacacctacatccactgggtgcgccaggcccctggaaagggactggaatgggtggcccggatctaccccaccaacggctacaccagatacgccgacagcgtgaagggccggttcaccatcagcgccgacaccagcaagaataccgcctacctccagatgaacagcctgcgggccgaggataccgccgtgtactactgctcaagatggggaggcgacggcttctacgctatggacgtgtggggccagggcacccttgtgaccgtgtcatctacgcgtgaggacctgaagaacgtgttcccacctgaggtggccgtgttcgagcctagcgaggccgagatcagccacacccagaaagccaccctcgtgtgcctggctaccggcttctaccccgaccatgtggaactgtcttggtgggtcaacggcaaagaggtgcacagcggcgtgtctaccgacccccagccactgaaagaacagcccgccctgaacgacagccggtactgcctgagcagcagactgagagtgtccgccaccttctggcagaacccccggaaccacttcagatgccaggtgcagttctacggcctgagcgagaacgacgagtggacccaggacagagccaagcccgtgacccagatcgtgtctgccgaagcctggggcagagccgattgcgacgtgaagctggtggaaaagagcttcgagacagacaccaacctgaacttccagaacctgagcgtgatcggcttcagaatcctgctgctgaaagtggccggctttaacctgctgatgaccctgcggctgtggtccagccgcgccaagagaagcggatctggcgtgaagcagaccctgaatttcgacctgctgaagctggctggcgacgtggaatccaacccaggcccttctagaggccatatgaccgagtacaagcccacggtgcgcctcgccacccgcgacgacgtccccagggccgtacgcaccctcgccgccgcgttcgccgactaccccgccacgcgccacaccgtcgatccggaccgccacatcgagcgggtcaccgagctgcaagaactcttcctcacgcgcgtcgggctcgacatcggcaaggtgtgggtcgcggacgacggcgccgcggtggcggtctggaccacgccggagagcgtcgaagcgggggcggtgttcgccgagatcggcccgcgcatggccgagttgagcggttcccggctggccgcgcagcaacagatggaaggcctcctggcgccgcaccggcccaaggagcccgcgtggttcctggccaccgtcggcgtctcgcccgaccaccagggcaagggtctgggcagcgccgtcgtgctccccggagtggaggcggccgagcgcgccggggtgcccgccttcctggagacctccgcgccccgcaacctccccttctacgagcggctcggcttcaccgtcaccgccgacgtcgaggtgcccgaaggaccgcgcacctggtgcatgacccgcaagcccggtgcctga

SEQ ID NO: 8240 - DNA, 2243 bp, synthetic construct
  source 1..2243: mol_type = other DNA
atggccttaccagtgaccgccttgctcctgccgctggccttgctgctccacgccgccaggccgctcgagatccagaaccctgatcctgccgtgtaccagctgcgggatagcaagagcagcgacaagagcgtgtgtctgttcaccgacttcgacagccagaccaacgtgtcccagagcaaggactccgacgtgtacatcaccgataagaccgtgctggacatgcggagcatggacttcaagagcaactccgccgtggcctggtccaacaagtccgatttcgcctgcgccaacgccttcaacaacagcattatccccgaggacacattcttcccaagccccgagagcagctgcggctttaccagcgagagctaccagcagggcgtgctgagcgccaccatcctgtacgagacctgagcgtgatcggcttcagaatcctgctgctgaaagtggccggctttaacctgctgatgaccctgcggctgtggtccagcagggccaagcgatctggatctggagcaacaaacttctcactactcaaacaagcaggtgacgtggaggagaatcccgggcctactagcatggccctgcccgtgacagccctgctgctgcctctggctctgctgctgcacgccgccagacccgatgaattcgaggtgcaactggtggaaagcggcggaggcctggtgcaggctggcggatctctgagactgagctgtgccgccagcggcatcaccttcagcatcaacacaatgggctggtacagacaggcccctggcaagcagagggaactggtggccctgatctccagcatcggcgacacctactacgccgacagcgtgaagggccggttcaccatcagccgggacaacgccaagaacaccgtgtacctccagatgaacagcctgaagcccgaggacaccgccgtgtactactgcaagcggttcagaacagccgcccagggcaccgattattggggccagggaacacaagtgaccgtgtcctctacgcgtgaggacctgaagaacgtgttcccacctgaggtggccgtgttcgagcctagcgaggccgagatcagccacacccagaaagccaccctcgtgtgcctggctaccggcttctaccccgaccatgtggaactgtcttggtgggtcaacggcaaagaggtgcacagcggcgtgtctaccgacccccagccactgaaagaacagcccgccctgaacgacagccggtactgcctgagcagcagactgagagtgtccgccaccttctggcagaacccccggaaccacttcagatgccaggtgcagttctacggcctgagcgagaacgacgagtggacccaggacagagccaagcccgtgacccagatcgtgtctgccgaagcctggggcagagccgattgcgacgtgaagctggtggaaaagagcttcgagacagacaccaacctgaacttccagaacctgagcgtgatcggcttcagaatcctgctgctgaaagtggccggctttaacctgctgatgaccctgcggctgtggtccagccgcgccaagagaagcggatctggcgtgaagcagaccctgaatttcgacctgctgaagctggctggcgacgtggaatccaacccaggcccttctagaggccatatgaccgagtacaagcccacggtgcgcctcgccacccgcgacgacgtccccagggccgtacgcaccctcgccgccgcgttcgccgactaccccgccacgcgccacaccgtcgatccggaccgccacatcgagcgggtcaccgagctgcaagaactcttcctcacgcgcgtcgggctcgacatcggcaaggtgtgggtcgcggacgacggcgccgcggtggcggtctggaccacgccggagagcgtcgaagcgggggcggtgttcgccgagatcggcccgcgcatggccgagttgagcggttcccggctggccgcgcagcaacagatggaaggcctcctggcgccgcaccggcccaaggagcccgcgtggttcctggccaccgtcggcgtctcgcccgaccaccagggcaagggtctgggcagcgccgtcgtgctccccggagtggaggcggccgagcgcgccggggtgcccgccttcctggagacctccgcgccccgcaacctccccttctacgagcggctcggcttcaccgtcaccgccgacgtcgaggtgcccgaaggaccgcgcacctggtgcatgacccgcaagcccggtgcctga

SEQ ID NO: 8241 - DNA, 2243 bp, synthetic construct; identical to SEQ ID NO: 8240
  source 1..2243: mol_type = other DNA

SEQ ID NO: 8242 - DNA, 3038 bp, synthetic construct
  source 1..3038: mol_type = other DNA
atggccttaccagtgaccgccttgctcctgccgctggccttgctgctccacgccgccaggccgctcgagatccagaaccctgatcctgccgtgtaccagctgcgggatagcaagagcagcgacaagagcgtgtgtctgttcaccgacttcgacagccagaccaacgtgtcccagagcaaggactccgacgtgtacatcaccgataagaccgtgctggacatgcggagcatggacttcaagagcaactccgccgtggcctggtccaacaagtccgatttcgcctgcgccaacgccttcaacaacagcattatccccgaggacacattcttcccaagccccgagagcagctgcggctttaccagcgagagctaccagcagggcgtgctgagcgccaccatcctgtacgagacctgagcgtgatcggcttcagaatcctgctgctgaaagtggccggctttaacctgctgatgaccctgcggctgtggtccagcagggccaagcgatctggatctggagcaacaaacttctcactactcaaacaagcaggtgacgtggaggagaatcccgggcctactagcatggccttaccagtgaccgccttgctcctgccgctggccttgctgctccacgccgccaggccgcaggtccagctcgtcgagtccggcggcggcctcgtccaggccggcgactccgtcaccctctcctgcaccgcctccggccgcaccttctcctcctacgccctcgcctggttccgccagcgccccggcaaggagcgcgagttcgtcgccggcctccgctggggcggccccaccaactacgccgactccgtcaaggaccgcttcaccatctccggcgactccgccaagcacaccatgtacctccagatgaactccctcaagcccgaggacaccgccgtctactactgcggctacaaccccggcggctgggccgtcccctcccagtacgagtacgactcctggggccagggcacccaggtcaccgtctcctccggtaccggcggaggcggatctggcggcggaggtagcggtggcggaggatctgaattcgacatccagatgacacagagccctagcagcctgtctgccagcgtgggagacagagtgaccatcacatgcaaggccagcgaccacatcaacaactggctggcctggtatcagcagaagcctggacaggcccctaagctgctgatctacggcgctaccacactggaaacaggcgtgcccagcagattttctggcagcggctctggcaccgactacaccctgacaatatccagcctccagcctgaggacttcgccacctactactgtcagcagagctggaacaccccttggacattcggccagggcaccaagctggaaatcaagagaggcggaggcggaagtggaggcggaggatctggcggcggaggctctcaagttcagcttcaacagcctggcgctgagctggtcaaacctggcgcttctgtgaagatgagctgcaaagccagcggctacgccttcagcagctactggatcaactggatgaagcagaaacccggccagggactcgaatggatcggccaaatctatcccggcgacggcgacaccaactacaacggcaagttcaagggcagagccacactgaccgccgatacctctagcagcacagcctacatgcagctgagcagcctgaccagcgaagatagcgccgtgtacttctgtgcccggtccatcacaacagtcgtgggctgcgctatggactattggggccagggaacaagcgtgaccgtgtctagtacgcgtgaggacctgaagaacgtgttcccacctgaggtggccgtgttcgagcctagcgaggccgagatcagccacacccagaaagccaccctcgtgtgcctggctaccggcttctaccccgaccatgtggaactgtcttggtgggtcaacggcaaagaggtgcacagcggcgtgtctaccgacccccagccactgaaagaacagcccgccctgaacgacagccggtactgcctgagcagcagactgagagtgtccgccaccttctggcagaacccccggaaccacttcagatgccaggtgcagttctacggcctgagcgagaacgacgagtggacccaggacagagccaagcccgtgacccagatcgtgtctgccgaagcctggggcagagccgattgcgacgtgaagctggtggaaaagagcttcgagacagacaccaacctgaacttccagaacctgagcgtgatcggcttcagaatcctgctgctgaaagtggccggctttaacctgctgatgaccctgcggctgtggtccagccgcgccaagagaagcggatctggcgtgaagcagaccctgaatttcgacctgctgaagctggctggcgacgtggaatccaacccaggcccttctagaggccatatgaccgagtacaagcccacggtgcgcctcgccacccgcgacgacgtccccagggccgtacgcaccctcgccgccgcgttcgccgactaccccgccacgcgccacaccgtcgatccggaccgccacatcgagcgggtcaccgagctgcaagaactcttcctcacgcgcgtcgggctcgacatcggcaaggtgtgggtcgcggacgacggcgccgcggtggcggtctggaccacgccggagagcgtcgaagcgggggcggtgttcgccgagatcggcccgcgcatggccgagttgagcggttcccggctggccgcgcagcaacagatggaaggcctcctggcgccgcaccggcccaaggagcccgcgtggttcctggccaccgtcggcgtctcgcccgaccaccagggcaagggtctgggcagcgccgtcgtgctccccggagtggaggcggccgagcgcgccggggtgcccgccttcctggagacctccgcgccccgcaacctccccttctacgagcggctcggcttcaccgtcaccgccgacgtcgaggtgcccgaaggaccgcgcacctggtgcatgacccgcaagcccggtgcctga

SEQ ID NO: 8243 - DNA, 3425 bp, synthetic construct
  source 1..3425: mol_type = other DNA
atggccttaccagtgaccgccttgctcctgccgctggccttgctgctccacgccgccaggccgctcgagatccagaaccctgatcctgccgtgtaccagctgcgggatagcaagagcagcgacaagagcgtgtgtctgttcaccgacttcgacagccagaccaacgtgtcccagagcaaggactccgacgtgtacatcaccgataagaccgtgctggacatgcggagcatggacttcaagagcaactccgccgtggcctggtccaacaagtccgatttcgcctgcgccaacgccttcaacaacagcattatccccgaggacacattcttcccaagccccgagagcagctgcggctttaccagcgagagctaccagcagggcgtgctgagcgccaccatcctgtacgagacctgagcgtgatcggcttcagaatcctgctgctgaaagtggccggctttaacctgctgatgaccctgcggctgtggtccagcagggccaagcgatctggatctggagcaacaaacttctcactactcaaacaagcaggtgacgtggaggagaatcccgggcctactagcatggccttaccagtgaccgccttgctcctgccgctggccttgctgctccacgccgccaggccggaggttcagctgcttgagtctggcggaggactggttcaacctggcggaagcctgagactgtcttgtgccgccagcggcttcacctttagcagctacgccatgagctgggtccgacaggctcctggcaaaggactggaatgggtgtccagcatcagcggcagcggcgactacatctactacgccgatagcgtgaagggcagattcaccatcagccgggacatcagcaagaacaccctgtacctccagatgaacagcctgagagccgaggacaccgccgtgtactactgtgccaaagaaggcaccggcgctaacagcagcctggccgattatagaggccagggcacactggtcaccgtgtctagtggcggaggaagcggcggaggatctcaggtccagctcgtcgagtccggcggcggcctcgtccaggccggcgactccgtcaccctctcctgcaccgcctccggccgcaccttctcctcctacgccctcgcctggttccgccagcgccccggcaaggagcgcgagttcgtcgccggcctccgctggggcggccccaccaactacgccgactccgtcaaggaccgcttcaccatctccggcgactccgccaagcacaccatgtacctccagatgaactccctcaagcccgaggacaccgccgtctactactgcggctacaaccccggcggctgggccgtcccctcccagtacgagtacgactcctggggccagggcacccaggtcaccgtctcctccggtaccggcggaggcggatctggcggcggaggtagcggtggcggaggatctgaattcgacatccagatgacacagagccctagcagcctgtctgccagcgtgggagacagagtgaccatcacatgcaaggccagcgaccacatcaacaactggctggcctggtatcagcagaagcctggacaggcccctaagctgctgatctacggcgctaccacactggaaacaggcgtgcccagcagattttctggcagcggctctggcaccgactacaccctgacaatatccagcctccagcctgaggacttcgccacctactactgtcagcagagctggaacaccccttggacattcggccagggcaccaagctggaaatcaagagaggcggaggcggaagtggaggcggaggatctggcggcggaggctctcaagttcagcttcaacagcctggcgctgagctggtcaaacctggcgcttctgtgaagatgagctgcaaagccagcggctacgccttcagcagctactggatcaactggatgaagcagaaacccggccagggactcgaatggatcggccaaatctatcccggcgacggcgacaccaactacaacggcaagttcaagggcagagccacactgaccgccgatacctctagcagcacagcctacatgcagctgagcagcctgaccagcgaagatagcgccgtgtacttctgtgcccggtccatcacaacagtcgtgggctgcgctatggactattggggccagggaacaagcgtgaccgtgtctagtacgcgtgaggacctgaagaacgtgttcccacctgaggtggccgtgttcgagcctagcgaggccgagatcagccacacccagaaagccaccctcgtgtgcctggctaccggcttctaccccgaccatgtggaactgtcttggtgggtcaacggcaaagaggtgcacagcggcgtgtctaccgacccccagccactgaaagaacagcccgccctgaacgacagccggtactgcctgagcagcagactgagagtgtccgccaccttctggcagaacccccggaaccacttcagatgccaggtgcagttctacggcctgagcgagaacgacgagtggacccaggacagagccaagcccgtgacccagatcgtgtctgccgaagcctggggcagagccgattgcgacgtgaagctggtggaaaagagcttcgagacagacaccaacctgaacttccagaacctgagcgtgatcggcttcagaatcctgctgctgaaagtggccggctttaacctgctgatgaccctgcggctgtggtccagccgcgccaagagaagcggatctggcgtgaagcagaccctgaatttcgacctgctgaagctggctggcgacgtggaatccaacccaggcccttctagaggccatatgaccgagtacaagcccacggtgcgcctcgccacccgcgacgacgtccccagggccgtacgcaccctcgccgccgcgttcgccgactaccccgccacgcgccacaccgtcgatccggaccgccacatcgagcgggtcaccgagctgcaagaactcttcctcacgcgcgtcgggctcgacatcggcaaggtgtgggtcgcggacgacggcgccgcggtggcggtctggaccacgccggagagcgtcgaagcgggggcggtgttcgccgagatcggcccgcgcatggccgagttgagcggttcccggctggccgcgcagcaacagatggaaggcctcctggcgccgcaccggcccaaggagcccgcgtggttcctggccaccgtcggcgtctcgcccgaccaccagggcaagggtctgggcagcgccgtcgtgctccccggagtggaggcggccgagcgcgccggggtgcccgccttcctggagacctccgcgccccgcaacctccccttctacgagcggctcggcttcaccgtcaccgccgacgtcgaggtgcccgaaggaccgcgcacctggtgcatgacccgcaagcccggtgcctga

SEQ ID NO: 8244 - DNA, 3425 bp, synthetic construct; identical to SEQ ID NO: 8243
  source 1..3425: mol_type = other DNA

SEQ ID NO: 8245 - DNA, 2261 bp, synthetic construct
  source 1..2261: mol_type = other DNA
atggccttaccagtgaccgccttgctcctgccgctggccttgctgctccacgccgccaggccgctcgagatccagaaccctgatcctgccgtgtaccagctgcgggatagcaagagcagcgacaagagcgtgtgtctgttcaccgacttcgacagccagaccaacgtgtcccagagcaaggactccgacgtgtacatcaccgataagaccgtgctggacatgcggagcatggacttcaagagcaactccgccgtggcctggtccaacaagtccgatttcgcctgcgccaacgccttcaacaacagcattatccccgaggacacattcttcccaagccccgagagcagctgcggctttaccagcgagagctaccagcagggcgtgctgagcgccaccatcctgtacgagacctgagcgtgatcggcttcagaatcctgctgctgaaagtggccggctttaacctgctgatgaccctgcggctgtggtccagcagggccaagcgatctggatctggagcaacaaacttctcactactcaaacaagcaggtgacgtggaggagaatcccgggcctactagcatggccctgcccgtgacagccctgctgctgcctctggctctgctgctgcacgccgccagacccgatgaattcggctctgacctgggcatcaagctgctgttcgccgctgccaagggccaggacgacgaagtgcggattctgctggctgctggggccgacgtgaacgccaaggatttcgagggctacacccccctgcacgtggccgcctatgatggacacctggaaatcgtggaagtgctgctgaaggctggcgctgatgtgaatgccaaagacagccagggccggacccctctgcatgaagccgcctacagcggccatctggaaattgtggaagtgctgctgaaagccggggcagacgtgaacgctcaggacgacgctggcgagacaccagccgatctggctgcagcttggggccacgaagatatcgccgaggtgctgcagaagacgcgtgaggacctgaagaacgtgttcccacctgaggtggccgtgttcgagcctagcgaggccgagatcagccacacccagaaagccaccctcgtgtgcctggctaccggcttctaccccgaccatgtggaactgtcttggtgggtcaacggcaaagaggtgcacagcggcgtgtctaccgacccccagccactgaaagaacagcccgccctgaacgacagccggtactgcctgagcagcagactgagagtgtccgccaccttctggcagaacccccggaaccacttcagatgccaggtgcagttctacggcctgagcgagaacgacgagtggacccaggacagagccaagcccgtgacccagatcgtgtctgccgaagcctggggcagagccgattgcgacgtgaagctggtggaaaagagcttcgagacagacaccaacctgaacttccagaacctgagcgtgatcggcttcagaatcctgctgctgaaagtggccggctttaacctgctgatgaccctgcggctgtggtccagccgcgccaagagaagcggatctggcgtgaagcagaccctgaatttcgacctgctgaagctggctggcgacgtggaatccaacccaggcccttctagaggccatatgaccgagtacaagcccacggtgcgcctcgccacccgcgacgacgtccccagggccgtacgcaccctcgccgccgcgttcgccgactaccccgccacgcgccacaccgtcgatccggaccgccacatcgagcgggtcaccgagctgcaagaactcttcctcacgcgcgtcgggctcgacatcggcaaggtgtgggtcgcggacgacggcgccgcggtggcggtctggaccacgccggagagcgtcgaagcgggggcggtgttcgccgagatcggcccgcgcatggccgagttgagcggttcccggctggccgcgcagcaacagatggaaggcctcctggcgccgcaccggcccaaggagcccgcgtggttcctggccaccgtcggcgtctcgcccgaccaccagggcaagggtctgggcagcgccgtcgtgctccccggagtggaggcggccgagcgcgccggggtgcccgccttcctggagacctccgcgccccgcaacctccccttctacgagcggctcggcttcaccgtcaccgccgacgtcgaggtgcccgaaggaccgcgcacctggtgcatgacccgcaagcccggtgcctga

SEQ ID NO: 8246 - DNA, 2048 bp, synthetic construct
  source 1..2048: mol_type = other DNA
atggccttaccagtgaccgccttgctcctgccgctggccttgctgctccacgccgccaggccgctcgagatccagaaccctgatcctgccgtgtaccagctgcgggatagcaagagcagcgacaagagcgtgtgtctgttcaccgacttcgacagccagaccaacgtgtcccagagcaaggactccgacgtgtacatcaccgataagaccgtgctggacatgcggagcatggacttcaagagcaactccgccgtggcctggtccaacaagtccgatttcgcctgcgccaacgccttcaacaacagcattatccccgaggacacattcttcccaagccccgagagcagctgcggctttaccagcgagagctaccagcagggcgtgctgagcgccaccatcctgtacgagacctgagcgtgatcggcttcagaatcctgctgctgaaagtggccggctttaacctgctgatgaccctgcggctgtggtccagcagggccaagcgatctggatctggagcaacaaacttctcactactcaaacaagcaggtgacgtggaggagaatcccgggcctactagcatggactggatttggcgcatccttttccttgtcggcgctgctaccggcgcccattccttcgaaggcagcggattcgaatacgccaaagagatgcggaacgcctactgggagatcgccctgctgcccaatctgaccaaccagcagaagagagcccccatcagaaagctgtacgacgacccctcccagagcagcgagctgctgtctgaggctaaaaaactgaacgatagccagacgcgtgaggacctgaagaacgtgttcccacctgaggtggccgtgttcgagcctagcgaggccgagatcagccacacccagaaagccaccctcgtgtgcctggctaccggcttctaccccgaccatgtggaactgtcttggtgggtcaacggcaaagaggtgcacagcggcgtgtctaccgacccccagccactgaaagaacagcccgccctgaacgacagccggtactgcctgagcagcagactgagagtgtccgccaccttctggcagaacccccggaaccacttcagatgccaggtgcagttctacggcctgagcgagaacgacgagtggacccaggacagagccaagcccgtgacccagatcgtgtctgccgaagcctggggcagagccgattgcgacgtgaagctggtggaaaagagcttcgagacagacaccaacctgaacttccagaacctgagcgtgatcggcttcagaatcctgctgctgaaagtggccggctttaacctgctgatgaccctgcggctgtggtccagccgcgccaagagaagcggatctggcgtgaagcagaccctgaatttcgacctgctgaagctggctggcgacgtggaatccaacccaggcccttctagaggccatatgaccgagtacaagcccacggtgcgcctcgccacccgcgacgacgtccccagggccgtacgcaccctcgccgccgcgttcgccgactaccccgccacgcgccacaccgtcgatccggaccgccacatcgagcgggtcaccgagctgcaagaactcttcctcacgcgcgtcgggctcgacatcggcaaggtgtgggtcgcggacgacggcgccgcggtggcggtctggaccacgccggagagcgtcgaagcgggggcggtgttcgccgagatcggcccgcgcatggccgagttgagcggttcccggctggccgcgcagcaacagatggaaggcctcctggcgccgcaccggcccaaggagcccgcgtggttcctggccaccgtcggcgtctcgcccgaccaccagggcaagggtctgggcagcgccgtcgtgctccccggagtggaggcggccgagcgcgccggggtgcccgccttcctggagacctccgcgccccgcaacctccccttctacgagcggctcggcttcaccgtcaccgccgacgtcgaggtgcccgaaggaccgcgcacctggtgcatgacccgcaagcccggtgcctga

SEQ ID NO: 8247 - DNA, 2714 bp, synthetic construct
  source 1..2714: mol_type = other DNA
atggccttaccagtgaccgccttgctcctgccgctggccttgctgctccacgccgccaggccgctcgagatccagaaccctgatcctgccgtgtaccagctgcgggatagcaagagcagcgacaagagcgtgtgtctgttcaccgacttcgacagccagaccaacgtgtcccagagcaaggactccgacgtgtacatcaccgataagaccgtgctggacatgcggagcatggacttcaagagcaactccgccgtggcctggtccaacaagtccgatttcgcctgcgccaacgccttcaacaacagcattatccccgaggacacattcttcccaagccccgagagcagctgcggctttaccagcgagagctaccagcagggcgtgctgagcgccaccatcctgtacgagacctgagcgtgatcggcttcagaatcctgctgctgaaagtggccggctttaacctgctgatgaccctgcggctgtggtccagcagggccaagcgatctggatctggagcaacaaacttctcactactcaaacaagcaggtgacgtggaggagaatcccgggcctactagcatggccctgcccgtgacagccctgctgctgcctctggctctgctgctgcacgccgccagacccgatgaattcgaggtgcaactggtggaaagcggcggaggcctggtgcaggctggcggatctctgagactgagctgtgccgccagcggcatcaccttcagcatcaacacaatgggctggtacagacaggcccctggcaagcagagggaactggtggccctgatctccagcatcggcgacacctactacgccgacagcgtgaagggccggttcaccatcagccgggacaacgccaagaacaccgtgtacctccagatgaacagcctgaagcccgaggacaccgccgtgtactactgcaagcggttcagaacagccgcccagggcaccgattattggggccagggaacacaagtgaccgtgtcctctctcgagggaggaggcggctccgggggaggcggaagtggaggcggaggatctgggtctggaggaagcggatctggaggctcagggtcagggggctcaggcagtggaggctctttcgaagtgcaactggtggaatctgggggcggactggtgcagccaggcggaagtctgaggctgtcttgtgccgcctccggcagcatcttcggcttcaacgacatggcctggtatcggcaggctcccggaaaacagcgcgagctggtggctctgattagcagagtgggcgtgaccagcagcgccgactctgtgaagggcagattcacaatctccagagtgaacgccaaggatacagtgtacctccagatgaactctctgaaacctgaggatacagcagtgtactattgctacatggaccagcggctggacggcagcacactggcctactggggacagggaactcaagtgacagtgtctagcacgcgtgaggacctgaagaacgtgttcccacctgaggtggccgtgttcgagcctagcgaggccgagatcagccacacccagaaagccaccctcgtgtgcctggctaccggcttctaccccgaccatgtggaactgtcttggtgggtcaacggcaaagaggtgcacagcggcgtgtctaccgacccccagccactgaaagaacagcccgccctgaacgacagccggtactgcctgagcagcagactgagagtgtccgccaccttctggcagaacccccggaaccacttcagatgccaggtgcagttctacggcctgagcgagaacgacgagtggacccaggacagagccaagcccgtgacccagatcgtgtctgccgaagcctggggcagagccgattgcgacgtgaagctggtggaaaagagcttcgagacagacaccaacctgaacttccagaacctgagcgtgatcggcttcagaatcctgctgctgaaagtggccggctttaacctgctgatgaccctgcggctgtggtccagccgcgccaagagaagcggatctggcgtgaagcagaccctgaatttcgacctgctgaagctggctggcgacgtggaatccaacccaggcccttctagaggccatatgaccgagtacaagcccacggtgcgcctcgccacccgcgacgacgtccccagggccgtacgcaccctcgccgccgcgttcgccgactaccccgccacgcgccacaccgtcgatccggaccgccacatcgagcgggtcaccgagctgcaagaactcttcctcacgcgcgtcgggctcgacatcggcaaggtgtgggtcgcggacgacggcgccgcggtggcggtctggaccacgccggagagcgtcgaagcgggggcggtgttcgccgagatcggcccgcgcatggccgagttgagcggttcccggctggccgcgcagcaacagatggaaggcctcctggcgccgcaccggcccaaggagcccgcgtggttcctggccaccgtcggcgtctcgcccgaccaccagggcaagggtctgggcagcgccgtcgtgctccccggagtggaggcggccgagcgcgccggggtgcccgccttcctggagacctccgcgccccgcaacctccccttctacgagcggctcggcttcaccgtcaccgccgacgtcgaggtgcccgaaggaccgcgcacctggtgcatgacccgcaagcccggtgcctga

SEQ ID NO: 8248 - DNA, 2456 bp, synthetic construct
  source 1..2456: mol_type = other DNA
atggccttaccagtgaccgccttgctcctgccgctggccttgctgctccacgccgccaggccgctcgagatccagaaccctgatcctgccgtgtaccagctgcgggatagcaagagcagcgacaagagcgtgtgtctgttcaccgacttcgacagccagaccaacgtgtcccagagcaaggactccgacgtgtacatcaccgataagaccgtgctggacatgcggagcatggacttcaagagcaactccgccgtggcctggtccaacaagtccgatttcgcctgcgccaacgccttcaacaacagcattatccccgaggacacattcttcccaagccccgagagcagctgcggctttaccagcgagagctaccagcagggcgtgctgagcgccaccatcctgtacgagacctgagcgtgatcggcttcagaatcctgctgctgaaagtggccggctttaacctgctgatgaccctgcggctgtggtccagcagggccaagcgatctggatctggagcaacaaacttctcactactcaaacaagcaggtgacgtggaggagaatcccgggcctactagcatggcccttccagtcactgccttgctgttgcctctggcgctcctgctccacgccgctagaccgggcatgagaaccgaggacctgcctaaggccgtggtgttcctggaaccccagtggtacagagtgctggaaaaggacagcgtgaccctgaagtgccagggcgcctacagccccgaggacaatagcacccagtggttccacaacgagagcctgatctccagccaggccagcagctacttcatcgacgccgccaccgtggacgacagcggcgagtatagatgccagaccaacctgagcaccctgagcgaccccgtgcagctggaagtgcacatcggatggctgctgctgcaggcccccagatgggtgttcaaagaagaggaccccatccacctgagatgccactcttggaagaacaccgccctgcacaaagtgacctacctgcagaacggcaagggcagaaagtacttccaccacaacagcgacttctacatccccaaggccaccctgaaggactccggctcctacttctgcagaggcctcgtgggcagcaagaacgtgtccagcgagacagtgaacatcaccatcacccagggcctggccgtgtctaccatcagcagctttttcccacccggctaccagacgcgtgaggacctgaagaacgtgttcccacctgaggtggccgtgttcgagcctagcgaggccgagatcagccacacccagaaagccaccctcgtgtgcctggctaccggcttctaccccgaccatgtggaactgtcttggtgggtcaacggcaaagaggtgcacagcggcgtgtctaccgacccccagccactgaaagaacagcccgccctgaacgacagccggtactgcctgagcagcagactgagagtgtccgccaccttctggcagaacccccggaaccacttcagatgccaggtgcagttctacggcctgagcgagaacgacgagtggacccaggacagagccaagcccgtgacccagatcgtgtctgccgaagcctggggcagagccgattgcgacgtgaagctggtggaaaagagcttcgagacagacaccaacctgaacttccagaacctgagcgtgatcggcttcagaatcctgctgctgaaagtggccggctttaacctgctgatgaccctgcggctgtggtccagccgcgccaagagaagcggatctggcgtgaagcagaccctgaatttcgacctgctgaagctggctggcgacgtggaatccaacccaggcccttctagaggccatatgaccgagtacaagcccacggtgcgcctcgccacccgcgacgacgtccccagggccgtacgcaccctcgccgccgcgttcgccgactaccccgccacgcgccacaccgtcgatccggaccgccacatcgagcgggtcaccgagctgcaagaactcttcctcacgcgcgtcgggctcgacatcggcaaggtgtgggtcgcggacgacggcgccgcggtggcggtctggaccacgccggagagcgtcgaagcgggggcggtgttcgccgagatcggcccgcgcatggccgagttgagcggttcccggctggccgcgcagcaacagatggaaggcctcctggcgccgcaccggcccaaggagcccgcgtggttcctggccaccgtcggcgtctcgcccgaccaccagggcaagggtctgggcagcgccgtcgtgctccccggagtggaggcggccgagcgcgccggggtgcccgccttcctggagacctccgcgccccgcaacctccccttctacgagcggctcggcttcaccgtcaccgccgacgtcgaggtgcccgaaggaccgcgcacctggtgcatgacccgcaagcccggtgcctga

SEQ ID NO: 8249 - DNA, 2462 bp, synthetic construct
  source 1..2462: mol_type = other DNA
atggccttaccagtgaccgccttgctcctgccgctggccttgctgctccacgccgccaggccgctcgagatccagaaccctgatcctgccgtgtaccagctgcgggatagcaagagcagcgacaagagcgtgtgtctgttcaccgacttcgacagccagaccaacgtgtcccagagcaaggactccgacgtgtacatcaccgataagaccgtgctggacatgcggagcatggacttcaagagcaactccgccgtggcctggtccaacaagtccgatttcgcctgcgccaacgccttcaacaacagcattatccccgaggacacattcttcccaagccccgagagcagctgcggctttaccagcgagagctaccagcagggcgtgctgagcgccaccatcctgtacgagacctgagcgtgatcggcttcagaatcctgctgctgaaagtggccggctttaacctgctgatgaccctgcggctgtggtccagcagggccaagcgatctggatctggagcaacaaacttctcactactcaaacaagcaggtgacgtggaggagaatcccgggcctactagcgccaccatggccttaccagtgaccgccttgctcctgccgctggccttgctgctccacgccgccaggccgggcatgcggactgaagacctcccaaaggctgtggtgttcctggagcctcaatggtacagggtgctggagaaggacagtgtgactctgaagtgccagggagcctactcccctgaggacaattccacacagtggtttcacaatgagagcctcatctcaagccaggcctccagctacttcattgacgctgccacagtggacgacagtggagagtacaggtgccagacaaacctctccaccctcagtgacccggtgcagctagaagtccatatcggctggctgttgctccaggcccctcggtgggtgttcaaggaggaagaccctattcacctgaggtgtcacagctggaagaacactgctctgcataaggtcacatatttacagaatggcaaaggcaggaagtattttcatcataattctgacttctacattccaaaagccacactcaaagacagcggctcctacttctgcagggggcttgttgggagtaaaaatgtgtcttcagagactgtgaacatcaccatcactcaaggtttggcagtgtcaaccatctcatcattctttccacctggctaccaaacgcgtgaggacctgaagaacgtgttcccacctgaggtggccgtgttcgagcctagcgaggccgagatcagccacacccagaaagccaccctcgtgtgcctggctaccggcttctaccccgaccatgtggaactgtcttggtgggtcaacggcaaagaggtgcacagcggcgtgtctaccgacccccagccactgaaagaacagcccgccctgaacgacagccggtactgcctgagcagcagactgagagtgtccgccaccttctggcagaacccccggaaccacttcagatgccaggtgcagttctacggcctgagcgagaacgacgagtggacccaggacagagccaagcccgtgacccagatcgtgtctgccgaagcctggggcagagccgattgcgacgtgaagctggtggaaaagagcttcgagacagacaccaacctgaacttccagaacctgagcgtgatcggcttcagaatcctgctgctgaaagtggccggctttaacctgctgatgaccctgcggctgtggtccagccgcgccaagagaagcggatctggcgtgaagcagaccctgaatttcgacctgctgaagctggctggcgacgtggaatccaacccaggcccttctagaggccatatgaccgagtacaagcccacggtgcgcctcgccacccgcgacgacgtccccagggccgtacgcaccctcgccgccgcgttcgccgactaccccgccacgcgccacaccgtcgatccggaccgccacatcgagcgggtcaccgagctgcaagaactcttcctcacgcgcgtcgggctcgacatcggcaaggtgtgggtcgcggacgacggcgccgcggtggcggtctggaccacgccggagagcgtcgaagcgggggcggtgttcgccgagatcggcccgcgcatggccgagttgagcggttcccggctggccgcgcagcaacagatggaaggcctcctggcgccgcaccggcccaaggagcccgcgtggttcctggccaccgtcggcgtctcgcccgaccaccagggcaagggtctgggcagcgccgtcgtgctccccggagtggaggcggccgagcgcgccggggtgcccgccttcctggagacctccgcgccccgcaacctccccttctacgagcggctcggcttcaccgtcaccgccgacgtcgaggtgcccgaaggaccgcgcacctggtgcatgacccgcaagcccggtgcctga

SEQ ID NO: 8250 - DNA, 2597 bp, synthetic construct
  source 1..2597: mol_type = other DNA
atggccttaccagtgaccgccttgctcctgccgctggccttgctgctccacgccgccaggccgctcgaggaggacctgaagaacgtgttcccacctgaggtggccgtgttcgagcctagcgaggccgagatcagccacacccagaaagccaccctcgtgtgcctggctaccggcttctaccccgaccatgtggaactgtcttggtgggtcaacggcaaagaggtgcacagcggcgtgtctaccgacccccagccactgaaagaacagcccgccctgaacgacagccggtactgcctgagcagcagactgagagtgtccgccaccttctggcagaacccccggaaccacttcagatgccaggtgcagttctacggcctgagcgagaacgacgagtggacccaggacagagccaagcccgtgacccagatcgtgtctgccgaagcctggggcagagccgattgcggctttaccagcgagagctaccagcagggcgtgctgagcgccaccaacctgagcgtgatcggcttcagaatcctgctgctgaaagtggccggctttaacctgctgatgaccctgcggctgtggtccagcagggccaagcgatctggatctggagcaacaaacttctcactactcaaacaagcaggtgacgtggaggagaatcccgggcctactagcatggccttaccagtgaccgccttgctcctgccgctggccttgctgctccacgccgccaggccggacatccagatgacacagactacatcctccctgtctgcctctctgggagacagagtcaccatcagttgcagggcaagtcaggacattagtaaatatttaaattggtatcagcagaaaccagatggaactgttaaactcctgatctaccatacatcaagattacactcaggagtcccatcaaggttcagtggcagtgggtctggaacagattattctctcaccattagcaacctggagcaagaagatattgccacttacttttgccaacagggtaatacgcttccgtacacgttcggaggggggaccaagctggagatcacaggtggcggtggctcgggcggtggtgggtcgggtggcggcggatctgaggtgaaactgcaggagtcaggacctggcctggtggcgccctcacagagcctgtccgtcacatgcactgtctcaggggtctcattacccgactatggtgtaagctggattcgccagcctccacgaaagggtctggagtggctgggagtaatatggggtagtgaaaccacatactataattcagctctcaaatccagactgaccatcatcaaggacaactccaagagccaagttttcttaaaaatgaacagtctgcaaactgatgacacagccatttactactgtgccaaacattattactacggtggtagctatgctatggactactggggtcaaggaacctcagtcaccgtctcctcaacgcgtatccagaaccctgatcctgccgtgtaccagctgcgggatagcaagagcagcgacaagagcgtgtgtctgttcaccgacttcgacagccagaccaacgtgtcccagagcaaggactccgacgtgtacatcaccgataagaccgtgctggacatgcggagcatggacttcaagagcaactccgccgtggcctggtccaacaagtccgatttcgcctgcgccaacgccttcaacaacagcattatccccgaggacacattcttcccaagccccgagagcagctgcgacgtgaagctggtggaaaagagcttcgagacagacaccaacctgaacttccagatcctgtacgagtgatcggcttcagaatcctgctgctgaaagtggccggctttaacctgctgatgaccctgcggctgtggtccagccgcgccaagagaagcggatctggcgtgaagcagaccctgaatttcgacctgctgaagctggctggcgacgtggaatccaacccaggcccttctagaggccatatgaccgagtacaagcccacggtgcgcctcgccacccgcgacgacgtccccagggccgtacgcaccctcgccgccgcgttcgccgactaccccgccacgcgccacaccgtcgatccggaccgccacatcgagcgggtcaccgagctgcaagaactcttcctcacgcgcgtcgggctcgacatcggcaaggtgtgggtcgcggacgacggcgccgcggtggcggtctggaccacgccggagagcgtcgaagcgggggcggtgttcgccgagatcggcccgcgcatggccgagttgagcggttcccggctggccgcgcagcaacagatggaaggcctcctggcgccgcaccggcccaaggagcccgcgtggttcctggccaccgtcggcgtctcgcccgaccaccagggcaagggtctgggcagcgccgtcgtgctccccggagtggaggcggccgagcgcgccggggtgcccgccttcctggagacctccgcgccccgcaacctccccttctacgagcggctcggcttcaccgtcaccgccgacgtcgaggtgcccgaaggaccgcgcacctggtgcatgacccgcaagcccggtgcctga

SEQ ID NO: 8251 - DNA, 2600 bp, synthetic construct
  source 1..2600: mol_type = other DNA
atggccttaccagtgaccgccttgctcctgccgctggccttgctgctccacgccgccaggccgctcgaggaggacctgaagaacgtgttcccacctgaggtggccgtgttcgagcctagcgaggccgagatcagccacacccagaaagccaccctcgtgtgcctggctaccggcttctaccccgaccatgtggaactgtcttggtgggtcaacggcaaagaggtgcacagcggcgtgtctaccgacccccagccactgaaagaacagcccgccctgaacgacagccggtactgcctgagcagcagactgagagtgtccgccaccttctggcagaacccccggaaccacttcagatgccaggtgcagttctacggcctgagcgagaacgacgagtggacccaggacagagccaagcccgtgacccagatcgtgtctgccgaagcctggggcagagccgattgcggctttaccagcgagagctaccagcagggcgtgctgagcgccaccaacctgagcgtgatcggcttcagaatcctgctgctgaaagtggccggctttaacctgctgatgaccctgcggctgtggtccagcagggccaagcgatctggatctggagcaacaaacttctcactactcaaacaagcaggtgacgtggaggagaatcccgggcctactagcaccatggccttaccagtgaccgccttgctcctgccgctggccttgctgctccacgccgccaggccggagatcgtgatgacccagagccctgccaccctgtctctgagccctggcgaaagagccaccctgagctgtagagccagccaggacatcagcaagtacctgaactggtatcagcagaagcccggccaggcccccagactgctgatctaccacaccagcagactgcacagcggcatccccgccagattttctggctctggcagcggcaccgactacaccctgacaatcagcagcctccagcccgaggacttcgccgtgtacttctgtcagcaaggcaacaccctgccctacaccttcggccagggcaccaagctggaaatcaagggcggaggcggaagtggaggcggaggatctggcggcggaggctctcaggtgcaactccaggaatctggccctggcctcgtgaagcccagcgagacactgagcctgacctgtaccgtgtccggcgtgtccctgcctgactatggcgtgtcctggatcagacagccccctggcaagggcctggaatggatcggagtgatttggggcagcgaaaccacctactacaacagctccctgaagtccagagtgaccatctccaaggacaactccaagaaccaggtgtccctgaagctgagcagcgtgacagccgccgacaccgccgtgtattactgcgccaagcactactactacggcggcagctacgctatggactactggggccagggaaccctcgtgaccgtgtctagtacgcgtatccagaaccctgatcctgccgtgtaccagctgcgggatagcaagagcagcgacaagagcgtgtgtctgttcaccgacttcgacagccagaccaacgtgtcccagagcaaggactccgacgtgtacatcaccgataagaccgtgctggacatgcggagcatggacttcaagagcaactccgccgtggcctggtccaacaagtccgatttcgcctgcgccaacgccttcaacaacagcattatccccgaggacacattcttcccaagccccgagagcagctgcgacgtgaagctggtggaaaagagcttcgagacagacaccaacctgaacttccagatcctgtacgagtgatcggcttcagaatcctgctgctgaaagtggccggctttaacctgctgatgaccctgcggctgtggtccagccgcgccaagagaagcggatctggcgtgaagcagaccctgaatttcgacctgctgaagctggctggcgacgtggaatccaacccaggcccttctagaggccatatgaccgagtacaagcccacggtgcgcctcgccacccgcgacgacgtccccagggccgtacgcaccctcgccgccgcgttcgccgactaccccgccacgcgccacaccgtcgatccggaccgccacatcgagcgggtcaccgagctgcaagaactcttcctcacgcgcgtcgggctcgacatcggcaaggtgtgggtcgcggacgacggcgccgcggtggcggtctggaccacgccggagagcgtcgaagcgggggcggtgttcgccgagatcggcccgcgcatggccgagttgagcggttcccggctggccgcgcagcaacagatggaaggcctcctggcgccgcaccggcccaaggagcccgcgtggttcctggccaccgtcggcgtctcgcccgaccaccagggcaagggtctgggcagcgccgtcgtgctccccggagtggaggcggccgagcgcgccggggtgcccgccttcctggagacctccgcgccccgcaacctccccttctacgagcggctcggcttcaccgtcaccgccgacgtcgaggtgcccgaaggaccgcgcacctggtgcatgacccgcaagcccggtgcctga

SEQ ID NO: 8252 - DNA, 2603 bp, synthetic construct
  source 1..2603: mol_type = other DNA
atggccttaccagtgaccgccttgctcctgccgctggccttgctgctccacgccgccaggccgctcgaggaggacctgaagaacgtgttcccacctgaggtggccgtgttcgagcctagcgaggccgagatcagccacacccagaaagccaccctcgtgtgcctggctaccggcttctaccccgaccatgtggaactgtcttggtgggtcaacggcaaagaggtgcacagcggcgtgtctaccgacccccagccactgaaagaacagcccgccctgaacgacagccggtactgcctgagcagcagactgagagtgtccgccaccttctggcagaacccccggaaccacttcagatgccaggtgcagttctacggcctgagcgagaacgacgagtggacccaggacagagccaagcccgtgacccagatcgtgtctgccgaagcctggggcagagccgattgcggctttaccagcgagagctaccagcagggcgtgctgagcgccaccaacctgagcgtgatcggcttcagaatcctgctgctgaaagtggccggctttaacctgctgatgaccctgcggctgtggtccagcagggccaagcgatctggatctggagcaacaaacttctcactactcaaacaagcaggtgacgtggaggagaatcccgggcctactagcaccatggccttaccagtgaccgccttgctcctgccgctggccttgctgctccacgccgccaggccggacgagatcgtgctgacacagagccccgccaccctgtcactgtctccaggcgaaagagccaccctgagctgtagcgccagcagcagcgtgtcctacatgcactggtatcagcagaagcccggccaggcccccagactgctgatctacgataccagcaagctggcctccggcatccccgccagattttctggcagcggctccggcaccgacttcaccctgacaatcagcagcctggaacccgaggacgtggccgtgtactactgttttcaaggcagcgtgtaccccttcaccttcggccagggcaccaagctggaaatcaagagaggtggcggtggctcgggcggtggtgggtcgggtggcggcggatctcaggtgcagctccaggaatctggccctggcctcgtgaagcctagccagaccctgagcctgacctgtaccgtgtctggcggcagcatcagcacaagcggcatgggcgtgggctggatcagacagcaccctggcaagggcctggaatggatcggccacatttggtgggacgacgacaagcggtacaaccccgccctgaagtccagagtgaccatcagcgtggacaccagcaagaaccagttcagcctgaagctgagcagcgtgacagccgccgataccgccgtgtattattgcgcccggatggaactgtggtcctactacttcgactactggggccagggaaccctcgtgaccgtgtctagtacgcgtatccagaaccctgatcctgccgtgtaccagctgcgggatagcaagagcagcgacaagagcgtgtgtctgttcaccgacttcgacagccagaccaacgtgtcccagagcaaggactccgacgtgtacatcaccgataagaccgtgctggacatgcggagcatggacttcaagagcaactccgccgtggcctggtccaacaagtccgatttcgcctgcgccaacgccttcaacaacagcattatccccgaggacacattcttcccaagccccgagagcagctgcgacgtgaagctggtggaaaagagcttcgagacagacaccaacctgaacttccagatcctgtacgagtgatcggcttcagaatcctgctgctgaaagtggccggctttaacctgctgatgaccctgcggctgtggtccagccgcgccaagagaagcggatctggcgtgaagcagaccctgaatttcgacctgctgaagctggctggcgacgtggaatccaacccaggcccttctagaggccatatgaccgagtacaagcccacggtgcgcctcgccacccgcgacgacgtccccagggccgtacgcaccctcgccgccgcgttcgccgactaccccgccacgcgccacaccgtcgatccggaccgccacatcgagcgggtcaccgagctgcaagaactcttcctcacgcgcgtcgggctcgacatcggcaaggtgtgggtcgcggacgacggcgccgcggtggcggtctggaccacgccggagagcgtcgaagcgggggcggtgttcgccgagatcggcccgcgcatggccgagttgagcggttcccggctggccgcgcagcaacagatggaaggcctcctggcgccgcaccggcccaaggagcccgcgtggttcctggccaccgtcggcgtctcgcccgaccaccagggcaagggtctgggcagcgccgtcgtgctccccggagtggaggcggccgagcgcgccggggtgcccgccttcctggagacctccgcgccccgcaacctccccttctacgagcggctcggcttcaccgtcaccgccgacgtcgaggtgcccgaaggaccgcgcacctggtgcatgacccgcaagcccggtgcctga

SEQ ID NO: 8253 - DNA, 2591 bp, synthetic construct
  source 1..2591: mol_type = other DNA
atggccttaccagtgaccgccttgctcctgccgctggccttgctgctccacgccgccaggccgctcgaggaggacctgaagaacgtgttcccacctgaggtggccgtgttcgagcctagcgaggccgagatcagccacacccagaaagccaccctcgtgtgcctggctaccggcttctaccccgaccatgtggaactgtcttggtgggtcaacggcaaagaggtgcacagcggcgtgtctaccgacccccagccactgaaagaacagcccgccctgaacgacagccggtactgcctgagcagcagactgagagtgtccgccaccttctggcagaacccccggaaccacttcagatgccaggtgcagttctacggcctgagcgagaacgacgagtggacccaggacagagccaagcccgtgacccagatcgtgtctgccgaagcctggggcagagccgattgcggctttaccagcgagagctaccagcagggcgtgctgagcgccaccaacctgagcgtgatcggcttcagaatcctgctgctgaaagtggccggctttaacctgctgatgaccctgcggctgtggtccagcagggccaagcgatctggatctggagcaacaaacttctcactactcaaacaagcaggtgacgtggaggagaatcccgggcctactagcatggccttaccagtgaccgccttgctcctgccgctggccttgctgctccacgccgccaggccggacatccagatgacacagagccctagcagcctgtctgccagcgtgggagacagagtgaccatcacctgtagagccagccaggacatcagcaactacctgaactggtatcagcagaagcccggcaaggcccctaagctgctgatctactacaccagcagactgcacagcggcgtgcccagcagattttctggctctggcagcggcaccgacttcaccctgacaatatctagcctccagcctgaggacttcgccacctactattgccagcagggcaacaccctgccttacacatttggacagggcaccaaggtggaaatcaagagaggcggaggcggaagtggaggcggaggatctggcggcggaggctctgaagtgcagctggttgaatcaggtggcggcctggttcaacctggcggatctctgagactgagctgtgccgccagcggcttcaccttcagcgactactttatgagctgggtccgacaggcccctggcaaaggacttgaatgggtcgccaccatcagcaatggcggcacctacacttactaccccgacagcgtgaagggcagattcaccatctccagagacaacagcaagaacaccctgtacctccagatgaactccctgagagccgaggacaccgccgtgtactactgcgccagattcgacggctacatcttcgactattggggccagggcaccctggtcacagtctcttctacgcgtatccagaaccctgatcctgccgtgtaccagctgcgggatagcaagagcagcgacaagagcgtgtgtctgttcaccgacttcgacagccagaccaacgtgtcccagagcaaggactccgacgtgtacatcaccgataagaccgtgctggacatgcggagcatggacttcaagagcaactccgccgtggcctggtccaacaagtccgatttcgcctgcgccaacgccttcaacaacagcattatccccgaggacacattcttcccaagccccgagagcagctgcgacgtgaagctggtggaaaagagcttcgagacagacaccaacctgaacttccagatcctgtacgagtgatcggcttcagaatcctgctgctgaaagtggccggctttaacctgctgatgaccctgcggctgtggtccagccgcgccaagagaagcggatctggcgtgaagcagaccctgaatttcgacctgctgaagctggctggcgacgtggaatccaacccaggcccttctagaggccatatgaccgagtacaagcccacggtgcgcctcgccacccgcgacgacgtccccagggccgtacgcaccctcgccgccgcgttcgccgactaccccgccacgcgccacaccgtcgatccggaccgccacatcgagcgggtcaccgagctgcaagaactcttcctcacgcgcgtcgggctcgacatcggcaaggtgtgggtcgcggacgacggcgccgcggtggcggtctggaccacgccggagagcgtcgaagcgggggcggtgttcgccgagatcggcccgcgcatggccgagttgagcggttcccggctggccgcgcagcaacagatggaaggcctcctggcgccgcaccggcccaaggagcccgcgtggttcctggccaccgtcggcgtctcgcccgaccaccagggcaagggtctgggcagcgccgtcgtgctccccggagtggaggcggccgagcgcgccggggtgcccgccttcctggagacctccgcgccccgcaacctccccttctacgagcggctcggcttcaccgtcaccgccgacgtcgaggtgcccgaaggaccgcgcacctggtgcatgacccgcaagcccggtgcctga

SEQ ID NO: 8254 - DNA, 2603 bp, synthetic construct
  source 1..2603: mol_type = other DNA
atggccttaccagtgaccgccttgctcctgccgctggccttgctgctccacgccgccaggccgctcgaggaggacctgaagaacgtgttcccacctgaggtggccgtgttcgagcctagcgaggccgagatcagccacacccagaaagccaccctcgtgtgcctggctaccggcttctaccccgaccatgtggaactgtcttggtgggtcaacggcaaagaggtgcacagcggcgtgtctaccgacccccagccactgaaagaacagcccgccctgaacgacagccggtactgcctgagcagcagactgagagtgtccgccaccttctggcagaacccccggaaccacttcagatgccaggtgcagttctacggcctgagcgagaacgacgagtggacccaggacagagccaagcccgtgacccagatcgtgtctgccgaagcctggggcagagccgattgcggctttaccagcgagagctaccagcagggcgtgctgagcgccaccaacctgagcgtgatcggcttcagaatcctgctgctgaaagtggccggctttaacctgctgatgaccctgcggctgtggtccagcagggccaagcgatctggatctggagcaacaaacttctcactactcaaacaagcaggtgacgtggaggagaatcccgggcctactagcatggccttaccagtgaccgccttgctcctgccgctggccttgctgctccacgccgccaggccggacatccagatgacacagagccctagcagcctgtctgccagcgtgggagacagagtgaccatcacatgcaaggccagcgaccacatcaacaactggctggcctggtatcagcagaagcctggacaggcccctaagctgctgatctacggcgctaccacactggaaacaggcgtgcccagcagattttctggcagcggctctggcaccgactacaccctgacaatatccagcctccagcctgaggacttcgccacctactactgtcagcagagctggaacaccccttggacattcggccagggcaccaagctggaaatcaagagaggcggaggcggaagtggaggcggaggatctggcggcggaggctctcaagttcagcttcaacagcctggcgctgagctggtcaaacctggcgcttctgtgaagatgagctgcaaagccagcggctacgccttcagcagctactggatcaactggatgaagcagaaacccggccagggactcgaatggatcggccaaatctatcccggcgacggcgacaccaactacaacggcaagttcaagggcagagccacactgaccgccgatacctctagcagcacagcctacatgcagctgagcagcctgaccagcgaagatagcgccgtgtacttctgtgcccggtccatcacaacagtcgtgggctgcgctatggactattggggccagggaacaagcgtgaccgtgtctagtacgcgtatccagaaccctgatcctgccgtgtaccagctgcgggatagcaagagcagcgacaagagcgtgtgtctgttcaccgacttcgacagccagaccaacgtgtcccagagcaaggactccgacgtgtacatcaccgataagaccgtgctggacatgcggagcatggacttcaagagcaactccgccgtggcctggtccaacaagtccgatttcgcctgcgccaacgccttcaacaacagcattatccccgaggacacattcttcccaagccccgagagcagctgcgacgtgaagctggtggaaaagagcttcgagacagacaccaacctgaacttccagatcctgtacgagtgatcggcttcagaatcctgctgctgaaagtggccggctttaacctgctgatgaccctgcggctgtggtccagccgcgccaagagaagcggatctggcgtgaagcagaccctgaatttcgacctgctgaagctggctggcgacgtggaatccaacccaggcccttctagaggccatatgaccgagtacaagcccacggtgcgcctcgccacccgcgacgacgtccccagggccgtacgcaccctcgccgccgcgttcgccgactaccccgccacgcgccacaccgtcgatccggaccgccacatcgagcgggtcaccgagctgcaagaactcttcctcacgcgcgtcgggctcgacatcggcaaggtgtgggtcgcggacgacggcgccgcggtggcggtctggaccacgccggagagcgtcgaagcgggggcggtgttcgccgagatcggcccgcgcatggccgagttgagcggttcccggctggccgcgcagcaacagatggaaggcctcctggcgccgcaccggcccaaggagcccgcgtggttcctggccaccgtcggcgtctcgcccgaccaccagggcaagggtctgggcagcgccgtcgtgctccccggagtggaggcggccgagcgcgccggggtgcccgccttcctggagacctccgcgccccgcaacctccccttctacgagcggctcggcttcaccgtcaccgccgacgtcgaggtgcccgaaggaccgcgcacctggtgcatgacccgcaagcccggtgcctga

SEQ ID NO: 8255 - DNA, 2609 bp, synthetic construct
  source 1..2609: mol_type = other DNA
atggccttaccagtgaccgccttgctcctgccgctggccttgctgctccacgccgccaggccgctcgaggaggacctgaagaacgtgttcccacctgaggtggccgtgttcgagcctagcgaggccgagatcagccacacccagaaagccaccctcgtgtgcctggctaccggcttctaccccgaccatgtggaactgtcttggtgggtcaacggcaaagaggtgcacagcggcgtgtctaccgacccccagccactgaaagaacagcccgccctgaacgacagccggtactgcctgagcagcagactgagagtgtccgccaccttctggcagaacccccggaaccacttcagatgccaggtgcagttctacggcctgagcgagaacgacgagtggacccaggacagagccaagcccgtgacccagatcgtgtctgccgaagcctggggcagagccgattgcggctttaccagcgagagctaccagcagggcgtgctgagcgccaccaacctgagcgtgatcggcttcagaatcctgctgctgaaagtggccggctttaacctgctgatgaccctgcggctgtggtccagcagggccaagcgatctggatctggagcaacaaacttctcactactcaaacaagcaggtgacgtggaggagaatcccgggcctactagcatggccttaccagtgaccgccttgctcctgccgctggccttgctgctccacgccgccaggccgcagatcgtgctgtctcagtctcctgccatcctgagcgcttccccaggcgagaaagtgaccatgacctgtagagccagcagcagcgtgtcctacatgcactggtatcagcagaagcccggcagcagccctaagccttggatctacgccaccagcaatctggcctctggcgtgccagccagattttctggctctggcagcggcaccagctacagcttcacaatcagcagagtggaagccgaggacgccgccacctactattgtcagcagtggaccttcaatcctcctaccttcggcggaggcacccggctggaaatcaaaagaacagtggctgctggcggaggcggaagtggaggcggaggatctggcggcggaggctctcaggcttatctgcaacagagcggagccgaactcgtcagacctggcgcttctgtgaagatgagctgcaaggccagcggctacaccttcaccagctataatatgcactgggtcaagcagacccctcggcagggactcgaatggatcggcggaatctatcccggcaacggcgacacctcctacaaccagaagttcaagggcaaagccacactgaccgtgggcaagagcagcagcaccgcctatatgcagctcagcagcctgaccagcgaggacagcgccgtgtacttctgcgccagatacgactacaactacgctatggactactggggccagggcaccagcgtgacagttagctctgccagcacgcgtatccagaaccctgatcctgccgtgtaccagctgcgggatagcaagagcagcgacaagagcgtgtgtctgttcaccgacttcgacagccagaccaacgtgtcccagagcaaggactccgacgtgtacatcaccgataagaccgtgctggacatgcggagcatggacttcaagagcaactccgccgtggcctggtccaacaagtccgatttcgcctgcgccaacgccttcaacaacagcattatccccgaggacacattcttcccaagccccgagagcagctgcgacgtgaagctggtggaaaagagcttcgagacagacaccaacctgaacttccagatcctgtacgagtgatcggcttcagaatcctgctgctgaaagtggccggctttaacctgctgatgaccctgcggctgtggtccagccgcgccaagagaagcggatctggcgtgaagcagaccctgaatttcgacctgctgaagctggctggcgacgtggaatccaacccaggcccttctagaggccatatgaccgagtacaagcccacggtgcgcctcgccacccgcgacgacgtccccagggccgtacgcaccctcgccgccgcgttcgccgactaccccgccacgcgccacaccgtcgatccggaccgccacatcgagcgggtcaccgagctgcaagaactcttcctcacgcgcgtcgggctcgacatcggcaaggtgtgggtcgcggacgacggcgccgcggtggcggtctggaccacgccggagagcgtcgaagcgggggcggtgttcgccgagatcggcccgcgcatggccgagttgagcggttcccggctggccgcgcagcaacagatggaaggcctcctggcgccgcaccggcccaaggagcccgcgtggttcctggccaccgtcggcgtctcgcccgaccaccagggcaagggtctgggcagcgccgtcgtgctccccggagtggaggcggccgagcgcgccggggtgcccgccttcctggagacctccgcgccccgcaacctccccttctacgagcggctcggcttcaccgtcaccgccgacgtcgaggtgcccgaaggaccgcgcacctggtgcatgacccgcaagcccggtgcctga

SEQ ID NO: 8256 - DNA, 2603 bp, synthetic construct
  source 1..2603: mol_type = other DNA
atggccttaccagtgaccgccttgctcctgccgctggccttgctgctccacgccgccaggccgctcgaggaggacctgaagaacgtgttcccacctgaggtggccgtgttcgagcctagcgaggccgagatcagccacacccagaaagccaccctcgtgtgcctggctaccggcttctaccccgaccatgtggaactgtcttggtgggtcaacggcaaagaggtgcacagcggcgtgtctaccgacccccagccactgaaagaacagcccgccctgaacgacagccggtactgcctgagcagcagactgagagtgtccgccaccttctggcagaacccccggaaccacttcagatgccaggtgcagttctacggcctgagcgagaacgacgagtggacccaggacagagccaagcccgtgacccagatcgtgtctgccgaagcctggggcagagccgattgcggctttaccagcgagagctaccagcagggcgtgctgagcgccaccaacctgagcgtgatcggcttcagaatcctgctgctgaaagtggccggctttaacctgctgatgaccctgcggctgtggtccagcagggccaagcgatctggatctggagcaacaaacttctcactactcaaacaagcaggtgacgtggaggagaatcccgggcctactagcatggccttaccagtgaccgccttgctcctgccgctggccttgctgctccacgccgccaggccggagatcgtgctgacacagagccctgccaccctgtctctgagccctggcgaaagagccaccctgagctgtagagccagccagagcgtgtccagctacctggcctggtatcagcagaagcccggccaggctccccggctgctgatctacgatgccagcaatagagccaccggcatccccgccagattttccggctctggcagcggcaccgacttcaccctgaccatcagctccctggaacccgaggacttcgccgtgtactactgccagcagcggagcaactggcccatcacattcggccagggcacccggctggaaatcaaaggcggaggcggaagtggaggcggaggatctggcggcggaggctctgaggtgcagcttgttgagtctggcggaggactggtgcagcccgatagaagcctgagactgtcttgtgccgccagcggcttcaccttccacgattatgccatgcactgggtccgacaggcccctggcaaaggacttgaatgggtgtccaccatctcttggaacagcggcacaatcggctacgccgactctgtgaagggcagattcaccatcagccgggacaacgccaagaacagcctgtacctccagatgaactccctgagagccgaggacacagccctgtactactgcgccaaggacatccagtacggcaactactactacggcatggacgtgtggggccagggcacaacagtgacagtctcttctacgcgtatccagaaccctgatcctgccgtgtaccagctgcgggatagcaagagcagcgacaagagcgtgtgtctgttcaccgacttcgacagccagaccaacgtgtcccagagcaaggactccgacgtgtacatcaccgataagaccgtgctggacatgcggagcatggacttcaagagcaactccgccgtggcctggtccaacaagtccgatttcgcctgcgccaacgccttcaacaacagcattatccccgaggacacattcttcccaagccccgagagcagctgcgacgtgaagctggtggaaaagagcttcgagacagacaccaacctgaacttccagatcctgtacgagtgatcggcttcagaatcctgctgctgaaagtggccggctttaacctgctgatgaccctgcggctgtggtccagccgcgccaagagaagcggatctggcgtgaagcagaccctgaatttcgacctgctgaagctggctggcgacgtggaatccaacccaggcccttctagaggccatatgaccgagtacaagcccacggtgcgcctcgccacccgcgacgacgtccccagggccgtacgcaccctcgccgccgcgttcgccgactaccccgccacgcgccacaccgtcgatccggaccgccacatcgagcgggtcaccgagctgcaagaactcttcctcacgcgcgtcgggctcgacatcggcaaggtgtgggtcgcggacgacggcgccgcggtggcggtctggaccacgccggagagcgtcgaagcgggggcggtgttcgccgagatcggcccgcgcatggccgagttgagcggttcccggctggccgcgcagcaacagatggaaggcctcctggcgccgcaccggcccaaggagcccgcgtggttcctggccaccgtcggcgtctcgcccgaccaccagggcaagggtctgggcagcgccgtcgtgctccccggagtggaggcggccgagcgcgccggggtgcccgccttcctggagacctccgcgccccgcaacctccccttctacgagcggctcggcttcaccgtcaccgccgacgtcgaggtgcccgaaggaccgcgcacctggtgcatgacccgcaagcccggtgcctga

SEQ ID NO: 8257 - DNA, 2597 bp, synthetic construct
  source 1..2597: mol_type = other DNA
atggccttaccagtgaccgccttgctcctgccgctggccttgctgctccacgccgccaggccgctcgaggaggacctgaagaacgtgttcccacctgaggtggccgtgttcgagcctagcgaggccgagatcagccacacccagaaagccaccctcgtgtgcctggctaccggcttctaccccgaccatgtggaactgtcttggtgggtcaacggcaaagaggtgcacagcggcgtgtctaccgacccccagccactgaaagaacagcccgccctgaacgacagccggtactgcctgagcagcagactgagagtgtccgccaccttctggcagaacccccggaaccacttcagatgccaggtgcagttctacggcctgagcgagaacgacgagtggacccaggacagagccaagcccgtgacccagatcgtgtctgccgaagcctggggcagagccgattgcggctttaccagcgagagctaccagcagggcgtgctgagcgccaccaacctgagcgtgatcggcttcagaatcctgctgctgaaagtggccggctttaacctgctgatgaccctgcggctgtggtccagcagggccaagcgatctggatctggagcaacaaacttctcactactcaaacaagcaggtgacgtggaggagaatcccgggcctactagcatggccttaccagtgaccgccttgctcctgccgctggccttgctgctccacgccgccaggccggacatccagatgacccagagccccagcagcctgtctgccagcgtgggcgacagagtgaccatcacctgtagagccagccaggacgtgaacaccgccgtggcctggtatcagcagaagcctggcaaggcccccaagctgctgatctacagcgccagcttcctggaaagcggcgtgcccagcagattcagcggaagcagaagcggcaccgacttcaccctgaccatcagctccctccagcccgaggacttcgccacctactactgccagcagcactacaccacccctcccaccttcggccagaccaaggtggaaatcaagagaggcggaggcggaagtggaggcggaggatctggcggcggaggctctgaagtgcaactggtggaatctggcggcggactggtgcagcctggcggatctctgagactgagctgtgccgccagcggcttcaacatcaaggacacctacatccactgggtgcgccaggcccctggaaagggactggaatgggtggcccggatctaccccaccaacggctacaccagatacgccgacagcgtgaagggccggttcaccatcagcgccgacaccagcaagaataccgcctacctccagatgaacagcctgcgggccgaggataccgccgtgtactactgctcaagatggggaggcgacggcttctacgctatggacgtgtggggccagggcacccttgtgaccgtgtcatctacgcgtatccagaaccctgatcctgccgtgtaccagctgcgggatagcaagagcagcgacaagagcgtgtgtctgttcaccgacttcgacagccagaccaacgtgtcccagagcaaggactccgacgtgtacatcaccgataagaccgtgctggacatgcggagcatggacttcaagagcaactccgccgtggcctggtccaacaagtccgatttcgcctgcgccaacgccttcaacaacagcattatccccgaggacacattcttcccaagccccgagagcagctgcgacgtgaagctggtggaaaagagcttcgagacagacaccaacctgaacttccagatcctgtacgagtgatcggcttcagaatcctgctgctgaaagtggccggctttaacctgctgatgaccctgcggctgtggtccagccgcgccaagagaagcggatctggcgtgaagcagaccctgaatttcgacctgctgaagctggctggcgacgtggaatccaacccaggcccttctagaggccatatgaccgagtacaagcccacggtgcgcctcgccacccgcgacgacgtccccagggccgtacgcaccctcgccgccgcgttcgccgactaccccgccacgcgccacaccgtcgatccggaccgccacatcgagcgggtcaccgagctgcaagaactcttcctcacgcgcgtcgggctcgacatcggcaaggtgtgggtcgcggacgacggcgccgcggtggcggtctggaccacgccggagagcgtcgaagcgggggcggtgttcgccgagatcggcccgcgcatggccgagttgagcggttcccggctggccgcgcagcaacagatggaaggcctcctggcgccgcaccggcccaaggagcccgcgtggttcctggccaccgtcggcgtctcgcccgaccaccagggcaagggtctgggcagcgccgtcgtgctccccggagtggaggcggccgagcgcgccggggtgcccgccttcctggagacctccgcgccccgcaacctccccttctacgagcggctcggcttcaccgtcaccgccgacgtcgaggtgcccgaaggaccgcgcacctggtgcatgacccgcaagcccggtgcctga

SEQ ID NO: 8258 - DNA, 2234 bp, synthetic construct
  source 1..2234: mol_type = other DNA
atggccttaccagtgaccgccttgctcctgccgctggccttgctgctccacgccgccaggccgctcgaggaggacctgaagaacgtgttcccacctgaggtggccgtgttcgagcctagcgaggccgagatcagccacacccagaaagccaccctcgtgtgcctggctaccggcttctaccccgaccatgtggaactgtcttggtgggtcaacggcaaagaggtgcacagcggcgtgtctaccgacccccagccactgaaagaacagcccgccctgaacgacagccggtactgcctgagcagcagactgagagtgtccgccaccttctggcagaacccccggaaccacttcagatgccaggtgcagttctacggcctgagcgagaacgacgagtggacccaggacagagccaagcccgtgacccagatcgtgtctgccgaagcctggggcagagccgattgcggctttaccagcgagagctaccagcagggcgtgctgagcgccaccaacctgagcgtgatcggcttcagaatcctgctgctgaaagtggccggctttaacctgctgatgaccctgcggctgtggtccagcagggccaagcgatctggatctggagcaacaaacttctcactactcaaacaagcaggtgacgtggaggagaatcccgggcctactagcatggccctgcccgtgacagccctgctgctgcctctggctctgctgctgcacgccgccagacccgatgaattcgaggtgcaactggtggaaagcggcggaggcctggtgcaggctggcggatctctgagactgagctgtgccgccagcggcatcaccttcagcatcaacacaatgggctggtacagacaggcccctggcaagcagagggaactggtggccctgatctccagcatcggcgacacctactacgccgacagcgtgaagggccggttcaccatcagccgggacaacgccaagaacaccgtgtacctccagatgaacagcctgaagcccgaggacaccgccgtgtactactgcaagcggttcagaacagccgcccagggcaccgattattggggccagggaacacaagtgaccgtgtcctctacgcgtatccagaaccctgatcctgccgtgtaccagctgcgggatagcaagagcagcgacaagagcgtgtgtctgttcaccgacttcgacagccagaccaacgtgtcccagagcaaggactccgacgtgtacatcaccgataagaccgtgctggacatgcggagcatggacttcaagagcaactccgccgtggcctggtccaacaagtccgatttcgcctgcgccaacgccttcaacaacagcattatccccgaggacacattcttcccaagccccgagagcagctgcgacgtgaagctggtggaaaagagcttcgagacagacaccaacctgaacttccagatcctgtacgagtgatcggcttcagaatcctgctgctgaaagtggccggctttaacctgctgatgaccctgcggctgtggtccagccgcgccaagagaagcggatctggcgtgaagcagaccctgaatttcgacctgctgaagctggctggcgacgtggaatccaacccaggcccttctagaggccatatgaccgagtacaagcccacggtgcgcctcgccacccgcgacgacgtccccagggccgtacgcaccctcgccgccgcgttcgccgactaccccgccacgcgccacaccgtcgatccggaccgccacatcgagcgggtcaccgagctgcaagaactcttcctcacgcgcgtcgggctcgacatcggcaaggtgtgggtcgcggacgacggcgccgcggtggcggtctggaccacgccggagagcgtcgaagcgggggcggtgttcgccgagatcggcccgcgcatggccgagttgagcggttcccggctggccgcgcagcaacagatggaaggcctcctggcgccgcaccggcccaaggagcccgcgtggttcctggccaccgtcggcgtctcgcccgaccaccagggcaagggtctgggcagcgccgtcgtgctccccggagtggaggcggccgagcgcgccggggtgcccgccttcctggagacctccgcgccccgcaacctccccttctacgagcggctcggcttcaccgtcaccgccgacgtcgaggtgcccgaaggaccgcgcacctggtgcatgacccgcaagcccggtgcctga

SEQ ID NO: 8259 - DNA, 2234 bp, synthetic construct; identical to SEQ ID NO: 8258
  source 1..2234: mol_type = other DNA

SEQ ID NO: 8260 - DNA, 3029 bp, synthetic construct
  source 1..3029: mol_type = other DNA
atggccttaccagtgaccgccttgctcctgccgctggccttgctgctccacgccgccaggccgctcgaggaggacctgaagaacgtgttcccacctgaggtggccgtgttcgagcctagcgaggccgagatcagccacacccagaaagccaccctcgtgtgcctggctaccggcttctaccccgaccatgtggaactgtcttggtgggtcaacggcaaagaggtgcacagcggcgtgtctaccgacccccagccactgaaagaacagcccgccctgaacgacagccggtactgcctgagcagcagactgagagtgtccgccaccttctggcagaacccccggaaccacttcagatgccaggtgcagttctacggcctgagcgagaacgacgagtggacccaggacagagccaagcccgtgacccagatcgtgtctgccgaagcctggggcagagccgattgcggctttaccagcgagagctaccagcagggcgtgctgagcgccaccaacctgagcgtgatcggcttcagaatcctgctgctgaaagtggccggctttaacctgctgatgaccctgcggctgtggtccagcagggccaagcgatctggatctggagcaacaaacttctcactactcaaacaagcaggtgacgtggaggagaatcccgggcctactagcatggccttaccagtgaccgccttgctcctgccgctggccttgctgctccacgccgccaggccgcaggtccagctcgtcgagtccggcggcggcctcgtccaggccggcgactccgtcaccctctcctgcaccgcctccggccgcaccttctcctcctacgccctcgcctggttccgccagcgccccggcaaggagcgcgagttcgtcgccggcctccgctggggcggccccaccaactacgccgactccgtcaaggaccgcttcaccatctccggcgactccgccaagcacaccatgtacctccagatgaactccctcaagcccgaggacaccgccgtctactactgcggctacaaccccggcggctgggccgtcccctcccagtacgagtacgactcctggggccagggcacccaggtcaccgtctcctccggtaccggcggaggcggatctggcggcggaggtagcggtggcggaggatctgaattcgacatccagatgacacagagccctagcagcctgtctgccagcgtgggagacagagtgaccatcacatgcaaggccagcgaccacatcaacaactggctggcctggtatcagcagaagcctggacaggcccctaagctgctgatctacggcgctaccacactggaaacaggcgtgcccagcagattttctggcagcggctctggcaccgactacaccctgacaatatccagcctccagcctgaggacttcgccacctactactgtcagcagagctggaacaccccttggacattcggccagggcaccaagctggaaatcaagagaggcggaggcggaagtggaggcggaggatctggcggcggaggctctcaagttcagcttcaacagcctggcgctgagctggtcaaacctggcgcttctgtgaagatgagctgcaaagccagcggctacgccttcagcagctactggatcaactggatgaagcagaaacccggccagggactcgaatggatcggccaaatctatcccggcgacggcgacaccaactacaacggcaagttcaagggcagagccacactgaccgccgatacctctagcagcacagcctacatgcagctgagcagcctgaccagcgaagatagcgccgtgtacttctgtgcccggtccatcacaacagtcgtgggctgcgctatggactattggggccagggaacaagcgtgaccgtgtctagtacgcgtatccagaaccctgatcctgccgtgtaccagctgcgggatagcaagagcagcgacaagagcgtgtgtctgttcaccgacttcgacagccagaccaacgtgtcccagagcaaggactccgacgtgtacatcaccgataagaccgtgctggacatgcggagcatggacttcaagagcaactccgccgtggcctggtccaacaagtccgatttcgcctgcgccaacgccttcaacaacagcattatccccgaggacacattcttcccaagccccgagagcagctgcgacgtgaagctggtggaaaagagcttcgagacagacaccaacctgaacttccagatcctgtacgagtgatcggcttcagaatcctgctgctgaaagtggccggctttaacctgctgatgaccctgcggctgtggtccagccgcgccaagagaagcggatctggcgtgaagcagaccctgaatttcgacctgctgaagctggctggcgacgtggaatccaacccaggcccttctagaggccatatgaccgagtacaagcccacggtgcgcctcgccacccgcgacgacgtccccagggccgtacgcaccctcgccgccgcgttcgccgactaccccgccacgcgccacaccgtcgatccggaccgccacatcgagcgggtcaccgagctgcaagaactcttcctcacgcgcgtcgggctcgacatcggcaaggtgtgggtcgcggacgacggcgccgcggtggcggtctggaccacgccggagagcgtcgaagcgggggcggtgttcgccgagatcggcccgcgcatggccgagttgagcggttcccggctggccgcgcagcaacagatggaaggcctcctggcgccgcaccggcccaaggagcccgcgtggttcctggccaccgtcggcgtctcgcccgaccaccagggcaagggtctgggcagcgccgtcgtgctccccggagtggaggcggccgagcgcgccggggtgcccgccttcctggagacctccgcgccccgcaacctccccttctacgagcggctcggcttcaccgtcaccgccgacgtcgaggtgcccgaaggaccgcgcacctggtgcatgacccgcaagcccggtgcctga

SEQ ID NO: 8261 - DNA, 3416 bp, synthetic construct
  source 1..3416: mol_type = other DNA
atggccttaccagtgaccgccttgctcctgccgctggccttgctgctccacgccgccaggccgctcgaggaggacctgaagaacgtgttcccacctgaggtggccgtgttcgagcctagcgaggccgagatcagccacacccagaaagccaccctcgtgtgcctggctaccggcttctaccccgaccatgtggaactgtcttggtgggtcaacggcaaagaggtgcacagcggcgtgtctaccgacccccagccactgaaagaacagcccgccctgaacgacagccggtactgcctgagcagcagactgagagtgtccgccaccttctggcagaacccccggaaccacttcagatgccaggtgcagttctacggcctgagcgagaacgacgagtggacccaggacagagccaagcccgtgacccagatcgtgtctgccgaagcctggggcagagccgattgcggctttaccagcgagagctaccagcagggcgtgctgagcgccaccaacctgagcgtgatcggcttcagaatcctgctgctgaaagtggccggctttaacctgctgatgaccctgcggctgtggtccagcagggccaagcgatctggatctggagcaacaaacttctcactactcaaacaagcaggtgacgtggaggagaatcccgggcctactagcatggccttaccagtgaccgccttgctcctgccgctggccttgctgctccacgccgccaggccggaggttcagctgcttgagtctggcggaggactggttcaacctggcggaagcctgagactgtcttgtgccgccagcggcttcacctttagcagctacgccatgagctgggtccgacaggctcctggcaaaggactggaatgggtgtccagcatcagcggcagcggcgactacatctactacgccgatagcgtgaagggcagattcaccatcagccgggacatcagcaagaacaccctgtacctccagatgaacagcctgagagccgaggacaccgccgtgtactactgtgccaaagaaggcaccggcgctaacagcagcctggccgattatagaggccagggcacactggtcaccgtgtctagtggcggaggaagcggcggaggatctcaggtccagctcgtcgagtccggcggcggcctcgtccaggccggcgactccgtcaccctctcctgcaccgcctccggccgcaccttctcctcctacgccctcgcctggttccgccagcgccccggcaaggagcgcgagttcgtcgccggcctccgctggggcggccccaccaactacgccgactccgtcaaggaccgcttcaccatctccggcgactccgccaagcacaccatgtacctccagatgaactccctcaagcccgaggacaccgccgtctactactgcggctacaaccccggcggctgggccgtcccctcccagtacgagtacgactcctggggccagggcacccaggtcaccgtctcctccggtaccggcggaggcggatctggcggcggaggtagcggtggcggaggatctgaattcgacatccagatgacacagagccctagcagcctgtctgccagcgtgggagacagagtgaccatcacatgcaaggccagcgaccacatcaacaactggctggcctggtatcagcagaagcctggacaggcccctaagctgctgatctacggcgctaccacactggaaacaggcgtgcccagcagattttctggcagcggctctggcaccgactacaccctgacaatatccagcctccagcctgaggacttcgccacctactactgtcagcagagctggaacaccccttggacattcggccagggcaccaagctggaaatcaagagaggcggaggcggaagtggaggcggaggatctggcggcggaggctctcaagttcagcttcaacagcctggcgctgagctggtcaaacctggcgcttctgtgaagatgagctgcaaagccagcggctacgccttcagcagctactggatcaactggatgaagcagaaacccggccagggactcgaatggatcggccaaatctatcccggcgacggcgacaccaactacaacggcaagttcaagggcagagccacactgaccgccgatacctctagcagcacagcctacatgcagctgagcagcctgaccagcgaagatagcgccgtgtacttctgtgcccggtccatcacaacagtcgtgggctgcgctatggactattggggccagggaacaagcgtgaccgtgtctagtacgcgtatccagaaccctgatcctgccgtgtaccagctgcgggatagcaagagcagcgacaagagcgtgtgtctgttcaccgacttcgacagccagaccaacgtgtcccagagcaaggactccgacgtgtacatcaccgataagaccgtgctggacatgcggagcatggacttcaagagcaactccgccgtggcctggtccaacaagtccgatttcgcctgcgccaacgccttcaacaacagcattatccccgaggacacattcttcccaagccccgagagcagctgcgacgtgaagctggtggaaaagagcttcgagacagacaccaacctgaacttccagatcctgtacgagtgatcggcttcagaatcctgctgctgaaagtggccggctttaacctgctgatgaccctgcggctgtggtccagccgcgccaagagaagcggatctggcgtgaagcagaccctgaatttcgacctgctgaagctggctggcgacgtggaatccaacccaggcccttctagaggccatatgaccgagtacaagcccacggtgcgcctcgccacccgcgacgacgtccccagggccgtacgcaccctcgccgccgcgttcgccgactaccccgccacgcgccacaccgtcgatccggaccgccacatcgagcgggtcaccgagctgcaagaactcttcctcacgcgcgtcgggctcgacatcggcaaggtgtgggtcgcggacgacggcgccgcggtggcggtctggaccacgccggagagcgtcgaagcgggggcggtgttcgccgagatcggcccgcgcatggccgagttgagcggttcccggctggccgcgcagcaacagatggaaggcctcctggcgccgcaccggcccaaggagcccgcgtggttcctggccaccgtcggcgtctcgcccgaccaccagggcaagggtctgggcagcgccgtcgtgctccccggagtggaggcggccgagcgcgccggggtgcccgccttcctggagacctccgcgccccgcaacctccccttctacgagcggctcggcttcaccgtcaccgccgacgtcgaggtgcccgaaggaccgcgcacctggtgcatgacccgcaagcccggtgcctga

SEQ ID NO: 8262 - DNA, 3416 bp, synthetic construct; identical to SEQ ID NO: 8261
  source 1..3416: mol_type = other DNA

SEQ ID NO: 8263 - DNA, 2252 bp, synthetic construct
  source 1..2252: mol_type = other DNA
atggccttaccagtgaccgccttgctcctgccgctggccttgctgctccacgccgccaggccgctcgaggaggacctgaagaacgtgttcccacctgaggtggccgtgttcgagcctagcgaggccgagatcagccacacccagaaagccaccctcgtgtgcctggctaccggcttctaccccgaccatgtggaactgtcttggtgggtcaacggcaaagaggtgcacagcggcgtgtctaccgacccccagccactgaaagaacagcccgccctgaacgacagccggtactgcctgagcagcagactgagagtgtccgccaccttctggcagaacccccggaaccacttcagatgccaggtgcagttctacggcctgagcgagaacgacgagtggacccaggacagagccaagcccgtgacccagatcgtgtctgccgaagcctggggcagagccgattgcggctttaccagcgagagctaccagcagggcgtgctgagcgccaccaacctgagcgtgatcggcttcagaatcctgctgctgaaagtggccggctttaacctgctgatgaccctgcggctgtggtccagcagggccaagcgatctggatctggagcaacaaacttctcactactcaaacaagcaggtgacgtggaggagaatcccgggcctactagcatggccctgcccgtgacagccctgctgctgcctctggctctgctgctgcacgccgccagacccgatgaattcggctctgacctgggcatcaagctgctgttcgccgctgccaagggccaggacgacgaagtgcggattctgctggctgctggggccgacgtgaacgccaaggatttcgagggctacacccccctgcacgtggccgcctatgatggacacctggaaatcgtggaagtgctgctgaaggctggcgctgatgtgaatgccaaagacagccagggccggacccctctgcatgaagccgcctacagcggccatctggaaattgtggaagtgctgctgaaagccggggcagacgtgaacgctcaggacgacgctggcgagacaccagccgatctggctgcagcttggggccacgaagatatcgccgaggtgctgcagaagacgcgtatccagaaccctgatcctgccgtgtaccagctgcgggatagcaagagcagcgacaagagcgtgtgtctgttcaccgacttcgacagccagaccaacgtgtcccagagcaaggactccgacgtgtacatcaccgataagaccgtgctggacatgcggagcatggacttcaagagcaactccgccgtggcctggtccaacaagtccgatttcgcctgcgccaacgccttcaacaacagcattatccccgaggacacattcttcccaagccccgagagcagctgcgacgtgaagctggtggaaaagagcttcgagacagacaccaacctgaacttccagatcctgtacgagtgatcggcttcagaatcctgctgctgaaagtggccggctttaacctgctgatgaccctgcggctgtggtccagccgcgccaagagaagcggatctggcgtgaagcagaccctgaatttcgacctgctgaagctggctggcgacgtggaatccaacccaggcccttctagaggccatatgaccgagtacaagcccacggtgcgcctcgccacccgcgacgacgtccccagggccgtacgcaccctcgccgccgcgttcgccgactaccccgccacgcgccacaccgtcgatccggaccgccacatcgagcgggtcaccgagctgcaagaactcttcctcacgcgcgtcgggctcgacatcggcaaggtgtgggtcgcggacgacggcgccgcggtggcggtctggaccacgccggagagcgtcgaagcgggggcggtgttcgccgagatcggcccgcgcatggccgagttgagcggttcccggctggccgcgcagcaacagatggaaggcctcctggcgccgcaccggcccaaggagcccgcgtggttcctggccaccgtcggcgtctcgcccgaccaccagggcaagggtctgggcagcgccgtcgtgctccccggagtggaggcggccgagcgcgccggggtgcccgccttcctggagacctccgcgccccgcaacctccccttctacgagcggctcggcttcaccgtcaccgccgacgtcgaggtgcccgaaggaccgcgcacctggtgcatgacccgcaagcccggtgcctga

SEQ ID NO: 8264 - DNA, 2039 bp, synthetic construct
  source 1..2039: mol_type = other DNA
atggccttaccagtgaccgccttgctcctgccgctggccttgctgctccacgccgccaggccgctcgaggaggacctgaagaacgtgttcccacctgaggtggccgtgttcgagcctagcgaggccgagatcagccacacccagaaagccaccctcgtgtgcctggctaccggcttctaccccgaccatgtggaactgtcttggtgggtcaacggcaaagaggtgcacagcggcgtgtctaccgacccccagccactgaaagaacagcccgccctgaacgacagccggtactgcctgagcagcagactgagagtgtccgccaccttctggcagaacccccggaaccacttcagatgccaggtgcagttctacggcctgagcgagaacgacgagtggacccaggacagagccaagcccgtgacccagatcgtgtctgccgaagcctggggcagagccgattgcggctttaccagcgagagctaccagcagggcgtgctgagcgccaccaacctgagcgtgatcggcttcagaatcctgctgctgaaagtggccggctttaacctgctgatgaccctgcggctgtggtccagcagggccaagcgatctggatctggagcaacaaacttctcactactcaaacaagcaggtgacgtggaggagaatcccgggcctactagcatggactggatttggcgcatccttttccttgtcggcgctgctaccggcgcccattccttcgaaggcagcggattcgaatacgccaaagagatgcggaacgcctactgggagatcgccctgctgcccaatctgaccaaccagcagaagagagcccccatcagaaagctgtacgacgacccctcccagagcagcgagctgctgtctgaggctaaaaaactgaacgatagccagacgcgtatccagaaccctgatcctgccgtgtaccagctgcgggatagcaagagcagcgacaagagcgtgtgtctgttcaccgacttcgacagccagaccaacgtgtcccagagcaaggactccgacgtgtacatcaccgataagaccgtgctggacatgcggagcatggacttcaagagcaactccgccgtggcctggtccaacaagtccgatttcgcctgcgccaacgccttcaacaacagcattatccccgaggacacattcttcccaagccccgagagcagctgcgacgtgaagctggtggaaaagagcttcgagacagacaccaacctgaacttccagatcctgtacgagtgatcggcttcagaatcctgctgctgaaagtggccggctttaacctgctgatgaccctgcggctgtggtccagccgcgccaagagaagcggatctggcgtgaagcagaccctgaatttcgacctgctgaagctggctggcgacgtggaatccaacccaggcccttctagaggccatatgaccgagtacaagcccacggtgcgcctcgccacccgcgacgacgtccccagggccgtacgcaccctcgccgccgcgttcgccgactaccccgccacgcgccacaccgtcgatccggaccgccacatcgagcgggtcaccgagctgcaagaactcttcctcacgcgcgtcgggctcgacatcggcaaggtgtgggtcgcggacgacggcgccgcggtggcggtctggaccacgccggagagcgtcgaagcgggggcggtgttcgccgagatcggcccgcgcatggccgagttgagcggttcccggctggccgcgcagcaacagatggaaggcctcctggcgccgcaccggcccaaggagcccgcgtggttcctggccaccgtcggcgtctcgcccgaccaccagggcaagggtctgggcagcgccgtcgtgctccccggagtggaggcggccgagcgcgccggggtgcccgccttcctggagacctccgcgccccgcaacctccccttctacgagcggctcggcttcaccgtcaccgccgacgtcgaggtgcccgaaggaccgcgcacctggtgcatgacccgcaagcccggtgcctga

SEQ ID NO: 8265 - DNA, 2705 bp, synthetic construct
  source 1..2705: mol_type = other DNA
atggccttaccagtgaccgccttgctcctgccgctggccttgctgctccacgccgccaggccgctcgaggaggacctgaagaacgtgttcccacctgaggtggccgtgttcgagcctagcgaggccgagatcagccacacccagaaagccaccctcgtgtgcctggctaccggcttctaccccgaccatgtggaactgtcttggtgggtcaacggcaaagaggtgcacagcggcgtgtctaccgacccccagccactgaaagaacagcccgccctgaacgacagccggtactgcctgagcagcagactgagagtgtccgccaccttctggcagaacccccggaaccacttcagatgccaggtgcagttctacggcctgagcgagaacgacgagtggacccaggacagagccaagcccgtgacccagatcgtgtctgccgaagcctggggcagagccgattgcggctttaccagcgagagctaccagcagggcgtgctgagcgccaccaacctgagcgtgatcggcttcagaatcctgctgctgaaagtggccggctttaacctgctgatgaccctgcggctgtggtccagcagggccaagcgatctggatctggagcaacaaacttctcactactcaaacaagcaggtgacgtggaggagaatcccgggcctactagcatggccctgcccgtgacagccctgctgctgcctctggctctgctgctgcacgccgccagacccgatgaattcgaggtgcaactggtggaaagcggcggaggcctggtgcaggctggcggatctctgagactgagctgtgccgccagcggcatcaccttcagcatcaacacaatgggctggtacagacaggcccctggcaagcagagggaactggtggccctgatctccagcatcggcgacacctactacgccgacagcgtgaagggccggttcaccatcagccgggacaacgccaagaacaccgtgtacctccagatgaacagcctgaagcccgaggacaccgccgtgtactactgcaagcggttcagaacagccgcccagggcaccgattattggggccagggaacacaagtgaccgtgtcctctctcgagggaggaggcggctccgggggaggcggaagtggaggcggaggatctgggtctggaggaagcggatctggaggctcagggtcagggggctcaggcagtggaggctctttcgaagtgcaactggtggaatctgggggcggactggtgcagccaggcggaagtctgaggctgtcttgtgccgcctccggcagcatcttcggcttcaacgacatggcctggtatcggcaggctcccggaaaacagcgcgagctggtggctctgattagcagagtgggcgtgaccagcagcgccgactctgtgaagggcagattcacaatctccagagtgaacgccaaggatacagtgtacctccagatgaactctctgaaacctgaggatacagcagtgtactattgctacatggaccagcggctggacggcagcacactggcctactggggacagggaactcaagtgacagtgtctagcacgcgtatccagaaccctgatcctgccgtgtaccagctgcgggatagcaagagcagcgacaagagcgtgtgtctgttcaccgacttcgacagccagaccaacgtgtcccagagcaaggactccgacgtgtacatcaccgataagaccgtgctggacatgcggagcatggacttcaagagcaactccgccgtggcctggtccaacaagtccgatttcgcctgcgccaacgccttcaacaacagcattatccccgaggacacattcttcccaagccccgagagcagctgcgacgtgaagctggtggaaaagagcttcgagacagacaccaacctgaacttccagatcctgtacgagtgatcggcttcagaatcctgctgctgaaagtggccggctttaacctgctgatgaccctgcggctgtggtccagccgcgccaagagaagcggatctggcgtgaagcagaccctgaatttcgacctgctgaagctggctggcgacgtggaatccaacccaggcccttctagaggccatatgaccgagtacaagcccacggtgcgcctcgccacccgcgacgacgtccccagggccgtacgcaccctcgccgccgcgttcgccgactaccccgccacgcgccacaccgtcgatccggaccgccacatcgagcgggtcaccgagctgcaagaactcttcctcacgcgcgtcgggctcgacatcggcaaggtgtgggtcgcggacgacggcgccgcggtggcggtctggaccacgccggagagcgtcgaagcgggggcggtgttcgccgagatcggcccgcgcatggccgagttgagcggttcccggctggccgcgcagcaacagatggaaggcctcctggcgccgcaccggcccaaggagcccgcgtggttcctggccaccgtcggcgtctcgcccgaccaccagggcaagggtctgggcagcgccgtcgtgctccccggagtggaggcggccgagcgcgccggggtgcccgccttcctggagacctccgcgccccgcaacctccccttctacgagcggctcggcttcaccgtcaccgccgacgtcgaggtgcccgaaggaccgcgcacctggtgcatgacccgcaagcccggtgcctga

SEQ ID NO: 8266 - DNA, 2447 bp, synthetic construct
  source 1..2447: mol_type = other DNA
atggccttaccagtgaccgccttgctcctgccgctggccttgctgctccacgccgccaggccgctcgaggaggacctgaagaacgtgttcccacctgaggtggccgtgttcgagcctagcgaggccgagatcagccacacccagaaagccaccctcgtgtgcctggctaccggcttctaccccgaccatgtggaactgtcttggtgggtcaacggcaaagaggtgcacagcggcgtgtctaccgacccccagccactgaaagaacagcccgccctgaacgacagccggtactgcctgagcagcagactgagagtgtccgccaccttctggcagaacccccggaaccacttcagatgccaggtgcagttctacggcctgagcgagaacgacgagtggacccaggacagagccaagcccgtgacccagatcgtgtctgccgaagcctggggcagagccgattgcggctttaccagcgagagctaccagcagggcgtgctgagcgccaccaacctgagcgtgatcggcttcagaatcctgctgctgaaagtggccggctttaacctgctgatgaccctgcggctgtggtccagcagggccaagcgatctggatctggagcaacaaacttctcactactcaaacaagcaggtgacgtggaggagaatcccgggcctactagcatggcccttccagtcactgccttgctgttgcctctggcgctcctgctccacgccgctagaccgggcatgagaaccgaggacctgcctaaggccgtggtgttcctggaaccccagtggtacagagtgctggaaaaggacagcgtgaccctgaagtgccagggcgcctacagccccgaggacaatagcacccagtggttccacaacgagagcctgatctccagccaggccagcagctacttcatcgacgccgccaccgtggacgacagcggcgagtatagatgccagaccaacctgagcaccctgagcgaccccgtgcagctggaagtgcacatcggatggctgctgctgcaggcccccagatgggtgttcaaagaagaggaccccatccacctgagatgccactcttggaagaacaccgccctgcacaaagtgacctacctgcagaacggcaagggcagaaagtacttccaccacaacagcgacttctacatccccaaggccaccctgaaggactccggctcctacttctgcagaggcctcgtgggcagcaagaacgtgtccagcgagacagtgaacatcaccatcacccagggcctggccgtgtctaccatcagcagctttttcccacccggctaccagacgcgtatccagaaccctgatcctgccgtgtaccagctgcgggatagcaagagcagcgacaagagcgtgtgtctgttcaccgacttcgacagccagaccaacgtgtcccagagcaaggactccgacgtgtacatcaccgataagaccgtgctggacatgcggagcatggacttcaagagcaactccgccgtggcctggtccaacaagtccgatttcgcctgcgccaacgccttcaacaacagcattatccccgaggacacattcttcccaagccccgagagcagctgcgacgtgaagctggtggaaaagagcttcgagacagacaccaacctgaacttccagatcctgtacgagtgatcggcttcagaatcctgctgctgaaagtggccggctttaacctgctgatgaccctgcggctgtggtccagccgcgccaagagaagcggatctggcgtgaagcagaccctgaatttcgacctgctgaagctggctggcgacgtggaatccaacccaggcccttctagaggccatatgaccgagtacaagcccacggtgcgcctcgccacccgcgacgacgtccccagggccgtacgcaccctcgccgccgcgttcgccgactaccccgccacgcgccacaccgtcgatccggaccgccacatcgagcgggtcaccgagctgcaagaactcttcctcacgcgcgtcgggctcgacatcggcaaggtgtgggtcgcggacgacggcgccgcggtggcggtctggaccacgccggagagcgtcgaagcgggggcggtgttcgccgagatcggcccgcgcatggccgagttgagcggttcccggctggccgcgcagcaacagatggaaggcctcctggcgccgcaccggcccaaggagcccgcgtggttcctggccaccgtcggcgtctcgcccgaccaccagggcaagggtctgggcagcgccgtcgtgctccccggagtggaggcggccgagcgcgccggggtgcccgccttcctggagacctccgcgccccgcaacctccccttctacgagcggctcggcttcaccgtcaccgccgacgtcgaggtgcccgaaggaccgcgcacctggtgcatgacccgcaagcccggtgcctga

SEQ ID NO: 8267 - DNA, 2453 bp, synthetic construct
  source 1..2453: mol_type = other DNA
atggccttaccagtgaccgccttgctcctgccgctggccttgctgctccacgccgccaggccgctcgaggaggacctgaagaacgtgttcccacctgaggtggccgtgttcgagcctagcgaggccgagatcagccacacccagaaagccaccctcgtgtgcctggctaccggcttctaccccgaccatgtggaactgtcttggtgggtcaacggcaaagaggtgcacagcggcgtgtctaccgacccccagccactgaaagaacagcccgccctgaacgacagccggtactgcctgagcagcagactgagagtgtccgccaccttctggcagaacccccggaaccacttcagatgccaggtgcagttctacggcctgagcgagaacgacgagtggacccaggacagagccaagcccgtgacccagatcgtgtctgccgaagcctggggcagagccgattgcggctttaccagcgagagctaccagcagggcgtgctgagcgccaccaacctgagcgtgatcggcttcagaatcctgctgctgaaagtggccggctttaacctgctgatgaccctgcggctgtggtccagcagggccaagcgatctggatctggagcaacaaacttctcactactcaaacaagcaggtgacgtggaggagaatcccgggcctactagcgccaccatggccttaccagtgaccgccttgctcctgccgctggccttgctgctccacgccgccaggccgggcatgcggactgaagacctcccaaaggctgtggtgttcctggagcctcaatggtacagggtgctggagaaggacagtgtgactctgaagtgccagggagcctactcccctgaggacaattccacacagtggtttcacaatgagagcctcatctcaagccaggcctccagctacttcattgacgctgccacagtggacgacagtggagagtacaggtgccagacaaacctctccaccctcagtgacccggtgcagctagaagtccatatcggctggctgttgctccaggcccctcggtgggtgttcaaggaggaagaccctattcacctgaggtgtcacagctggaagaacactgctctgcataaggtcacatatttacagaatggcaaaggcaggaagtattttcatcataattctgacttctacattccaaaagccacactcaaagacagcggctcctacttctgcagggggcttgttgggagtaaaaatgtgtcttcagagactgtgaacatcaccatcactcaaggtttggcagtgtcaaccatctcatcattctttccacctggctaccaaacgcgtatccagaaccctgatcctgccgtgtaccagctgcgggatagcaagagcagcgacaagagcgtgtgtctgttcaccgacttcgacagccagaccaacgtgtcccagagcaaggactccgacgtgtacatcaccgataagaccgtgctggacatgcggagcatggacttcaagagcaactccgccgtggcctggtccaacaagtccgatttcgcctgcgccaacgccttcaacaacagcattatccccgaggacacattcttcccaagccccgagagcagctgcgacgtgaagctggtggaaaagagcttcgagacagacaccaacctgaacttccagatcctgtacgagtgatcggcttcagaatcctgctgctgaaagtggccggctttaacctgctgatgaccctgcggctgtggtccagccgcgccaagagaagcggatctggcgtgaagcagaccctgaatttcgacctgctgaagctggctggcgacgtggaatccaacccaggcccttctagaggccatatgaccgagtacaagcccacggtgcgcctcgccacccgcgacgacgtccccagggccgtacgcaccctcgccgccgcgttcgccgactaccccgccacgcgccacaccgtcgatccggaccgccacatcgagcgggtcaccgagctgcaagaactcttcctcacgcgcgtcgggctcgacatcggcaaggtgtgggtcgcggacgacggcgccgcggtggcggtctggaccacgccggagagcgtcgaagcgggggcggtgttcgccgagatcggcccgcgcatggccgagttgagcggttcccggctggccgcgcagcaacagatggaaggcctcctggcgccgcaccggcccaaggagcccgcgtggttcctggccaccgtcggcgtctcgcccgaccaccagggcaagggtctgggcagcgccgtcgtgctccccggagtggaggcggccgagcgcgccggggtgcccgccttcctggagacctccgcgccccgcaacctccccttctacgagcggctcggcttcaccgtcaccgccgacgtcgaggtgcccgaaggaccgcgcacctggtgcatgacccgcaagcccggtgcctga

SEQ ID NO: 8268 - DNA, 2597 bp, synthetic construct
  source 1..2597: mol_type = other DNA
atggccttaccagtgaccgccttgctcctgccgctggccttgctgctccacgccgccaggccgctcgagatccagaaccctgatcctgccgtgtaccagctgcgggatagcaagagcagcgacaagagcgtgtgtctgttcaccgacttcgacagccagaccaacgtgtcccagagcaaggactccgacgtgtacatcaccgataagaccgtgctggacatgcggagcatggacttcaagagcaactccgccgtggcctggtccaacaagtccgatttcgcctgcgccaacgccttcaacaacagcattatccccgaggacacattcttcccaagccccgagagcagctgcgacgtgaagctggtggaaaagagcttcgagacagacaccaacctgaacttccagatcctgtacgagtgatcggcttcagaatcctgctgctgaaagtggccggctttaacctgctgatgaccctgcggctgtggtccagcagggccaagcgatctggatctggagcaacaaacttctcactactcaaacaagcaggtgacgtggaggagaatcccgggcctactagcatggccttaccagtgaccgccttgctcctgccgctggccttgctgctccacgccgccaggccggacatccagatgacacagactacatcctccctgtctgcctctctgggagacagagtcaccatcagttgcagggcaagtcaggacattagtaaatatttaaattggtatcagcagaaaccagatggaactgttaaactcctgatctaccatacatcaagattacactcaggagtcccatcaaggttcagtggcagtgggtctggaacagattattctctcaccattagcaacctggagcaagaagatattgccacttacttttgccaacagggtaatacgcttccgtacacgttcggaggggggaccaagctggagatcacaggtggcggtggctcgggcggtggtgggtcgggtggcggcggatctgaggtgaaactgcaggagtcaggacctggcctggtggcgccctcacagagcctgtccgtcacatgcactgtctcaggggtctcattacccgactatggtgtaagctggattcgccagcctccacgaaagggtctggagtggctgggagtaatatggggtagtgaaaccacatactataattcagctctcaaatccagactgaccatcatcaaggacaactccaagagccaagttttcttaaaaatgaacagtctgcaaactgatgacacagccatttactactgtgccaaacattattactacggtggtagctatgctatggactactggggtcaaggaacctcagtcaccgtctcctcaacgcgtgaggacctgaagaacgtgttcccacctgaggtggccgtgttcgagcctagcgaggccgagatcagccacacccagaaagccaccctcgtgtgcctggctaccggcttctaccccgaccatgtggaactgtcttggtgggtcaacggcaaagaggtgcacagcggcgtgtctaccgacccccagccactgaaagaacagcccgccctgaacgacagccggtactgcctgagcagcagactgagagtgtccgccaccttctggcagaacccccggaaccacttcagatgccaggtgcagttctacggcctgagcgagaacgacgagtggacccaggacagagccaagcccgtgacccagatcgtgtctgccgaagcctggggcagagccgattgcggctttaccagcgagagctaccagcagggcgtgctgagcgccaccaacctgagcgtgatcggcttcagaatcctgctgctgaaagtggccggctttaacctgctgatgaccctgcggctgtggtccagccgcgccaagagaagcggatctggcgtgaagcagaccctgaatttcgacctgctgaagctggctggcgacgtggaatccaacccaggcccttctagaggccatatgaccgagtacaagcccacggtgcgcctcgccacccgcgacgacgtccccagggccgtacgcaccctcgccgccgcgttcgccgactaccccgccacgcgccacaccgtcgatccggaccgccacatcgagcgggtcaccgagctgcaagaactcttcctcacgcgcgtcgggctcgacatcggcaaggtgtgggtcgcggacgacggcgccgcggtggcggtctggaccacgccggagagcgtcgaagcgggggcggtgttcgccgagatcggcccgcgcatggccgagttgagcggttcccggctggccgcgcagcaacagatggaaggcctcctggcgccgcaccggcccaaggagcccgcgtggttcctggccaccgtcggcgtctcgcccgaccaccagggcaagggtctgggcagcgccgtcgtgctccccggagtggaggcggccgagcgcgccggggtgcccgccttcctggagacctccgcgccccgcaacctccccttctacgagcggctcggcttcaccgtcaccgccgacgtcgaggtgcccgaaggaccgcgcacctggtgcatgacccgcaagcccggtgcctga

SEQ ID NO: 8269 - DNA, 2600 bp, synthetic construct
  source 1..2600: mol_type = other DNA
atggccttaccagtgaccgccttgctcctgccgctggccttgctgctccacgccgccaggccgctcgagatccagaaccctgatcctgccgtgtaccagctgcgggatagcaagagcagcgacaagagcgtgtgtctgttcaccgacttcgacagccagaccaacgtgtcccagagcaaggactccgacgtgtacatcaccgataagaccgtgctggacatgcggagcatggacttcaagagcaactccgccgtggcctggtccaacaagtccgatttcgcctgcgccaacgccttcaacaacagcattatccccgaggacacattcttcccaagccccgagagcagctgcgacgtgaagctggtggaaaagagcttcgagacagacaccaacctgaacttccagatcctgtacgagtgatcggcttcagaatcctgctgctgaaagtggccggctttaacctgctgatgaccctgcggctgtggtccagcagggccaagcgatctggatctggagcaacaaacttctcactactcaaacaagcaggtgacgtggaggagaatcccgggcctactagcaccatggccttaccagtgaccgccttgctcctgccgctggccttgctgctccacgccgccaggccggagatcgtgatgacccagagccctgccaccctgtctctgagccctggcgaaagagccaccctgagctgtagagccagccaggacatcagcaagtacctgaactggtatcagcagaagcccggccaggcccccagactgctgatctaccacaccagcagactgcacagcggcatccccgccagattttctggctctggcagcggcaccgactacaccctgacaatcagcagcctccagcccgaggacttcgccgtgtacttctgtcagcaaggcaacaccctgccctacaccttcggccagggcaccaagctggaaatcaagggcggaggcggaagtggaggcggaggatctggcggcggaggctctcaggtgcaactccaggaatctggccctggcctcgtgaagcccagcgagacactgagcctgacctgtaccgtgtccggcgtgtccctgcctgactatggcgtgtcctggatcagacagccccctggcaagggcctggaatggatcggagtgatttggggcagcgaaaccacctactacaacagctccctgaagtccagagtgaccatctccaaggacaactccaagaaccaggtgtccctgaagctgagcagcgtgacagccgccgacaccgccgtgtattactgcgccaagcactactactacggcggcagctacgctatggactactggggccagggaaccctcgtgaccgtgtctagtacgcgtgaggacctgaagaacgtgttcccacctgaggtggccgtgttcgagcctagcgaggccgagatcagccacacccagaaagccaccctcgtgtgcctggctaccggcttctaccccgaccatgtggaactgtcttggtgggtcaacggcaaagaggtgcacagcggcgtgtctaccgacccccagccactgaaagaacagcccgccctgaacgacagccggtactgcctgagcagcagactgagagtgtccgccaccttctggcagaacccccggaaccacttcagatgccaggtgcagttctacggcctgagcgagaacgacgagtggacccaggacagagccaagcccgtgacccagatcgtgtctgccgaagcctggggcagagccgattgcggctttaccagcgagagctaccagcagggcgtgctgagcgccaccaacctgagcgtgatcggcttcagaatcctgctgctgaaagtggccggctttaacctgctgatgaccctgcggctgtggtccagccgcgccaagagaagcggatctggcgtgaagcagaccctgaatttcgacctgctgaagctggctggcgacgtggaatccaacccaggcccttctagaggccatatgaccgagtacaagcccacggtgcgcctcgccacccgcgacgacgtccccagggccgtacgcaccctcgccgccgcgttcgccgactaccccgccacgcgccacaccgtcgatccggaccgccacatcgagcgggtcaccgagctgcaagaactcttcctcacgcgcgtcgggctcgacatcggcaaggtgtgggtcgcggacgacggcgccgcggtggcggtctggaccacgccggagagcgtcgaagcgggggcggtgttcgccgagatcggcccgcgcatggccgagttgagcggttcccggctggccgcgcagcaacagatggaaggcctcctggcgccgcaccggcccaaggagcccgcgtggttcctggccaccgtcggcgtctcgcccgaccaccagggcaagggtctgggcagcgccgtcgtgctccccggagtggaggcggccgagcgcgccggggtgcccgccttcctggagacctccgcgccccgcaacctccccttctacgagcggctcggcttcaccgtcaccgccgacgtcgaggtgcccgaaggaccgcgcacctggtgcatgacccgcaagcccggtgcctga

SEQ ID NO: 8270 - DNA, 2603 bp, synthetic construct
  source 1..2603: mol_type = other DNA
atggccttaccagtgaccgccttgctcctgccgctggccttgctgctccacgccgccaggccgctcgagatccagaaccctgatcctgccgtgtaccagctgcgggatagcaagagcagcgacaagagcgtgtgtctgttcaccgacttcgacagccagaccaacgtgtcccagagcaaggactccgacgtgtacatcaccgataagaccgtgctggacatgcggagcatggacttcaagagcaactccgccgtggcctggtccaacaagtccgatttcgcctgcgccaacgccttcaacaacagcattatccccgaggacacattcttcccaagccccgagagcagctgcgacgtgaagctggtggaaaagagcttcgagacagacaccaacctgaacttccagatcctgtacgagtgatcggcttcagaatcctgctgctgaaagtggccggctttaacctgctgatgaccctgcggctgtggtccagcagggccaagcgatctggatctggagcaacaaacttctcactactcaaacaagcaggtgacgtggaggagaatcccgggcctactagcaccatggccttaccagtgaccgccttgctcctgccgctggccttgctgctccacgccgccaggccggacgagatcgtgctgacacagagccccgccaccctgtcactgtctccaggcgaaagagccaccctgagctgtagcgccagcagcagcgtgtcctacatgcactggtatcagcagaagcccggccaggcccccagactgctgatctacgataccagcaagctggcctccggcatccccgccagattttctggcagcggctccggcaccgacttcaccctgacaatcagcagcctggaacccgaggacgtggccgtgtactactgttttcaaggcagcgtgtaccccttcaccttcggccagggcaccaagctggaaatcaagagaggtggcggtggctcgggcggtggtgggtcgggtggcggcggatctcaggtgcagctccaggaatctggccctggcctcgtgaagcctagccagaccctgagcctgacctgtaccgtgtctggcggcagcatcagcacaagcggcatgggcgtgggctggatcagacagcaccctggcaagggcctggaatggatcggccacatttggtgggacgacgacaagcggtacaaccccgccctgaagtccagagtgaccatcagcgtggacaccagcaagaaccagttcagcctgaagctgagcagcgtgacagccgccgataccgccgtgtattattgcgcccggatggaactgtggtcctactacttcgactactggggccagggaaccctcgtgaccgtgtctagtacgcgtgaggacctgaagaacgtgttcccacctgaggtggccgtgttcgagcctagcgaggccgagatcagccacacccagaaagccaccctcgtgtgcctggctaccggcttctaccccgaccatgtggaactgtcttggtgggtcaacggcaaagaggtgcacagcggcgtgtctaccgacccccagccactgaaagaacagcccgccctgaacgacagccggtactgcctgagcagcagactgagagtgtccgccaccttctggcagaacccccggaaccacttcagatgccaggtgcagttctacggcctgagcgagaacgacgagtggacccaggacagagccaagcccgtgacccagatcgtgtctgccgaagcctggggcagagccgattgcggctttaccagcgagagctaccagcagggcgtgctgagcgccaccaacctgagcgtgatcggcttcagaatcctgctgctgaaagtggccggctttaacctgctgatgaccctgcggctgtggtccagccgcgccaagagaagcggatctggcgtgaagcagaccctgaatttcgacctgctgaagctggctggcgacgtggaatccaacccaggcccttctagaggccatatgaccgagtacaagcccacggtgcgcctcgccacccgcgacgacgtccccagggccgtacgcaccctcgccgccgcgttcgccgactaccccgccacgcgccacaccgtcgatccggaccgccacatcgagcgggtcaccgagctgcaagaactcttcctcacgcgcgtcgggctcgacatcggcaaggtgtgggtcgcggacgacggcgccgcggtggcggtctggaccacgccggagagcgtcgaagcgggggcggtgttcgccgagatcggcccgcgcatggccgagttgagcggttcccggctggccgcgcagcaacagatggaaggcctcctggcgccgcaccggcccaaggagcccgcgtggttcctggccaccgtcggcgtctcgcccgaccaccagggcaagggtctgggcagcgccgtcgtgctccccggagtggaggcggccgagcgcgccggggtgcccgccttcctggagacctccgcgccccgcaacctccccttctacgagcggctcggcttcaccgtcaccgccgacgtcgaggtgcccgaaggaccgcgcacctggtgcatgacccgcaagcccggtgcctga

SEQ ID NO: 8271 - DNA, 2591 bp, synthetic construct
  source 1..2591: mol_type = other DNA
atggccttaccagtgaccgccttgctcctgccgctggccttgctgctccacgccgccaggccgctcgagatccagaaccctgatcctgccgtgtaccagctgcgggatagcaagagcagcgacaagagcgtgtgtctgttcaccgacttcgacagccagaccaacgtgtcccagagcaaggactccgacgtgtacatcaccgataagaccgtgctggacatgcggagcatggacttcaagagcaactccgccgtggcctggtccaacaagtccgatttcgcctgcgccaacgccttcaacaacagcattatccccgaggacacattcttcccaagccccgagagcagctgcgacgtgaagctggtggaaaagagcttcgagacagacaccaacctgaacttccagatcctgtacgagtgatcggcttcagaatcctgctgctgaaagtggccggctttaacctgctgatgaccctgcggctgtggtccagcagggccaagcgatctggatctggagcaacaaacttctcactactcaaacaagcaggtgacgtggaggagaatcccgggcctactagcatggccttaccagtgaccgccttgctcctgccgctggccttgctgctccacgccgccaggccggacatccagatgacacagagccctagcagcctgtctgccagcgtgggagacagagtgaccatcacctgtagagccagccaggacatcagcaactacctgaactggtatcagcagaagcccggcaaggcccctaagctgctgatctactacaccagcagactgcacagcggcgtgcccagcagattttctggctctggcagcggcaccgacttcaccctgacaatatctagcctccagcctgaggacttcgccacctactattgccagcagggcaacaccctgccttacacatttggacagggcaccaaggtggaaatcaagagaggcggaggcggaagtggaggcggaggatctggcggcggaggctctgaagtgcagctggttgaatcaggtggcggcctggttcaacctggcggatctctgagactgagctgtgccgccagcggcttcaccttcagcgactactttatgagctgggtccgacaggcccctggcaaaggacttgaatgggtcgccaccatcagcaatggcggcacctacacttactaccccgacagcgtgaagggcagattcaccatctccagagacaacagcaagaacaccctgtacctccagatgaactccctgagagccgaggacaccgccgtgtactactgcgccagattcgacggctacatcttcgactattggggccagggcaccctggtcacagtctcttctacgcgtgaggacctgaagaacgtgttcccacctgaggtggccgtgttcgagcctagcgaggccgagatcagccacacccagaaagccaccctcgtgtgcctggctaccggcttctaccccgaccatgtggaactgtcttggtgggtcaacggcaaagaggtgcacagcggcgtgtctaccgacccccagccactgaaagaacagcccgccctgaacgacagccggtactgcctgagcagcagactgagagtgtccgccaccttctggcagaacccccggaaccacttcagatgccaggtgcagttctacggcctgagcgagaacgacgagtggacccaggacagagccaagcccgtgacccagatcgtgtctgccgaagcctggggcagagccgattgcggctttaccagcgagagctaccagcagggcgtgctgagcgccaccaacctgagcgtgatcggcttcagaatcctgctgctgaaagtggccggctttaacctgctgatgaccctgcggctgtggtccagccgcgccaagagaagcggatctggcgtgaagcagaccctgaatttcgacctgctgaagctggctggcgacgtggaatccaacccaggcccttctagaggccatatgaccgagtacaagcccacggtgcgcctcgccacccgcgacgacgtccccagggccgtacgcaccctcgccgccgcgttcgccgactaccccgccacgcgccacaccgtcgatccggaccgccacatcgagcgggtcaccgagctgcaagaactcttcctcacgcgcgtcgggctcgacatcggcaaggtgtgggtcgcggacgacggcgccgcggtggcggtctggaccacgccggagagcgtcgaagcgggggcggtgttcgccgagatcggcccgcgcatggccgagttgagcggttcccggctggccgcgcagcaacagatggaaggcctcctggcgccgcaccggcccaaggagcccgcgtggttcctggccaccgtcggcgtctcgcccgaccaccagggcaagggtctgggcagcgccgtcgtgctccccggagtggaggcggccgagcgcgccggggtgcccgccttcctggagacctccgcgccccgcaacctccccttctacgagcggctcggcttcaccgtcaccgccgacgtcgaggtgcccgaaggaccgcgcacctggtgcatgacccgcaagcccggtgcctga

SEQ ID NO: 8272 - DNA, 2603 bp, synthetic construct
  source 1..2603: mol_type = other DNA
atggccttaccagtgaccgccttgctcctgccgctggccttgctgctccacgccgccaggccgctcgagatccagaaccctgatcctgccgtgtaccagctgcgggatagcaagagcagcgacaagagcgtgtgtctgttcaccgacttcgacagccagaccaacgtgtcccagagcaaggactccgacgtgtacatcaccgataagaccgtgctggacatgcggagcatggacttcaagagcaactccgccgtggcctggtccaacaagtccgatttcgcctgcgccaacgccttcaacaacagcattatccccgaggacacattcttcccaagccccgagagcagctgcgacgtgaagctggtggaaaagagcttcgagacagacaccaacctgaacttccagatcctgtacgagtgatcggcttcagaatcctgctgctgaaagtggccggctttaacctgctgatgaccctgcggctgtggtccagcagggccaagcgatctggatctggagcaacaaacttctcactactcaaacaagcaggtgacgtggaggagaatcccgggcctactagcatggccttaccagtgaccgccttgctcctgccgctggccttgctgctccacgccgccaggccggacatccagatgacacagagccctagcagcctgtctgccagcgtgggagacagagtgaccatcacatgcaaggccagcgaccacatcaacaactggctggcctggtatcagcagaagcctggacaggcccctaagctgctgatctacggcgctaccacactggaaacaggcgtgcccagcagattttctggcagcggctctggcaccgactacaccctgacaatatccagcctccagcctgaggacttcgccacctactactgtcagcagagctggaacaccccttggacattcggccagggcaccaagctggaaatcaagagaggcggaggcggaagtggaggcggaggatctggcggcggaggctctcaagttcagcttcaacagcctggcgctgagctggtcaaacctggcgcttctgtgaagatgagctgcaaagccagcggctacgccttcagcagctactggatcaactggatgaagcagaaacccggccagggactcgaatggatcggccaaatctatcccggcgacggcgacaccaactacaacggcaagttcaagggcagagccacactgaccgccgatacctctagcagcacagcctacatgcagctgagcagcctgaccagcgaagatagcgccgtgtacttctgtgcccggtccatcacaacagtcgtgggctgcgctatggactattggggccagggaacaagcgtgaccgtgtctagtacgcgtgaggacctgaagaacgtgttcccacctgaggtggccgtgttcgagcctagcgaggccgagatcagccacacccagaaagccaccctcgtgtgcctggctaccggcttctaccccgaccatgtggaactgtcttggtgggtcaacggcaaagaggtgcacagcggcgtgtctaccgacccccagccactgaaagaacagcccgccctgaacgacagccggtactgcctgagcagcagactgagagtgtccgccaccttctggcagaacccccggaaccacttcagatgccaggtgcagttctacggcctgagcgagaacgacgagtggacccaggacagagccaagcccgtgacccagatcgtgtctgccgaagcctggggcagagccgattgcggctttaccagcgagagctaccagcagggcgtgctgagcgccaccaacctgagcgtgatcggcttcagaatcctgctgctgaaagtggccggctttaacctgctgatgaccctgcggctgtggtccagccgcgccaagagaagcggatctggcgtgaagcagaccctgaatttcgacctgctgaagctggctggcgacgtggaatccaacccaggcccttctagaggccatatgaccgagtacaagcccacggtgcgcctcgccacccgcgacgacgtccccagggccgtacgcaccctcgccgccgcgttcgccgactaccccgccacgcgccacaccgtcgatccggaccgccacatcgagcgggtcaccgagctgcaagaactcttcctcacgcgcgtcgggctcgacatcggcaaggtgtgggtcgcggacgacggcgccgcggtggcggtctggaccacgccggagagcgtcgaagcgggggcggtgttcgccgagatcggcccgcgcatggccgagttgagcggttcccggctggccgcgcagcaacagatggaaggcctcctggcgccgcaccggcccaaggagcccgcgtggttcctggccaccgtcggcgtctcgcccgaccaccagggcaagggtctgggcagcgccgtcgtgctccccggagtggaggcggccgagcgcgccggggtgcccgccttcctggagacctccgcgccccgcaacctccccttctacgagcggctcggcttcaccgtcaccgccgacgtcgaggtgcccgaaggaccgcgcacctggtgcatgacccgcaagcccggtgcctga

SEQ ID NO: 8273 - DNA, 2609 bp, synthetic construct
  source 1..2609: mol_type = other DNA
atggccttaccagtgaccgccttgctcctgccgctggccttgctgctccacgccgccaggccgctcgagatccagaaccctgatcctgccgtgtaccagctgcgggatagcaagagcagcgacaagagcgtgtgtctgttcaccgacttcgacagccagaccaacgtgtcccagagcaaggactccgacgtgtacatcaccgataagaccgtgctggacatgcggagcatggacttcaagagcaactccgccgtggcctggtccaacaagtccgatttcgcctgcgccaacgccttcaacaacagcattatccccgaggacacattcttcccaagccccgagagcagctgcgacgtgaagctggtggaaaagagcttcgagacagacaccaacctgaacttccagatcctgtacgagtgatcggcttcagaatcctgctgctgaaagtggccggctttaacctgctgatgaccctgcggctgtggtccagcagggccaagcgatctggatctggagcaacaaacttctcactactcaaacaagcaggtgacgtggaggagaatcccgggcctactagcatggccttaccagtgaccgccttgctcctgccgctggccttgctgctccacgccgccaggccgcagatcgtgctgtctcagtctcctgccatcctgagcgcttccccaggcgagaaagtgaccatgacctgtagagccagcagcagcgtgtcctacatgcactggtatcagcagaagcccggcagcagccctaagccttggatctacgccaccagcaatctggcctctggcgtgccagccagattttctggctctggcagcggcaccagctacagcttcacaatcagcagagtggaagccgaggacgccgccacctactattgtcagcagtggaccttcaatcctcctaccttcggcggaggcacccggctggaaatcaaaagaacagtggctgctggcggaggcggaagtggaggcggaggatctggcggcggaggctctcaggcttatctgcaacagagcggagccgaactcgtcagacctggcgcttctgtgaagatgagctgcaaggccagcggctacaccttcaccagctataatatgcactgggtcaagcagacccctcggcagggactcgaatggatcggcggaatctatcccggcaacggcgacacctcctacaaccagaagttcaagggcaaagccacactgaccgtgggcaagagcagcagcaccgcctatatgcagctcagcagcctgaccagcgaggacagcgccgtgtacttctgcgccagatacgactacaactacgctatggactactggggccagggcaccagcgtgacagttagctctgccagcacgcgtgaggacctgaagaacgtgttcccacctgaggtggccgtgttcgagcctagcgaggccgagatcagccacacccagaaagccaccctcgtgtgcctggctaccggcttctaccccgaccatgtggaactgtcttggtgggtcaacggcaaagaggtgcacagcggcgtgtctaccgacccccagccactgaaagaacagcccgccctgaacgacagccggtactgcctgagcagcagactgagagtgtccgccaccttctggcagaacccccggaaccacttcagatgccaggtgcagttctacggcctgagcgagaacgacgagtggacccaggacagagccaagcccgtgacccagatcgtgtctgccgaagcctggggcagagccgattgcggctttaccagcgagagctaccagcagggcgtgctgagcgccaccaacctgagcgtgatcggcttcagaatcctgctgctgaaagtggccggctttaacctgctgatgaccctgcggctgtggtccagccgcgccaagagaagcggatctggcgtgaagcagaccctgaatttcgacctgctgaagctggctggcgacgtggaatccaacccaggcccttctagaggccatatgaccgagtacaagcccacggtgcgcctcgccacccgcgacgacgtccccagggccgtacgcaccctcgccgccgcgttcgccgactaccccgccacgcgccacaccgtcgatccggaccgccacatcgagcgggtcaccgagctgcaagaactcttcctcacgcgcgtcgggctcgacatcggcaaggtgtgggtcgcggacgacggcgccgcggtggcggtctggaccacgccggagagcgtcgaagcgggggcggtgttcgccgagatcggcccgcgcatggccgagttgagcggttcccggctggccgcgcagcaacagatggaaggcctcctggcgccgcaccggcccaaggagcccgcgtggttcctggccaccgtcggcgtctcgcccgaccaccagggcaagggtctgggcagcgccgtcgtgctccccggagtggaggcggccgagcgcgccggggtgcccgccttcctggagacctccgcgccccgcaacctccccttctacgagcggctcggcttcaccgtcaccgccgacgtcgaggtgcccgaaggaccgcgcacctggtgcatgacccgcaagcccggtgcctga

SEQ ID NO: 8274 - DNA, 2603 bp, synthetic construct
  source 1..2603: mol_type = other DNA
atggccttaccagtgaccgccttgctcctgccgctggccttgctgctccacgccgccaggccgctcgagatccagaaccctgatcctgccgtgtaccagctgcgggatagcaagagcagcgacaagagcgtgtgtctgttcaccgacttcgacagccagaccaacgtgtcccagagcaaggactccgacgtgtacatcaccgataagaccgtgctggacatgcggagcatggacttcaagagcaactccgccgtggcctggtccaacaagtccgatttcgcctgcgccaacgccttcaacaacagcattatccccgaggacacattcttcccaagccccgagagcagctgcgacgtgaagctggtggaaaagagcttcgagacagacaccaacctgaacttccagatcctgtacgagtgatcggcttcagaatcctgctgctgaaagtggccggctttaacctgctgatgaccctgcggctgtggtccagcagggccaagcgatctggatctggagcaacaaacttctcactactcaaacaagcaggtgacgtggaggagaatcccgggcctactagcatggccttaccagtgaccgccttgctcctgccgctggccttgctgctccacgccgccaggccggagatcgtgctgacacagagccctgccaccctgtctctgagccctggcgaaagagccaccctgagctgtagagccagccagagcgtgtccagctacctggcctggtatcagcagaagcccggccaggctccccggctgctgatctacgatgccagcaatagagccaccggcatccccgccagattttccggctctggcagcggcaccgacttcaccctgaccatcagctccctggaacccgaggacttcgccgtgtactactgccagcagcggagcaactggcccatcacattcggccagggcacccggctggaaatcaaaggcggaggcggaagtggaggcggaggatctggcggcggaggctctgaggtgcagcttgttgagtctggcggaggactggtgcagcccgatagaagcctgagactgtcttgtgccgccagcggcttcaccttccacgattatgccatgcactgggtccgacaggcccctggcaaaggacttgaatgggtgtccaccatctcttggaacagcggcacaatcggctacgccgactctgtgaagggcagattcaccatcagccgggacaacgccaagaacagcctgtacctccagatgaactccctgagagccgaggacacagccctgtactactgcgccaaggacatccagtacggcaactactactacggcatggacgtgtggggccagggcacaacagtgacagtctcttctacgcgtgaggacctgaagaacgtgttcccacctgaggtggccgtgttcgagcctagcgaggccgagatcagccacacccagaaagccaccctcgtgtgcctggctaccggcttctaccccgaccatgtggaactgtcttggtgggtcaacggcaaagaggtgcacagcggcgtgtctaccgacccccagccactgaaagaacagcccgccctgaacgacagccggtactgcctgagcagcagactgagagtgtccgccaccttctggcagaacccccggaaccacttcagatgccaggtgcagttctacggcctgagcgagaacgacgagtggacccaggacagagccaagcccgtgacccagatcgtgtctgccgaagcctggggcagagccgattgcggctttaccagcgagagctaccagcagggcgtgctgagcgccaccaacctgagcgtgatcggcttcagaatcctgctgctgaaagtggccggctttaacctgctgatgaccctgcggctgtggtccagccgcgccaagagaagcggatctggcgtgaagcagaccctgaatttcgacctgctgaagctggctggcgacgtggaatccaacccaggcccttctagaggccatatgaccgagtacaagcccacggtgcgcctcgccacccgcgacgacgtccccagggccgtacgcaccctcgccgccgcgttcgccgactaccccgccacgcgccacaccgtcgatccggaccgccacatcgagcgggtcaccgagctgcaagaactcttcctcacgcgcgtcgggctcgacatcggcaaggtgtgggtcgcggacgacggcgccgcggtggcggtctggaccacgccggagagcgtcgaagcgggggcggtgttcgccgagatcggcccgcgcatggccgagttgagcggttcccggctggccgcgcagcaacagatggaaggcctcctggcgccgcaccggcccaaggagcccgcgtggttcctggccaccgtcggcgtctcgcccgaccaccagggcaagggtctgggcagcgccgtcgtgctccccggagtggaggcggccgagcgcgccggggtgcccgccttcctggagacctccgcgccccgcaacctccccttctacgagcggctcggcttcaccgtcaccgccgacgtcgaggtgcccgaaggaccgcgcacctggtgcatgacccgcaagcccggtgcctga

SEQ ID NO: 8275 - DNA, 2597 bp, synthetic construct
  source 1..2597: mol_type = other DNA
atggccttaccagtgaccgccttgctcctgccgctggccttgctgctccacgccgccaggccgctcgagatccagaaccctgatcctgccgtgtaccagctgcgggatagcaagagcagcgacaagagcgtgtgtctgttcaccgacttcgacagccagaccaacgtgtcccagagcaaggactccgacgtgtacatcaccgataagaccgtgctggacatgcggagcatggacttcaagagcaactccgccgtggcctggtccaacaagtccgatttcgcctgcgccaacgccttcaacaacagcattatccccgaggacacattcttcccaagccccgagagcagctgcgacgtgaagctggtggaaaagagcttcgagacagacaccaacctgaacttccagatcctgtacgagtgatcggcttcagaatcctgctgctgaaagtggccggctttaacctgctgatgaccctgcggctgtggtccagcagggccaagcgatctggatctggagcaacaaacttctcactactcaaacaagcaggtgacgtggaggagaatcccgggcctactagcatggccttaccagtgaccgccttgctcctgccgctggccttgctgctccacgccgccaggccggacatccagatgacccagagccccagcagcctgtctgccagcgtgggcgacagagtgaccatcacctgtagagccagccaggacgtgaacaccgccgtggcctggtatcagcagaagcctggcaaggcccccaagctgctgatctacagcgccagcttcctggaaagcggcgtgcccagcagattcagcggaagcagaagcggcaccgacttcaccctgaccatcagctccctccagcccgaggacttcgccacctactactgccagcagcactacaccacccctcccaccttcggccagaccaaggtggaaatcaagagaggcggaggcggaagtggaggcggaggatctggcggcggaggctctgaagtgcaactggtggaatctggcggcggactggtgcagcctggcggatctctgagactgagctgtgccgccagcggcttcaacatcaaggacacctacatccactgggtgcgccaggcccctggaaagggactggaatgggtggcccggatctaccccaccaacggctacaccagatacgccgacagcgtgaagggccggttcaccatcagcgccgacaccagcaagaataccgcctacctccagatgaacagcctgcgggccgaggataccgccgtgtactactgctcaagatggggaggcgacggcttctacgctatggacgtgtggggccagggcacccttgtgaccgtgtcatctacgcgtgaggacctgaagaacgtgttcccacctgaggtggccgtgttcgagcctagcgaggccgagatcagccacacccagaaagccaccctcgtgtgcctggctaccggcttctaccccgaccatgtggaactgtcttggtgggtcaacggcaaagaggtgcacagcggcgtgtctaccgacccccagccactgaaagaacagcccgccctgaacgacagccggtactgcctgagcagcagactgagagtgtccgccaccttctggcagaacccccggaaccacttcagatgccaggtgcagttctacggcctgagcgagaacgacgagtggacccaggacagagccaagcccgtgacccagatcgtgtctgccgaagcctggggcagagccgattgcggctttaccagcgagagctaccagcagggcgtgctgagcgccaccaacctgagcgtgatcggcttcagaatcctgctgctgaaagtggccggctttaacctgctgatgaccctgcggctgtggtccagccgcgccaagagaagcggatctggcgtgaagcagaccctgaatttcgacctgctgaagctggctggcgacgtggaatccaacccaggcccttctagaggccatatgaccgagtacaagcccacggtgcgcctcgccacccgcgacgacgtccccagggccgtacgcaccctcgccgccgcgttcgccgactaccccgccacgcgccacaccgtcgatccggaccgccacatcgagcgggtcaccgagctgcaagaactcttcctcacgcgcgtcgggctcgacatcggcaaggtgtgggtcgcggacgacggcgccgcggtggcggtctggaccacgccggagagcgtcgaagcgggggcggtgttcgccgagatcggcccgcgcatggccgagttgagcggttcccggctggccgcgcagcaacagatggaaggcctcctggcgccgcaccggcccaaggagcccgcgtggttcctggccaccgtcggcgtctcgcccgaccaccagggcaagggtctgggcagcgccgtcgtgctccccggagtggaggcggccgagcgcgccggggtgcccgccttcctggagacctccgcgccccgcaacctccccttctacgagcggctcggcttcaccgtcaccgccgacgtcgaggtgcccgaaggaccgcgcacctggtgcatgacccgcaagcccggtgcctga

SEQ ID NO: 8276 - DNA, 2234 bp, synthetic construct
  source 1..2234: mol_type = other DNA
atggccttaccagtgaccgccttgctcctgccgctggccttgctgctccacgccgccaggccgctcgagatccagaaccctgatcctgccgtgtaccagctgcgggatagcaagagcagcgacaagagcgtgtgtctgttcaccgacttcgacagccagaccaacgtgtcccagagcaaggactccgacgtgtacatcaccgataagaccgtgctggacatgcggagcatggacttcaagagcaactccgccgtggcctggtccaacaagtccgatttcgcctgcgccaacgccttcaacaacagcattatccccgaggacacattcttcccaagccccgagagcagctgcgacgtgaagctggtggaaaagagcttcgagacagacaccaacctgaacttccagatcctgtacgagtgatcggcttcagaatcctgctgctgaaagtggccggctttaacctgctgatgaccctgcggctgtggtccagcagggccaagcgatctggatctggagcaacaaacttctcactactcaaacaagcaggtgacgtggaggagaatcccgggcctactagcatggccctgcccgtgacagccctgctgctgcctctggctctgctgctgcacgccgccagacccgatgaattcgaggtgcaactggtggaaagcggcggaggcctggtgcaggctggcggatctctgagactgagctgtgccgccagcggcatcaccttcagcatcaacacaatgggctggtacagacaggcccctggcaagcagagggaactggtggccctgatctccagcatcggcgacacctactacgccgacagcgtgaagggccggttcaccatcagccgggacaacgccaagaacaccgtgtacctccagatgaacagcctgaagcccgaggacaccgccgtgtactactgcaagcggttcagaacagccgcccagggcaccgattattggggccagggaacacaagtgaccgtgtcctctacgcgtgaggacctgaagaacgtgttcccacctgaggtggccgtgttcgagcctagcgaggccgagatcagccacacccagaaagccaccctcgtgtgcctggctaccggcttctaccccgaccatgtggaactgtcttggtgggtcaacggcaaagaggtgcacagcggcgtgtctaccgacccccagccactgaaagaacagcccgccctgaacgacagccggtactgcctgagcagcagactgagagtgtccgccaccttctggcagaacccccggaaccacttcagatgccaggtgcagttctacggcctgagcgagaacgacgagtggacccaggacagagccaagcccgtgacccagatcgtgtctgccgaagcctggggcagagccgattgcggctttaccagcgagagctaccagcagggcgtgctgagcgccaccaacctgagcgtgatcggcttcagaatcctgctgctgaaagtggccggctttaacctgctgatgaccctgcggctgtggtccagccgcgccaagagaagcggatctggcgtgaagcagaccctgaatttcgacctgctgaagctggctggcgacgtggaatccaacccaggcccttctagaggccatatgaccgagtacaagcccacggtgcgcctcgccacccgcgacgacgtccccagggccgtacgcaccctcgccgccgcgttcgccgactaccccgccacgcgccacaccgtcgatccggaccgccacatcgagcgggtcaccgagctgcaagaactcttcctcacgcgcgtcgggctcgacatcggcaaggtgtgggtcgcggacgacggcgccgcggtggcggtctggaccacgccggagagcgtcgaagcgggggcggtgttcgccgagatcggcccgcgcatggccgagttgagcggttcccggctggccgcgcagcaacagatggaaggcctcctggcgccgcaccggcccaaggagcccgcgtggttcctggccaccgtcggcgtctcgcccgaccaccagggcaagggtctgggcagcgccgtcgtgctccccggagtggaggcggccgagcgcgccggggtgcccgccttcctggagacctccgcgccccgcaacctccccttctacgagcggctcggcttcaccgtcaccgccgacgtcgaggtgcccgaaggaccgcgcacctggtgcatgacccgcaagcccggtgcctga

SEQ ID NO: 8277 - DNA, 2234 bp, synthetic construct; identical to SEQ ID NO: 8276
  source 1..2234: mol_type = other DNA

SEQ ID NO: 8278 - DNA, 3029 bp, synthetic construct
  source 1..3029: mol_type = other DNA
atggccttaccagtgaccgccttgctcctgccgctggccttgctgctccacgccgccaggccgctcgagatccagaaccctgatcctgccgtgtaccagctgcgggatagcaagagcagcgacaagagcgtgtgtctgttcaccgacttcgacagccagaccaacgtgtcccagagcaaggactccgacgtgtacatcaccgataagaccgtgctggacatgcggagcatggacttcaagagcaactccgccgtggcctggtccaacaagtccgatttcgcctgcgccaacgccttcaacaacagcattatccccgaggacacattcttcccaagccccgagagcagctgcgacgtgaagctggtggaaaagagcttcgagacagacaccaacctgaacttccagatcctgtacgagtgatcggcttcagaatcctgctgctgaaagtggccggctttaacctgctgatgaccctgcggctgtggtccagcagggccaagcgatctggatctggagcaacaaacttctcactactcaaacaagcaggtgacgtggaggagaatcccgggcctactagcatggccttaccagtgaccgccttgctcctgccgctggccttgctgctccacgccgccaggccgcaggtccagctcgtcgagtccggcggcggcctcgtccaggccggcgactccgtcaccctctcctgcaccgcctccggccgcaccttctcctcctacgccctcgcctggttccgccagcgccccggcaaggagcgcgagttcgtcgccggcctccgctggggcggccccaccaactacgccgactccgtcaaggaccgcttcaccatctccggcgactccgccaagcacaccatgtacctccagatgaactccctcaagcccgaggacaccgccgtctactactgcggctacaaccccggcggctgggccgtcccctcccagtacgagtacgactcctggggccagggcacccaggtcaccgtctcctccggtaccggcggaggcggatctggcggcggaggtagcggtggcggaggatctgaattcgacatccagatgacacagagccctagcagcctgtctgccagcgtgggagacagagtgaccatcacatgcaaggccagcgaccacatcaacaactggctggcctggtatcagcagaagcctggacaggcccctaagctgctgatctacggcgctaccacactggaaacaggcgtgcccagcagattttctggcagcggctctggcaccgactacaccctgacaatatccagcctccagcctgaggacttcgccacctactactgtcagcagagctggaacaccccttggacattcggccagggcaccaagctggaaatcaagagaggcggaggcggaagtggaggcggaggatctggcggcggaggctctcaagttcagcttcaacagcctggcgctgagctggtcaaacctggcgcttctgtgaagatgagctgcaaagccagcggctacgccttcagcagctactggatcaactggatgaagcagaaacccggccagggactcgaatggatcggccaaatctatcccggcgacggcgacaccaactacaacggcaagttcaagggcagagccacactgaccgccgatacctctagcagcacagcctacatgcagctgagcagcctgaccagcgaagatagcgccgtgtacttctgtgcccggtccatcacaacagtcgtgggctgcgctatggactattggggccagggaacaagcgtgaccgtgtctagtacgcgtgaggacctgaagaacgtgttcccacctgaggtggccgtgttcgagcctagcgaggccgagatcagccacacccagaaagccaccctcgtgtgcctggctaccggcttctaccccgaccatgtggaactgtcttggtgggtcaacggcaaagaggtgcacagcggcgtgtctaccgacccccagccactgaaagaacagcccgccctgaacgacagccggtactgcctgagcagcagactgagagtgtccgccaccttctggcagaacccccggaaccacttcagatgccaggtgcagttctacggcctgagcgagaacgacgagtggacccaggacagagccaagcccgtgacccagatcgtgtctgccgaagcctggggcagagccgattgcggctttaccagcgagagctaccagcagggcgtgctgagcgccaccaacctgagcgtgatcggcttcagaatcctgctgctgaaagtggccggctttaacctgctgatgaccctgcggctgtggtccagccgcgccaagagaagcggatctggcgtgaagcagaccctgaatttcgacctgctgaagctggctggcgacgtggaatccaacccaggcccttctagaggccatatgaccgagtacaagcccacggtgcgcctcgccacccgcgacgacgtccccagggccgtacgcaccctcgccgccgcgttcgccgactaccccgccacgcgccacaccgtcgatccggaccgccacatcgagcgggtcaccgagctgcaagaactcttcctcacgcgcgtcgggctcgacatcggcaaggtgtgggtcgcggacgacggcgccgcggtggcggtctggaccacgccggagagcgtcgaagcgggggcggtgttcgccgagatcggcccgcgcatggccgagttgagcggttcccggctggccgcgcagcaacagatggaaggcctcctggcgccgcaccggcccaaggagcccgcgtggttcctggccaccgtcggcgtctcgcccgaccaccagggcaagggtctgggcagcgccgtcgtgctccccggagtggaggcggccgagcgcgccggggtgcccgccttcctggagacctccgcgccccgcaacctccccttctacgagcggctcggcttcaccgtcaccgccgacgtcgaggtgcccgaaggaccgcgcacctggtgcatgacccgcaagcccggtgcctga

SEQ ID NO: 8279 - DNA, 3416 bp, synthetic construct
  source 1..3416: mol_type = other DNA
atggccttaccagtgaccgccttgctcctgccgctggccttgctgctccacgccgccaggccgctcgagatccagaaccctgatcctgccgtgtaccagctgcgggatagcaagagcagcgacaagagcgtgtgtctgttcaccgacttcgacagccagaccaacgtgtcccagagcaaggactccgacgtgtacatcaccgataagaccgtgctggacatgcggagcatggacttcaagagcaactccgccgtggcctggtccaacaagtccgatttcgcctgcgccaacgccttcaacaacagcattatccccgaggacacattcttcccaagccccgagagcagctgcgacgtgaagctggtggaaaagagcttcgagacagacaccaacctgaacttccagatcctgtacgagtgatcggcttcagaatcctgctgctgaaagtggccggctttaacctgctgatgaccctgcggctgtggtccagcagggccaagcgatctggatctggagcaacaaacttctcactactcaaacaagcaggtgacgtggaggagaatcccgggcctactagcatggccttaccagtgaccgccttgctcctgccgctggccttgctgctccacgccgccaggccggaggttcagctgcttgagtctggcggaggactggttcaacctggcggaagcctgagactgtcttgtgccgccagcggcttcacctttagcagctacgccatgagctgggtccgacaggctcctggcaaaggactggaatgggtgtccagcatcagcggcagcggcgactacatctactacgccgatagcgtgaagggcagattcaccatcagccgggacatcagcaagaacaccctgtacctccagatgaacagcctgagagccgaggacaccgccgtgtactactgtgccaaagaaggcaccggcgctaacagcagcctggccgattatagaggccagggcacactggtcaccgtgtctagtggcggaggaagcggcggaggatctcaggtccagctcgtcgagtccggcggcggcctcgtccaggccggcgactccgtcaccctctcctgcaccgcctccggccgcaccttctcctcctacgccctcgcctggttccgccagcgccccggcaaggagcgcgagttcgtcgccggcctccgctggggcggccccaccaactacgccgactccgtcaaggaccgcttcaccatctccggcgactccgccaagcacaccatgtacctccagatgaactccctcaagcccgaggacaccgccgtctactactgcggctacaaccccggcggctgggccgtcccctcccagtacgagtacgactcctggggccagggcacccaggtcaccgtctcctccggtaccggcggaggcggatctggcggcggaggtagcggtggcggaggatctgaattcgacatccagatgacacagagccctagcagcctgtctgccagcgtgggagacagagtgaccatcacatgcaaggccagcgaccacatcaacaactggctggcctggtatcagcagaagcctggacaggcccctaagctgctgatctacggcgctaccacactggaaacaggcgtgcccagcagattttctggcagcggctctggcaccgactacaccctgacaatatccagcctccagcctgaggacttcgccacctactactgtcagcagagctggaacaccccttggacattcggccagggcaccaagctggaaatcaagagaggcggaggcggaagtggaggcggaggatctggcggcggaggctctcaagttcagcttcaacagcctggcgctgagctggtcaaacctggcgcttctgtgaagatgagctgcaaagccagcggctacgccttcagcagctactggatcaactggatgaagcagaaacccggccagggactcgaatggatcggccaaatctatcccggcgacggcgacaccaactacaacggcaagttcaagggcagagccacactgaccgccgatacctctagcagcacagcctacatgcagctgagcagcctgaccagcgaagatagcgccgtgtacttctgtgcccggtccatcacaacagtcgtgggctgcgctatggactattggggccagggaacaagcgtgaccgtgtctagtacgcgtgaggacctgaagaacgtgttcccacctgaggtggccgtgttcgagcctagcgaggccgagatcagccacacccagaaagccaccctcgtgtgcctggctaccggcttctaccccgaccatgtggaactgtcttggtgggtcaacggcaaagaggtgcacagcggcgtgtctaccgacccccagccactgaaagaacagcccgccctgaacgacagccggtactgcctgagcagcagactgagagtgtccgccaccttctggcagaacccccggaaccacttcagatgccaggtgcagttctacggcctgagcgagaacgacgagtggacccaggacagagccaagcccgtgacccagatcgtgtctgccgaagcctggggcagagccgattgcggctttaccagcgagagctaccagcagggcgtgctgagcgccaccaacctgagcgtgatcggcttcagaatcctgctgctgaaagtggccggctttaacctgctgatgaccctgcggctgtggtccagccgcgccaagagaagcggatctggcgtgaagcagaccctgaatttcgacctgctgaagctggctggcgacgtggaatccaacccaggcccttctagaggccatatgaccgagtacaagcccacggtgcgcctcgccacccgcgacgacgtccccagggccgtacgcaccctcgccgccgcgttcgccgactaccccgccacgcgccacaccgtcgatccggaccgccacatcgagcgggtcaccgagctgcaagaactcttcctcacgcgcgtcgggctcgacatcggcaaggtgtgggtcgcggacgacggcgccgcggtggcggtctggaccacgccggagagcgtcgaagcgggggcggtgttcgccgagatcggcccgcgcatggccgagttgagcggttcccggctggccgcgcagcaacagatggaaggcctcctggcgccgcaccggcccaaggagcccgcgtggttcctggccaccgtcggcgtctcgcccgaccaccagggcaagggtctgggcagcgccgtcgtgctccccggagtggaggcggccgagcgcgccggggtgcccgccttcctggagacctccgcgccccgcaacctccccttctacgagcggctcggcttcaccgtcaccgccgacgtcgaggtgcccgaaggaccgcgcacctggtgcatgacccgcaagcccggtgcctga

SEQ ID NO: 8280 - DNA, 3416 bp, synthetic construct; identical to SEQ ID NO: 8279
  source 1..3416: mol_type = other DNA

SEQ ID NO: 8281 - DNA, 2252 bp, synthetic construct
  source 1..2252: mol_type = other DNA
atggccttaccagtgaccgccttgctcctgccgctggccttgctgctccacgccgccaggccgctcgagatccagaaccctgatcctgccgtgtaccagctgcgggatagcaagagcagcgacaagagcgtgtgtctgttcaccgacttcgacagccagaccaacgtgtcccagagcaaggactccgacgtgtacatcaccgataagaccgtgctggacatgcggagcatggacttcaagagcaactccgccgtggcctggtccaacaagtccgatttcgcctgcgccaacgccttcaacaacagcattatccccgaggacacattcttcccaagccccgagagcagctgcgacgtgaagctggtggaaaagagcttcgagacagacaccaacctgaacttccagatcctgtacgagtgatcggcttcagaatcctgctgctgaaagtggccggctttaacctgctgatgaccctgcggctgtggtccagcagggccaagcgatctggatctggagcaacaaacttctcactactcaaacaagcaggtgacgtggaggagaatcccgggcctactagcatggccctgcccgtgacagccctgctgctgcctctggctctgctgctgcacgccgccagacccgatgaattcggctctgacctgggcatcaagctgctgttcgccgctgccaagggccaggacgacgaagtgcggattctgctggctgctggggccgacgtgaacgccaaggatttcgagggctacacccccctgcacgtggccgcctatgatggacacctggaaatcgtggaagtgctgctgaaggctggcgctgatgtgaatgccaaagacagccagggccggacccctctgcatgaagccgcctacagcggccatctggaaattgtggaagtgctgctgaaagccggggcagacgtgaacgctcaggacgacgctggcgagacaccagccgatctggctgcagcttggggccacgaagatatcgccgaggtgctgcagaagacgcgtgaggacctgaagaacgtgttcccacctgaggtggccgtgttcgagcctagcgaggccgagatcagccacacccagaaagccaccctcgtgtgcctggctaccggcttctaccccgaccatgtggaactgtcttggtgggtcaacggcaaagaggtgcacagcggcgtgtctaccgacccccagccactgaaagaacagcccgccctgaacgacagccggtactgcctgagcagcagactgagagtgtccgccaccttctggcagaacccccggaaccacttcagatgccaggtgcagttctacggcctgagcgagaacgacgagtggacccaggacagagccaagcccgtgacccagatcgtgtctgccgaagcctggggcagagccgattgcggctttaccagcgagagctaccagcagggcgtgctgagcgccaccaacctgagcgtgatcggcttcagaatcctgctgctgaaagtggccggctttaacctgctgatgaccctgcggctgtggtccagccgcgccaagagaagcggatctggcgtgaagcagaccctgaatttcgacctgctgaagctggctggcgacgtggaatccaacccaggcccttctagaggccatatgaccgagtacaagcccacggtgcgcctcgccacccgcgacgacgtccccagggccgtacgcaccctcgccgccgcgttcgccgactaccccgccacgcgccacaccgtcgatccggaccgccacatcgagcgggtcaccgagctgcaagaactcttcctcacgcgcgtcgggctcgacatcggcaaggtgtgggtcgcggacgacggcgccgcggtggcggtctggaccacgccggagagcgtcgaagcgggggcggtgttcgccgagatcggcccgcgcatggccgagttgagcggttcccggctggccgcgcagcaacagatggaaggcctcctggcgccgcaccggcccaaggagcccgcgtggttcctggccaccgtcggcgtctcgcccgaccaccagggcaagggtctgggcagcgccgtcgtgctccccggagtggaggcggccgagcgcgccggggtgcccgccttcctggagacctccgcgccccgcaacctccccttctacgagcggctcggcttcaccgtcaccgccgacgtcgaggtgcccgaaggaccgcgcacctggtgcatgacccgcaagcccggtgcctga

SEQ ID NO: 8282 - DNA, 2039 bp, synthetic construct
  source 1..2039: mol_type = other DNA
atggccttaccagtgaccgccttgctcctgccgctggccttgctgctccacgccgccaggccgctcgagatccagaaccctgatcctgccgtgtaccagctgcgggatagcaagagcagcgacaagagcgtgtgtctgttcaccgacttcgacagccagaccaacgtgtcccagagcaaggactccgacgtgtacatcaccgataagaccgtgctggacatgcggagcatggacttcaagagcaactccgccgtggcctggtccaacaagtccgatttcgcctgcgccaacgccttcaacaacagcattatccccgaggacacattcttcccaagccccgagagcagctgcgacgtgaagctggtggaaaagagcttcgagacagacaccaacctgaacttccagatcctgtacgagtgatcggcttcagaatcctgctgctgaaagtggccggctttaacctgctgatgaccctgcggctgtggtccagcagggccaagcgatctggatctggagcaacaaacttctcactactcaaacaagcaggtgacgtggaggagaatcccgggcctactagcatggactggatttggcgcatccttttccttgtcggcgctgctaccggcgcccattccttcgaaggcagcggattcgaatacgccaaagagatgcggaacgcctactgggagatcgccctgctgcccaatctgaccaaccagcagaagagagcccccatcagaaagctgtacgacgacccctcccagagcagcgagctgctgtctgaggctaaaaaactgaacgatagccagacgcgtgaggacctgaagaacgtgttcccacctgaggtggccgtgttcgagcctagcgaggccgagatcagccacacccagaaagccaccctcgtgtgcctggctaccggcttctaccccgaccatgtggaactgtcttggtgggtcaacggcaaagaggtgcacagcggcgtgtctaccgacccccagccactgaaagaacagcccgccctgaacgacagccggtactgcctgagcagcagactgagagtgtccgccaccttctggcagaacccccggaaccacttcagatgccaggtgcagttctacggcctgagcgagaacgacgagtggacccaggacagagccaagcccgtgacccagatcgtgtctgccgaagcctggggcagagccgattgcggctttaccagcgagagctaccagcagggcgtgctgagcgccaccaacctgagcgtgatcggcttcagaatcctgctgctgaaagtggccggctttaacctgctgatgaccctgcggctgtggtccagccgcgccaagagaagcggatctggcgtgaagcagaccctgaatttcgacctgctgaagctggctggcgacgtggaatccaacccaggcccttctagaggccatatgaccgagtacaagcccacggtgcgcctcgccacccgcgacgacgtccccagggccgtacgcaccctcgccgccgcgttcgccgactaccccgccacgcgccacaccgtcgatccggaccgccacatcgagcgggtcaccgagctgcaagaactcttcctcacgcgcgtcgggctcgacatcggcaaggtgtgggtcgcggacgacggcgccgcggtggcggtctggaccacgccggagagcgtcgaagcgggggcggtgttcgccgagatcggcccgcgcatggccgagttgagcggttcccggctggccgcgcagcaacagatggaaggcctcctggcgccgcaccggcccaaggagcccgcgtggttcctggccaccgtcggcgtctcgcccgaccaccagggcaagggtctgggcagcgccgtcgtgctccccggagtggaggcggccgagcgcgccggggtgcccgccttcctggagacctccgcgccccgcaacctccccttctacgagcggctcggcttcaccgtcaccgccgacgtcgaggtgcccgaaggaccgcgcacctggtgcatgacccgcaagcccggtgcctga

SEQ ID NO: 8283 - DNA, 2705 bp, synthetic construct
  source 1..2705: mol_type = other DNA
atggccttaccagtgaccgccttgctcctgccgctggccttgctgctccacgccgccaggccgctcgagatccagaaccctgatcctgccgtgtaccagctgcgggatagcaagagcagcgacaagagcgtgtgtctgttcaccgacttcgacagccagaccaacgtgtcccagagcaaggactccgacgtgtacatcaccgataagaccgtgctggacatgcggagcatggacttcaagagcaactccgccgtggcctggtccaacaagtccgatttcgcctgcgccaacgccttcaacaacagcattatccccgaggacacattcttcccaagccccgagagcagctgcgacgtgaagctggtggaaaagagcttcgagacagacaccaacctgaacttccagatcctgtacgagtgatcggcttcagaatcctgctgctgaaagtggccggctttaacctgctgatgaccctgcggctgtggtccagcagggccaagcgatctggatctggagcaacaaacttctcactactcaaacaagcaggtgacgtggaggagaatcccgggcctactagcatggccctgcccgtgacagccctgctgctgcctctggctctgctgctgcacgccgccagacccgatgaattcgaggtgcaactggtggaaagcggcggaggcctggtgcaggctggcggatctctgagactgagctgtgccgccagcggcatcaccttcagcatcaacacaatgggctggtacagacaggcccctggcaagcagagggaactggtggccctgatctccagcatcggcgacacctactacgccgacagcgtgaagggccggttcaccatcagccgggacaacgccaagaacaccgtgtacctccagatgaacagcctgaagcccgaggacaccgccgtgtactactgcaagcggttcagaacagccgcccagggcaccgattattggggccagggaacacaagtgaccgtgtcctctctcgagggaggaggcggctccgggggaggcggaagtggaggcggaggatctgggtctggaggaagcggatctggaggctcagggtcagggggctcaggcagtggaggctctttcgaagtgcaactggtggaatctgggggcggactggtgcagccaggcggaagtctgaggctgtcttgtgccgcctccggcagcatcttcggcttcaacgacatggcctggtatcggcaggctcccggaaaacagcgcgagctggtggctctgattagcagagtgggcgtgaccagcagcgccgactctgtgaagggcagattcacaatctccagagtgaacgccaaggatacagtgtacctccagatgaactctctgaaacctgaggatacagcagtgtactattgctacatggaccagcggctggacggcagcacactggcctactggggacagggaactcaagtgacagtgtctagcacgcgtgaggacctgaagaacgtgttcccacctgaggtggccgtgttcgagcctagcgaggccgagatcagccacacccagaaagccaccctcgtgtgcctggctaccggcttctaccccgaccatgtggaactgtcttggtgggtcaacggcaaagaggtgcacagcggcgtgtctaccgacccccagccactgaaagaacagcccgccctgaacgacagccggtactgcctgagcagcagactgagagtgtccgccaccttctggcagaacccccggaaccacttcagatgccaggtgcagttctacggcctgagcgagaacgacgagtggacccaggacagagccaagcccgtgacccagatcgtgtctgccgaagcctggggcagagccgattgcggctttaccagcgagagctaccagcagggcgtgctgagcgccaccaacctgagcgtgatcggcttcagaatcctgctgctgaaagtggccggctttaacctgctgatgaccctgcggctgtggtccagccgcgccaagagaagcggatctggcgtgaagcagaccctgaatttcgacctgctgaagctggctggcgacgtggaatccaacccaggcccttctagaggccatatgaccgagtacaagcccacggtgcgcctcgccacccgcgacgacgtccccagggccgtacgcaccctcgccgccgcgttcgccgactaccccgccacgcgccacaccgtcgatccggaccgccacatcgagcgggtcaccgagctgcaagaactcttcctcacgcgcgtcgggctcgacatcggcaaggtgtgggtcgcggacgacggcgccgcggtggcggtctggaccacgccggagagcgtcgaagcgggggcggtgttcgccgagatcggcccgcgcatggccgagttgagcggttcccggctggccgcgcagcaacagatggaaggcctcctggcgccgcaccggcccaaggagcccgcgtggttcctggccaccgtcggcgtctcgcccgaccaccagggcaagggtctgggcagcgccgtcgtgctccccggagtggaggcggccgagcgcgccggggtgcccgccttcctggagacctccgcgccccgcaacctccccttctacgagcggctcggcttcaccgtcaccgccgacgtcgaggtgcccgaaggaccgcgcacctggtgcatgacccgcaagcccggtgcctga

SEQ ID NO: 8284 - DNA, 2447 bp, synthetic construct
  source 1..2447: mol_type = other DNA
atggccttaccagtgaccgccttgctcctgccgctggccttgctgctccacgccgccaggccgctcgagatccagaaccctgatcctgccgtgtaccagctgcgggatagcaagagcagcgacaagagcgtgtgtctgttcaccgacttcgacagccagaccaacgtgtcccagagcaaggactccgacgtgtacatcaccgataagaccgtgctggacatgcggagcatggacttcaagagcaactccgccgtggcctggtccaacaagtccgatttcgcctgcgccaacgccttcaacaacagcattatccccgaggacacattcttcccaagccccgagagcagctgcgacgtgaagctggtggaaaagagcttcgagacagacaccaacctgaacttccagatcctgtacgagtgatcggcttcagaatcctgctgctgaaagtggccggctttaacctgctgatgaccctgcggctgtggtccagcagggccaagcgatctggatctggagcaacaaacttctcactactcaaacaagcaggtgacgtggaggagaatcccgggcctactagcatggcccttccagtcactgccttgctgttgcctctggcgctcctgctccacgccgctagaccgggcatgagaaccgaggacctgcctaaggccgtggtgttcctggaaccccagtggtacagagtgctggaaaaggacagcgtgaccctgaagtgccagggcgcctacagccccgaggacaatagcacccagtggttccacaacgagagcctgatctccagccaggccagcagctacttcatcgacgccgccaccgtggacgacagcggcgagtatagatgccagaccaacctgagcaccctgagcgaccccgtgcagctggaagtgcacatcggatggctgctgctgcaggcccccagatgggtgttcaaagaagaggaccccatccacctgagatgccactcttggaagaacaccgccctgcacaaagtgacctacctgcagaacggcaagggcagaaagtacttccaccacaacagcgacttctacatccccaaggccaccctgaaggactccggctcctacttctgcagaggcctcgtgggcagcaagaacgtgtccagcgagacagtgaacatcaccatcacccagggcctggccgtgtctaccatcagcagctttttcccacccggctaccagacgcgtgaggacctgaagaacgtgttcccacctgaggtggccgtgttcgagcctagcgaggccgagatcagccacacccagaaagccaccctcgtgtgcctggctaccggcttctaccccgaccatgtggaactgtcttggtgggtcaacggcaaagaggtgcacagcggcgtgtctaccgacccccagccactgaaagaacagcccgccctgaacgacagccggtactgcctgagcagcagactgagagtgtccgccaccttctggcagaacccccggaaccacttcagatgccaggtgcagttctacggcctgagcgagaacgacgagtggacccaggacagagccaagcccgtgacccagatcgtgtctgccgaagcctggggcagagccgattgcggctttaccagcgagagctaccagcagggcgtgctgagcgccaccaacctgagcgtgatcggcttcagaatcctgctgctgaaagtggccggctttaacctgctgatgaccctgcggctgtggtccagccgcgccaagagaagcggatctggcgtgaagcagaccctgaatttcgacctgctgaagctggctggcgacgtggaatccaacccaggcccttctagaggccatatgaccgagtacaagcccacggtgcgcctcgccacccgcgacgacgtccccagggccgtacgcaccctcgccgccgcgttcgccgactaccccgccacgcgccacaccgtcgatccggaccgccacatcgagcgggtcaccgagctgcaagaactcttcctcacgcgcgtcgggctcgacatcggcaaggtgtgggtcgcggacgacggcgccgcggtggcggtctggaccacgccggagagcgtcgaagcgggggcggtgttcgccgagatcggcccgcgcatggccgagttgagcggttcccggctggccgcgcagcaacagatggaaggcctcctggcgccgcaccggcccaaggagcccgcgtggttcctggccaccgtcggcgtctcgcccgaccaccagggcaagggtctgggcagcgccgtcgtgctccccggagtggaggcggccgagcgcgccggggtgcccgccttcctggagacctccgcgccccgcaacctccccttctacgagcggctcggcttcaccgtcaccgccgacgtcgaggtgcccgaaggaccgcgcacctggtgcatgacccgcaagcccggtgcctga

SEQ ID NO: 8285 - DNA, 2453 bp, synthetic construct
  source 1..2453: mol_type = other DNA
atggccttaccagtgaccgccttgctcctgccgctggccttgctgctccacgccgccaggccgctcgagatccagaaccctgatcctgccgtgtaccagctgcgggatagcaagagcagcgacaagagcgtgtgtctgttcaccgacttcgacagccagaccaacgtgtcccagagcaaggactccgacgtgtacatcaccgataagaccgtgctggacatgcggagcatggacttcaagagcaactccgccgtggcctggtccaacaagtccgatttcgcctgcgccaacgccttcaacaacagcattatccccgaggacacattcttcccaagccccgagagcagctgcgacgtgaagctggtggaaaagagcttcgagacagacaccaacctgaacttccagatcctgtacgagtgatcggcttcagaatcctgctgctgaaagtggccggctttaacctgctgatgaccctgcggctgtggtccagcagggccaagcgatctggatctggagcaacaaacttctcactactcaaacaagcaggtgacgtggaggagaatcccgggcctactagcgccaccatggccttaccagtgaccgccttgctcctgccgctggccttgctgctccacgccgccaggccgggcatgcggactgaagacctcccaaaggctgtggtgttcctggagcctcaatggtacagggtgctggagaaggacagtgtgactctgaagtgccagggagcctactcccctgaggacaattccacacagtggtttcacaatgagagcctcatctcaagccaggcctccagctacttcattgacgctgccacagtggacgacagtggagagtacaggtgccagacaaacctctccaccctcagtgacccggtgcagctagaagtccatatcggctggctgttgctccaggcccctcggtgggtgttcaaggaggaagaccctattcacctgaggtgtcacagctggaagaacactgctctgcataaggtcacatatttacagaatggcaaaggcaggaagtattttcatcataattctgacttctacattccaaaagccacactcaaagacagcggctcctacttctgcagggggcttgttgggagtaaaaatgtgtcttcagagactgtgaacatcaccatcactcaaggtttggcagtgtcaaccatctcatcattctttccacctggctaccaaacgcgtgaggacctgaagaacgtgttcccacctgaggtggccgtgttcgagcctagcgaggccgagatcagccacacccagaaagccaccctcgtgtgcctggctaccggcttctaccccgaccatgtggaactgtcttggtgggtcaacggcaaagaggtgcacagcggcgtgtctaccgacccccagccactgaaagaacagcccgccctgaacgacagccggtactgcctgagcagcagactgagagtgtccgccaccttctggcagaacccccggaaccacttcagatgccaggtgcagttctacggcctgagcgagaacgacgagtggacccaggacagagccaagcccgtgacccagatcgtgtctgccgaagcctggggcagagccgattgcggctttaccagcgagagctaccagcagggcgtgctgagcgccaccaacctgagcgtgatcggcttcagaatcctgctgctgaaagtggccggctttaacctgctgatgaccctgcggctgtggtccagccgcgccaagagaagcggatctggcgtgaagcagaccctgaatttcgacctgctgaagctggctggcgacgtggaatccaacccaggcccttctagaggccatatgaccgagtacaagcccacggtgcgcctcgccacccgcgacgacgtccccagggccgtacgcaccctcgccgccgcgttcgccgactaccccgccacgcgccacaccgtcgatccggaccgccacatcgagcgggtcaccgagctgcaagaactcttcctcacgcgcgtcgggctcgacatcggcaaggtgtgggtcgcggacgacggcgccgcggtggcggtctggaccacgccggagagcgtcgaagcgggggcggtgttcgccgagatcggcccgcgcatggccgagttgagcggttcccggctggccgcgcagcaacagatggaaggcctcctggcgccgcaccggcccaaggagcccgcgtggttcctggccaccgtcggcgtctcgcccgaccaccagggcaagggtctgggcagcgccgtcgtgctccccggagtggaggcggccgagcgcgccggggtgcccgccttcctggagacctccgcgccccgcaacctccccttctacgagcggctcggcttcaccgtcaccgccgacgtcgaggtgcccgaaggaccgcgcacctggtgcatgacccgcaagcccggtgcctga

SEQ ID NO: 8286 - DNA, 2922 bp, synthetic construct
  source 1..2922: mol_type = other DNA
atggccttaccagtgaccgccttgctcctgccgctggccttgctgctccacgccgccaggccgctcgaggaggacctgaagaacgtgttcccacctgaggtggccgtgttcgagcctagcgaggccgagatcagccacacccagaaagccaccctcgtgtgcctggctaccggcttctaccccgaccatgtggaactgtcttggtgggtcaacggcaaagaggtgcacagcggcgtgtctaccgacccccagccactgaaagaacagcccgccctgaacgacagccggtactgcctgagcagcagactgagagtgtccgccaccttctggcagaacccccggaaccacttcagatgccaggtgcagttctacggcctgagcgagaacgacgagtggacccaggacagagccaagcccgtgacccagatcgtgtctgccgaagcctggggcagagccgatgatgtgattaagatccactggcaggaaaagaagtccaacaccatcctgggcagccaggaaggcaacaccatgaagaccaacgacacctacatgaagttcagctggctgaccgtgcccgagaagtccctggacaaagaacacagatgcatcgtgcggcacgaaaacaacaagaacggcgtggaccaggaaatcatcttcccacccatcaagaccgatgtgattacaatggaccccaaggacaactgctccaaggacgccaacgataccctgctgctccagctgaccaacaccagcgcctactacatgtacttgttgctgctgctgaagtccgtggtgtacttcgccatcatcacatgctgcctgctgatggctatggtcaagcggaaggacagccggggaagggccaagcgatctggatctggagcaacaaacttctcactactcaaacaagcaggtgacgtggaggagaatcccgggcctactagcatggccttaccagtgaccgccttgctcctgccgctggccttgctgctccacgccgccaggccggacatccagatgacacagactacatcctccctgtctgcctctctgggagacagagtcaccatcagttgcagggcaagtcaggacattagtaaatatttaaattggtatcagcagaaaccagatggaactgttaaactcctgatctaccatacatcaagattacactcaggagtcccatcaaggttcagtggcagtgggtctggaacagattattctctcaccattagcaacctggagcaagaagatattgccacttacttttgccaacagggtaatacgcttccgtacacgttcggaggggggaccaagctggagatcacaggtggcggtggctcgggcggtggtgggtcgggtggcggcggatctgaggtgaaactgcaggagtcaggacctggcctggtggcgccctcacagagcctgtccgtcacatgcactgtctcaggggtctcattacccgactatggtgtaagctggattcgccagcctccacgaaagggtctggagtggctgggagtaatatggggtagtgaaaccacatactataattcagctctcaaatccagactgaccatcatcaaggacaactccaagagccaagttttcttaaaaatgaacagtctgcaaactgatgacacagccatttactactgtgccaaacattattactacggtggtagctatgctatggactactggggtcaaggaacctcagtcaccgtctcctcaacgcgtatccagaaccctgatcctgccgtgtaccagctgcgggatagcaagagcagcgacaagagcgtgtgtctgttcaccgacttcgacagccagaccaacgtgtcccagagcaaggactccgacgtgtacatcaccgataagaccgtgctggacatgcggagcatggacttcaagagcaactccgccgtggcctggtccaacaagtccgatttcgcctgcgccaacgccttcaacaacagcattatccccgaggacacattcttcccaagccccgagagcagcgactccaccgaccacgtgaagcccaaagagacagagaacaccaagcagcccagcaagagctgccacaagcccaaggccatcgtgcacaccgagaaagtgaacatgatgagcctgaccgtgctgggcctgcggatgctgttcgccaaaaccgtggccgtgaacttcctgctgaccgccaagctgttcttcctcctcaccgcccgcgccaagagaagcggatctggcgtgaagcagaccctgaatttcgacctgctgaagctggctggcgacgtggaatccaacccaggcccttctagaggccatatgaccgagtacaagcccacggtgcgcctcgccacccgcgacgacgtccccagggccgtacgcaccctcgccgccgcgttcgccgactaccccgccacgcgccacaccgtcgatccggaccgccacatcgagcgggtcaccgagctgcaagaactcttcctcacgcgcgtcgggctcgacatcggcaaggtgtgggtcgcggacgacggcgccgcggtggcggtctggaccacgccggagagcgtcgaagcgggggcggtgttcgccgagatcggcccgcgcatggccgagttgagcggttcccggctggccgcgcagcaacagatggaaggcctcctggcgccgcaccggcccaaggagcccgcgtggttcctggccaccgtcggcgtctcgcccgaccaccagggcaagggtctgggcagcgccgtcgtgctccccggagtggaggcggccgagcgcgccggggtgcccgccttcctggagacctccgcgccccgcaacctccccttctacgagcggctcggcttcaccgtcaccgccgacgtcgaggtgcccgaaggaccgcgcacctggtgcatgacccgcaagcccggtgcctga

SEQ ID NO: 8287 - DNA, 2925 bp, synthetic construct
  source 1..2925: mol_type = other DNA
atggccttaccagtgaccgccttgctcctgccgctggccttgctgctccacgccgccaggccgctcgaggaggacctgaagaacgtgttcccacctgaggtggccgtgttcgagcctagcgaggccgagatcagccacacccagaaagccaccctcgtgtgcctggctaccggcttctaccccgaccatgtggaactgtcttggtgggtcaacggcaaagaggtgcacagcggcgtgtctaccgacccccagccactgaaagaacagcccgccctgaacgacagccggtactgcctgagcagcagactgagagtgtccgccaccttctggcagaacccccggaaccacttcagatgccaggtgcagttctacggcctgagcgagaacgacgagtggacccaggacagagccaagcccgtgacccagatcgtgtctgccgaagcctggggcagagccgatgatgtgattaagatccactggcaggaaaagaagtccaacaccatcctgggcagccaggaaggcaacaccatgaagaccaacgacacctacatgaagttcagctggctgaccgtgcccgagaagtccctggacaaagaacacagatgcatcgtgcggcacgaaaacaacaagaacggcgtggaccaggaaatcatcttcccacccatcaagaccgatgtgattacaatggaccccaaggacaactgctccaaggacgccaacgataccctgctgctccagctgaccaacaccagcgcctactacatgtacttgttgctgctgctgaagtccgtggtgtacttcgccatcatcacatgctgcctgctgatggctatggtcaagcggaaggacagccggggaagggccaagcgatctggatctggagcaacaaacttctcactactcaaacaagcaggtgacgtggaggagaatcccgggcctactagcaccatggccttaccagtgaccgccttgctcctgccgctggccttgctgctccacgccgccaggccggagatcgtgatgacccagagccctgccaccctgtctctgagccctggcgaaagagccaccctgagctgtagagccagccaggacatcagcaagtacctgaactggtatcagcagaagcccggccaggcccccagactgctgatctaccacaccagcagactgcacagcggcatccccgccagattttctggctctggcagcggcaccgactacaccctgacaatcagcagcctccagcccgaggacttcgccgtgtacttctgtcagcaaggcaacaccctgccctacaccttcggccagggcaccaagctggaaatcaagggcggaggcggaagtggaggcggaggatctggcggcggaggctctcaggtgcaactccaggaatctggccctggcctcgtgaagcccagcgagacactgagcctgacctgtaccgtgtccggcgtgtccctgcctgactatggcgtgtcctggatcagacagccccctggcaagggcctggaatggatcggagtgatttggggcagcgaaaccacctactacaacagctccctgaagtccagagtgaccatctccaaggacaactccaagaaccaggtgtccctgaagctgagcagcgtgacagccgccgacaccgccgtgtattactgcgccaagcactactactacggcggcagctacgctatggactactggggccagggaaccctcgtgaccgtgtctagtacgcgtatccagaaccctgatcctgccgtgtaccagctgcgggatagcaagagcagcgacaagagcgtgtgtctgttcaccgacttcgacagccagaccaacgtgtcccagagcaaggactccgacgtgtacatcaccgataagaccgtgctggacatgcggagcatggacttcaagagcaactccgccgtggcctggtccaacaagtccgatttcgcctgcgccaacgccttcaacaacagcattatccccgaggacacattcttcccaagccccgagagcagcgactccaccgaccacgtgaagcccaaagagacagagaacaccaagcagcccagcaagagctgccacaagcccaaggccatcgtgcacaccgagaaagtgaacatgatgagcctgaccgtgctgggcctgcggatgctgttcgccaaaaccgtggccgtgaacttcctgctgaccgccaagctgttcttcctcctcaccgcccgcgccaagagaagcggatctggcgtgaagcagaccctgaatttcgacctgctgaagctggctggcgacgtggaatccaacccaggcccttctagaggccatatgaccgagtacaagcccacggtgcgcctcgccacccgcgacgacgtccccagggccgtacgcaccctcgccgccgcgttcgccgactaccccgccacgcgccacaccgtcgatccggaccgccacatcgagcgggtcaccgagctgcaagaactcttcctcacgcgcgtcgggctcgacatcggcaaggtgtgggtcgcggacgacggcgccgcggtggcggtctggaccacgccggagagcgtcgaagcgggggcggtgttcgccgagatcggcccgcgcatggccgagttgagcggttcccggctggccgcgcagcaacagatggaaggcctcctggcgccgcaccggcccaaggagcccgcgtggttcctggccaccgtcggcgtctcgcccgaccaccagggcaagggtctgggcagcgccgtcgtgctccccggagtggaggcggccgagcgcgccggggtgcccgccttcctggagacctccgcgccccgcaacctccccttctacgagcggctcggcttcaccgtcaccgccgacgtcgaggtgcccgaaggaccgcgcacctggtgcatgacccgcaagcccggtgcctga

SEQ ID NO: 8288 - DNA, 2928 bp, synthetic construct
  source 1..2928: mol_type = other DNA
atggccttaccagtgaccgccttgctcctgccgctggccttgctgctccacgccgccaggccgctcgaggaggacctgaagaacgtgttcccacctgaggtggccgtgttcgagcctagcgaggccgagatcagccacacccagaaagccaccctcgtgtgcctggctaccggcttctaccccgaccatgtggaactgtcttggtgggtcaacggcaaagaggtgcacagcggcgtgtctaccgacccccagccactgaaagaacagcccgccctgaacgacagccggtactgcctgagcagcagactgagagtgtccgccaccttctggcagaacccccggaaccacttcagatgccaggtgcagttctacggcctgagcgagaacgacgagtggacccaggacagagccaagcccgtgacccagatcgtgtctgccgaagcctggggcagagccgatgatgtgattaagatccactggcaggaaaagaagtccaacaccatcctgggcagccaggaaggcaacaccatgaagaccaacgacacctacatgaagttcagctggctgaccgtgcccgagaagtccctggacaaagaacacagatgcatcgtgcggcacgaaaacaacaagaacggcgtggaccaggaaatcatcttcccacccatcaagaccgatgtgattacaatggaccccaaggacaactgctccaaggacgccaacgataccctgctgctccagctgaccaacaccagcgcctactacatgtacttgttgctgctgctgaagtccgtggtgtacttcgccatcatcacatgctgcctgctgatggctatggtcaagcggaaggacagccggggaagggccaagcgatctggatctggagcaacaaacttctcactactcaaacaagcaggtgacgtggaggagaatcccgggcctactagcaccatggccttaccagtgaccgccttgctcctgccgctggccttgctgctccacgccgccaggccggacgagatcgtgctgacacagagccccgccaccctgtcactgtctccaggcgaaagagccaccctgagctgtagcgccagcagcagcgtgtcctacatgcactggtatcagcagaagcccggccaggcccccagactgctgatctacgataccagcaagctggcctccggcatccccgccagattttctggcagcggctccggcaccgacttcaccctgacaatcagcagcctggaacccgaggacgtggccgtgtactactgttttcaaggcagcgtgtaccccttcaccttcggccagggcaccaagctggaaatcaagagaggtggcggtggctcgggcggtggtgggtcgggtggcggcggatctcaggtgcagctccaggaatctggccctggcctcgtgaagcctagccagaccctgagcctgacctgtaccgtgtctggcggcagcatcagcacaagcggcatgggcgtgggctggatcagacagcaccctggcaagggcctggaatggatcggccacatttggtgggacgacgacaagcggtacaaccccgccctgaagtccagagtgaccatcagcgtggacaccagcaagaaccagttcagcctgaagctgagcagcgtgacagccgccgataccgccgtgtattattgcgcccggatggaactgtggtcctactacttcgactactggggccagggaaccctcgtgaccgtgtctagtacgcgtatccagaaccctgatcctgccgtgtaccagctgcgggatagcaagagcagcgacaagagcgtgtgtctgttcaccgacttcgacagccagaccaacgtgtcccagagcaaggactccgacgtgtacatcaccgataagaccgtgctggacatgcggagcatggacttcaagagcaactccgccgtggcctggtccaacaagtccgatttcgcctgcgccaacgccttcaacaacagcattatccccgaggacacattcttcccaagccccgagagcagcgactccaccgaccacgtgaagcccaaagagacagagaacaccaagcagcccagcaagagctgccacaagcccaaggccatcgtgcacaccgagaaagtgaacatgatgagcctgaccgtgctgggcctgcggatgctgttcgccaaaaccgtggccgtgaacttcctgctgaccgccaagctgttcttcctcctcaccgcccgcgccaagagaagcggatctggcgtgaagcagaccctgaatttcgacctgctgaagctggctggcgacgtggaatccaacccaggcccttctagaggccatatgaccgagtacaagcccacggtgcgcctcgccacccgcgacgacgtccccagggccgtacgcaccctcgccgccgcgttcgccgactaccccgccacgcgccacaccgtcgatccggaccgccacatcgagcgggtcaccgagctgcaagaactcttcctcacgcgcgtcgggctcgacatcggcaaggtgtgggtcgcggacgacggcgccgcggtggcggtctggaccacgccggagagcgtcgaagcgggggcggtgttcgccgagatcggcccgcgcatggccgagttgagcggttcccggctggccgcgcagcaacagatggaaggcctcctggcgccgcaccggcccaaggagcccgcgtggttcctggccaccgtcggcgtctcgcccgaccaccagggcaagggtctgggcagcgccgtcgtgctccccggagtggaggcggccgagcgcgccggggtgcccgccttcctggagacctccgcgccccgcaacctccccttctacgagcggctcggcttcaccgtcaccgccgacgtcgaggtgcccgaaggaccgcgcacctggtgcatgacccgcaagcccggtgcctga

SEQ ID NO: 8289 - DNA, 2916 bp, synthetic construct
  source 1..2916: mol_type = other DNA
atggccttaccagtgaccgccttgctcctgccgctggccttgctgctccacgccgccaggccgctcgaggaggacctgaagaacgtgttcccacctgaggtggccgtgttcgagcctagcgaggccgagatcagccacacccagaaagccaccctcgtgtgcctggctaccggcttctaccccgaccatgtggaactgtcttggtgggtcaacggcaaagaggtgcacagcggcgtgtctaccgacccccagccactgaaagaacagcccgccctgaacgacagccggtactgcctgagcagcagactgagagtgtccgccaccttctggcagaacccccggaaccacttcagatgccaggtgcagttctacggcctgagcgagaacgacgagtggacccaggacagagccaagcccgtgacccagatcgtgtctgccgaagcctggggcagagccgatgatgtgattaagatccactggcaggaaaagaagtccaacaccatcctgggcagccaggaaggcaacaccatgaagaccaacgacacctacatgaagttcagctggctgaccgtgcccgagaagtccctggacaaagaacacagatgcatcgtgcggcacgaaaacaacaagaacggcgtggaccaggaaatcatcttcccacccatcaagaccgatgtgattacaatggaccccaaggacaactgctccaaggacgccaacgataccctgctgctccagctgaccaacaccagcgcctactacatgtacttgttgctgctgctgaagtccgtggtgtacttcgccatcatcacatgctgcctgctgatggctatggtcaagcggaaggacagccggggaagggccaagcgatctggatctggagcaacaaacttctcactactcaaacaagcaggtgacgtggaggagaatcccgggcctactagcatggccttaccagtgaccgccttgctcctgccgctggccttgctgctccacgccgccaggccggacatccagatgacacagagccctagcagcctgtctgccagcgtgggagacagagtgaccatcacctgtagagccagccaggacatcagcaactacctgaactggtatcagcagaagcccggcaaggcccctaagctgctgatctactacaccagcagactgcacagcggcgtgcccagcagattttctggctctggcagcggcaccgacttcaccctgacaatatctagcctccagcctgaggacttcgccacctactattgccagcagggcaacaccctgccttacacatttggacagggcaccaaggtggaaatcaagagaggcggaggcggaagtggaggcggaggatctggcggcggaggctctgaagtgcagctggttgaatcaggtggcggcctggttcaacctggcggatctctgagactgagctgtgccgccagcggcttcaccttcagcgactactttatgagctgggtccgacaggcccctggcaaaggacttgaatgggtcgccaccatcagcaatggcggcacctacacttactaccccgacagcgtgaagggcagattcaccatctccagagacaacagcaagaacaccctgtacctccagatgaactccctgagagccgaggacaccgccgtgtactactgcgccagattcgacggctacatcttcgactattggggccagggcaccctggtcacagtctcttctacgcgtatccagaaccctgatcctgccgtgtaccagctgcgggatagcaagagcagcgacaagagcgtgtgtctgttcaccgacttcgacagccagaccaacgtgtcccagagcaaggactccgacgtgtacatcaccgataagaccgtgctggacatgcggagcatggacttcaagagcaactccgccgtggcctggtccaacaagtccgatttcgcctgcgccaacgccttcaacaacagcattatccccgaggacacattcttcccaagccccgagagcagcgactccaccgaccacgtgaagcccaaagagacagagaacaccaagcagcccagcaagagctgccacaagcccaaggccatcgtgcacaccgagaaagtgaacatgatgagcctgaccgtgctgggcctgcggatgctgttcgccaaaaccgtggccgtgaacttcctgctgaccgccaagctgttcttcctcctcaccgcccgcgccaagagaagcggatctggcgtgaagcagaccctgaatttcgacctgctgaagctggctggcgacgtggaatccaacccaggcccttctagaggccatatgaccgagtacaagcccacggtgcgcctcgccacccgcgacgacgtccccagggccgtacgcaccctcgccgccgcgttcgccgactaccccgccacgcgccacaccgtcgatccggaccgccacatcgagcgggtcaccgagctgcaagaactcttcctcacgcgcgtcgggctcgacatcggcaaggtgtgggtcgcggacgacggcgccgcggtggcggtctggaccacgccggagagcgtcgaagcgggggcggtgttcgccgagatcggcccgcgcatggccgagttgagcggttcccggctggccgcgcagcaacagatggaaggcctcctggcgccgcaccggcccaaggagcccgcgtggttcctggccaccgtcggcgtctcgcccgaccaccagggcaagggtctgggcagcgccgtcgtgctccccggagtggaggcggccgagcgcgccggggtgcccgccttcctggagacctccgcgccccgcaacctccccttctacgagcggctcggcttcaccgtcaccgccgacgtcgaggtgcccgaaggaccgcgcacctggtgcatgacccgcaagcccggtgcctga

SEQ ID NO: 8290 - DNA, 2928 bp, synthetic construct
  source 1..2928: mol_type = other DNA
atggccttaccagtgaccgccttgctcctgccgctggccttgctgctccacgccgccaggccgctcgaggaggacctgaagaacgtgttcccacctgaggtggccgtgttcgagcctagcgaggccgagatcagccacacccagaaagccaccctcgtgtgcctggctaccggcttctaccccgaccatgtggaactgtcttggtgggtcaacggcaaagaggtgcacagcggcgtgtctaccgacccccagccactgaaagaacagcccgccctgaacgacagccggtactgcctgagcagcagactgagagtgtccgccaccttctggcagaacccccggaaccacttcagatgccaggtgcagttctacggcctgagcgagaacgacgagtggacccaggacagagccaagcccgtgacccagatcgtgtctgccgaagcctggggcagagccgatgatgtgattaagatccactggcaggaaaagaagtccaacaccatcctgggcagccaggaaggcaacaccatgaagaccaacgacacctacatgaagttcagctggctgaccgtgcccgagaagtccctggacaaagaacacagatgcatcgtgcggcacgaaaacaacaagaacggcgtggaccaggaaatcatcttcccacccatcaagaccgatgtgattacaatggaccccaaggacaactgctccaaggacgccaacgataccctgctgctccagctgaccaacaccagcgcctactacatgtacttgttgctgctgctgaagtccgtggtgtacttcgccatcatcacatgctgcctgctgatggctatggtcaagcggaaggacagccggggaagggccaagcgatctggatctggagcaacaaacttctcactactcaaacaagcaggtgacgtggaggagaatcccgggcctactagcatggccttaccagtgaccgccttgctcctgccgctggccttgctgctccacgccgccaggccggacatccagatgacacagagccctagcagcctgtctgccagcgtgggagacagagtgaccatcacatgcaaggccagcgaccacatcaacaactggctggcctggtatcagcagaagcctggacaggcccctaagctgctgatctacggcgctaccacactggaaacaggcgtgcccagcagattttctggcagcggctctggcaccgactacaccctgacaatatccagcctccagcctgaggacttcgccacctactactgtcagcagagctggaacaccccttggacattcggccagggcaccaagctggaaatcaagagaggcggaggcggaagtggaggcggaggatctggcggcggaggctctcaagttcagcttcaacagcctggcgctgagctggtcaaacctggcgcttctgtgaagatgagctgcaaagccagcggctacgccttcagcagctactggatcaactggatgaagcagaaacccggccagggactcgaatggatcggccaaatctatcccggcgacggcgacaccaactacaacggcaagttcaagggcagagccacactgaccgccgatacctctagcagcacagcctacatgcagctgagcagcctgaccagcgaagatagcgccgtgtacttctgtgcccggtccatcacaacagtcgtgggctgcgctatggactattggggccagggaacaagcgtgaccgtgtctagtacgcgtatccagaaccctgatcctgccgtgtaccagctgcgggatagcaagagcagcgacaagagcgtgtgtctgttcaccgacttcgacagccagaccaacgtgtcccagagcaaggactccgacgtgtacatcaccgataagaccgtgctggacatgcggagcatggacttcaagagcaactccgccgtggcctggtccaacaagtccgatttcgcctgcgccaacgccttcaacaacagcattatccccgaggacacattcttcccaagccccgagagcagcgactccaccgaccacgtgaagcccaaagagacagagaacaccaagcagcccagcaagagctgccacaagcccaaggccatcgtgcacaccgagaaagtgaacatgatgagcctgaccgtgctgggcctgcggatgctgttcgccaaaaccgtggccgtgaacttcctgctgaccgccaagctgttcttcctcctcaccgcccgcgccaagagaagcggatctggcgtgaagcagaccctgaatttcgacctgctgaagctggctggcgacgtggaatccaacccaggcccttctagaggccatatgaccgagtacaagcccacggtgcgcctcgccacccgcgacgacgtccccagggccgtacgcaccctcgccgccgcgttcgccgactaccccgccacgcgccacaccgtcgatccggaccgccacatcgagcgggtcaccgagctgcaagaactcttcctcacgcgcgtcgggctcgacatcggcaaggtgtgggtcgcggacgacggcgccgcggtggcggtctggaccacgccggagagcgtcgaagcgggggcggtgttcgccgagatcggcccgcgcatggccgagttgagcggttcccggctggccgcgcagcaacagatggaaggcctcctggcgccgcaccggcccaaggagcccgcgtggttcctggccaccgtcggcgtctcgcccgaccaccagggcaagggtctgggcagcgccgtcgtgctccccggagtggaggcggccgagcgcgccggggtgcccgccttcctggagacctccgcgccccgcaacctccccttctacgagcggctcggcttcaccgtcaccgccgacgtcgaggtgcccgaaggaccgcgcacctggtgcatgacccgcaagcccggtgcctga

SEQ ID NO: 8291 - DNA, 2934 bp, synthetic construct
  source 1..2934: mol_type = other DNA
atggccttaccagtgaccgccttgctcctgccgctggccttgctgctccacgccgccaggccgctcgaggaggacctgaagaacgtgttcccacctgaggtggccgtgttcgagcctagcgaggccgagatcagccacacccagaaagccaccctcgtgtgcctggctaccggcttctaccccgaccatgtggaactgtcttggtgggtcaacggcaaagaggtgcacagcggcgtgtctaccgacccccagccactgaaagaacagcccgccctgaacgacagccggtactgcctgagcagcagactgagagtgtccgccaccttctggcagaacccccggaaccacttcagatgccaggtgcagttctacggcctgagcgagaacgacgagtggacccaggacagagccaagcccgtgacccagatcgtgtctgccgaagcctggggcagagccgatgatgtgattaagatccactggcaggaaaagaagtccaacaccatcctgggcagccaggaaggcaacaccatgaagaccaacgacacctacatgaagttcagctggctgaccgtgcccgagaagtccctggacaaagaacacagatgcatcgtgcggcacgaaaacaacaagaacggcgtggaccaggaaatcatcttcccacccatcaagaccgatgtgattacaatggaccccaaggacaactgctccaaggacgccaacgataccctgctgctccagctgaccaacaccagcgcctactacatgtacttgttgctgctgctgaagtccgtggtgtacttcgccatcatcacatgctgcctgctgatggctatggtcaagcggaaggacagccggggaagggccaagcgatctggatctggagcaacaaacttctcactactcaaacaagcaggtgacgtggaggagaatcccgggcctactagcatggccttaccagtgaccgccttgctcctgccgctggccttgctgctccacgccgccaggccgcagatcgtgctgtctcagtctcctgccatcctgagcgcttccccaggcgagaaagtgaccatgacctgtagagccagcagcagcgtgtcctacatgcactggtatcagcagaagcccggcagcagccctaagccttggatctacgccaccagcaatctggcctctggcgtgccagccagattttctggctctggcagcggcaccagctacagcttcacaatcagcagagtggaagccgaggacgccgccacctactattgtcagcagtggaccttcaatcctcctaccttcggcggaggcacccggctggaaatcaaaagaacagtggctgctggcggaggcggaagtggaggcggaggatctggcggcggaggctctcaggcttatctgcaacagagcggagccgaactcgtcagacctggcgcttctgtgaagatgagctgcaaggccagcggctacaccttcaccagctataatatgcactgggtcaagcagacccctcggcagggactcgaatggatcggcggaatctatcccggcaacggcgacacctcctacaaccagaagttcaagggcaaagccacactgaccgtgggcaagagcagcagcaccgcctatatgcagctcagcagcctgaccagcgaggacagcgccgtgtacttctgcgccagatacgactacaactacgctatggactactggggccagggcaccagcgtgacagttagctctgccagcacgcgtatccagaaccctgatcctgccgtgtaccagctgcgggatagcaagagcagcgacaagagcgtgtgtctgttcaccgacttcgacagccagaccaacgtgtcccagagcaaggactccgacgtgtacatcaccgataagaccgtgctggacatgcggagcatggacttcaagagcaactccgccgtggcctggtccaacaagtccgatttcgcctgcgccaacgccttcaacaacagcattatccccgaggacacattcttcccaagccccgagagcagcgactccaccgaccacgtgaagcccaaagagacagagaacaccaagcagcccagcaagagctgccacaagcccaaggccatcgtgcacaccgagaaagtgaacatgatgagcctgaccgtgctgggcctgcggatgctgttcgccaaaaccgtggccgtgaacttcctgctgaccgccaagctgttcttcctcctcaccgcccgcgccaagagaagcggatctggcgtgaagcagaccctgaatttcgacctgctgaagctggctggcgacgtggaatccaacccaggcccttctagaggccatatgaccgagtacaagcccacggtgcgcctcgccacccgcgacgacgtccccagggccgtacgcaccctcgccgccgcgttcgccgactaccccgccacgcgccacaccgtcgatccggaccgccacatcgagcgggtcaccgagctgcaagaactcttcctcacgcgcgtcgggctcgacatcggcaaggtgtgggtcgcggacgacggcgccgcggtggcggtctggaccacgccggagagcgtcgaagcgggggcggtgttcgccgagatcggcccgcgcatggccgagttgagcggttcccggctggccgcgcagcaacagatggaaggcctcctggcgccgcaccggcccaaggagcccgcgtggttcctggccaccgtcggcgtctcgcccgaccaccagggcaagggtctgggcagcgccgtcgtgctccccggagtggaggcggccgagcgcgccggggtgcccgccttcctggagacctccgcgccccgcaacctccccttctacgagcggctcggcttcaccgtcaccgccgacgtcgaggtgcccgaaggaccgcgcacctggtgcatgacccgcaagcccggtgcctga

SEQ ID NO: 8292 - DNA, 2928 bp, synthetic construct
  source 1..2928: mol_type = other DNA
atggccttaccagtgaccgccttgctcctgccgctggccttgctgctccacgccgccaggccgctcgaggaggacctgaagaacgtgttcccacctgaggtggccgtgttcgagcctagcgaggccgagatcagccacacccagaaagccaccctcgtgtgcctggctaccggcttctaccccgaccatgtggaactgtcttggtgggtcaacggcaaagaggtgcacagcggcgtgtctaccgacccccagccactgaaagaacagcccgccctgaacgacagccggtactgcctgagcagcagactgagagtgtccgccaccttctggcagaacccccggaaccacttcagatgccaggtgcagttctacggcctgagcgagaacgacgagtggacccaggacagagccaagcccgtgacccagatcgtgtctgccgaagcctggggcagagccgatgatgtgattaagatccactggcaggaaaagaagtccaacaccatcctgggcagccaggaaggcaacaccatgaagaccaacgacacctacatgaagttcagctggctgaccgtgcccgagaagtccctggacaaagaacacagatgcatcgtgcggcacgaaaacaacaagaacggcgtggaccaggaaatcatcttcccacccatcaagaccgatgtgattacaatggaccccaaggacaactgctccaaggacgccaacgataccctgctgctccagctgaccaacaccagcgcctactacatgtacttgttgctgctgctgaagtccgtggtgtacttcgccatcatcacatgctgcctgctgatggctatggtcaagcggaaggacagccggggaagggccaagcgatctggatctggagcaacaaacttctcactactcaaacaagcaggtgacgtggaggagaatcccgggcctactagcatggccttaccagtgaccgccttgctcctgccgctggccttgctgctccacgccgccaggccggagatcgtgctgacacagagccctgccaccctgtctctgagccctggcgaaagagccaccctgagctgtagagccagccagagcgtgtccagctacctggcctggtatcagcagaagcccggccaggctccccggctgctgatctacgatgccagcaatagagccaccggcatccccgccagattttccggctctggcagcggcaccgacttcaccctgaccatcagctccctggaacccgaggacttcgccgtgtactactgccagcagcggagcaactggcccatcacattcggccagggcacccggctggaaatcaaaggcggaggcggaagtggaggcggaggatctggcggcggaggctctgaggtgcagcttgttgagtctggcggaggactggtgcagcccgatagaagcctgagactgtcttgtgccgccagcggcttcaccttccacgattatgccatgcactgggtccgacaggcccctggcaaaggacttgaatgggtgtccaccatctcttggaacagcggcacaatcggctacgccgactctgtgaagggcagattcaccatcagccgggacaacgccaagaacagcctgtacctccagatgaactccctgagagccgaggacacagccctgtactactgcgccaaggacatccagtacggcaactactactacggcatggacgtgtggggccagggcacaacagtgacagtctcttctacgcgtatccagaaccctgatcctgccgtgtaccagctgcgggatagcaagagcagcgacaagagcgtgtgtctgttcaccgacttcgacagccagaccaacgtgtcccagagcaaggactccgacgtgtacatcaccgataagaccgtgctggacatgcggagcatggacttcaagagcaactccgccgtggcctggtccaacaagtccgatttcgcctgcgccaacgccttcaacaacagcattatccccgaggacacattcttcccaagccccgagagcagcgactccaccgaccacgtgaagcccaaagagacagagaacaccaagcagcccagcaagagctgccacaagcccaaggccatcgtgcacaccgagaaagtgaacatgatgagcctgaccgtgctgggcctgcggatgctgttcgccaaaaccgtggccgtgaacttcctgctgaccgccaagctgttcttcctcctcaccgcccgcgccaagagaagcggatctggcgtgaagcagaccctgaatttcgacctgctgaagctggctggcgacgtggaatccaacccaggcccttctagaggccatatgaccgagtacaagcccacggtgcgcctcgccacccgcgacgacgtccccagggccgtacgcaccctcgccgccgcgttcgccgactaccccgccacgcgccacaccgtcgatccggaccgccacatcgagcgggtcaccgagctgcaagaactcttcctcacgcgcgtcgggctcgacatcggcaaggtgtgggtcgcggacgacggcgccgcggtggcggtctggaccacgccggagagcgtcgaagcgggggcggtgttcgccgagatcggcccgcgcatggccgagttgagcggttcccggctggccgcgcagcaacagatggaaggcctcctggcgccgcaccggcccaaggagcccgcgtggttcctggccaccgtcggcgtctcgcccgaccaccagggcaagggtctgggcagcgccgtcgtgctccccggagtggaggcggccgagcgcgccggggtgcccgccttcctggagacctccgcgccccgcaacctccccttctacgagcggctcggcttcaccgtcaccgccgacgtcgaggtgcccgaaggaccgcgcacctggtgcatgacccgcaagcccggtgcctga

SEQ ID NO: 8293 - DNA, 2922 bp, synthetic construct
  source 1..2922: mol_type = other DNA
atggccttaccagtgaccgccttgctcctgccgctggccttgctgctccacgccgccaggccgctcgaggaggacctgaagaacgtgttcccacctgaggtggccgtgttcgagcctagcgaggccgagatcagccacacccagaaagccaccctcgtgtgcctggctaccggcttctaccccgaccatgtggaactgtcttggtgggtcaacggcaaagaggtgcacagcggcgtgtctaccgacccccagccactgaaagaacagcccgccctgaacgacagccggtactgcctgagcagcagactgagagtgtccgccaccttctggcagaacccccggaaccacttcagatgccaggtgcagttctacggcctgagcgagaacgacgagtggacccaggacagagccaagcccgtgacccagatcgtgtctgccgaagcctggggcagagccgatgatgtgattaagatccactggcaggaaaagaagtccaacaccatcctgggcagccaggaaggcaacaccatgaagaccaacgacacctacatgaagttcagctggctgaccgtgcccgagaagtccctggacaaagaacacagatgcatcgtgcggcacgaaaacaacaagaacggcgtggaccaggaaatcatcttcccacccatcaagaccgatgtgattacaatggaccccaaggacaactgctccaaggacgccaacgataccctgctgctccagctgaccaacaccagcgcctactacatgtacttgttgctgctgctgaagtccgtggtgtacttcgccatcatcacatgctgcctgctgatggctatggtcaagcggaaggacagccggggaagggccaagcgatctggatctggagcaacaaacttctcactactcaaacaagcaggtgacgtggaggagaatcccgggcctactagcatggccttaccagtgaccgccttgctcctgccgctggccttgctgctccacgccgccaggccggacatccagatgacccagagccccagcagcctgtctgccagcgtgggcgacagagtgaccatcacctgtagagccagccaggacgtgaacaccgccgtggcctggtatcagcagaagcctggcaaggcccccaagctgctgatctacagcgccagcttcctggaaagcggcgtgcccagcagattcagcggaagcagaagcggcaccgacttcaccctgaccatcagctccctccagcccgaggacttcgccacctactactgccagcagcactacaccacccctcccaccttcggccagaccaaggtggaaatcaagagaggcggaggcggaagtggaggcggaggatctggcggcggaggctctgaagtgcaactggtggaatctggcggcggactggtgcagcctggcggatctctgagactgagctgtgccgccagcggcttcaacatcaaggacacctacatccactgggtgcgccaggcccctggaaagggactggaatgggtggcccggatctaccccaccaacggctacaccagatacgccgacagcgtgaagggccggttcaccatcagcgccgacaccagcaagaataccgcctacctccagatgaacagcctgcgggccgaggataccgccgtgtactactgctcaagatggggaggcgacggcttctacgctatggacgtgtggggccagggcacccttgtgaccgtgtcatctacgcgtatccagaaccctgatcctgccgtgtaccagctgcgggatagcaagagcagcgacaagagcgtgtgtctgttcaccgacttcgacagccagaccaacgtgtcccagagcaaggactccgacgtgtacatcaccgataagaccgtgctggacatgcggagcatggacttcaagagcaactccgccgtggcctggtccaacaagtccgatttcgcctgcgccaacgccttcaacaacagcattatccccgaggacacattcttcccaagccccgagagcagcgactccaccgaccacgtgaagcccaaagagacagagaacaccaagcagcccagcaagagctgccacaagcccaaggccatcgtgcacaccgagaaagtgaacatgatgagcctgaccgtgctgggcctgcggatgctgttcgccaaaaccgtggccgtgaacttcctgctgaccgccaagctgttcttcctcctcaccgcccgcgccaagagaagcggatctggcgtgaagcagaccctgaatttcgacctgctgaagctggctggcgacgtggaatccaacccaggcccttctagaggccatatgaccgagtacaagcccacggtgcgcctcgccacccgcgacgacgtccccagggccgtacgcaccctcgccgccgcgttcgccgactaccccgccacgcgccacaccgtcgatccggaccgccacatcgagcgggtcaccgagctgcaagaactcttcctcacgcgcgtcgggctcgacatcggcaaggtgtgggtcgcggacgacggcgccgcggtggcggtctggaccacgccggagagcgtcgaagcgggggcggtgttcgccgagatcggcccgcgcatggccgagttgagcggttcccggctggccgcgcagcaacagatggaaggcctcctggcgccgcaccggcccaaggagcccgcgtggttcctggccaccgtcggcgtctcgcccgaccaccagggcaagggtctgggcagcgccgtcgtgctccccggagtggaggcggccgagcgcgccggggtgcccgccttcctggagacctccgcgccccgcaacctccccttctacgagcggctcggcttcaccgtcaccgccgacgtcgaggtgcccgaaggaccgcgcacctggtgcatgacccgcaagcccggtgcctga

SEQ ID NO: 8294 - DNA, 2559 bp, synthetic construct
  source 1..2559: mol_type = other DNA
atggccttaccagtgaccgccttgctcctgccgctggccttgctgctccacgccgccaggccgctcgaggaggacctgaagaacgtgttcccacctgaggtggccgtgttcgagcctagcgaggccgagatcagccacacccagaaagccaccctcgtgtgcctggctaccggcttctaccccgaccatgtggaactgtcttggtgggtcaacggcaaagaggtgcacagcggcgtgtctaccgacccccagccactgaaagaacagcccgccctgaacgacagccggtactgcctgagcagcagactgagagtgtccgccaccttctggcagaacccccggaaccacttcagatgccaggtgcagttctacggcctgagcgagaacgacgagtggacccaggacagagccaagcccgtgacccagatcgtgtctgccgaagcctggggcagagccgatgatgtgattaagatccactggcaggaaaagaagtccaacaccatcctgggcagccaggaaggcaacaccatgaagaccaacgacacctacatgaagttcagctggctgaccgtgcccgagaagtccctggacaaagaacacagatgcatcgtgcggcacgaaaacaacaagaacggcgtggaccaggaaatcatcttcccacccatcaagaccgatgtgattacaatggaccccaaggacaactgctccaaggacgccaacgataccctgctgctccagctgaccaacaccagcgcctactacatgtacttgttgctgctgctgaagtccgtggtgtacttcgccatcatcacatgctgcctgctgatggctatggtcaagcggaaggacagccggggaagggccaagcgatctggatctggagcaacaaacttctcactactcaaacaagcaggtgacgtggaggagaatcccgggcctactagcatggccctgcccgtgacagccctgctgctgcctctggctctgctgctgcacgccgccagacccgatgaattcgaggtgcaactggtggaaagcggcggaggcctggtgcaggctggcggatctctgagactgagctgtgccgccagcggcatcaccttcagcatcaacacaatgggctggtacagacaggcccctggcaagcagagggaactggtggccctgatctccagcatcggcgacacctactacgccgacagcgtgaagggccggttcaccatcagccgggacaacgccaagaacaccgtgtacctccagatgaacagcctgaagcccgaggacaccgccgtgtactactgcaagcggttcagaacagccgcccagggcaccgattattggggccagggaacacaagtgaccgtgtcctctacgcgtatccagaaccctgatcctgccgtgtaccagctgcgggatagcaagagcagcgacaagagcgtgtgtctgttcaccgacttcgacagccagaccaacgtgtcccagagcaaggactccgacgtgtacatcaccgataagaccgtgctggacatgcggagcatggacttcaagagcaactccgccgtggcctggtccaacaagtccgatttcgcctgcgccaacgccttcaacaacagcattatccccgaggacacattcttcccaagccccgagagcagcgactccaccgaccacgtgaagcccaaagagacagagaacaccaagcagcccagcaagagctgccacaagcccaaggccatcgtgcacaccgagaaagtgaacatgatgagcctgaccgtgctgggcctgcggatgctgttcgccaaaaccgtggccgtgaacttcctgctgaccgccaagctgttcttcctcctcaccgcccgcgccaagagaagcggatctggcgtgaagcagaccctgaatttcgacctgctgaagctggctggcgacgtggaatccaacccaggcccttctagaggccatatgaccgagtacaagcccacggtgcgcctcgccacccgcgacgacgtccccagggccgtacgcaccctcgccgccgcgttcgccgactaccccgccacgcgccacaccgtcgatccggaccgccacatcgagcgggtcaccgagctgcaagaactcttcctcacgcgcgtcgggctcgacatcggcaaggtgtgggtcgcggacgacggcgccgcggtggcggtctggaccacgccggagagcgtcgaagcgggggcggtgttcgccgagatcggcccgcgcatggccgagttgagcggttcccggctggccgcgcagcaacagatggaaggcctcctggcgccgcaccggcccaaggagcccgcgtggttcctggccaccgtcggcgtctcgcccgaccaccagggcaagggtctgggcagcgccgtcgtgctccccggagtggaggcggccgagcgcgccggggtgcccgccttcctggagacctccgcgccccgcaacctccccttctacgagcggctcggcttcaccgtcaccgccgacgtcgaggtgcccgaaggaccgcgcacctggtgcatgacccgcaagcccggtgcctga

SEQ ID NO: 8295 - DNA, 2559 bp, synthetic construct; identical to SEQ ID NO: 8294
  source 1..2559: mol_type = other DNA

SEQ ID NO: 8296 - DNA, 3354 bp, synthetic construct
  source 1..3354: mol_type = other DNA
atggccttaccagtgaccgccttgctcctgccgctggccttgctgctccacgccgccaggccgctcgaggaggacctgaagaacgtgttcccacctgaggtggccgtgttcgagcctagcgaggccgagatcagccacacccagaaagccaccctcgtgtgcctggctaccggcttctaccccgaccatgtggaactgtcttggtgggtcaacggcaaagaggtgcacagcggcgtgtctaccgacccccagccactgaaagaacagcccgccctgaacgacagccggtactgcctgagcagcagactgagagtgtccgccaccttctggcagaacccccggaaccacttcagatgccaggtgcagttctacggcctgagcgagaacgacgagtggacccaggacagagccaagcccgtgacccagatcgtgtctgccgaagcctggggcagagccgatgatgtgattaagatccactggcaggaaaagaagtccaacaccatcctgggcagccaggaaggcaacaccatgaagaccaacgacacctacatgaagttcagctggctgaccgtgcccgagaagtccctggacaaagaacacagatgcatcgtgcggcacgaaaacaacaagaacggcgtggaccaggaaatcatcttcccacccatcaagaccgatgtgattacaatggaccccaaggacaactgctccaaggacgccaacgataccctgctgctccagctgaccaacaccagcgcctactacatgtacttgttgctgctgctgaagtccgtggtgtacttcgccatcatcacatgctgcctgctgatggctatggtcaagcggaaggacagccggggaagggccaagcgatctggatctggagcaacaaacttctcactactcaaacaagcaggtgacgtggaggagaatcccgggcctactagcatggccttaccagtgaccgccttgctcctgccgctggccttgctgctccacgccgccaggccgcaggtccagctcgtcgagtccggcggcggcctcgtccaggccggcgactccgtcaccctctcctgcaccgcctccggccgcaccttctcctcctacgccctcgcctggttccgccagcgccccggcaaggagcgcgagttcgtcgccggcctccgctggggcggccccaccaactacgccgactccgtcaaggaccgcttcaccatctccggcgactccgccaagcacaccatgtacctccagatgaactccctcaagcccgaggacaccgccgtctactactgcggctacaaccccggcggctgggccgtcccctcccagtacgagtacgactcctggggccagggcacccaggtcaccgtctcctccggtaccggcggaggcggatctggcggcggaggtagcggtggcggaggatctgaattcgacatccagatgacacagagccctagcagcctgtctgccagcgtgggagacagagtgaccatcacatgcaaggccagcgaccacatcaacaactggctggcctggtatcagcagaagcctggacaggcccctaagctgctgatctacggcgctaccacactggaaacaggcgtgcccagcagattttctggcagcggctctggcaccgactacaccctgacaatatccagcctccagcctgaggacttcgccacctactactgtcagcagagctggaacaccccttggacattcggccagggcaccaagctggaaatcaagagaggcggaggcggaagtggaggcggaggatctggcggcggaggctctcaagttcagcttcaacagcctggcgctgagctggtcaaacctggcgcttctgtgaagatgagctgcaaagccagcggctacgccttcagcagctactggatcaactggatgaagcagaaacccggccagggactcgaatggatcggccaaatctatcccggcgacggcgacaccaactacaacggcaagttcaagggcagagccacactgaccgccgatacctctagcagcacagcctacatgcagctgagcagcctgaccagcgaagatagcgccgtgtacttctgtgcccggtccatcacaacagtcgtgggctgcgctatggactattggggccagggaacaagcgtgaccgtgtctagtacgcgtatccagaaccctgatcctgccgtgtaccagctgcgggatagcaagagcagcgacaagagcgtgtgtctgttcaccgacttcgacagccagaccaacgtgtcccagagcaaggactccgacgtgtacatcaccgataagaccgtgctggacatgcggagcatggacttcaagagcaactccgccgtggcctggtccaacaagtccgatttcgcctgcgccaacgccttcaacaacagcattatccccgaggacacattcttcccaagccccgagagcagcgactccaccgaccacgtgaagcccaaagagacagagaacaccaagcagcccagcaagagctgccacaagcccaaggccatcgtgcacaccgagaaagtgaacatgatgagcctgaccgtgctgggcctgcggatgctgttcgccaaaaccgtggccgtgaacttcctgctgaccgccaagctgttcttcctcctcaccgcccgcgccaagagaagcggatctggcgtgaagcagaccctgaatttcgacctgctgaagctggctggcgacgtggaatccaacccaggcccttctagaggccatatgaccgagtacaagcccacggtgcgcctcgccacccgcgacgacgtccccagggccgtacgcaccctcgccgccgcgttcgccgactaccccgccacgcgccacaccgtcgatccggaccgccacatcgagcgggtcaccgagctgcaagaactcttcctcacgcgcgtcgggctcgacatcggcaaggtgtgggtcgcggacgacggcgccgcggtggcggtctggaccacgccggagagcgtcgaagcgggggcggtgttcgccgagatcggcccgcgcatggccgagttgagcggttcccggctggccgcgcagcaacagatggaaggcctcctggcgccgcaccggcccaaggagcccgcgtggttcctggccaccgtcggcgtctcgcccgaccaccagggcaagggtctgggcagcgccgtcgtgctccccggagtggaggcggccgagcgcgccggggtgcccgccttcctggagacctccgcgccccgcaacctccccttctacgagcggctcggcttcaccgtcaccgccgacgtcgaggtgcccgaaggaccgcgcacctggtgcatgacccgcaagcccggtgcctga

SEQ ID NO: 8297 - DNA, 3741 bp, synthetic construct
  source 1..3741: mol_type = other DNA
atggccttaccagtgaccgccttgctcctgccgctggccttgctgctccacgccgccaggccgctcgaggaggacctgaagaacgtgttcccacctgaggtggccgtgttcgagcctagcgaggccgagatcagccacacccagaaagccaccctcgtgtgcctggctaccggcttctaccccgaccatgtggaactgtcttggtgggtcaacggcaaagaggtgcacagcggcgtgtctaccgacccccagccactgaaagaacagcccgccctgaacgacagccggtactgcctgagcagcagactgagagtgtccgccaccttctggcagaacccccggaaccacttcagatgccaggtgcagttctacggcctgagcgagaacgacgagtggacccaggacagagccaagcccgtgacccagatcgtgtctgccgaagcctggggcagagccgatgatgtgattaagatccactggcaggaaaagaagtccaacaccatcctgggcagccaggaaggcaacaccatgaagaccaacgacacctacatgaagttcagctggctgaccgtgcccgagaagtccctggacaaagaacacagatgcatcgtgcggcacgaaaacaacaagaacggcgtggaccaggaaatcatcttcccacccatcaagaccgatgtgattacaatggaccccaaggacaactgctccaaggacgccaacgataccctgctgctccagctgaccaacaccagcgcctactacatgtacttgttgctgctgctgaagtccgtggtgtacttcgccatcatcacatgctgcctgctgatggctatggtcaagcggaaggacagccggggaagggccaagcgatctggatctggagcaacaaacttctcactactcaaacaagcaggtgacgtggaggagaatcccgggcctactagcatggccttaccagtgaccgccttgctcctgccgctggccttgctgctccacgccgccaggccggaggttcagctgcttgagtctggcggaggactggttcaacctggcggaagcctgagactgtcttgtgccgccagcggcttcacctttagcagctacgccatgagctgggtccgacaggctcctggcaaaggactggaatgggtgtccagcatcagcggcagcggcgactacatctactacgccgatagcgtgaagggcagattcaccatcagccgggacatcagcaagaacaccctgtacctccagatgaacagcctgagagccgaggacaccgccgtgtactactgtgccaaagaaggcaccggcgctaacagcagcctggccgattatagaggccagggcacactggtcaccgtgtctagtggcggaggaagcggcggaggatctcaggtccagctcgtcgagtccggcggcggcctcgtccaggccggcgactccgtcaccctctcctgcaccgcctccggccgcaccttctcctcctacgccctcgcctggttccgccagcgccccggcaaggagcgcgagttcgtcgccggcctccgctggggcggccccaccaactacgccgactccgtcaaggaccgcttcaccatctccggcgactccgccaagcacaccatgtacctccagatgaactccctcaagcccgaggacaccgccgtctactactgcggctacaaccccggcggctgggccgtcccctcccagtacgagtacgactcctggggccagggcacccaggtcaccgtctcctccggtaccggcggaggcggatctggcggcggaggtagcggtggcggaggatctgaattcgacatccagatgacacagagccctagcagcctgtctgccagcgtgggagacagagtgaccatcacatgcaaggccagcgaccacatcaacaactggctggcctggtatcagcagaagcctggacaggcccctaagctgctgatctacggcgctaccacactggaaacaggcgtgcccagcagattttctggcagcggctctggcaccgactacaccctgacaatatccagcctccagcctgaggacttcgccacctactactgtcagcagagctggaacaccccttggacattcggccagggcaccaagctggaaatcaagagaggcggaggcggaagtggaggcggaggatctggcggcggaggctctcaagttcagcttcaacagcctggcgctgagctggtcaaacctggcgcttctgtgaagatgagctgcaaagccagcggctacgccttcagcagctactggatcaactggatgaagcagaaacccggccagggactcgaatggatcggccaaatctatcccggcgacggcgacaccaactacaacggcaagttcaagggcagagccacactgaccgccgatacctctagcagcacagcctacatgcagctgagcagcctgaccagcgaagatagcgccgtgtacttctgtgcccggtccatcacaacagtcgtgggctgcgctatggactattggggccagggaacaagcgtgaccgtgtctagtacgcgtatccagaaccctgatcctgccgtgtaccagctgcgggatagcaagagcagcgacaagagcgtgtgtctgttcaccgacttcgacagccagaccaacgtgtcccagagcaaggactccgacgtgtacatcaccgataagaccgtgctggacatgcggagcatggacttcaagagcaactccgccgtggcctggtccaacaagtccgatttcgcctgcgccaacgccttcaacaacagcattatccccgaggacacattcttcccaagccccgagagcagcgactccaccgaccacgtgaagcccaaagagacagagaacaccaagcagcccagcaagagctgccacaagcccaaggccatcgtgcacaccgagaaagtgaacatgatgagcctgaccgtgctgggcctgcggatgctgttcgccaaaaccgtggccgtgaacttcctgctgaccgccaagctgttcttcctcctcaccgcccgcgccaagagaagcggatctggcgtgaagcagaccctgaatttcgacctgctgaagctggctggcgacgtggaatccaacccaggcccttctagaggccatatgaccgagtacaagcccacggtgcgcctcgccacccgcgacgacgtccccagggccgtacgcaccctcgccgccgcgttcgccgactaccccgccacgcgccacaccgtcgatccggaccgccacatcgagcgggtcaccgagctgcaagaactcttcctcacgcgcgtcgggctcgacatcggcaaggtgtgggtcgcggacgacggcgccgcggtggcggtctggaccacgccggagagcgtcgaagcgggggcggtgttcgccgagatcggcccgcgcatggccgagttgagcggttcccggctggccgcgcagcaacagatggaaggcctcctggcgccgcaccggcccaaggagcccgcgtggttcctggccaccgtcggcgtctcgcccgaccaccagggcaagggtctgggcagcgccgtcgtgctccccggagtggaggcggccgagcgcgccggggtgcccgccttcctggagacctccgcgccccgcaacctccccttctacgagcggctcggcttcaccgtcaccgccgacgtcgaggtgcccgaaggaccgcgcacctggtgcatgacccgcaagcccggtgcctga

SEQ ID NO: 8298 - DNA, 3741 bp, synthetic construct; identical to SEQ ID NO: 8297
  source 1..3741: mol_type = other DNA

SEQ ID NO: 8299 - DNA, 2577 bp, synthetic construct
  source 1..2577: mol_type = other DNA
atggccttaccagtgaccgccttgctcctgccgctggccttgctgctccacgccgccaggccgctcgaggaggacctgaagaacgtgttcccacctgaggtggccgtgttcgagcctagcgaggccgagatcagccacacccagaaagccaccctcgtgtgcctggctaccggcttctaccccgaccatgtggaactgtcttggtgggtcaacggcaaagaggtgcacagcggcgtgtctaccgacccccagccactgaaagaacagcccgccctgaacgacagccggtactgcctgagcagcagactgagagtgtccgccaccttctggcagaacccccggaaccacttcagatgccaggtgcagttctacggcctgagcgagaacgacgagtggacccaggacagagccaagcccgtgacccagatcgtgtctgccgaagcctggggcagagccgatgatgtgattaagatccactggcaggaaaagaagtccaacaccatcctgggcagccaggaaggcaacaccatgaagaccaacgacacctacatgaagttcagctggctgaccgtgcccgagaagtccctggacaaagaacacagatgcatcgtgcggcacgaaaacaacaagaacggcgtggaccaggaaatcatcttcccacccatcaagaccgatgtgattacaatggaccccaaggacaactgctccaaggacgccaacgataccctgctgctccagctgaccaacaccagcgcctactacatgtacttgttgctgctgctgaagtccgtggtgtacttcgccatcatcacatgctgcctgctgatggctatggtcaagcggaaggacagccggggaagggccaagcgatctggatctggagcaacaaacttctcactactcaaacaagcaggtgacgtggaggagaatcccgggcctactagcatggccctgcccgtgacagccctgctgctgcctctggctctgctgctgcacgccgccagacccgatgaattcggctctgacctgggcatcaagctgctgttcgccgctgccaagggccaggacgacgaagtgcggattctgctggctgctggggccgacgtgaacgccaaggatttcgagggctacacccccctgcacgtggccgcctatgatggacacctggaaatcgtggaagtgctgctgaaggctggcgctgatgtgaatgccaaagacagccagggccggacccctctgcatgaagccgcctacagcggccatctggaaattgtggaagtgctgctgaaagccggggcagacgtgaacgctcaggacgacgctggcgagacaccagccgatctggctgcagcttggggccacgaagatatcgccgaggtgctgcagaagacgcgtatccagaaccctgatcctgccgtgtaccagctgcgggatagcaagagcagcgacaagagcgtgtgtctgttcaccgacttcgacagccagaccaacgtgtcccagagcaaggactccgacgtgtacatcaccgataagaccgtgctggacatgcggagcatggacttcaagagcaactccgccgtggcctggtccaacaagtccgatttcgcctgcgccaacgccttcaacaacagcattatccccgaggacacattcttcccaagccccgagagcagcgactccaccgaccacgtgaagcccaaagagacagagaacaccaagcagcccagcaagagctgccacaagcccaaggccatcgtgcacaccgagaaagtgaacatgatgagcctgaccgtgctgggcctgcggatgctgttcgccaaaaccgtggccgtgaacttcctgctgaccgccaagctgttcttcctcctcaccgcccgcgccaagagaagcggatctggcgtgaagcagaccctgaatttcgacctgctgaagctggctggcgacgtggaatccaacccaggcccttctagaggccatatgaccgagtacaagcccacggtgcgcctcgccacccgcgacgacgtccccagggccgtacgcaccctcgccgccgcgttcgccgactaccccgccacgcgccacaccgtcgatccggaccgccacatcgagcgggtcaccgagctgcaagaactcttcctcacgcgcgtcgggctcgacatcggcaaggtgtgggtcgcggacgacggcgccgcggtggcggtctggaccacgccggagagcgtcgaagcgggggcggtgttcgccgagatcggcccgcgcatggccgagttgagcggttcccggctggccgcgcagcaacagatggaaggcctcctggcgccgcaccggcccaaggagcccgcgtggttcctggccaccgtcggcgtctcgcccgaccaccagggcaagggtctgggcagcgccgtcgtgctccccggagtggaggcggccgagcgcgccggggtgcccgccttcctggagacctccgcgccccgcaacctccccttctacgagcggctcggcttcaccgtcaccgccgacgtcgaggtgcccgaaggaccgcgcacctggtgcatgacccgcaagcccggtgcctga

SEQ ID NO: 8300 - DNA, 2364 bp, synthetic construct
  source 1..2364: mol_type = other DNA
atggccttaccagtgaccgccttgctcctgccgctggccttgctgctccacgccgccaggccgctcgaggaggacctgaagaacgtgttcccacctgaggtggccgtgttcgagcctagcgaggccgagatcagccacacccagaaagccaccctcgtgtgcctggctaccggcttctaccccgaccatgtggaactgtcttggtgggtcaacggcaaagaggtgcacagcggcgtgtctaccgacccccagccactgaaagaacagcccgccctgaacgacagccggtactgcctgagcagcagactgagagtgtccgccaccttctggcagaacccccggaaccacttcagatgccaggtgcagttctacggcctgagcgagaacgacgagtggacccaggacagagccaagcccgtgacccagatcgtgtctgccgaagcctggggcagagccgatgatgtgattaagatccactggcaggaaaagaagtccaacaccatcctgggcagccaggaaggcaacaccatgaagaccaacgacacctacatgaagttcagctggctgaccgtgcccgagaagtccctggacaaagaacacagatgcatcgtgcggcacgaaaacaacaagaacggcgtggaccaggaaatcatcttcccacccatcaagaccgatgtgattacaatggaccccaaggacaactgctccaaggacgccaacgataccctgctgctccagctgaccaacaccagcgcctactacatgtacttgttgctgctgctgaagtccgtggtgtacttcgccatcatcacatgctgcctgctgatggctatggtcaagcggaaggacagccggggaagggccaagcgatctggatctggagcaacaaacttctcactactcaaacaagcaggtgacgtggaggagaatcccgggcctactagcatggactggatttggcgcatccttttccttgtcggcgctgctaccggcgcccattccttcgaaggcagcggattcgaatacgccaaagagatgcggaacgcctactgggagatcgccctgctgcccaatctgaccaaccagcagaagagagcccccatcagaaagctgtacgacgacccctcccagagcagcgagctgctgtctgaggctaaaaaactgaacgatagccagacgcgtatccagaaccctgatcctgccgtgtaccagctgcgggatagcaagagcagcgacaagagcgtgtgtctgttcaccgacttcgacagccagaccaacgtgtcccagagcaaggactccgacgtgtacatcaccgataagaccgtgctggacatgcggagcatggacttcaagagcaactccgccgtggcctggtccaacaagtccgatttcgcctgcgccaacgccttcaacaacagcattatccccgaggacacattcttcccaagccccgagagcagcgactccaccgaccacgtgaagcccaaagagacagagaacaccaagcagcccagcaagagctgccacaagcccaaggccatcgtgcacaccgagaaagtgaacatgatgagcctgaccgtgctgggcctgcggatgctgttcgccaaaaccgtggccgtgaacttcctgctgaccgccaagctgttcttcctcctcaccgcccgcgccaagagaagcggatctggcgtgaagcagaccctgaatttcgacctgctgaagctggctggcgacgtggaatccaacccaggcccttctagaggccatatgaccgagtacaagcccacggtgcgcctcgccacccgcgacgacgtccccagggccgtacgcaccctcgccgccgcgttcgccgactaccccgccacgcgccacaccgtcgatccggaccgccacatcgagcgggtcaccgagctgcaagaactcttcctcacgcgcgtcgggctcgacatcggcaaggtgtgggtcgcggacgacggcgccgcggtggcggtctggaccacgccggagagcgtcgaagcgggggcggtgttcgccgagatcggcccgcgcatggccgagttgagcggttcccggctggccgcgcagcaacagatggaaggcctcctggcgccgcaccggcccaaggagcccgcgtggttcctggccaccgtcggcgtctcgcccgaccaccagggcaagggtctgggcagcgccgtcgtgctccccggagtggaggcggccgagcgcgccggggtgcccgccttcctggagacctccgcgccccgcaacctccccttctacgagcggctcggcttcaccgtcaccgccgacgtcgaggtgcccgaaggaccgcgcacctggtgcatgacccgcaagcccggtgcctga

SEQ ID NO: 8301 - DNA, 3030 bp, synthetic construct
  source 1..3030: mol_type = other DNA
atggccttaccagtgaccgccttgctcctgccgctggccttgctgctccacgccgccaggccgctcgaggaggacctgaagaacgtgttcccacctgaggtggccgtgttcgagcctagcgaggccgagatcagccacacccagaaagccaccctcgtgtgcctggctaccggcttctaccccgaccatgtggaactgtcttggtgggtcaacggcaaagaggtgcacagcggcgtgtctaccgacccccagccactgaaagaacagcccgccctgaacgacagccggtactgcctgagcagcagactgagagtgtccgccaccttctggcagaacccccggaaccacttcagatgccaggtgcagttctacggcctgagcgagaacgacgagtggacccaggacagagccaagcccgtgacccagatcgtgtctgccgaagcctggggcagagccgatgatgtgattaagatccactggcaggaaaagaagtccaacaccatcctgggcagccaggaaggcaacaccatgaagaccaacgacacctacatgaagttcagctggctgaccgtgcccgagaagtccctggacaaagaacacagatgcatcgtgcggcacgaaaacaacaagaacggcgtggaccaggaaatcatcttcccacccatcaagaccgatgtgattacaatggaccccaaggacaactgctccaaggacgccaacgataccctgctgctccagctgaccaacaccagcgcctactacatgtacttgttgctgctgctgaagtccgtggtgtacttcgccatcatcacatgctgcctgctgatggctatggtcaagcggaaggacagccggggaagggccaagcgatctggatctggagcaacaaacttctcactactcaaacaagcaggtgacgtggaggagaatcccgggcctactagcatggccctgcccgtgacagccctgctgctgcctctggctctgctgctgcacgccgccagacccgatgaattcgaggtgcaactggtggaaagcggcggaggcctggtgcaggctggcggatctctgagactgagctgtgccgccagcggcatcaccttcagcatcaacacaatgggctggtacagacaggcccctggcaagcagagggaactggtggccctgatctccagcatcggcgacacctactacgccgacagcgtgaagggccggttcaccatcagccgggacaacgccaagaacaccgtgtacctccagatgaacagcctgaagcccgaggacaccgccgtgtactactgcaagcggttcagaacagccgcccagggcaccgattattggggccagggaacacaagtgaccgtgtcctctctcgagggaggaggcggctccgggggaggcggaagtggaggcggaggatctgggtctggaggaagcggatctggaggctcagggtcagggggctcaggcagtggaggctctttcgaagtgcaactggtggaatctgggggcggactggtgcagccaggcggaagtctgaggctgtcttgtgccgcctccggcagcatcttcggcttcaacgacatggcctggtatcggcaggctcccggaaaacagcgcgagctggtggctctgattagcagagtgggcgtgaccagcagcgccgactctgtgaagggcagattcacaatctccagagtgaacgccaaggatacagtgtacctccagatgaactctctgaaacctgaggatacagcagtgtactattgctacatggaccagcggctggacggcagcacactggcctactggggacagggaactcaagtgacagtgtctagcacgcgtatccagaaccctgatcctgccgtgtaccagctgcgggatagcaagagcagcgacaagagcgtgtgtctgttcaccgacttcgacagccagaccaacgtgtcccagagcaaggactccgacgtgtacatcaccgataagaccgtgctggacatgcggagcatggacttcaagagcaactccgccgtggcctggtccaacaagtccgatttcgcctgcgccaacgccttcaacaacagcattatccccgaggacacattcttcccaagccccgagagcagcgactccaccgaccacgtgaagcccaaagagacagagaacaccaagcagcccagcaagagctgccacaagcccaaggccatcgtgcacaccgagaaagtgaacatgatgagcctgaccgtgctgggcctgcggatgctgttcgccaaaaccgtggccgtgaacttcctgctgaccgccaagctgttcttcctcctcaccgcccgcgccaagagaagcggatctggcgtgaagcagaccctgaatttcgacctgctgaagctggctggcgacgtggaatccaacccaggcccttctagaggccatatgaccgagtacaagcccacggtgcgcctcgccacccgcgacgacgtccccagggccgtacgcaccctcgccgccgcgttcgccgactaccccgccacgcgccacaccgtcgatccggaccgccacatcgagcgggtcaccgagctgcaagaactcttcctcacgcgcgtcgggctcgacatcggcaaggtgtgggtcgcggacgacggcgccgcggtggcggtctggaccacgccggagagcgtcgaagcgggggcggtgttcgccgagatcggcccgcgcatggccgagttgagcggttcccggctggccgcgcagcaacagatggaaggcctcctggcgccgcaccggcccaaggagcccgcgtggttcctggccaccgtcggcgtctcgcccgaccaccagggcaagggtctgggcagcgccgtcgtgctccccggagtggaggcggccgagcgcgccggggtgcccgccttcctggagacctccgcgccccgcaacctccccttctacgagcggctcggcttcaccgtcaccgccgacgtcgaggtgcccgaaggaccgcgcacctggtgcatgacccgcaagcccggtgcctga

SEQ ID NO: 8302 - DNA, 2772 bp, synthetic construct
  source 1..2772: mol_type = other DNA
atggccttaccagtgaccgccttgctcctgccgctggccttgctgctccacgccgccaggccgctcgaggaggacctgaagaacgtgttcccacctgaggtggccgtgttcgagcctagcgaggccgagatcagccacacccagaaagccaccctcgtgtgcctggctaccggcttctaccccgaccatgtggaactgtcttggtgggtcaacggcaaagaggtgcacagcggcgtgtctaccgacccccagccactgaaagaacagcccgccctgaacgacagccggtactgcctgagcagcagactgagagtgtccgccaccttctggcagaacccccggaaccacttcagatgccaggtgcagttctacggcctgagcgagaacgacgagtggacccaggacagagccaagcccgtgacccagatcgtgtctgccgaagcctggggcagagccgatgatgtgattaagatccactggcaggaaaagaagtccaacaccatcctgggcagccaggaaggcaacaccatgaagaccaacgacacctacatgaagttcagctggctgaccgtgcccgagaagtccctggacaaagaacacagatgcatcgtgcggcacgaaaacaacaagaacggcgtggaccaggaaatcatcttcccacccatcaagaccgatgtgattacaatggaccccaaggacaactgctccaaggacgccaacgataccctgctgctccagctgaccaacaccagcgcctactacatgtacttgttgctgctgctgaagtccgtggtgtacttcgccatcatcacatgctgcctgctgatggctatggtcaagcggaaggacagccggggaagggccaagcgatctggatctggagcaacaaacttctcactactcaaacaagcaggtgacgtggaggagaatcccgggcctactagcatggcccttccagtcactgccttgctgttgcctctggcgctcctgctccacgccgctagaccgggcatgagaaccgaggacctgcctaaggccgtggtgttcctggaaccccagtggtacagagtgctggaaaaggacagcgtgaccctgaagtgccagggcgcctacagccccgaggacaatagcacccagtggttccacaacgagagcctgatctccagccaggccagcagctacttcatcgacgccgccaccgtggacgacagcggcgagtatagatgccagaccaacctgagcaccctgagcgaccccgtgcagctggaagtgcacatcggatggctgctgctgcaggcccccagatgggtgttcaaagaagaggaccccatccacctgagatgccactcttggaagaacaccgccctgcacaaagtgacctacctgcagaacggcaagggcagaaagtacttccaccacaacagcgacttctacatccccaaggccaccctgaaggactccggctcctacttctgcagaggcctcgtgggcagcaagaacgtgtccagcgagacagtgaacatcaccatcacccagggcctggccgtgtctaccatcagcagctttttcccacccggctaccagacgcgtatccagaaccctgatcctgccgtgtaccagctgcgggatagcaagagcagcgacaagagcgtgtgtctgttcaccgacttcgacagccagaccaacgtgtcccagagcaaggactccgacgtgtacatcaccgataagaccgtgctggacatgcggagcatggacttcaagagcaactccgccgtggcctggtccaacaagtccgatttcgcctgcgccaacgccttcaacaacagcattatccccgaggacacattcttcccaagccccgagagcagcgactccaccgaccacgtgaagcccaaagagacagagaacaccaagcagcccagcaagagctgccacaagcccaaggccatcgtgcacaccgagaaagtgaacatgatgagcctgaccgtgctgggcctgcggatgctgttcgccaaaaccgtggccgtgaacttcctgctgaccgccaagctgttcttcctcctcaccgcccgcgccaagagaagcggatctggcgtgaagcagaccctgaatttcgacctgctgaagctggctggcgacgtggaatccaacccaggcccttctagaggccatatgaccgagtacaagcccacggtgcgcctcgccacccgcgacgacgtccccagggccgtacgcaccctcgccgccgcgttcgccgactaccccgccacgcgccacaccgtcgatccggaccgccacatcgagcgggtcaccgagctgcaagaactcttcctcacgcgcgtcgggctcgacatcggcaaggtgtgggtcgcggacgacggcgccgcggtggcggtctggaccacgccggagagcgtcgaagcgggggcggtgttcgccgagatcggcccgcgcatggccgagttgagcggttcccggctggccgcgcagcaacagatggaaggcctcctggcgccgcaccggcccaaggagcccgcgtggttcctggccaccgtcggcgtctcgcccgaccaccagggcaagggtctgggcagcgccgtcgtgctccccggagtggaggcggccgagcgcgccggggtgcccgccttcctggagacctccgcgccccgcaacctccccttctacgagcggctcggcttcaccgtcaccgccgacgtcgaggtgcccgaaggaccgcgcacctggtgcatgacccgcaagcccggtgcctga

SEQ ID NO: 8303 - DNA, 2778 bp, synthetic construct
  source 1..2778: mol_type = other DNA
atggccttaccagtgaccgccttgctcctgccgctggccttgctgctccacgccgccaggccgctcgaggaggacctgaagaacgtgttcccacctgaggtggccgtgttcgagcctagcgaggccgagatcagccacacccagaaagccaccctcgtgtgcctggctaccggcttctaccccgaccatgtggaactgtcttggtgggtcaacggcaaagaggtgcacagcggcgtgtctaccgacccccagccactgaaagaacagcccgccctgaacgacagccggtactgcctgagcagcagactgagagtgtccgccaccttctggcagaacccccggaaccacttcagatgccaggtgcagttctacggcctgagcgagaacgacgagtggacccaggacagagccaagcccgtgacccagatcgtgtctgccgaagcctggggcagagccgatgatgtgattaagatccactggcaggaaaagaagtccaacaccatcctgggcagccaggaaggcaacaccatgaagaccaacgacacctacatgaagttcagctggctgaccgtgcccgagaagtccctggacaaagaacacagatgcatcgtgcggcacgaaaacaacaagaacggcgtggaccaggaaatcatcttcccacccatcaagaccgatgtgattacaatggaccccaaggacaactgctccaaggacgccaacgataccctgctgctccagctgaccaacaccagcgcctactacatgtacttgttgctgctgctgaagtccgtggtgtacttcgccatcatcacatgctgcctgctgatggctatggtcaagcggaaggacagccggggaagggccaagcgatctggatctggagcaacaaacttctcactactcaaacaagcaggtgacgtggaggagaatcccgggcctactagcgccaccatggccttaccagtgaccgccttgctcctgccgctggccttgctgctccacgccgccaggccgggcatgcggactgaagacctcccaaaggctgtggtgttcctggagcctcaatggtacagggtgctggagaaggacagtgtgactctgaagtgccagggagcctactcccctgaggacaattccacacagtggtttcacaatgagagcctcatctcaagccaggcctccagctacttcattgacgctgccacagtggacgacagtggagagtacaggtgccagacaaacctctccaccctcagtgacccggtgcagctagaagtccatatcggctggctgttgctccaggcccctcggtgggtgttcaaggaggaagaccctattcacctgaggtgtcacagctggaagaacactgctctgcataaggtcacatatttacagaatggcaaaggcaggaagtattttcatcataattctgacttctacattccaaaagccacactcaaagacagcggctcctacttctgcagggggcttgttgggagtaaaaatgtgtcttcagagactgtgaacatcaccatcactcaaggtttggcagtgtcaaccatctcatcattctttccacctggctaccaaacgcgtatccagaaccctgatcctgccgtgtaccagctgcgggatagcaagagcagcgacaagagcgtgtgtctgttcaccgacttcgacagccagaccaacgtgtcccagagcaaggactccgacgtgtacatcaccgataagaccgtgctggacatgcggagcatggacttcaagagcaactccgccgtggcctggtccaacaagtccgatttcgcctgcgccaacgccttcaacaacagcattatccccgaggacacattcttcccaagccccgagagcagcgactccaccgaccacgtgaagcccaaagagacagagaacaccaagcagcccagcaagagctgccacaagcccaaggccatcgtgcacaccgagaaagtgaacatgatgagcctgaccgtgctgggcctgcggatgctgttcgccaaaaccgtggccgtgaacttcctgctgaccgccaagctgttcttcctcctcaccgcccgcgccaagagaagcggatctggcgtgaagcagaccctgaatttcgacctgctgaagctggctggcgacgtggaatccaacccaggcccttctagaggccatatgaccgagtacaagcccacggtgcgcctcgccacccgcgacgacgtccccagggccgtacgcaccctcgccgccgcgttcgccgactaccccgccacgcgccacaccgtcgatccggaccgccacatcgagcgggtcaccgagctgcaagaactcttcctcacgcgcgtcgggctcgacatcggcaaggtgtgggtcgcggacgacggcgccgcggtggcggtctggaccacgccggagagcgtcgaagcgggggcggtgttcgccgagatcggcccgcgcatggccgagttgagcggttcccggctggccgcgcagcaacagatggaaggcctcctggcgccgcaccggcccaaggagcccgcgtggttcctggccaccgtcggcgtctcgcccgaccaccagggcaagggtctgggcagcgccgtcgtgctccccggagtggaggcggccgagcgcgccggggtgcccgccttcctggagacctccgcgccccgcaacctccccttctacgagcggctcggcttcaccgtcaccgccgacgtcgaggtgcccgaaggaccgcgcacctggtgcatgacccgcaagcccggtgcctga

SEQ ID NO: 8304 - DNA, 2922 bp, synthetic construct
  source 1..2922: mol_type = other DNA
atggccttaccagtgaccgccttgctcctgccgctggccttgctgctccacgccgccaggccgctcgagatccagaaccctgatcctgccgtgtaccagctgcgggatagcaagagcagcgacaagagcgtgtgtctgttcaccgacttcgacagccagaccaacgtgtcccagagcaaggactccgacgtgtacatcaccgataagaccgtgctggacatgcggagcatggacttcaagagcaactccgccgtggcctggtccaacaagtccgatttcgcctgcgccaacgccttcaacaacagcattatccccgaggacacattcttcccaagccccgagagcagcgactccaccgaccacgtgaagcccaaagagacagagaacaccaagcagcccagcaagagctgccacaagcccaaggccatcgtgcacaccgagaaagtgaacatgatgagcctgaccgtgctgggcctgcggatgctgttcgccaaaaccgtggccgtgaacttcctgctgaccgccaagctgttcttcctcctcaccgccagggccaagcgatctggatctggagcaacaaacttctcactactcaaacaagcaggtgacgtggaggagaatcccgggcctactagcatggccttaccagtgaccgccttgctcctgccgctggccttgctgctccacgccgccaggccggacatccagatgacacagactacatcctccctgtctgcctctctgggagacagagtcaccatcagttgcagggcaagtcaggacattagtaaatatttaaattggtatcagcagaaaccagatggaactgttaaactcctgatctaccatacatcaagattacactcaggagtcccatcaaggttcagtggcagtgggtctggaacagattattctctcaccattagcaacctggagcaagaagatattgccacttacttttgccaacagggtaatacgcttccgtacacgttcggaggggggaccaagctggagatcacaggtggcggtggctcgggcggtggtgggtcgggtggcggcggatctgaggtgaaactgcaggagtcaggacctggcctggtggcgccctcacagagcctgtccgtcacatgcactgtctcaggggtctcattacccgactatggtgtaagctggattcgccagcctccacgaaagggtctggagtggctgggagtaatatggggtagtgaaaccacatactataattcagctctcaaatccagactgaccatcatcaaggacaactccaagagccaagttttcttaaaaatgaacagtctgcaaactgatgacacagccatttactactgtgccaaacattattactacggtggtagctatgctatggactactggggtcaaggaacctcagtcaccgtctcctcaacgcgtgaggacctgaagaacgtgttcccacctgaggtggccgtgttcgagcctagcgaggccgagatcagccacacccagaaagccaccctcgtgtgcctggctaccggcttctaccccgaccatgtggaactgtcttggtgggtcaacggcaaagaggtgcacagcggcgtgtctaccgacccccagccactgaaagaacagcccgccctgaacgacagccggtactgcctgagcagcagactgagagtgtccgccaccttctggcagaacccccggaaccacttcagatgccaggtgcagttctacggcctgagcgagaacgacgagtggacccaggacagagccaagcccgtgacccagatcgtgtctgccgaagcctggggcagagccgatgatgtgattaagatccactggcaggaaaagaagtccaacaccatcctgggcagccaggaaggcaacaccatgaagaccaacgacacctacatgaagttcagctggctgaccgtgcccgagaagtccctggacaaagaacacagatgcatcgtgcggcacgaaaacaacaagaacggcgtggaccaggaaatcatcttcccacccatcaagaccgatgtgattacaatggaccccaaggacaactgctccaaggacgccaacgataccctgctgctccagctgaccaacaccagcgcctactacatgtacttgttgctgctgctgaagtccgtggtgtacttcgccatcatcacatgctgcctgctgatggctatggtcaagcggaaggacagccggggacgcgccaagagaagcggatctggcgtgaagcagaccctgaatttcgacctgctgaagctggctggcgacgtggaatccaacccaggcccttctagaggccatatgaccgagtacaagcccacggtgcgcctcgccacccgcgacgacgtccccagggccgtacgcaccctcgccgccgcgttcgccgactaccccgccacgcgccacaccgtcgatccggaccgccacatcgagcgggtcaccgagctgcaagaactcttcctcacgcgcgtcgggctcgacatcggcaaggtgtgggtcgcggacgacggcgccgcggtggcggtctggaccacgccggagagcgtcgaagcgggggcggtgttcgccgagatcggcccgcgcatggccgagttgagcggttcccggctggccgcgcagcaacagatggaaggcctcctggcgccgcaccggcccaaggagcccgcgtggttcctggccaccgtcggcgtctcgcccgaccaccagggcaagggtctgggcagcgccgtcgtgctccccggagtggaggcggccgagcgcgccggggtgcccgccttcctggagacctccgcgccccgcaacctccccttctacgagcggctcggcttcaccgtcaccgccgacgtcgaggtgcccgaaggaccgcgcacctggtgcatgacccgcaagcccggtgcctga

SEQ ID NO: 8305 - DNA, 2925 bp, synthetic construct
  source 1..2925: mol_type = other DNA
atggccttaccagtgaccgccttgctcctgccgctggccttgctgctccacgccgccaggccgctcgagatccagaaccctgatcctgccgtgtaccagctgcgggatagcaagagcagcgacaagagcgtgtgtctgttcaccgacttcgacagccagaccaacgtgtcccagagcaaggactccgacgtgtacatcaccgataagaccgtgctggacatgcggagcatggacttcaagagcaactccgccgtggcctggtccaacaagtccgatttcgcctgcgccaacgccttcaacaacagcattatccccgaggacacattcttcccaagccccgagagcagcgactccaccgaccacgtgaagcccaaagagacagagaacaccaagcagcccagcaagagctgccacaagcccaaggccatcgtgcacaccgagaaagtgaacatgatgagcctgaccgtgctgggcctgcggatgctgttcgccaaaaccgtggccgtgaacttcctgctgaccgccaagctgttcttcctcctcaccgccagggccaagcgatctggatctggagcaacaaacttctcactactcaaacaagcaggtgacgtggaggagaatcccgggcctactagcaccatggccttaccagtgaccgccttgctcctgccgctggccttgctgctccacgccgccaggccggagatcgtgatgacccagagccctgccaccctgtctctgagccctggcgaaagagccaccctgagctgtagagccagccaggacatcagcaagtacctgaactggtatcagcagaagcccggccaggcccccagactgctgatctaccacaccagcagactgcacagcggcatccccgccagattttctggctctggcagcggcaccgactacaccctgacaatcagcagcctccagcccgaggacttcgccgtgtacttctgtcagcaaggcaacaccctgccctacaccttcggccagggcaccaagctggaaatcaagggcggaggcggaagtggaggcggaggatctggcggcggaggctctcaggtgcaactccaggaatctggccctggcctcgtgaagcccagcgagacactgagcctgacctgtaccgtgtccggcgtgtccctgcctgactatggcgtgtcctggatcagacagccccctggcaagggcctggaatggatcggagtgatttggggcagcgaaaccacctactacaacagctccctgaagtccagagtgaccatctccaaggacaactccaagaaccaggtgtccctgaagctgagcagcgtgacagccgccgacaccgccgtgtattactgcgccaagcactactactacggcggcagctacgctatggactactggggccagggaaccctcgtgaccgtgtctagtacgcgtgaggacctgaagaacgtgttcccacctgaggtggccgtgttcgagcctagcgaggccgagatcagccacacccagaaagccaccctcgtgtgcctggctaccggcttctaccccgaccatgtggaactgtcttggtgggtcaacggcaaagaggtgcacagcggcgtgtctaccgacccccagccactgaaagaacagcccgccctgaacgacagccggtactgcctgagcagcagactgagagtgtccgccaccttctggcagaacccccggaaccacttcagatgccaggtgcagttctacggcctgagcgagaacgacgagtggacccaggacagagccaagcccgtgacccagatcgtgtctgccgaagcctggggcagagccgatgatgtgattaagatccactggcaggaaaagaagtccaacaccatcctgggcagccaggaaggcaacaccatgaagaccaacgacacctacatgaagttcagctggctgaccgtgcccgagaagtccctggacaaagaacacagatgcatcgtgcggcacgaaaacaacaagaacggcgtggaccaggaaatcatcttcccacccatcaagaccgatgtgattacaatggaccccaaggacaactgctccaaggacgccaacgataccctgctgctccagctgaccaacaccagcgcctactacatgtacttgttgctgctgctgaagtccgtggtgtacttcgccatcatcacatgctgcctgctgatggctatggtcaagcggaaggacagccggggacgcgccaagagaagcggatctggcgtgaagcagaccctgaatttcgacctgctgaagctggctggcgacgtggaatccaacccaggcccttctagaggccatatgaccgagtacaagcccacggtgcgcctcgccacccgcgacgacgtccccagggccgtacgcaccctcgccgccgcgttcgccgactaccccgccacgcgccacaccgtcgatccggaccgccacatcgagcgggtcaccgagctgcaagaactcttcctcacgcgcgtcgggctcgacatcggcaaggtgtgggtcgcggacgacggcgccgcggtggcggtctggaccacgccggagagcgtcgaagcgggggcggtgttcgccgagatcggcccgcgcatggccgagttgagcggttcccggctggccgcgcagcaacagatggaaggcctcctggcgccgcaccggcccaaggagcccgcgtggttcctggccaccgtcggcgtctcgcccgaccaccagggcaagggtctgggcagcgccgtcgtgctccccggagtggaggcggccgagcgcgccggggtgcccgccttcctggagacctccgcgccccgcaacctccccttctacgagcggctcggcttcaccgtcaccgccgacgtcgaggtgcccgaaggaccgcgcacctggtgcatgacccgcaagcccggtgcctga

SEQ ID NO: 8306 - DNA, 2928 bp, synthetic construct
  source 1..2928: mol_type = other DNA
atggccttaccagtgaccgccttgctcctgccgctggccttgctgctccacgccgccaggccgctcgagatccagaaccctgatcctgccgtgtaccagctgcgggatagcaagagcagcgacaagagcgtgtgtctgttcaccgacttcgacagccagaccaacgtgtcccagagcaaggactccgacgtgtacatcaccgataagaccgtgctggacatgcggagcatggacttcaagagcaactccgccgtggcctggtccaacaagtccgatttcgcctgcgccaacgccttcaacaacagcattatccccgaggacacattcttcccaagccccgagagcagcgactccaccgaccacgtgaagcccaaagagacagagaacaccaagcagcccagcaagagctgccacaagcccaaggccatcgtgcacaccgagaaagtgaacatgatgagcctgaccgtgctgggcctgcggatgctgttcgccaaaaccgtggccgtgaacttcctgctgaccgccaagctgttcttcctcctcaccgccagggccaagcgatctggatctggagcaacaaacttctcactactcaaacaagcaggtgacgtggaggagaatcccgggcctactagcaccatggccttaccagtgaccgccttgctcctgccgctggccttgctgctccacgccgccaggccggacgagatcgtgctgacacagagccccgccaccctgtcactgtctccaggcgaaagagccaccctgagctgtagcgccagcagcagcgtgtcctacatgcactggtatcagcagaagcccggccaggcccccagactgctgatctacgataccagcaagctggcctccggcatccccgccagattttctggcagcggctccggcaccgacttcaccctgacaatcagcagcctggaacccgaggacgtggccgtgtactactgttttcaaggcagcgtgtaccccttcaccttcggccagggcaccaagctggaaatcaagagaggtggcggtggctcgggcggtggtgggtcgggtggcggcggatctcaggtgcagctccaggaatctggccctggcctcgtgaagcctagccagaccctgagcctgacctgtaccgtgtctggcggcagcatcagcacaagcggcatgggcgtgggctggatcagacagcaccctggcaagggcctggaatggatcggccacatttggtgggacgacgacaagcggtacaaccccgccctgaagtccagagtgaccatcagcgtggacaccagcaagaaccagttcagcctgaagctgagcagcgtgacagccgccgataccgccgtgtattattgcgcccggatggaactgtggtcctactacttcgactactggggccagggaaccctcgtgaccgtgtctagtacgcgtgaggacctgaagaacgtgttcccacctgaggtggccgtgttcgagcctagcgaggccgagatcagccacacccagaaagccaccctcgtgtgcctggctaccggcttctaccccgaccatgtggaactgtcttggtgggtcaacggcaaagaggtgcacagcggcgtgtctaccgacccccagccactgaaagaacagcccgccctgaacgacagccggtactgcctgagcagcagactgagagtgtccgccaccttctggcagaacccccggaaccacttcagatgccaggtgcagttctacggcctgagcgagaacgacgagtggacccaggacagagccaagcccgtgacccagatcgtgtctgccgaagcctggggcagagccgatgatgtgattaagatccactggcaggaaaagaagtccaacaccatcctgggcagccaggaaggcaacaccatgaagaccaacgacacctacatgaagttcagctggctgaccgtgcccgagaagtccctggacaaagaacacagatgcatcgtgcggcacgaaaacaacaagaacggcgtggaccaggaaatcatcttcccacccatcaagaccgatgtgattacaatggaccccaaggacaactgctccaaggacgccaacgataccctgctgctccagctgaccaacaccagcgcctactacatgtacttgttgctgctgctgaagtccgtggtgtacttcgccatcatcacatgctgcctgctgatggctatggtcaagcggaaggacagccggggacgcgccaagagaagcggatctggcgtgaagcagaccctgaatttcgacctgctgaagctggctggcgacgtggaatccaacccaggcccttctagaggccatatgaccgagtacaagcccacggtgcgcctcgccacccgcgacgacgtccccagggccgtacgcaccctcgccgccgcgttcgccgactaccccgccacgcgccacaccgtcgatccggaccgccacatcgagcgggtcaccgagctgcaagaactcttcctcacgcgcgtcgggctcgacatcggcaaggtgtgggtcgcggacgacggcgccgcggtggcggtctggaccacgccggagagcgtcgaagcgggggcggtgttcgccgagatcggcccgcgcatggccgagttgagcggttcccggctggccgcgcagcaacagatggaaggcctcctggcgccgcaccggcccaaggagcccgcgtggttcctggccaccgtcggcgtctcgcccgaccaccagggcaagggtctgggcagcgccgtcgtgctccccggagtggaggcggccgagcgcgccggggtgcccgccttcctggagacctccgcgccccgcaacctccccttctacgagcggctcggcttcaccgtcaccgccgacgtcgaggtgcccgaaggaccgcgcacctggtgcatgacccgcaagcccggtgcctga

SEQ ID NO: 8307 - DNA, 2916 bp, synthetic construct
  source 1..2916: mol_type = other DNA
atggccttaccagtgaccgccttgctcctgccgctggccttgctgctccacgccgccaggccgctcgagatccagaaccctgatcctgccgtgtaccagctgcgggatagcaagagcagcgacaagagcgtgtgtctgttcaccgacttcgacagccagaccaacgtgtcccagagcaaggactccgacgtgtacatcaccgataagaccgtgctggacatgcggagcatggacttcaagagcaactccgccgtggcctggtccaacaagtccgatttcgcctgcgccaacgccttcaacaacagcattatccccgaggacacattcttcccaagccccgagagcagcgactccaccgaccacgtgaagcccaaagagacagagaacaccaagcagcccagcaagagctgccacaagcccaaggccatcgtgcacaccgagaaagtgaacatgatgagcctgaccgtgctgggcctgcggatgctgttcgccaaaaccgtggccgtgaacttcctgctgaccgccaagctgttcttcctcctcaccgccagggccaagcgatctggatctggagcaacaaacttctcactactcaaacaagcaggtgacgtggaggagaatcccgggcctactagcatggccttaccagtgaccgccttgctcctgccgctggccttgctgctccacgccgccaggccggacatccagatgacacagagccctagcagcctgtctgccagcgtgggagacagagtgaccatcacctgtagagccagccaggacatcagcaactacctgaactggtatcagcagaagcccggcaaggcccctaagctgctgatctactacaccagcagactgcacagcggcgtgcccagcagattttctggctctggcagcggcaccgacttcaccctgacaatatctagcctccagcctgaggacttcgccacctactattgccagcagggcaacaccctgccttacacatttggacagggcaccaaggtggaaatcaagagaggcggaggcggaagtggaggcggaggatctggcggcggaggctctgaagtgcagctggttgaatcaggtggcggcctggttcaacctggcggatctctgagactgagctgtgccgccagcggcttcaccttcagcgactactttatgagctgggtccgacaggcccctggcaaaggacttgaatgggtcgccaccatcagcaatggcggcacctacacttactaccccgacagcgtgaagggcagattcaccatctccagagacaacagcaagaacaccctgtacctccagatgaactccctgagagccgaggacaccgccgtgtactactgcgccagattcgacggctacatcttcgactattggggccagggcaccctggtcacagtctcttctacgcgtgaggacctgaagaacgtgttcccacctgaggtggccgtgttcgagcctagcgaggccgagatcagccacacccagaaagccaccctcgtgtgcctggctaccggcttctaccccgaccatgtggaactgtcttggtgggtcaacggcaaagaggtgcacagcggcgtgtctaccgacccccagccactgaaagaacagcccgccctgaacgacagccggtactgcctgagcagcagactgagagtgtccgccaccttctggcagaacccccggaaccacttcagatgccaggtgcagttctacggcctgagcgagaacgacgagtggacccaggacagagccaagcccgtgacccagatcgtgtctgccgaagcctggggcagagccgatgatgtgattaagatccactggcaggaaaagaagtccaacaccatcctgggcagccaggaaggcaacaccatgaagaccaacgacacctacatgaagttcagctggctgaccgtgcccgagaagtccctggacaaagaacacagatgcatcgtgcggcacgaaaacaacaagaacggcgtggaccaggaaatcatcttcccacccatcaagaccgatgtgattacaatggaccccaaggacaactgctccaaggacgccaacgataccctgctgctccagctgaccaacaccagcgcctactacatgtacttgttgctgctgctgaagtccgtggtgtacttcgccatcatcacatgctgcctgctgatggctatggtcaagcggaaggacagccggggacgcgccaagagaagcggatctggcgtgaagcagaccctgaatttcgacctgctgaagctggctggcgacgtggaatccaacccaggcccttctagaggccatatgaccgagtacaagcccacggtgcgcctcgccacccgcgacgacgtccccagggccgtacgcaccctcgccgccgcgttcgccgactaccccgccacgcgccacaccgtcgatccggaccgccacatcgagcgggtcaccgagctgcaagaactcttcctcacgcgcgtcgggctcgacatcggcaaggtgtgggtcgcggacgacggcgccgcggtggcggtctggaccacgccggagagcgtcgaagcgggggcggtgttcgccgagatcggcccgcgcatggccgagttgagcggttcccggctggccgcgcagcaacagatggaaggcctcctggcgccgcaccggcccaaggagcccgcgtggttcctggccaccgtcggcgtctcgcccgaccaccagggcaagggtctgggcagcgccgtcgtgctccccggagtggaggcggccgagcgcgccggggtgcccgccttcctggagacctccgcgccccgcaacctccccttctacgagcggctcggcttcaccgtcaccgccgacgtcgaggtgcccgaaggaccgcgcacctggtgcatgacccgcaagcccggtgcctga

SEQ ID NO: 8308 - DNA, 2928 bp, synthetic construct
  source 1..2928: mol_type = other DNA
atggccttaccagtgaccgccttgctcctgccgctggccttgctgctccacgccgccaggccgctcgagatccagaaccctgatcctgccgtgtaccagctgcgggatagcaagagcagcgacaagagcgtgtgtctgttcaccgacttcgacagccagaccaacgtgtcccagagcaaggactccgacgtgtacatcaccgataagaccgtgctggacatgcggagcatggacttcaagagcaactccgccgtggcctggtccaacaagtccgatttcgcctgcgccaacgccttcaacaacagcattatccccgaggacacattcttcccaagccccgagagcagcgactccaccgaccacgtgaagcccaaagagacagagaacaccaagcagcccagcaagagctgccacaagcccaaggccatcgtgcacaccgagaaagtgaacatgatgagcctgaccgtgctgggcctgcggatgctgttcgccaaaaccgtggccgtgaacttcctgctgaccgccaagctgttcttcctcctcaccgccagggccaagcgatctggatctggagcaacaaacttctcactactcaaacaagcaggtgacgtggaggagaatcccgggcctactagcatggccttaccagtgaccgccttgctcctgccgctggccttgctgctccacgccgccaggccggacatccagatgacacagagccctagcagcctgtctgccagcgtgggagacagagtgaccatcacatgcaaggccagcgaccacatcaacaactggctggcctggtatcagcagaagcctggacaggcccctaagctgctgatctacggcgctaccacactggaaacaggcgtgcccagcagattttctggcagcggctctggcaccgactacaccctgacaatatccagcctccagcctgaggacttcgccacctactactgtcagcagagctggaacaccccttggacattcggccagggcaccaagctggaaatcaagagaggcggaggcggaagtggaggcggaggatctggcggcggaggctctcaagttcagcttcaacagcctggcgctgagctggtcaaacctggcgcttctgtgaagatgagctgcaaagccagcggctacgccttcagcagctactggatcaactggatgaagcagaaacccggccagggactcgaatggatcggccaaatctatcccggcgacggcgacaccaactacaacggcaagttcaagggcagagccacactgaccgccgatacctctagcagcacagcctacatgcagctgagcagcctgaccagcgaagatagcgccgtgtacttctgtgcccggtccatcacaacagtcgtgggctgcgctatggactattggggccagggaacaagcgtgaccgtgtctagtacgcgtgaggacctgaagaacgtgttcccacctgaggtggccgtgttcgagcctagcgaggccgagatcagccacacccagaaagccaccctcgtgtgcctggctaccggcttctaccccgaccatgtggaactgtcttggtgggtcaacggcaaagaggtgcacagcggcgtgtctaccgacccccagccactgaaagaacagcccgccctgaacgacagccggtactgcctgagcagcagactgagagtgtccgccaccttctggcagaacccccggaaccacttcagatgccaggtgcagttctacggcctgagcgagaacgacgagtggacccaggacagagccaagcccgtgacccagatcgtgtctgccgaagcctggggcagagccgatgatgtgattaagatccactggcaggaaaagaagtccaacaccatcctgggcagccaggaaggcaacaccatgaagaccaacgacacctacatgaagttcagctggctgaccgtgcccgagaagtccctggacaaagaacacagatgcatcgtgcggcacgaaaacaacaagaacggcgtggaccaggaaatcatcttcccacccatcaagaccgatgtgattacaatggaccccaaggacaactgctccaaggacgccaacgataccctgctgctccagctgaccaacaccagcgcctactacatgtacttgttgctgctgctgaagtccgtggtgtacttcgccatcatcacatgctgcctgctgatggctatggtcaagcggaaggacagccggggacgcgccaagagaagcggatctggcgtgaagcagaccctgaatttcgacctgctgaagctggctggcgacgtggaatccaacccaggcccttctagaggccatatgaccgagtacaagcccacggtgcgcctcgccacccgcgacgacgtccccagggccgtacgcaccctcgccgccgcgttcgccgactaccccgccacgcgccacaccgtcgatccggaccgccacatcgagcgggtcaccgagctgcaagaactcttcctcacgcgcgtcgggctcgacatcggcaaggtgtgggtcgcggacgacggcgccgcggtggcggtctggaccacgccggagagcgtcgaagcgggggcggtgttcgccgagatcggcccgcgcatggccgagttgagcggttcccggctggccgcgcagcaacagatggaaggcctcctggcgccgcaccggcccaaggagcccgcgtggttcctggccaccgtcggcgtctcgcccgaccaccagggcaagggtctgggcagcgccgtcgtgctccccggagtggaggcggccgagcgcgccggggtgcccgccttcctggagacctccgcgccccgcaacctccccttctacgagcggctcggcttcaccgtcaccgccgacgtcgaggtgcccgaaggaccgcgcacctggtgcatgacccgcaagcccggtgcctga

SEQ ID NO: 8309 - DNA, 2934 bp, synthetic construct
  source 1..2934: mol_type = other DNA
atggccttaccagtgaccgccttgctcctgccgctggccttgctgctccacgccgccaggccgctcgagatccagaaccctgatcctgccgtgtaccagctgcgggatagcaagagcagcgacaagagcgtgtgtctgttcaccgacttcgacagccagaccaacgtgtcccagagcaaggactccgacgtgtacatcaccgataagaccgtgctggacatgcggagcatggacttcaagagcaactccgccgtggcctggtccaacaagtccgatttcgcctgcgccaacgccttcaacaacagcattatccccgaggacacattcttcccaagccccgagagcagcgactccaccgaccacgtgaagcccaaagagacagagaacaccaagcagcccagcaagagctgccacaagcccaaggccatcgtgcacaccgagaaagtgaacatgatgagcctgaccgtgctgggcctgcggatgctgttcgccaaaaccgtggccgtgaacttcctgctgaccgccaagctgttcttcctcctcaccgccagggccaagcgatctggatctggagcaacaaacttctcactactcaaacaagcaggtgacgtggaggagaatcccgggcctactagcatggccttaccagtgaccgccttgctcctgccgctggccttgctgctccacgccgccaggccgcagatcgtgctgtctcagtctcctgccatcctgagcgcttccccaggcgagaaagtgaccatgacctgtagagccagcagcagcgtgtcctacatgcactggtatcagcagaagcccggcagcagccctaagccttggatctacgccaccagcaatctggcctctggcgtgccagccagattttctggctctggcagcggcaccagctacagcttcacaatcagcagagtggaagccgaggacgccgccacctactattgtcagcagtggaccttcaatcctcctaccttcggcggaggcacccggctggaaatcaaaagaacagtggctgctggcggaggcggaagtggaggcggaggatctggcggcggaggctctcaggcttatctgcaacagagcggagccgaactcgtcagacctggcgcttctgtgaagatgagctgcaaggccagcggctacaccttcaccagctataatatgcactgggtcaagcagacccctcggcagggactcgaatggatcggcggaatctatcccggcaacggcgacacctcctacaaccagaagttcaagggcaaagccacactgaccgtgggcaagagcagcagcaccgcctatatgcagctcagcagcctgaccagcgaggacagcgccgtgtacttctgcgccagatacgactacaactacgctatggactactggggccagggcaccagcgtgacagttagctctgccagcacgcgtgaggacctgaagaacgtgttcccacctgaggtggccgtgttcgagcctagcgaggccgagatcagccacacccagaaagccaccctcgtgtgcctggctaccggcttctaccccgaccatgtggaactgtcttggtgggtcaacggcaaagaggtgcacagcggcgtgtctaccgacccccagccactgaaagaacagcccgccctgaacgacagccggtactgcctgagcagcagactgagagtgtccgccaccttctggcagaacccccggaaccacttcagatgccaggtgcagttctacggcctgagcgagaacgacgagtggacccaggacagagccaagcccgtgacccagatcgtgtctgccgaagcctggggcagagccgatgatgtgattaagatccactggcaggaaaagaagtccaacaccatcctgggcagccaggaaggcaacaccatgaagaccaacgacacctacatgaagttcagctggctgaccgtgcccgagaagtccctggacaaagaacacagatgcatcgtgcggcacgaaaacaacaagaacggcgtggaccaggaaatcatcttcccacccatcaagaccgatgtgattacaatggaccccaaggacaactgctccaaggacgccaacgataccctgctgctccagctgaccaacaccagcgcctactacatgtacttgttgctgctgctgaagtccgtggtgtacttcgccatcatcacatgctgcctgctgatggctatggtcaagcggaaggacagccggggacgcgccaagagaagcggatctggcgtgaagcagaccctgaatttcgacctgctgaagctggctggcgacgtggaatccaacccaggcccttctagaggccatatgaccgagtacaagcccacggtgcgcctcgccacccgcgacgacgtccccagggccgtacgcaccctcgccgccgcgttcgccgactaccccgccacgcgccacaccgtcgatccggaccgccacatcgagcgggtcaccgagctgcaagaactcttcctcacgcgcgtcgggctcgacatcggcaaggtgtgggtcgcggacgacggcgccgcggtggcggtctggaccacgccggagagcgtcgaagcgggggcggtgttcgccgagatcggcccgcgcatggccgagttgagcggttcccggctggccgcgcagcaacagatggaaggcctcctggcgccgcaccggcccaaggagcccgcgtggttcctggccaccgtcggcgtctcgcccgaccaccagggcaagggtctgggcagcgccgtcgtgctccccggagtggaggcggccgagcgcgccggggtgcccgccttcctggagacctccgcgccccgcaacctccccttctacgagcggctcggcttcaccgtcaccgccgacgtcgaggtgcccgaaggaccgcgcacctggtgcatgacccgcaagcccggtgcctga

SEQ ID NO: 8310 - DNA, 2928 bp, synthetic construct
  source 1..2928: mol_type = other DNA
atggccttaccagtgaccgccttgctcctgccgctggccttgctgctccacgccgccaggccgctcgagatccagaaccctgatcctgccgtgtaccagctgcgggatagcaagagcagcgacaagagcgtgtgtctgttcaccgacttcgacagccagaccaacgtgtcccagagcaaggactccgacgtgtacatcaccgataagaccgtgctggacatgcggagcatggacttcaagagcaactccgccgtggcctggtccaacaagtccgatttcgcctgcgccaacgccttcaacaacagcattatccccgaggacacattcttcccaagccccgagagcagcgactccaccgaccacgtgaagcccaaagagacagagaacaccaagcagcccagcaagagctgccacaagcccaaggccatcgtgcacaccgagaaagtgaacatgatgagcctgaccgtgctgggcctgcggatgctgttcgccaaaaccgtggccgtgaacttcctgctgaccgccaagctgttcttcctcctcaccgccagggccaagcgatctggatctggagcaacaaacttctcactactcaaacaagcaggtgacgtggaggagaatcccgggcctactagcatggccttaccagtgaccgccttgctcctgccgctggccttgctgctccacgccgccaggccggagatcgtgctgacacagagccctgccaccctgtctctgagccctggcgaaagagccaccctgagctgtagagccagccagagcgtgtccagctacctggcctggtatcagcagaagcccggccaggctccccggctgctgatctacgatgccagcaatagagccaccggcatccccgccagattttccggctctggcagcggcaccgacttcaccctgaccatcagctccctggaacccgaggacttcgccgtgtactactgccagcagcggagcaactggcccatcacattcggccagggcacccggctggaaatcaaaggcggaggcggaagtggaggcggaggatctggcggcggaggctctgaggtgcagcttgttgagtctggcggaggactggtgcagcccgatagaagcctgagactgtcttgtgccgccagcggcttcaccttccacgattatgccatgcactgggtccgacaggcccctggcaaaggacttgaatgggtgtccaccatctcttggaacagcggcacaatcggctacgccgactctgtgaagggcagattcaccatcagccgggacaacgccaagaacagcctgtacctccagatgaactccctgagagccgaggacacagccctgtactactgcgccaaggacatccagtacggcaactactactacggcatggacgtgtggggccagggcacaacagtgacagtctcttctacgcgtgaggacctgaagaacgtgttcccacctgaggtggccgtgttcgagcctagcgaggccgagatcagccacacccagaaagccaccctcgtgtgcctggctaccggcttctaccccgaccatgtggaactgtcttggtgggtcaacggcaaagaggtgcacagcggcgtgtctaccgacccccagccactgaaagaacagcccgccctgaacgacagccggtactgcctgagcagcagactgagagtgtccgccaccttctggcagaacccccggaaccacttcagatgccaggtgcagttctacggcctgagcgagaacgacgagtggacccaggacagagccaagcccgtgacccagatcgtgtctgccgaagcctggggcagagccgatgatgtgattaagatccactggcaggaaaagaagtccaacaccatcctgggcagccaggaaggcaacaccatgaagaccaacgacacctacatgaagttcagctggctgaccgtgcccgagaagtccctggacaaagaacacagatgcatcgtgcggcacgaaaacaacaagaacggcgtggaccaggaaatcatcttcccacccatcaagaccgatgtgattacaatggaccccaaggacaactgctccaaggacgccaacgataccctgctgctccagctgaccaacaccagcgcctactacatgtacttgttgctgctgctgaagtccgtggtgtacttcgccatcatcacatgctgcctgctgatggctatggtcaagcggaaggacagccggggacgcgccaagagaagcggatctggcgtgaagcagaccctgaatttcgacctgctgaagctggctggcgacgtggaatccaacccaggcccttctagaggccatatgaccgagtacaagcccacggtgcgcctcgccacccgcgacgacgtccccagggccgtacgcaccctcgccgccgcgttcgccgactaccccgccacgcgccacaccgtcgatccggaccgccacatcgagcgggtcaccgagctgcaagaactcttcctcacgcgcgtcgggctcgacatcggcaaggtgtgggtcgcggacgacggcgccgcggtggcggtctggaccacgccggagagcgtcgaagcgggggcggtgttcgccgagatcggcccgcgcatggccgagttgagcggttcccggctggccgcgcagcaacagatggaaggcctcctggcgccgcaccggcccaaggagcccgcgtggttcctggccaccgtcggcgtctcgcccgaccaccagggcaagggtctgggcagcgccgtcgtgctccccggagtggaggcggccgagcgcgccggggtgcccgccttcctggagacctccgcgccccgcaacctccccttctacgagcggctcggcttcaccgtcaccgccgacgtcgaggtgcccgaaggaccgcgcacctggtgcatgacccgcaagcccggtgcctga

SEQ ID NO: 8311 - DNA, 2922 bp, synthetic construct
  source 1..2922: mol_type = other DNA
atggccttaccagtgaccgccttgctcctgccgctggccttgctgctccacgccgccaggccgctcgagatccagaaccctgatcctgccgtgtaccagctgcgggatagcaagagcagcgacaagagcgtgtgtctgttcaccgacttcgacagccagaccaacgtgtcccagagcaaggactccgacgtgtacatcaccgataagaccgtgctggacatgcggagcatggacttcaagagcaactccgccgtggcctggtccaacaagtccgatttcgcctgcgccaacgccttcaacaacagcattatccccgaggacacattcttcccaagccccgagagcagcgactccaccgaccacgtgaagcccaaagagacagagaacaccaagcagcccagcaagagctgccacaagcccaaggccatcgtgcacaccgagaaagtgaacatgatgagcctgaccgtgctgggcctgcggatgctgttcgccaaaaccgtggccgtgaacttcctgctgaccgccaagctgttcttcctcctcaccgccagggccaagcgatctggatctggagcaacaaacttctcactactcaaacaagcaggtgacgtggaggagaatcccgggcctactagcatggccttaccagtgaccgccttgctcctgccgctggccttgctgctccacgccgccaggccggacatccagatgacccagagccccagcagcctgtctgccagcgtgggcgacagagtgaccatcacctgtagagccagccaggacgtgaacaccgccgtggcctggtatcagcagaagcctggcaaggcccccaagctgctgatctacagcgccagcttcctggaaagcggcgtgcccagcagattcagcggaagcagaagcggcaccgacttcaccctgaccatcagctccctccagcccgaggacttcgccacctactactgccagcagcactacaccacccctcccaccttcggccagaccaaggtggaaatcaagagaggcggaggcggaagtggaggcggaggatctggcggcggaggctctgaagtgcaactggtggaatctggcggcggactggtgcagcctggcggatctctgagactgagctgtgccgccagcggcttcaacatcaaggacacctacatccactgggtgcgccaggcccctggaaagggactggaatgggtggcccggatctaccccaccaacggctacaccagatacgccgacagcgtgaagggccggttcaccatcagcgccgacaccagcaagaataccgcctacctccagatgaacagcctgcgggccgaggataccgccgtgtactactgctcaagatggggaggcgacggcttctacgctatggacgtgtggggccagggcacccttgtgaccgtgtcatctacgcgtgaggacctgaagaacgtgttcccacctgaggtggccgtgttcgagcctagcgaggccgagatcagccacacccagaaagccaccctcgtgtgcctggctaccggcttctaccccgaccatgtggaactgtcttggtgggtcaacggcaaagaggtgcacagcggcgtgtctaccgacccccagccactgaaagaacagcccgccctgaacgacagccggtactgcctgagcagcagactgagagtgtccgccaccttctggcagaacccccggaaccacttcagatgccaggtgcagttctacggcctgagcgagaacgacgagtggacccaggacagagccaagcccgtgacccagatcgtgtctgccgaagcctggggcagagccgatgatgtgattaagatccactggcaggaaaagaagtccaacaccatcctgggcagccaggaaggcaacaccatgaagaccaacgacacctacatgaagttcagctggctgaccgtgcccgagaagtccctggacaaagaacacagatgcatcgtgcggcacgaaaacaacaagaacggcgtggaccaggaaatcatcttcccacccatcaagaccgatgtgattacaatggaccccaaggacaactgctccaaggacgccaacgataccctgctgctccagctgaccaacaccagcgcctactacatgtacttgttgctgctgctgaagtccgtggtgtacttcgccatcatcacatgctgcctgctgatggctatggtcaagcggaaggacagccggggacgcgccaagagaagcggatctggcgtgaagcagaccctgaatttcgacctgctgaagctggctggcgacgtggaatccaacccaggcccttctagaggccatatgaccgagtacaagcccacggtgcgcctcgccacccgcgacgacgtccccagggccgtacgcaccctcgccgccgcgttcgccgactaccccgccacgcgccacaccgtcgatccggaccgccacatcgagcgggtcaccgagctgcaagaactcttcctcacgcgcgtcgggctcgacatcggcaaggtgtgggtcgcggacgacggcgccgcggtggcggtctggaccacgccggagagcgtcgaagcgggggcggtgttcgccgagatcggcccgcgcatggccgagttgagcggttcccggctggccgcgcagcaacagatggaaggcctcctggcgccgcaccggcccaaggagcccgcgtggttcctggccaccgtcggcgtctcgcccgaccaccagggcaagggtctgggcagcgccgtcgtgctccccggagtggaggcggccgagcgcgccggggtgcccgccttcctggagacctccgcgccccgcaacctccccttctacgagcggctcggcttcaccgtcaccgccgacgtcgaggtgcccgaaggaccgcgcacctggtgcatgacccgcaagcccggtgcctga

SEQ ID NO: 8312 - DNA, 2559 bp, synthetic construct
  source 1..2559: mol_type = other DNA
atggccttaccagtgaccgccttgctcctgccgctggccttgctgctccacgccgccaggccgctcgagatccagaaccctgatcctgccgtgtaccagctgcgggatagcaagagcagcgacaagagcgtgtgtctgttcaccgacttcgacagccagaccaacgtgtcccagagcaaggactccgacgtgtacatcaccgataagaccgtgctggacatgcggagcatggacttcaagagcaactccgccgtggcctggtccaacaagtccgatttcgcctgcgccaacgccttcaacaacagcattatccccgaggacacattcttcccaagccccgagagcagcgactccaccgaccacgtgaagcccaaagagacagagaacaccaagcagcccagcaagagctgccacaagcccaaggccatcgtgcacaccgagaaagtgaacatgatgagcctgaccgtgctgggcctgcggatgctgttcgccaaaaccgtggccgtgaacttcctgctgaccgccaagctgttcttcctcctcaccgccagggccaagcgatctggatctggagcaacaaacttctcactactcaaacaagcaggtgacgtggaggagaatcccgggcctactagcatggccctgcccgtgacagccctgctgctgcctctggctctgctgctgcacgccgccagacccgatgaattcgaggtgcaactggtggaaagcggcggaggcctggtgcaggctggcggatctctgagactgagctgtgccgccagcggcatcaccttcagcatcaacacaatgggctggtacagacaggcccctggcaagcagagggaactggtggccctgatctccagcatcggcgacacctactacgccgacagcgtgaagggccggttcaccatcagccgggacaacgccaagaacaccgtgtacctccagatgaacagcctgaagcccgaggacaccgccgtgtactactgcaagcggttcagaacagccgcccagggcaccgattattggggccagggaacacaagtgaccgtgtcctctacgcgtgaggacctgaagaacgtgttcccacctgaggtggccgtgttcgagcctagcgaggccgagatcagccacacccagaaagccaccctcgtgtgcctggctaccggcttctaccccgaccatgtggaactgtcttggtgggtcaacggcaaagaggtgcacagcggcgtgtctaccgacccccagccactgaaagaacagcccgccctgaacgacagccggtactgcctgagcagcagactgagagtgtccgccaccttctggcagaacccccggaaccacttcagatgccaggtgcagttctacggcctgagcgagaacgacgagtggacccaggacagagccaagcccgtgacccagatcgtgtctgccgaagcctggggcagagccgatgatgtgattaagatccactggcaggaaaagaagtccaacaccatcctgggcagccaggaaggcaacaccatgaagaccaacgacacctacatgaagttcagctggctgaccgtgcccgagaagtccctggacaaagaacacagatgcatcgtgcggcacgaaaacaacaagaacggcgtggaccaggaaatcatcttcccacccatcaagaccgatgtgattacaatggaccccaaggacaactgctccaaggacgccaacgataccctgctgctccagctgaccaacaccagcgcctactacatgtacttgttgctgctgctgaagtccgtggtgtacttcgccatcatcacatgctgcctgctgatggctatggtcaagcggaaggacagccggggacgcgccaagagaagcggatctggcgtgaagcagaccctgaatttcgacctgctgaagctggctggcgacgtggaatccaacccaggcccttctagaggccatatgaccgagtacaagcccacggtgcgcctcgccacccgcgacgacgtccccagggccgtacgcaccctcgccgccgcgttcgccgactaccccgccacgcgccacaccgtcgatccggaccgccacatcgagcgggtcaccgagctgcaagaactcttcctcacgcgcgtcgggctcgacatcggcaaggtgtgggtcgcggacgacggcgccgcggtggcggtctggaccacgccggagagcgtcgaagcgggggcggtgttcgccgagatcggcccgcgcatggccgagttgagcggttcccggctggccgcgcagcaacagatggaaggcctcctggcgccgcaccggcccaaggagcccgcgtggttcctggccaccgtcggcgtctcgcccgaccaccagggcaagggtctgggcagcgccgtcgtgctccccggagtggaggcggccgagcgcgccggggtgcccgccttcctggagacctccgcgccccgcaacctccccttctacgagcggctcggcttcaccgtcaccgccgacgtcgaggtgcccgaaggaccgcgcacctggtgcatgacccgcaagcccggtgcctga

SEQ ID NO: 8313 - DNA, 2559 bp, synthetic construct; identical to SEQ ID NO: 8312
  source 1..2559: mol_type = other DNA

SEQ ID NO: 8314 - DNA, 3354 bp, synthetic construct
  source 1..3354: mol_type = other DNA
atggccttaccagtgaccgccttgctcctgccgctggccttgctgctccacgccgccaggccgctcgagatccagaaccctgatcctgccgtgtaccagctgcgggatagcaagagcagcgacaagagcgtgtgtctgttcaccgacttcgacagccagaccaacgtgtcccagagcaaggactccgacgtgtacatcaccgataagaccgtgctggacatgcggagcatggacttcaagagcaactccgccgtggcctggtccaacaagtccgatttcgcctgcgccaacgccttcaacaacagcattatccccgaggacacattcttcccaagccccgagagcagcgactccaccgaccacgtgaagcccaaagagacagagaacaccaagcagcccagcaagagctgccacaagcccaaggccatcgtgcacaccgagaaagtgaacatgatgagcctgaccgtgctgggcctgcggatgctgttcgccaaaaccgtggccgtgaacttcctgctgaccgccaagctgttcttcctcctcaccgccagggccaagcgatctggatctggagcaacaaacttctcactactcaaacaagcaggtgacgtggaggagaatcccgggcctactagcatggccttaccagtgaccgccttgctcctgccgctggccttgctgctccacgccgccaggccgcaggtccagctcgtcgagtccggcggcggcctcgtccaggccggcgactccgtcaccctctcctgcaccgcctccggccgcaccttctcctcctacgccctcgcctggttccgccagcgccccggcaaggagcgcgagttcgtcgccggcctccgctggggcggccccaccaactacgccgactccgtcaaggaccgcttcaccatctccggcgactccgccaagcacaccatgtacctccagatgaactccctcaagcccgaggacaccgccgtctactactgcggctacaaccccggcggctgggccgtcccctcccagtacgagtacgactcctggggccagggcacccaggtcaccgtctcctccggtaccggcggaggcggatctggcggcggaggtagcggtggcggaggatctgaattcgacatccagatgacacagagccctagcagcctgtctgccagcgtgggagacagagtgaccatcacatgcaaggccagcgaccacatcaacaactggctggcctggtatcagcagaagcctggacaggcccctaagctgctgatctacggcgctaccacactggaaacaggcgtgcccagcagattttctggcagcggctctggcaccgactacaccctgacaatatccagcctccagcctgaggacttcgccacctactactgtcagcagagctggaacaccccttggacattcggccagggcaccaagctggaaatcaagagaggcggaggcggaagtggaggcggaggatctggcggcggaggctctcaagttcagcttcaacagcctggcgctgagctggtcaaacctggcgcttctgtgaagatgagctgcaaagccagcggctacgccttcagcagctactggatcaactggatgaagcagaaacccggccagggactcgaatggatcggccaaatctatcccggcgacggcgacaccaactacaacggcaagttcaagggcagagccacactgaccgccgatacctctagcagcacagcctacatgcagctgagcagcctgaccagcgaagatagcgccgtgtacttctgtgcccggtccatcacaacagtcgtgggctgcgctatggactattggggccagggaacaagcgtgaccgtgtctagtacgcgtgaggacctgaagaacgtgttcccacctgaggtggccgtgttcgagcctagcgaggccgagatcagccacacccagaaagccaccctcgtgtgcctggctaccggcttctaccccgaccatgtggaactgtcttggtgggtcaacggcaaagaggtgcacagcggcgtgtctaccgacccccagccactgaaagaacagcccgccctgaacgacagccggtactgcctgagcagcagactgagagtgtccgccaccttctggcagaacccccggaaccacttcagatgccaggtgcagttctacggcctgagcgagaacgacgagtggacccaggacagagccaagcccgtgacccagatcgtgtctgccgaagcctggggcagagccgatgatgtgattaagatccactggcaggaaaagaagtccaacaccatcctgggcagccaggaaggcaacaccatgaagaccaacgacacctacatgaagttcagctggctgaccgtgcccgagaagtccctggacaaagaacacagatgcatcgtgcggcacgaaaacaacaagaacggcgtggaccaggaaatcatcttcccacccatcaagaccgatgtgattacaatggaccccaaggacaactgctccaaggacgccaacgataccctgctgctccagctgaccaacaccagcgcctactacatgtacttgttgctgctgctgaagtccgtggtgtacttcgccatcatcacatgctgcctgctgatggctatggtcaagcggaaggacagccggggacgcgccaagagaagcggatctggcgtgaagcagaccctgaatttcgacctgctgaagctggctggcgacgtggaatccaacccaggcccttctagaggccatatgaccgagtacaagcccacggtgcgcctcgccacccgcgacgacgtccccagggccgtacgcaccctcgccgccgcgttcgccgactaccccgccacgcgccacaccgtcgatccggaccgccacatcgagcgggtcaccgagctgcaagaactcttcctcacgcgcgtcgggctcgacatcggcaaggtgtgggtcgcggacgacggcgccgcggtggcggtctggaccacgccggagagcgtcgaagcgggggcggtgttcgccgagatcggcccgcgcatggccgagttgagcggttcccggctggccgcgcagcaacagatggaaggcctcctggcgccgcaccggcccaaggagcccgcgtggttcctggccaccgtcggcgtctcgcccgaccaccagggcaagggtctgggcagcgccgtcgtgctccccggagtggaggcggccgagcgcgccggggtgcccgccttcctggagacctccgcgccccgcaacctccccttctacgagcggctcggcttcaccgtcaccgccgacgtcgaggtgcccgaaggaccgcgcacctggtgcatgacccgcaagcccggtgcctga

SEQ ID NO: 8315 - DNA, 3741 bp, synthetic construct
  source 1..3741: mol_type = other DNA
atggccttaccagtgaccgccttgctcctgccgctggccttgctgctccacgccgccaggccgctcgagatccagaaccctgatcctgccgtgtaccagctgcgggatagcaagagcagcgacaagagcgtgtgtctgttcaccgacttcgacagccagaccaacgtgtcccagagcaaggactccgacgtgtacatcaccgataagaccgtgctggacatgcggagcatggacttcaagagcaactccgccgtggcctggtccaacaagtccgatttcgcctgcgccaacgccttcaacaacagcattatccccgaggacacattcttcccaagccccgagagcagcgactccaccgaccacgtgaagcccaaagagacagagaacaccaagcagcccagcaagagctgccacaagcccaaggccatcgtgcacaccgagaaagtgaacatgatgagcctgaccgtgctgggcctgcggatgctgttcgccaaaaccgtggccgtgaacttcctgctgaccgccaagctgttcttcctcctcaccgccagggccaagcgatctggatctggagcaacaaacttctcactactcaaacaagcaggtgacgtggaggagaatcccgggcctactagcatggccttaccagtgaccgccttgctcctgccgctggccttgctgctccacgccgccaggccggaggttcagctgcttgagtctggcggaggactggttcaacctggcggaagcctgagactgtcttgtgccgccagcggcttcacctttagcagctacgccatgagctgggtccgacaggctcctggcaaaggactggaatgggtgtccagcatcagcggcagcggcgactacatctactacgccgatagcgtgaagggcagattcaccatcagccgggacatcagcaagaacaccctgtacctccagatgaacagcctgagagccgaggacaccgccgtgtactactgtgccaaagaaggcaccggcgctaacagcagcctggccgattatagaggccagggcacactggtcaccgtgtctagtggcggaggaagcggcggaggatctcaggtccagctcgtcgagtccggcggcggcctcgtccaggccggcgactccgtcaccctctcctgcaccgcctccggccgcaccttctcctcctacgccctcgcctggttccgccagcgccccggcaaggagcgcgagttcgtcgccggcctccgctggggcggccccaccaactacgccgactccgtcaaggaccgcttcaccatctccggcgactccgccaagcacaccatgtacctccagatgaactccctcaagcccgaggacaccgccgtctactactgcggctacaaccccggcggctgggccgtcccctcccagtacgagtacgactcctggggccagggcacccaggtcaccgtctcctccggtaccggcggaggcggatctggcggcggaggtagcggtggcggaggatctgaattcgacatccagatgacacagagccctagcagcctgtctgccagcgtgggagacagagtgaccatcacatgcaaggccagcgaccacatcaacaactggctggcctggtatcagcagaagcctggacaggcccctaagctgctgatctacggcgctaccacactggaaacaggcgtgcccagcagattttctggcagcggctctggcaccgactacaccctgacaatatccagcctccagcctgaggacttcgccacctactactgtcagcagagctggaacaccccttggacattcggccagggcaccaagctggaaatcaagagaggcggaggcggaagtggaggcggaggatctggcggcggaggctctcaagttcagcttcaacagcctggcgctgagctggtcaaacctggcgcttctgtgaagatgagctgcaaagccagcggctacgccttcagcagctactggatcaactggatgaagcagaaacccggccagggactcgaatggatcggccaaatctatcccggcgacggcgacaccaactacaacggcaagttcaagggcagagccacactgaccgccgatacctctagcagcacagcctacatgcagctgagcagcctgaccagcgaagatagcgccgtgtacttctgtgcccggtccatcacaacagtcgtgggctgcgctatggactattggggccagggaacaagcgtgaccgtgtctagtacgcgtgaggacctgaagaacgtgttcccacctgaggtggccgtgttcgagcctagcgaggccgagatcagccacacccagaaagccaccctcgtgtgcctggctaccggcttctaccccgaccatgtggaactgtcttggtgggtcaacggcaaagaggtgcacagcggcgtgtctaccgacccccagccactgaaagaacagcccgccctgaacgacagccggtactgcctgagcagcagactgagagtgtccgccaccttctggcagaacccccggaaccacttcagatgccaggtgcagttctacggcctgagcgagaacgacgagtggacccaggacagagccaagcccgtgacccagatcgtgtctgccgaagcctggggcagagccgatgatgtgattaagatccactggcaggaaaagaagtccaacaccatcctgggcagccaggaaggcaacaccatgaagaccaacgacacctacatgaagttcagctggctgaccgtgcccgagaagtccctggacaaagaacacagatgcatcgtgcggcacgaaaacaacaagaacggcgtggaccaggaaatcatcttcccacccatcaagaccgatgtgattacaatggaccccaaggacaactgctccaaggacgccaacgataccctgctgctccagctgaccaacaccagcgcctactacatgtacttgttgctgctgctgaagtccgtggtgtacttcgccatcatcacatgctgcctgctgatggctatggtcaagcggaaggacagccggggacgcgccaagagaagcggatctggcgtgaagcagaccctgaatttcgacctgctgaagctggctggcgacgtggaatccaacccaggcccttctagaggccatatgaccgagtacaagcccacggtgcgcctcgccacccgcgacgacgtccccagggccgtacgcaccctcgccgccgcgttcgccgactaccccgccacgcgccacaccgtcgatccggaccgccacatcgagcgggtcaccgagctgcaagaactcttcctcacgcgcgtcgggctcgacatcggcaaggtgtgggtcgcggacgacggcgccgcggtggcggtctggaccacgccggagagcgtcgaagcgggggcggtgttcgccgagatcggcccgcgcatggccgagttgagcggttcccggctggccgcgcagcaacagatggaaggcctcctggcgccgcaccggcccaaggagcccgcgtggttcctggccaccgtcggcgtctcgcccgaccaccagggcaagggtctgggcagcgccgtcgtgctccccggagtggaggcggccgagcgcgccggggtgcccgccttcctggagacctccgcgccccgcaacctccccttctacgagcggctcggcttcaccgtcaccgccgacgtcgaggtgcccgaaggaccgcgcacctggtgcatgacccgcaagcccggtgcctga

SEQ ID NO: 8316 - DNA, 3741 bp, synthetic construct; identical to SEQ ID NO: 8315
  source 1..3741: mol_type = other DNA

SEQ ID NO: 8317 - DNA, 2577 bp, synthetic construct
  source 1..2577: mol_type = other DNA
atggccttaccagtgaccgccttgctcctgccgctggccttgctgctccacgccgccaggccgctcgagatccagaaccctgatcctgccgtgtaccagctgcgggatagcaagagcagcgacaagagcgtgtgtctgttcaccgacttcgacagccagaccaacgtgtcccagagcaaggactccgacgtgtacatcaccgataagaccgtgctggacatgcggagcatggacttcaagagcaactccgccgtggcctggtccaacaagtccgatttcgcctgcgccaacgccttcaacaacagcattatccccgaggacacattcttcccaagccccgagagcagcgactccaccgaccacgtgaagcccaaagagacagagaacaccaagcagcccagcaagagctgccacaagcccaaggccatcgtgcacaccgagaaagtgaacatgatgagcctgaccgtgctgggcctgcggatgctgttcgccaaaaccgtggccgtgaacttcctgctgaccgccaagctgttcttcctcctcaccgccagggccaagcgatctggatctggagcaacaaacttctcactactcaaacaagcaggtgacgtggaggagaatcccgggcctactagcatggccctgcccgtgacagccctgctgctgcctctggctctgctgctgcacgccgccagacccgatgaattcggctctgacctgggcatcaagctgctgttcgccgctgccaagggccaggacgacgaagtgcggattctgctggctgctggggccgacgtgaacgccaaggatttcgagggctacacccccctgcacgtggccgcctatgatggacacctggaaatcgtggaagtgctgctgaaggctggcgctgatgtgaatgccaaagacagccagggccggacccctctgcatgaagccgcctacagcggccatctggaaattgtggaagtgctgctgaaagccggggcagacgtgaacgctcaggacgacgctggcgagacaccagccgatctggctgcagcttggggccacgaagatatcgccgaggtgctgcagaagacgcgtgaggacctgaagaacgtgttcccacctgaggtggccgtgttcgagcctagcgaggccgagatcagccacacccagaaagccaccctcgtgtgcctggctaccggcttctaccccgaccatgtggaactgtcttggtgggtcaacggcaaagaggtgcacagcggcgtgtctaccgacccccagccactgaaagaacagcccgccctgaacgacagccggtactgcctgagcagcagactgagagtgtccgccaccttctggcagaacccccggaaccacttcagatgccaggtgcagttctacggcctgagcgagaacgacgagtggacccaggacagagccaagcccgtgacccagatcgtgtctgccgaagcctggggcagagccgatgatgtgattaagatccactggcaggaaaagaagtccaacaccatcctgggcagccaggaaggcaacaccatgaagaccaacgacacctacatgaagttcagctggctgaccgtgcccgagaagtccctggacaaagaacacagatgcatcgtgcggcacgaaaacaacaagaacggcgtggaccaggaaatcatcttcccacccatcaagaccgatgtgattacaatggaccccaaggacaactgctccaaggacgccaacgataccctgctgctccagctgaccaacaccagcgcctactacatgtacttgttgctgctgctgaagtccgtggtgtacttcgccatcatcacatgctgcctgctgatggctatggtcaagcggaaggacagccggggacgcgccaagagaagcggatctggcgtgaagcagaccctgaatttcgacctgctgaagctggctggcgacgtggaatccaacccaggcccttctagaggccatatgaccgagtacaagcccacggtgcgcctcgccacccgcgacgacgtccccagggccgtacgcaccctcgccgccgcgttcgccgactaccccgccacgcgccacaccgtcgatccggaccgccacatcgagcgggtcaccgagctgcaagaactcttcctcacgcgcgtcgggctcgacatcggcaaggtgtgggtcgcggacgacggcgccgcggtggcggtctggaccacgccggagagcgtcgaagcgggggcggtgttcgccgagatcggcccgcgcatggccgagttgagcggttcccggctggccgcgcagcaacagatggaaggcctcctggcgccgcaccggcccaaggagcccgcgtggttcctggccaccgtcggcgtctcgcccgaccaccagggcaagggtctgggcagcgccgtcgtgctccccggagtggaggcggccgagcgcgccggggtgcccgccttcctggagacctccgcgccccgcaacctccccttctacgagcggctcggcttcaccgtcaccgccgacgtcgaggtgcccgaaggaccgcgcacctggtgcatgacccgcaagcccggtgcctga

SEQ ID NO: 8318 - DNA, 2364 bp, synthetic construct
  source 1..2364: mol_type = other DNA
atggccttaccagtgaccgccttgctcctgccgctggccttgctgctccacgccgccaggccgctcgagatccagaaccctgatcctgccgtgtaccagctgcgggatagcaagagcagcgacaagagcgtgtgtctgttcaccgacttcgacagccagaccaacgtgtcccagagcaaggactccgacgtgtacatcaccgataagaccgtgctggacatgcggagcatggacttcaagagcaactccgccgtggcctggtccaacaagtccgatttcgcctgcgccaacgccttcaacaacagcattatccccgaggacacattcttcccaagccccgagagcagcgactccaccgaccacgtgaagcccaaagagacagagaacaccaagcagcccagcaagagctgccacaagcccaaggccatcgtgcacaccgagaaagtgaacatgatgagcctgaccgtgctgggcctgcggatgctgttcgccaaaaccgtggccgtgaacttcctgctgaccgccaagctgttcttcctcctcaccgccagggccaagcgatctggatctggagcaacaaacttctcactactcaaacaagcaggtgacgtggaggagaatcccgggcctactagcatggactggatttggcgcatccttttccttgtcggcgctgctaccggcgcccattccttcgaaggcagcggattcgaatacgccaaagagatgcggaacgcctactgggagatcgccctgctgcccaatctgaccaaccagcagaagagagcccccatcagaaagctgtacgacgacccctcccagagcagcgagctgctgtctgaggctaaaaaactgaacgatagccagacgcgtgaggacctgaagaacgtgttcccacctgaggtggccgtgttcgagcctagcgaggccgagatcagccacacccagaaagccaccctcgtgtgcctggctaccggcttctaccccgaccatgtggaactgtcttggtgggtcaacggcaaagaggtgcacagcggcgtgtctaccgacccccagccactgaaagaacagcccgccctgaacgacagccggtactgcctgagcagcagactgagagtgtccgccaccttctggcagaacccccggaaccacttcagatgccaggtgcagttctacggcctgagcgagaacgacgagtggacccaggacagagccaagcccgtgacccagatcgtgtctgccgaagcctggggcagagccgatgatgtgattaagatccactggcaggaaaagaagtccaacaccatcctgggcagccaggaaggcaacaccatgaagaccaacgacacctacatgaagttcagctggctgaccgtgcccgagaagtccctggacaaagaacacagatgcatcgtgcggcacgaaaacaacaagaacggcgtggaccaggaaatcatcttcccacccatcaagaccgatgtgattacaatggaccccaaggacaactgctccaaggacgccaacgataccctgctgctccagctgaccaacaccagcgcctactacatgtacttgttgctgctgctgaagtccgtggtgtacttcgccatcatcacatgctgcctgctgatggctatggtcaagcggaaggacagccggggacgcgccaagagaagcggatctggcgtgaagcagaccctgaatttcgacctgctgaagctggctggcgacgtggaatccaacccaggcccttctagaggccatatgaccgagtacaagcccacggtgcgcctcgccacccgcgacgacgtccccagggccgtacgcaccctcgccgccgcgttcgccgactaccccgccacgcgccacaccgtcgatccggaccgccacatcgagcgggtcaccgagctgcaagaactcttcctcacgcgcgtcgggctcgacatcggcaaggtgtgggtcgcggacgacggcgccgcggtggcggtctggaccacgccggagagcgtcgaagcgggggcggtgttcgccgagatcggcccgcgcatggccgagttgagcggttcccggctggccgcgcagcaacagatggaaggcctcctggcgccgcaccggcccaaggagcccgcgtggttcctggccaccgtcggcgtctcgcccgaccaccagggcaagggtctgggcagcgccgtcgtgctccccggagtggaggcggccgagcgcgccggggtgcccgccttcctggagacctccgcgccccgcaacctccccttctacgagcggctcggcttcaccgtcaccgccgacgtcgaggtgcccgaaggaccgcgcacctggtgcatgacccgcaagcccggtgcctga

SEQ ID NO: 8319 - DNA, 3030 bp, synthetic construct
  source 1..3030: mol_type = other DNA
atggccttaccagtgaccgccttgctcctgccgctggccttgctgctccacgccgccaggccgctcgagatccagaaccctgatcctgccgtgtaccagctgcgggatagcaagagcagcgacaagagcgtgtgtctgttcaccgacttcgacagccagaccaacgtgtcccagagcaaggactccgacgtgtacatcaccgataagaccgtgctggacatgcggagcatggacttcaagagcaactccgccgtggcctggtccaacaagtccgatttcgcctgcgccaacgccttcaacaacagcattatccccgaggacacattcttcccaagccccgagagcagcgactccaccgaccacgtgaagcccaaagagacagagaacaccaagcagcccagcaagagctgccacaagcccaaggccatcgtgcacaccgagaaagtgaacatgatgagcctgaccgtgctgggcctgcggatgctgttcgccaaaaccgtggccgtgaacttcctgctgaccgccaagctgttcttcctcctcaccgccagggccaagcgatctggatctggagcaacaaacttctcactactcaaacaagcaggtgacgtggaggagaatcccgggcctactagcatggccctgcccgtgacagccctgctgctgcctctggctctgctgctgcacgccgccagacccgatgaattcgaggtgcaactggtggaaagcggcggaggcctggtgcaggctggcggatctctgagactgagctgtgccgccagcggcatcaccttcagcatcaacacaatgggctggtacagacaggcccctggcaagcagagggaactggtggccctgatctccagcatcggcgacacctactacgccgacagcgtgaagggccggttcaccatcagccgggacaacgccaagaacaccgtgtacctccagatgaacagcctgaagcccgaggacaccgccgtgtactactgcaagcggttcagaacagccgcccagggcaccgattattggggccagggaacacaagtgaccgtgtcctctctcgagggaggaggcggctccgggggaggcggaagtggaggcggaggatctgggtctggaggaagcggatctggaggctcagggtcagggggctcaggcagtggaggctctttcgaagtgcaactggtggaatctgggggcggactggtgcagccaggcggaagtctgaggctgtcttgtgccgcctccggcagcatcttcggcttcaacgacatggcctggtatcggcaggctcccggaaaacagcgcgagctggtggctctgattagcagagtgggcgtgaccagcagcgccgactctgtgaagggcagattcacaatctccagagtgaacgccaaggatacagtgtacctccagatgaactctctgaaacctgaggatacagcagtgtactattgctacatggaccagcggctggacggcagcacactggcctactggggacagggaactcaagtgacagtgtctagcacgcgtgaggacctgaagaacgtgttcccacctgaggtggccgtgttcgagcctagcgaggccgagatcagccacacccagaaagccaccctcgtgtgcctggctaccggcttctaccccgaccatgtggaactgtcttggtgggtcaacggcaaagaggtgcacagcggcgtgtctaccgacccccagccactgaaagaacagcccgccctgaacgacagccggtactgcctgagcagcagactgagagtgtccgccaccttctggcagaacccccggaaccacttcagatgccaggtgcagttctacggcctgagcgagaacgacgagtggacccaggacagagccaagcccgtgacccagatcgtgtctgccgaagcctggggcagagccgatgatgtgattaagatccactggcaggaaaagaagtccaacaccatcctgggcagccaggaaggcaacaccatgaagaccaacgacacctacatgaagttcagctggctgaccgtgcccgagaagtccctggacaaagaacacagatgcatcgtgcggcacgaaaacaacaagaacggcgtggaccaggaaatcatcttcccacccatcaagaccgatgtgattacaatggaccccaaggacaactgctccaaggacgccaacgataccctgctgctccagctgaccaacaccagcgcctactacatgtacttgttgctgctgctgaagtccgtggtgtacttcgccatcatcacatgctgcctgctgatggctatggtcaagcggaaggacagccggggacgcgccaagagaagcggatctggcgtgaagcagaccctgaatttcgacctgctgaagctggctggcgacgtggaatccaacccaggcccttctagaggccatatgaccgagtacaagcccacggtgcgcctcgccacccgcgacgacgtccccagggccgtacgcaccctcgccgccgcgttcgccgactaccccgccacgcgccacaccgtcgatccggaccgccacatcgagcgggtcaccgagctgcaagaactcttcctcacgcgcgtcgggctcgacatcggcaaggtgtgggtcgcggacgacggcgccgcggtggcggtctggaccacgccggagagcgtcgaagcgggggcggtgttcgccgagatcggcccgcgcatggccgagttgagcggttcccggctggccgcgcagcaacagatggaaggcctcctggcgccgcaccggcccaaggagcccgcgtggttcctggccaccgtcggcgtctcgcccgaccaccagggcaagggtctgggcagcgccgtcgtgctccccggagtggaggcggccgagcgcgccggggtgcccgccttcctggagacctccgcgccccgcaacctccccttctacgagcggctcggcttcaccgtcaccgccgacgtcgaggtgcccgaaggaccgcgcacctggtgcatgacccgcaagcccggtgcctga

SEQ ID NO: 8320 - DNA, 2772 bp, synthetic construct
  source 1..2772: mol_type = other DNA
atggccttaccagtgaccgccttgctcctgccgctggccttgctgctccacgccgccaggccgctcgagatccagaaccctgatcctgccgtgtaccagctgcgggatagcaagagcagcgacaagagcgtgtgtctgttcaccgacttcgacagccagaccaacgtgtcccagagcaaggactccgacgtgtacatcaccgataagaccgtgctggacatgcggagcatggacttcaagagcaactccgccgtggcctggtccaacaagtccgatttcgcctgcgccaacgccttcaacaacagcattatccccgaggacacattcttcccaagccccgagagcagcgactccaccgaccacgtgaagcccaaagagacagagaacaccaagcagcccagcaagagctgccacaagcccaaggccatcgtgcacaccgagaaagtgaacatgatgagcctgaccgtgctgggcctgcggatgctgttcgccaaaaccgtggccgtgaacttcctgctgaccgccaagctgttcttcctcctcaccgccagggccaagcgatctggatctggagcaacaaacttctcactactcaaacaagcaggtgacgtggaggagaatcccgggcctactagcatggcccttccagtcactgccttgctgttgcctctggcgctcctgctccacgccgctagaccgggcatgagaaccgaggacctgcctaaggccgtggtgttcctggaaccccagtggtacagagtgctggaaaaggacagcgtgaccctgaagtgccagggcgcctacagccccgaggacaatagcacccagtggttccacaacgagagcctgatctccagccaggccagcagctacttcatcgacgccgccaccgtggacgacagcggcgagtatagatgccagaccaacctgagcaccctgagcgaccccgtgcagctggaagtgcacatcggatggctgctgctgcaggcccccagatgggtgttcaaagaagaggaccccatccacctgagatgccactcttggaagaacaccgccctgcacaaagtgacctacctgcagaacggcaagggcagaaagtacttccaccacaacagcgacttctacatccccaaggccaccctgaaggactccggctcctacttctgcagaggcctcgtgggcagcaagaacgtgtccagcgagacagtgaacatcaccatcacccagggcctggccgtgtctaccatcagcagctttttcccacccggctaccagacgcgtgaggacctgaagaacgtgttcccacctgaggtggccgtgttcgagcctagcgaggccgagatcagccacacccagaaagccaccctcgtgtgcctggctaccggcttctaccccgaccatgtggaactgtcttggtgggtcaacggcaaagaggtgcacagcggcgtgtctaccgacccccagccactgaaagaacagcccgccctgaacgacagccggtactgcctgagcagcagactgagagtgtccgccaccttctggcagaacccccggaaccacttcagatgccaggtgcagttctacggcctgagcgagaacgacgagtggacccaggacagagccaagcccgtgacccagatcgtgtctgccgaagcctggggcagagccgatgatgtgattaagatccactggcaggaaaagaagtccaacaccatcctgggcagccaggaaggcaacaccatgaagaccaacgacacctacatgaagttcagctggctgaccgtgcccgagaagtccctggacaaagaacacagatgcatcgtgcggcacgaaaacaacaagaacggcgtggaccaggaaatcatcttcccacccatcaagaccgatgtgattacaatggaccccaaggacaactgctccaaggacgccaacgataccctgctgctccagctgaccaacaccagcgcctactacatgtacttgttgctgctgctgaagtccgtggtgtacttcgccatcatcacatgctgcctgctgatggctatggtcaagcggaaggacagccggggacgcgccaagagaagcggatctggcgtgaagcagaccctgaatttcgacctgctgaagctggctggcgacgtggaatccaacccaggcccttctagaggccatatgaccgagtacaagcccacggtgcgcctcgccacccgcgacgacgtccccagggccgtacgcaccctcgccgccgcgttcgccgactaccccgccacgcgccacaccgtcgatccggaccgccacatcgagcgggtcaccgagctgcaagaactcttcctcacgcgcgtcgggctcgacatcggcaaggtgtgggtcgcggacgacggcgccgcggtggcggtctggaccacgccggagagcgtcgaagcgggggcggtgttcgccgagatcggcccgcgcatggccgagttgagcggttcccggctggccgcgcagcaacagatggaaggcctcctggcgccgcaccggcccaaggagcccgcgtggttcctggccaccgtcggcgtctcgcccgaccaccagggcaagggtctgggcagcgccgtcgtgctccccggagtggaggcggccgagcgcgccggggtgcccgccttcctggagacctccgcgccccgcaacctccccttctacgagcggctcggcttcaccgtcaccgccgacgtcgaggtgcccgaaggaccgcgcacctggtgcatgacccgcaagcccggtgcctga

SEQ ID NO: 8321 - DNA, 2778 bp, synthetic construct
  source 1..2778: mol_type = other DNA
atggccttaccagtgaccgccttgctcctgccgctggccttgctgctccacgccgccaggccgctcgagatccagaaccctgatcctgccgtgtaccagctgcgggatagcaagagcagcgacaagagcgtgtgtctgttcaccgacttcgacagccagaccaacgtgtcccagagcaaggactccgacgtgtacatcaccgataagaccgtgctggacatgcggagcatggacttcaagagcaactccgccgtggcctggtccaacaagtccgatttcgcctgcgccaacgccttcaacaacagcattatccccgaggacacattcttcccaagccccgagagcagcgactccaccgaccacgtgaagcccaaagagacagagaacaccaagcagcccagcaagagctgccacaagcccaaggccatcgtgcacaccgagaaagtgaacatgatgagcctgaccgtgctgggcctgcggatgctgttcgccaaaaccgtggccgtgaacttcctgctgaccgccaagctgttcttcctcctcaccgccagggccaagcgatctggatctggagcaacaaacttctcactactcaaacaagcaggtgacgtggaggagaatcccgggcctactagcgccaccatggccttaccagtgaccgccttgctcctgccgctggccttgctgctccacgccgccaggccgggcatgcggactgaagacctcccaaaggctgtggtgttcctggagcctcaatggtacagggtgctggagaaggacagtgtgactctgaagtgccagggagcctactcccctgaggacaattccacacagtggtttcacaatgagagcctcatctcaagccaggcctccagctacttcattgacgctgccacagtggacgacagtggagagtacaggtgccagacaaacctctccaccctcagtgacccggtgcagctagaagtccatatcggctggctgttgctccaggcccctcggtgggtgttcaaggaggaagaccctattcacctgaggtgtcacagctggaagaacactgctctgcataaggtcacatatttacagaatggcaaaggcaggaagtattttcatcataattctgacttctacattccaaaagccacactcaaagacagcggctcctacttctgcagggggcttgttgggagtaaaaatgtgtcttcagagactgtgaacatcaccatcactcaaggtttggcagtgtcaaccatctcatcattctttccacctggctaccaaacgcgtgaggacctgaagaacgtgttcccacctgaggtggccgtgttcgagcctagcgaggccgagatcagccacacccagaaagccaccctcgtgtgcctggctaccggcttctaccccgaccatgtggaactgtcttggtgggtcaacggcaaagaggtgcacagcggcgtgtctaccgacccccagccactgaaagaacagcccgccctgaacgacagccggtactgcctgagcagcagactgagagtgtccgccaccttctggcagaacccccggaaccacttcagatgccaggtgcagttctacggcctgagcgagaacgacgagtggacccaggacagagccaagcccgtgacccagatcgtgtctgccgaagcctggggcagagccgatgatgtgattaagatccactggcaggaaaagaagtccaacaccatcctgggcagccaggaaggcaacaccatgaagaccaacgacacctacatgaagttcagctggctgaccgtgcccgagaagtccctggacaaagaacacagatgcatcgtgcggcacgaaaacaacaagaacggcgtggaccaggaaatcatcttcccacccatcaagaccgatgtgattacaatggaccccaaggacaactgctccaaggacgccaacgataccctgctgctccagctgaccaacaccagcgcctactacatgtacttgttgctgctgctgaagtccgtggtgtacttcgccatcatcacatgctgcctgctgatggctatggtcaagcggaaggacagccggggacgcgccaagagaagcggatctggcgtgaagcagaccctgaatttcgacctgctgaagctggctggcgacgtggaatccaacccaggcccttctagaggccatatgaccgagtacaagcccacggtgcgcctcgccacccgcgacgacgtccccagggccgtacgcaccctcgccgccgcgttcgccgactaccccgccacgcgccacaccgtcgatccggaccgccacatcgagcgggtcaccgagctgcaagaactcttcctcacgcgcgtcgggctcgacatcggcaaggtgtgggtcgcggacgacggcgccgcggtggcggtctggaccacgccggagagcgtcgaagcgggggcggtgttcgccgagatcggcccgcgcatggccgagttgagcggttcccggctggccgcgcagcaacagatggaaggcctcctggcgccgcaccggcccaaggagcccgcgtggttcctggccaccgtcggcgtctcgcccgaccaccagggcaagggtctgggcagcgccgtcgtgctccccggagtggaggcggccgagcgcgccggggtgcccgccttcctggagacctccgcgccccgcaacctccccttctacgagcggctcggcttcaccgtcaccgccgacgtcgaggtgcccgaaggaccgcgcacctggtgcatgacccgcaagcccggtgcctga

SEQ ID NO: 8322 - DNA, 2916 bp, synthetic construct
  source 1..2916: mol_type = other DNA
atggccttaccagtgaccgccttgctcctgccgctggccttgctgctccacgccgccaggccgctcgaggaggacctgaagaacgtgttcccacctgaggtggccgtgttcgagcctagcgaggccgagatcagccacacccagaaagccaccctcgtgtgcctggctaccggcttctaccccgaccatgtggaactgtcttggtgggtcaacggcaaagaggtgcacagcggcgtgtgtaccgacccccagccactgaaagaacagcccgccctgaacgacagccggtactgcctgagcagcagactgagagtgtccgccaccttctggcagaacccccggaaccacttcagatgccaggtgcagttctacggcctgagcgagaacgacgagtggacccaggacagagccaagcccgtgacccagatcgtgtctgccgaagcctggggcagagccgatgatgtgattaagatccactggcaggaaaagaagtccaacaccatcctgggcagccaggaaggcaacaccatgaagaccaacgacacctacatgaagttcagctggctgaccgtgcccgagaagtccctggacaaagaacacagatgcatcgtgcggcacgaaaacaacaagaacggcgtggaccaggaaatcatcttcccacccatcaagaccgatgtgattacaatggaccccaaggacaactgctccaaggacgccaacgataccctgctgctccagctgaccaacaccagcgcctactacatgtacttgttgctgctgctgaagtccgtggtgtacttcgccatcatcacatgctgcctgctgcggagaaccgccttctgctgcaacggcgagaagtctagggccaagcgatctggatctggagcaacaaacttctcactactcaaacaagcaggtgacgtggaggagaatcccgggcctactagcatggccttaccagtgaccgccttgctcctgccgctggccttgctgctccacgccgccaggccggacatccagatgacacagactacatcctccctgtctgcctctctgggagacagagtcaccatcagttgcagggcaagtcaggacattagtaaatatttaaattggtatcagcagaaaccagatggaactgttaaactcctgatctaccatacatcaagattacactcaggagtcccatcaaggttcagtggcagtgggtctggaacagattattctctcaccattagcaacctggagcaagaagatattgccacttacttttgccaacagggtaatacgcttccgtacacgttcggaggggggaccaagctggagatcacaggtggcggtggctcgggcggtggtgggtcgggtggcggcggatctgaggtgaaactgcaggagtcaggacctggcctggtggcgccctcacagagcctgtccgtcacatgcactgtctcaggggtctcattacccgactatggtgtaagctggattcgccagcctccacgaaagggtctggagtggctgggagtaatatggggtagtgaaaccacatactataattcagctctcaaatccagactgaccatcatcaaggacaactccaagagccaagttttcttaaaaatgaacagtctgcaaactgatgacacagccatttactactgtgccaaacattattactacggtggtagctatgctatggactactggggtcaaggaacctcagtcaccgtctcctcaacgcgtatccagaaccctgatcctgccgtgtaccagctgcgggatagcaagagcagcgacaagagcgtgtgtctgttcaccgacttcgacagccagaccaacgtgtcccagagcaaggactccgacgtgtacatcaccgataagtgcgtgctggacatgcggagcatggacttcaagagcaactccgccgtggcctggtccaacaagtccgatttcgcctgcgccaacgccttcaacaacagcattatccccgaggacacattcttcccaagccccgagagcagcgactccaccgaccacgtgaagcccaaagagacagagaacaccaagcagcccagcaagagctgccacaagcccaaggccatcgtgcacaccgagaaagtgaacatgatgagcctgaccgtgctgggcctgcggatgctgttcgccaaaaccgtggccgtgaacttcctgctgaccgccaagctgttcttcctccgcgccaagagaagcggatctggcgtgaagcagaccctgaatttcgacctgctgaagctggctggcgacgtggaatccaacccaggcccttctagaggccatatgaccgagtacaagcccacggtgcgcctcgccacccgcgacgacgtccccagggccgtacgcaccctcgccgccgcgttcgccgactaccccgccacgcgccacaccgtcgatccggaccgccacatcgagcgggtcaccgagctgcaagaactcttcctcacgcgcgtcgggctcgacatcggcaaggtgtgggtcgcggacgacggcgccgcggtggcggtctggaccacgccggagagcgtcgaagcgggggcggtgttcgccgagatcggcccgcgcatggccgagttgagcggttcccggctggccgcgcagcaacagatggaaggcctcctggcgccgcaccggcccaaggagcccgcgtggttcctggccaccgtcggcgtctcgcccgaccaccagggcaagggtctgggcagcgccgtcgtgctccccggagtggaggcggccgagcgcgccggggtgcccgccttcctggagacctccgcgccccgcaacctccccttctacgagcggctcggcttcaccgtcaccgccgacgtcgaggtgcccgaaggaccgcgcacctggtgcatgacccgcaagcccggtgcctga

SEQ ID NO: 8323 - DNA, 2919 bp, synthetic construct
  source 1..2919: mol_type = other DNA
atggccttaccagtgaccgccttgctcctgccgctggccttgctgctccacgccgccaggccgctcgaggaggacctgaagaacgtgttcccacctgaggtggccgtgttcgagcctagcgaggccgagatcagccacacccagaaagccaccctcgtgtgcctggctaccggcttctaccccgaccatgtggaactgtcttggtgggtcaacggcaaagaggtgcacagcggcgtgtgtaccgacccccagccactgaaagaacagcccgccctgaacgacagccggtactgcctgagcagcagactgagagtgtccgccaccttctggcagaacccccggaaccacttcagatgccaggtgcagttctacggcctgagcgagaacgacgagtggacccaggacagagccaagcccgtgacccagatcgtgtctgccgaagcctggggcagagccgatgatgtgattaagatccactggcaggaaaagaagtccaacaccatcctgggcagccaggaaggcaacaccatgaagaccaacgacacctacatgaagttcagctggctgaccgtgcccgagaagtccctggacaaagaacacagatgcatcgtgcggcacgaaaacaacaagaacggcgtggaccaggaaatcatcttcccacccatcaagaccgatgtgattacaatggaccccaaggacaactgctccaaggacgccaacgataccctgctgctccagctgaccaacaccagcgcctactacatgtacttgttgctgctgctgaagtccgtggtgtacttcgccatcatcacatgctgcctgctgcggagaaccgccttctgctgcaacggcgagaagtctagggccaagcgatctggatctggagcaacaaacttctcactactcaaacaagcaggtgacgtggaggagaatcccgggcctactagcaccatggccttaccagtgaccgccttgctcctgccgctggccttgctgctccacgccgccaggccggagatcgtgatgacccagagccctgccaccctgtctctgagccctggcgaaagagccaccctgagctgtagagccagccaggacatcagcaagtacctgaactggtatcagcagaagcccggccaggcccccagactgctgatctaccacaccagcagactgcacagcggcatccccgccagattttctggctctggcagcggcaccgactacaccctgacaatcagcagcctccagcccgaggacttcgccgtgtacttctgtcagcaaggcaacaccctgccctacaccttcggccagggcaccaagctggaaatcaagggcggaggcggaagtggaggcggaggatctggcggcggaggctctcaggtgcaactccaggaatctggccctggcctcgtgaagcccagcgagacactgagcctgacctgtaccgtgtccggcgtgtccctgcctgactatggcgtgtcctggatcagacagccccctggcaagggcctggaatggatcggagtgatttggggcagcgaaaccacctactacaacagctccctgaagtccagagtgaccatctccaaggacaactccaagaaccaggtgtccctgaagctgagcagcgtgacagccgccgacaccgccgtgtattactgcgccaagcactactactacggcggcagctacgctatggactactggggccagggaaccctcgtgaccgtgtctagtacgcgtatccagaaccctgatcctgccgtgtaccagctgcgggatagcaagagcagcgacaagagcgtgtgtctgttcaccgacttcgacagccagaccaacgtgtcccagagcaaggactccgacgtgtacatcaccgataagtgcgtgctggacatgcggagcatggacttcaagagcaactccgccgtggcctggtccaacaagtccgatttcgcctgcgccaacgccttcaacaacagcattatccccgaggacacattcttcccaagccccgagagcagcgactccaccgaccacgtgaagcccaaagagacagagaacaccaagcagcccagcaagagctgccacaagcccaaggccatcgtgcacaccgagaaagtgaacatgatgagcctgaccgtgctgggcctgcggatgctgttcgccaaaaccgtggccgtgaacttcctgctgaccgccaagctgttcttcctccgcgccaagagaagcggatctggcgtgaagcagaccctgaatttcgacctgctgaagctggctggcgacgtggaatccaacccaggcccttctagaggccatatgaccgagtacaagcccacggtgcgcctcgccacccgcgacgacgtccccagggccgtacgcaccctcgccgccgcgttcgccgactaccccgccacgcgccacaccgtcgatccggaccgccacatcgagcgggtcaccgagctgcaagaactcttcctcacgcgcgtcgggctcgacatcggcaaggtgtgggtcgcggacgacggcgccgcggtggcggtctggaccacgccggagagcgtcgaagcgggggcggtgttcgccgagatcggcccgcgcatggccgagttgagcggttcccggctggccgcgcagcaacagatggaaggcctcctggcgccgcaccggcccaaggagcccgcgtggttcctggccaccgtcggcgtctcgcccgaccaccagggcaagggtctgggcagcgccgtcgtgctccccggagtggaggcggccgagcgcgccggggtgcccgccttcctggagacctccgcgccccgcaacctccccttctacgagcggctcggcttcaccgtcaccgccgacgtcgaggtgcccgaaggaccgcgcacctggtgcatgacccgcaagcccggtgcctga

SEQ ID NO: 8324 - DNA, 2922 bp, synthetic construct
  source 1..2922: mol_type = other DNA
atggccttaccagtgaccgccttgctcctgccgctggccttgctgctccacgccgccaggccgctcgaggaggacctgaagaacgtgttcccacctgaggtggccgtgttcgagcctagcgaggccgagatcagccacacccagaaagccaccctcgtgtgcctggctaccggcttctaccccgaccatgtggaactgtcttggtgggtcaacggcaaagaggtgcacagcggcgtgtgtaccgacccccagccactgaaagaacagcccgccctgaacgacagccggtactgcctgagcagcagactgagagtgtccgccaccttctggcagaacccccggaaccacttcagatgccaggtgcagttctacggcctgagcgagaacgacgagtggacccaggacagagccaagcccgtgacccagatcgtgtctgccgaagcctggggcagagccgatgatgtgattaagatccactggcaggaaaagaagtccaacaccatcctgggcagccaggaaggcaacaccatgaagaccaacgacacctacatgaagttcagctggctgaccgtgcccgagaagtccctggacaaagaacacagatgcatcgtgcggcacgaaaacaacaagaacggcgtggaccaggaaatcatcttcccacccatcaagaccgatgtgattacaatggaccccaaggacaactgctccaaggacgccaacgataccctgctgctccagctgaccaacaccagcgcctactacatgtacttgttgctgctgctgaagtccgtggtgtacttcgccatcatcacatgctgcctgctgcggagaaccgccttctgctgcaacggcgagaagtctagggccaagcgatctggatctggagcaacaaacttctcactactcaaacaagcaggtgacgtggaggagaatcccgggcctactagcaccatggccttaccagtgaccgccttgctcctgccgctggccttgctgctccacgccgccaggccggacgagatcgtgctgacacagagccccgccaccctgtcactgtctccaggcgaaagagccaccctgagctgtagcgccagcagcagcgtgtcctacatgcactggtatcagcagaagcccggccaggcccccagactgctgatctacgataccagcaagctggcctccggcatccccgccagattttctggcagcggctccggcaccgacttcaccctgacaatcagcagcctggaacccgaggacgtggccgtgtactactgttttcaaggcagcgtgtaccccttcaccttcggccagggcaccaagctggaaatcaagagaggtggcggtggctcgggcggtggtgggtcgggtggcggcggatctcaggtgcagctccaggaatctggccctggcctcgtgaagcctagccagaccctgagcctgacctgtaccgtgtctggcggcagcatcagcacaagcggcatgggcgtgggctggatcagacagcaccctggcaagggcctggaatggatcggccacatttggtgggacgacgacaagcggtacaaccccgccctgaagtccagagtgaccatcagcgtggacaccagcaagaaccagttcagcctgaagctgagcagcgtgacagccgccgataccgccgtgtattattgcgcccggatggaactgtggtcctactacttcgactactggggccagggaaccctcgtgaccgtgtctagtacgcgtatccagaaccctgatcctgccgtgtaccagctgcgggatagcaagagcagcgacaagagcgtgtgtctgttcaccgacttcgacagccagaccaacgtgtcccagagcaaggactccgacgtgtacatcaccgataagtgcgtgctggacatgcggagcatggacttcaagagcaactccgccgtggcctggtccaacaagtccgatttcgcctgcgccaacgccttcaacaacagcattatccccgaggacacattcttcccaagccccgagagcagcgactccaccgaccacgtgaagcccaaagagacagagaacaccaagcagcccagcaagagctgccacaagcccaaggccatcgtgcacaccgagaaagtgaacatgatgagcctgaccgtgctgggcctgcggatgctgttcgccaaaaccgtggccgtgaacttcctgctgaccgccaagctgttcttcctccgcgccaagagaagcggatctggcgtgaagcagaccctgaatttcgacctgctgaagctggctggcgacgtggaatccaacccaggcccttctagaggccatatgaccgagtacaagcccacggtgcgcctcgccacccgcgacgacgtccccagggccgtacgcaccctcgccgccgcgttcgccgactaccccgccacgcgccacaccgtcgatccggaccgccacatcgagcgggtcaccgagctgcaagaactcttcctcacgcgcgtcgggctcgacatcggcaaggtgtgggtcgcggacgacggcgccgcggtggcggtctggaccacgccggagagcgtcgaagcgggggcggtgttcgccgagatcggcccgcgcatggccgagttgagcggttcccggctggccgcgcagcaacagatggaaggcctcctggcgccgcaccggcccaaggagcccgcgtggttcctggccaccgtcggcgtctcgcccgaccaccagggcaagggtctgggcagcgccgtcgtgctccccggagtggaggcggccgagcgcgccggggtgcccgccttcctggagacctccgcgccccgcaacctccccttctacgagcggctcggcttcaccgtcaccgccgacgtcgaggtgcccgaaggaccgcgcacctggtgcatgacccgcaagcccggtgcctga

SEQ ID NO: 8325 - DNA, 2910 bp, synthetic construct
  source 1..2910: mol_type = other DNA
atggccttaccagtgaccgccttgctcctgccgctggccttgctgctccacgccgccaggccgctcgaggaggacctgaagaacgtgttcccacctgaggtggccgtgttcgagcctagcgaggccgagatcagccacacccagaaagccaccctcgtgtgcctggctaccggcttctaccccgaccatgtggaactgtcttggtgggtcaacggcaaagaggtgcacagcggcgtgtgtaccgacccccagccactgaaagaacagcccgccctgaacgacagccggtactgcctgagcagcagactgagagtgtccgccaccttctggcagaacccccggaaccacttcagatgccaggtgcagttctacggcctgagcgagaacgacgagtggacccaggacagagccaagcccgtgacccagatcgtgtctgccgaagcctggggcagagccgatgatgtgattaagatccactggcaggaaaagaagtccaacaccatcctgggcagccaggaaggcaacaccatgaagaccaacgacacctacatgaagttcagctggctgaccgtgcccgagaagtccctggacaaagaacacagatgcatcgtgcggcacgaaaacaacaagaacggcgtggaccaggaaatcatcttcccacccatcaagaccgatgtgattacaatggaccccaaggacaactgctccaaggacgccaacgataccctgctgctccagctgaccaacaccagcgcctactacatgtacttgttgctgctgctgaagtccgtggtgtacttcgccatcatcacatgctgcctgctgcggagaaccgccttctgctgcaacggcgagaagtctagggccaagcgatctggatctggagcaacaaacttctcactactcaaacaagcaggtgacgtggaggagaatcccgggcctactagcatggccttaccagtgaccgccttgctcctgccgctggccttgctgctccacgccgccaggccggacatccagatgacacagagccctagcagcctgtctgccagcgtgggagacagagtgaccatcacctgtagagccagccaggacatcagcaactacctgaactggtatcagcagaagcccggcaaggcccctaagctgctgatctactacaccagcagactgcacagcggcgtgcccagcagattttctggctctggcagcggcaccgacttcaccctgacaatatctagcctccagcctgaggacttcgccacctactattgccagcagggcaacaccctgccttacacatttggacagggcaccaaggtggaaatcaagagaggcggaggcggaagtggaggcggaggatctggcggcggaggctctgaagtgcagctggttgaatcaggtggcggcctggttcaacctggcggatctctgagactgagctgtgccgccagcggcttcaccttcagcgactactttatgagctgggtccgacaggcccctggcaaaggacttgaatgggtcgccaccatcagcaatggcggcacctacacttactaccccgacagcgtgaagggcagattcaccatctccagagacaacagcaagaacaccctgtacctccagatgaactccctgagagccgaggacaccgccgtgtactactgcgccagattcgacggctacatcttcgactattggggccagggcaccctggtcacagtctcttctacgcgtatccagaaccctgatcctgccgtgtaccagctgcgggatagcaagagcagcgacaagagcgtgtgtctgttcaccgacttcgacagccagaccaacgtgtcccagagcaaggactccgacgtgtacatcaccgataagtgcgtgctggacatgcggagcatggacttcaagagcaactccgccgtggcctggtccaacaagtccgatttcgcctgcgccaacgccttcaacaacagcattatccccgaggacacattcttcccaagccccgagagcagcgactccaccgaccacgtgaagcccaaagagacagagaacaccaagcagcccagcaagagctgccacaagcccaaggccatcgtgcacaccgagaaagtgaacatgatgagcctgaccgtgctgggcctgcggatgctgttcgccaaaaccgtggccgtgaacttcctgctgaccgccaagctgttcttcctccgcgccaagagaagcggatctggcgtgaagcagaccctgaatttcgacctgctgaagctggctggcgacgtggaatccaacccaggcccttctagaggccatatgaccgagtacaagcccacggtgcgcctcgccacccgcgacgacgtccccagggccgtacgcaccctcgccgccgcgttcgccgactaccccgccacgcgccacaccgtcgatccggaccgccacatcgagcgggtcaccgagctgcaagaactcttcctcacgcgcgtcgggctcgacatcggcaaggtgtgggtcgcggacgacggcgccgcggtggcggtctggaccacgccggagagcgtcgaagcgggggcggtgttcgccgagatcggcccgcgcatggccgagttgagcggttcccggctggccgcgcagcaacagatggaaggcctcctggcgccgcaccggcccaaggagcccgcgtggttcctggccaccgtcggcgtctcgcccgaccaccagggcaagggtctgggcagcgccgtcgtgctccccggagtggaggcggccgagcgcgccggggtgcccgccttcctggagacctccgcgccccgcaacctccccttctacgagcggctcggcttcaccgtcaccgccgacgtcgaggtgcccgaaggaccgcgcacctggtgcatgacccgcaagcccggtgcctga

SEQ ID NO: 8326 - DNA, 2922 bp, synthetic construct
  source 1..2922: mol_type = other DNA
atggccttaccagtgaccgccttgctcctgccgctggccttgctgctccacgccgccaggccgctcgaggaggacctgaagaacgtgttcccacctgaggtggccgtgttcgagcctagcgaggccgagatcagccacacccagaaagccaccctcgtgtgcctggctaccggcttctaccccgaccatgtggaactgtcttggtgggtcaacggcaaagaggtgcacagcggcgtgtgtaccgacccccagccactgaaagaacagcccgccctgaacgacagccggtactgcctgagcagcagactgagagtgtccgccaccttctggcagaacccccggaaccacttcagatgccaggtgcagttctacggcctgagcgagaacgacgagtggacccaggacagagccaagcccgtgacccagatcgtgtctgccgaagcctggggcagagccgatgatgtgattaagatccactggcaggaaaagaagtccaacaccatcctgggcagccaggaaggcaacaccatgaagaccaacgacacctacatgaagttcagctggctgaccgtgcccgagaagtccctggacaaagaacacagatgcatcgtgcggcacgaaaacaacaagaacggcgtggaccaggaaatcatcttcccacccatcaagaccgatgtgattacaatggaccccaaggacaactgctccaaggacgccaacgataccctgctgctccagctgaccaacaccagcgcctactacatgtacttgttgctgctgctgaagtccgtggtgtacttcgccatcatcacatgctgcctgctgcggagaaccgccttctgctgcaacggcgagaagtctagggccaagcgatctggatctggagcaacaaacttctcactactcaaacaagcaggtgacgtggaggagaatcccgggcctactagcatggccttaccagtgaccgccttgctcctgccgctggccttgctgctccacgccgccaggccggacatccagatgacacagagccctagcagcctgtctgccagcgtgggagacagagtgaccatcacatgcaaggccagcgaccacatcaacaactggctggcctggtatcagcagaagcctggacaggcccctaagctgctgatctacggcgctaccacactggaaacaggcgtgcccagcagattttctggcagcggctctggcaccgactacaccctgacaatatccagcctccagcctgaggacttcgccacctactactgtcagcagagctggaacaccccttggacattcggccagggcaccaagctggaaatcaagagaggcggaggcggaagtggaggcggaggatctggcggcggaggctctcaagttcagcttcaacagcctggcgctgagctggtcaaacctggcgcttctgtgaagatgagctgcaaagccagcggctacgccttcagcagctactggatcaactggatgaagcagaaacccggccagggactcgaatggatcggccaaatctatcccggcgacggcgacaccaactacaacggcaagttcaagggcagagccacactgaccgccgatacctctagcagcacagcctacatgcagctgagcagcctgaccagcgaagatagcgccgtgtacttctgtgcccggtccatcacaacagtcgtgggctgcgctatggactattggggccagggaacaagcgtgaccgtgtctagtacgcgtatccagaaccctgatcctgccgtgtaccagctgcgggatagcaagagcagcgacaagagcgtgtgtctgttcaccgacttcgacagccagaccaacgtgtcccagagcaaggactccgacgtgtacatcaccgataagtgcgtgctggacatgcggagcatggacttcaagagcaactccgccgtggcctggtccaacaagtccgatttcgcctgcgccaacgccttcaacaacagcattatccccgaggacacattcttcccaagccccgagagcagcgactccaccgaccacgtgaagcccaaagagacagagaacaccaagcagcccagcaagagctgccacaagcccaaggccatcgtgcacaccgagaaagtgaacatgatgagcctgaccgtgctgggcctgcggatgctgttcgccaaaaccgtggccgtgaacttcctgctgaccgccaagctgttcttcctccgcgccaagagaagcggatctggcgtgaagcagaccctgaatttcgacctgctgaagctggctggcgacgtggaatccaacccaggcccttctagaggccatatgaccgagtacaagcccacggtgcgcctcgccacccgcgacgacgtccccagggccgtacgcaccctcgccgccgcgttcgccgactaccccgccacgcgccacaccgtcgatccggaccgccacatcgagcgggtcaccgagctgcaagaactcttcctcacgcgcgtcgggctcgacatcggcaaggtgtgggtcgcggacgacggcgccgcggtggcggtctggaccacgccggagagcgtcgaagcgggggcggtgttcgccgagatcggcccgcgcatggccgagttgagcggttcccggctggccgcgcagcaacagatggaaggcctcctggcgccgcaccggcccaaggagcccgcgtggttcctggccaccgtcggcgtctcgcccgaccaccagggcaagggtctgggcagcgccgtcgtgctccccggagtggaggcggccgagcgcgccggggtgcccgccttcctggagacctccgcgccccgcaacctccccttctacgagcggctcggcttcaccgtcaccgccgacgtcgaggtgcccgaaggaccgcgcacctggtgcatgacccgcaagcccggtgcctga

SEQ ID NO: 8327 - DNA, 2928 bp, synthetic construct
  source 1..2928: mol_type = other DNA
atggccttaccagtgaccgccttgctcctgccgctggccttgctgctccacgccgccaggccgctcgaggaggacctgaagaacgtgttcccacctgaggtggccgtgttcgagcctagcgaggccgagatcagccacacccagaaagccaccctcgtgtgcctggctaccggcttctaccccgaccatgtggaactgtcttggtgggtcaacggcaaagaggtgcacagcggcgtgtgtaccgacccccagccactgaaagaacagcccgccctgaacgacagccggtactgcctgagcagcagactgagagtgtccgccaccttctggcagaacccccggaaccacttcagatgccaggtgcagttctacggcctgagcgagaacgacgagtggacccaggacagagccaagcccgtgacccagatcgtgtctgccgaagcctggggcagagccgatgatgtgattaagatccactggcaggaaaagaagtccaacaccatcctgggcagccaggaaggcaacaccatgaagaccaacgacacctacatgaagttcagctggctgaccgtgcccgagaagtccctggacaaagaacacagatgcatcgtgcggcacgaaaacaacaagaacggcgtggaccaggaaatcatcttcccacccatcaagaccgatgtgattacaatggaccccaaggacaactgctccaaggacgccaacgataccctgctgctccagctgaccaacaccagcgcctactacatgtacttgttgctgctgctgaagtccgtggtgtacttcgccatcatcacatgctgcctgctgcggagaaccgccttctgctgcaacggcgagaagtctagggccaagcgatctggatctggagcaacaaacttctcactactcaaacaagcaggtgacgtggaggagaatcccgggcctactagcatggccttaccagtgaccgccttgctcctgccgctggccttgctgctccacgccgccaggccgcagatcgtgctgtctcagtctcctgccatcctgagcgcttccccaggcgagaaagtgaccatgacctgtagagccagcagcagcgtgtcctacatgcactggtatcagcagaagcccggcagcagccctaagccttggatctacgccaccagcaatctggcctctggcgtgccagccagattttctggctctggcagcggcaccagctacagcttcacaatcagcagagtggaagccgaggacgccgccacctactattgtcagcagtggaccttcaatcctcctaccttcggcggaggcacccggctggaaatcaaaagaacagtggctgctggcggaggcggaagtggaggcggaggatctggcggcggaggctctcaggcttatctgcaacagagcggagccgaactcgtcagacctggcgcttctgtgaagatgagctgcaaggccagcggctacaccttcaccagctataatatgcactgggtcaagcagacccctcggcagggactcgaatggatcggcggaatctatcccggcaacggcgacacctcctacaaccagaagttcaagggcaaagccacactgaccgtgggcaagagcagcagcaccgcctatatgcagctcagcagcctgaccagcgaggacagcgccgtgtacttctgcgccagatacgactacaactacgctatggactactggggccagggcaccagcgtgacagttagctctgccagcacgcgtatccagaaccctgatcctgccgtgtaccagctgcgggatagcaagagcagcgacaagagcgtgtgtctgttcaccgacttcgacagccagaccaacgtgtcccagagcaaggactccgacgtgtacatcaccgataagtgcgtgctggacatgcggagcatggacttcaagagcaactccgccgtggcctggtccaacaagtccgatttcgcctgcgccaacgccttcaacaacagcattatccccgaggacacattcttcccaagccccgagagcagcgactccaccgaccacgtgaagcccaaagagacagagaacaccaagcagcccagcaagagctgccacaagcccaaggccatcgtgcacaccgagaaagtgaacatgatgagcctgaccgtgctgggcctgcggatgctgttcgccaaaaccgtggccgtgaacttcctgctgaccgccaagctgttcttcctccgcgccaagagaagcggatctggcgtgaagcagaccctgaatttcgacctgctgaagctggctggcgacgtggaatccaacccaggcccttctagaggccatatgaccgagtacaagcccacggtgcgcctcgccacccgcgacgacgtccccagggccgtacgcaccctcgccgccgcgttcgccgactaccccgccacgcgccacaccgtcgatccggaccgccacatcgagcgggtcaccgagctgcaagaactcttcctcacgcgcgtcgggctcgacatcggcaaggtgtgggtcgcggacgacggcgccgcggtggcggtctggaccacgccggagagcgtcgaagcgggggcggtgttcgccgagatcggcccgcgcatggccgagttgagcggttcccggctggccgcgcagcaacagatggaaggcctcctggcgccgcaccggcccaaggagcccgcgtggttcctggccaccgtcggcgtctcgcccgaccaccagggcaagggtctgggcagcgccgtcgtgctccccggagtggaggcggccgagcgcgccggggtgcccgccttcctggagacctccgcgccccgcaacctccccttctacgagcggctcggcttcaccgtcaccgccgacgtcgaggtgcccgaaggaccgcgcacctggtgcatgacccgcaagcccggtgcctga

SEQ ID NO: 8328 - DNA, 2922 bp, synthetic construct
  source 1..2922: mol_type = other DNA
atggccttaccagtgaccgccttgctcctgccgctggccttgctgctccacgccgccaggccgctcgaggaggacctgaagaacgtgttcccacctgaggtggccgtgttcgagcctagcgaggccgagatcagccacacccagaaagccaccctcgtgtgcctggctaccggcttctaccccgaccatgtggaactgtcttggtgggtcaacggcaaagaggtgcacagcggcgtgtgtaccgacccccagccactgaaagaacagcccgccctgaacgacagccggtactgcctgagcagcagactgagagtgtccgccaccttctggcagaacccccggaaccacttcagatgccaggtgcagttctacggcctgagcgagaacgacgagtggacccaggacagagccaagcccgtgacccagatcgtgtctgccgaagcctggggcagagccgatgatgtgattaagatccactggcaggaaaagaagtccaacaccatcctgggcagccaggaaggcaacaccatgaagaccaacgacacctacatgaagttcagctggctgaccgtgcccgagaagtccctggacaaagaacacagatgcatcgtgcggcacgaaaacaacaagaacggcgtggaccaggaaatcatcttcccacccatcaagaccgatgtgattacaatggaccccaaggacaactgctccaaggacgccaacgataccctgctgctccagctgaccaacaccagcgcctactacatgtacttgttgctgctgctgaagtccgtggtgtacttcgccatcatcacatgctgcctgctgcggagaaccgccttctgctgcaacggcgagaagtctagggccaagcgatctggatctggagcaacaaacttctcactactcaaacaagcaggtgacgtggaggagaatcccgggcctactagcatggccttaccagtgaccgccttgctcctgccgctggccttgctgctccacgccgccaggccggagatcgtgctgacacagagccctgccaccctgtctctgagccctggcgaaagagccaccctgagctgtagagccagccagagcgtgtccagctacctggcctggtatcagcagaagcccggccaggctccccggctgctgatctacgatgccagcaatagagccaccggcatccccgccagattttccggctctggcagcggcaccgacttcaccctgaccatcagctccctggaacccgaggacttcgccgtgtactactgccagcagcggagcaactggcccatcacattcggccagggcacccggctggaaatcaaaggcggaggcggaagtggaggcggaggatctggcggcggaggctctgaggtgcagcttgttgagtctggcggaggactggtgcagcccgatagaagcctgagactgtcttgtgccgccagcggcttcaccttccacgattatgccatgcactgggtccgacaggcccctggcaaaggacttgaatgggtgtccaccatctcttggaacagcggcacaatcggctacgccgactctgtgaagggcagattcaccatcagccgggacaacgccaagaacagcctgtacctccagatgaactccctgagagccgaggacacagccctgtactactgcgccaaggacatccagtacggcaactactactacggcatggacgtgtggggccagggcacaacagtgacagtctcttctacgcgtatccagaaccctgatcctgccgtgtaccagctgcgggatagcaagagcagcgacaagagcgtgtgtctgttcaccgacttcgacagccagaccaacgtgtcccagagcaaggactccgacgtgtacatcaccgataagtgcgtgctggacatgcggagcatggacttcaagagcaactccgccgtggcctggtccaacaagtccgatttcgcctgcgccaacgccttcaacaacagcattatccccgaggacacattcttcccaagccccgagagcagcgactccaccgaccacgtgaagcccaaagagacagagaacaccaagcagcccagcaagagctgccacaagcccaaggccatcgtgcacaccgagaaagtgaacatgatgagcctgaccgtgctgggcctgcggatgctgttcgccaaaaccgtggccgtgaacttcctgctgaccgccaagctgttcttcctccgcgccaagagaagcggatctggcgtgaagcagaccctgaatttcgacctgctgaagctggctggcgacgtggaatccaacccaggcccttctagaggccatatgaccgagtacaagcccacggtgcgcctcgccacccgcgacgacgtccccagggccgtacgcaccctcgccgccgcgttcgccgactaccccgccacgcgccacaccgtcgatccggaccgccacatcgagcgggtcaccgagctgcaagaactcttcctcacgcgcgtcgggctcgacatcggcaaggtgtgggtcgcggacgacggcgccgcggtggcggtctggaccacgccggagagcgtcgaagcgggggcggtgttcgccgagatcggcccgcgcatggccgagttgagcggttcccggctggccgcgcagcaacagatggaaggcctcctggcgccgcaccggcccaaggagcccgcgtggttcctggccaccgtcggcgtctcgcccgaccaccagggcaagggtctgggcagcgccgtcgtgctccccggagtggaggcggccgagcgcgccggggtgcccgccttcctggagacctccgcgccccgcaacctccccttctacgagcggctcggcttcaccgtcaccgccgacgtcgaggtgcccgaaggaccgcgcacctggtgcatgacccgcaagcccggtgcctga

SEQ ID NO: 8329 - DNA, 2916 bp, synthetic construct
  source 1..2916: mol_type = other DNA
atggccttaccagtgaccgccttgctcctgccgctggccttgctgctccacgccgccaggccgctcgaggaggacctgaagaacgtgttcccacctgaggtggccgtgttcgagcctagcgaggccgagatcagccacacccagaaagccaccctcgtgtgcctggctaccggcttctaccccgaccatgtggaactgtcttggtgggtcaacggcaaagaggtgcacagcggcgtgtgtaccgacccccagccactgaaagaacagcccgccctgaacgacagccggtactgcctgagcagcagactgagagtgtccgccaccttctggcagaacccccggaaccacttcagatgccaggtgcagttctacggcctgagcgagaacgacgagtggacccaggacagagccaagcccgtgacccagatcgtgtctgccgaagcctggggcagagccgatgatgtgattaagatccactggcaggaaaagaagtccaacaccatcctgggcagccaggaaggcaacaccatgaagaccaacgacacctacatgaagttcagctggctgaccgtgcccgagaagtccctggacaaagaacacagatgcatcgtgcggcacgaaaacaacaagaacggcgtggaccaggaaatcatcttcccacccatcaagaccgatgtgattacaatggaccccaaggacaactgctccaaggacgccaacgataccctgctgctccagctgaccaacaccagcgcctactacatgtacttgttgctgctgctgaagtccgtggtgtacttcgccatcatcacatgctgcctgctgcggagaaccgccttctgctgcaacggcgagaagtctagggccaagcgatctggatctggagcaacaaacttctcactactcaaacaagcaggtgacgtggaggagaatcccgggcctactagcatggccttaccagtgaccgccttgctcctgccgctggccttgctgctccacgccgccaggccggacatccagatgacccagagccccagcagcctgtctgccagcgtgggcgacagagtgaccatcacctgtagagccagccaggacgtgaacaccgccgtggcctggtatcagcagaagcctggcaaggcccccaagctgctgatctacagcgccagcttcctggaaagcggcgtgcccagcagattcagcggaagcagaagcggcaccgacttcaccctgaccatcagctccctccagcccgaggacttcgccacctactactgccagcagcactacaccacccctcccaccttcggccagaccaaggtggaaatcaagagaggcggaggcggaagtggaggcggaggatctggcggcggaggctctgaagtgcaactggtggaatctggcggcggactggtgcagcctggcggatctctgagactgagctgtgccgccagcggcttcaacatcaaggacacctacatccactgggtgcgccaggcccctggaaagggactggaatgggtggcccggatctaccccaccaacggctacaccagatacgccgacagcgtgaagggccggttcaccatcagcgccgacaccagcaagaataccgcctacctccagatgaacagcctgcgggccgaggataccgccgtgtactactgctcaagatggggaggcgacggcttctacgctatggacgtgtggggccagggcacccttgtgaccgtgtcatctacgcgtatccagaaccctgatcctgccgtgtaccagctgcgggatagcaagagcagcgacaagagcgtgtgtctgttcaccgacttcgacagccagaccaacgtgtcccagagcaaggactccgacgtgtacatcaccgataagtgcgtgctggacatgcggagcatggacttcaagagcaactccgccgtggcctggtccaacaagtccgatttcgcctgcgccaacgccttcaacaacagcattatccccgaggacacattcttcccaagccccgagagcagcgactccaccgaccacgtgaagcccaaagagacagagaacaccaagcagcccagcaagagctgccacaagcccaaggccatcgtgcacaccgagaaagtgaacatgatgagcctgaccgtgctgggcctgcggatgctgttcgccaaaaccgtggccgtgaacttcctgctgaccgccaagctgttcttcctccgcgccaagagaagcggatctggcgtgaagcagaccctgaatttcgacctgctgaagctggctggcgacgtggaatccaacccaggcccttctagaggccatatgaccgagtacaagcccacggtgcgcctcgccacccgcgacgacgtccccagggccgtacgcaccctcgccgccgcgttcgccgactaccccgccacgcgccacaccgtcgatccggaccgccacatcgagcgggtcaccgagctgcaagaactcttcctcacgcgcgtcgggctcgacatcggcaaggtgtgggtcgcggacgacggcgccgcggtggcggtctggaccacgccggagagcgtcgaagcgggggcggtgttcgccgagatcggcccgcgcatggccgagttgagcggttcccggctggccgcgcagcaacagatggaaggcctcctggcgccgcaccggcccaaggagcccgcgtggttcctggccaccgtcggcgtctcgcccgaccaccagggcaagggtctgggcagcgccgtcgtgctccccggagtggaggcggccgagcgcgccggggtgcccgccttcctggagacctccgcgccccgcaacctccccttctacgagcggctcggcttcaccgtcaccgccgacgtcgaggtgcccgaaggaccgcgcacctggtgcatgacccgcaagcccggtgcctga

SEQ ID NO: 8330 - DNA, 2553 bp, synthetic construct
  source 1..2553: mol_type = other DNA
atggccttaccagtgaccgccttgctcctgccgctggccttgctgctccacgccgccaggccgctcgaggaggacctgaagaacgtgttcccacctgaggtggccgtgttcgagcctagcgaggccgagatcagccacacccagaaagccaccctcgtgtgcctggctaccggcttctaccccgaccatgtggaactgtcttggtgggtcaacggcaaagaggtgcacagcggcgtgtgtaccgacccccagccactgaaagaacagcccgccctgaacgacagccggtactgcctgagcagcagactgagagtgtccgccaccttctggcagaacccccggaaccacttcagatgccaggtgcagttctacggcctgagcgagaacgacgagtggacccaggacagagccaagcccgtgacccagatcgtgtctgccgaagcctggggcagagccgatgatgtgattaagatccactggcaggaaaagaagtccaacaccatcctgggcagccaggaaggcaacaccatgaagaccaacgacacctacatgaagttcagctggctgaccgtgcccgagaagtccctggacaaagaacacagatgcatcgtgcggcacgaaaacaacaagaacggcgtggaccaggaaatcatcttcccacccatcaagaccgatgtgattacaatggaccccaaggacaactgctccaaggacgccaacgataccctgctgctccagctgaccaacaccagcgcctactacatgtacttgttgctgctgctgaagtccgtggtgtacttcgccatcatcacatgctgcctgctgcggagaaccgccttctgctgcaacggcgagaagtctagggccaagcgatctggatctggagcaacaaacttctcactactcaaacaagcaggtgacgtggaggagaatcccgggcctactagcatggccctgcccgtgacagccctgctgctgcctctggctctgctgctgcacgccgccagacccgatgaattcgaggtgcaactggtggaaagcggcggaggcctggtgcaggctggcggatctctgagactgagctgtgccgccagcggcatcaccttcagcatcaacacaatgggctggtacagacaggcccctggcaagcagagggaactggtggccctgatctccagcatcggcgacacctactacgccgacagcgtgaagggccggttcaccatcagccgggacaacgccaagaacaccgtgtacctccagatgaacagcctgaagcccgaggacaccgccgtgtactactgcaagcggttcagaacagccgcccagggcaccgattattggggccagggaacacaagtgaccgtgtcctctacgcgtatccagaaccctgatcctgccgtgtaccagctgcgggatagcaagagcagcgacaagagcgtgtgtctgttcaccgacttcgacagccagaccaacgtgtcccagagcaaggactccgacgtgtacatcaccgataagtgcgtgctggacatgcggagcatggacttcaagagcaactccgccgtggcctggtccaacaagtccgatttcgcctgcgccaacgccttcaacaacagcattatccccgaggacacattcttcccaagccccgagagcagcgactccaccgaccacgtgaagcccaaagagacagagaacaccaagcagcccagcaagagctgccacaagcccaaggccatcgtgcacaccgagaaagtgaacatgatgagcctgaccgtgctgggcctgcggatgctgttcgccaaaaccgtggccgtgaacttcctgctgaccgccaagctgttcttcctccgcgccaagagaagcggatctggcgtgaagcagaccctgaatttcgacctgctgaagctggctggcgacgtggaatccaacccaggcccttctagaggccatatgaccgagtacaagcccacggtgcgcctcgccacccgcgacgacgtccccagggccgtacgcaccctcgccgccgcgttcgccgactaccccgccacgcgccacaccgtcgatccggaccgccacatcgagcgggtcaccgagctgcaagaactcttcctcacgcgcgtcgggctcgacatcggcaaggtgtgggtcgcggacgacggcgccgcggtggcggtctggaccacgccggagagcgtcgaagcgggggcggtgttcgccgagatcggcccgcgcatggccgagttgagcggttcccggctggccgcgcagcaacagatggaaggcctcctggcgccgcaccggcccaaggagcccgcgtggttcctggccaccgtcggcgtctcgcccgaccaccagggcaagggtctgggcagcgccgtcgtgctccccggagtggaggcggccgagcgcgccggggtgcccgccttcctggagacctccgcgccccgcaacctccccttctacgagcggctcggcttcaccgtcaccgccgacgtcgaggtgcccgaaggaccgcgcacctggtgcatgacccgcaagcccggtgcctga

SEQ ID NO: 8331 - DNA, 2553 bp, synthetic construct; identical to SEQ ID NO: 8330
  source 1..2553: mol_type = other DNA

SEQ ID NO: 8332 - DNA, 3348 bp, synthetic construct
  source 1..3348: mol_type = other DNA
atggccttaccagtgaccgccttgctcctgccgctggccttgctgctccacgccgccaggccgctcgaggaggacctgaagaacgtgttcccacctgaggtggccgtgttcgagcctagcgaggccgagatcagccacacccagaaagccaccctcgtgtgcctggctaccggcttctaccccgaccatgtggaactgtcttggtgggtcaacggcaaagaggtgcacagcggcgtgtgtaccgacccccagccactgaaagaacagcccgccctgaacgacagccggtactgcctgagcagcagactgagagtgtccgccaccttctggcagaacccccggaaccacttcagatgccaggtgcagttctacggcctgagcgagaacgacgagtggacccaggacagagccaagcccgtgacccagatcgtgtctgccgaagcctggggcagagccgatgatgtgattaagatccactggcaggaaaagaagtccaacaccatcctgggcagccaggaaggcaacaccatgaagaccaacgacacctacatgaagttcagctggctgaccgtgcccgagaagtccctggacaaagaacacagatgcatcgtgcggcacgaaaacaacaagaacggcgtggaccaggaaatcatcttcccacccatcaagaccgatgtgattacaatggaccccaaggacaactgctccaaggacgccaacgataccctgctgctccagctgaccaacaccagcgcctactacatgtacttgttgctgctgctgaagtccgtggtgtacttcgccatcatcacatgctgcctgctgcggagaaccgccttctgctgcaacggcgagaagtctagggccaagcgatctggatctggagcaacaaacttctcactactcaaacaagcaggtgacgtggaggagaatcccgggcctactagcatggccttaccagtgaccgccttgctcctgccgctggccttgctgctccacgccgccaggccgcaggtccagctcgtcgagtccggcggcggcctcgtccaggccggcgactccgtcaccctctcctgcaccgcctccggccgcaccttctcctcctacgccctcgcctggttccgccagcgccccggcaaggagcgcgagttcgtcgccggcctccgctggggcggccccaccaactacgccgactccgtcaaggaccgcttcaccatctccggcgactccgccaagcacaccatgtacctccagatgaactccctcaagcccgaggacaccgccgtctactactgcggctacaaccccggcggctgggccgtcccctcccagtacgagtacgactcctggggccagggcacccaggtcaccgtctcctccggtaccggcggaggcggatctggcggcggaggtagcggtggcggaggatctgaattcgacatccagatgacacagagccctagcagcctgtctgccagcgtgggagacagagtgaccatcacatgcaaggccagcgaccacatcaacaactggctggcctggtatcagcagaagcctggacaggcccctaagctgctgatctacggcgctaccacactggaaacaggcgtgcccagcagattttctggcagcggctctggcaccgactacaccctgacaatatccagcctccagcctgaggacttcgccacctactactgtcagcagagctggaacaccccttggacattcggccagggcaccaagctggaaatcaagagaggcggaggcggaagtggaggcggaggatctggcggcggaggctctcaagttcagcttcaacagcctggcgctgagctggtcaaacctggcgcttctgtgaagatgagctgcaaagccagcggctacgccttcagcagctactggatcaactggatgaagcagaaacccggccagggactcgaatggatcggccaaatctatcccggcgacggcgacaccaactacaacggcaagttcaagggcagagccacactgaccgccgatacctctagcagcacagcctacatgcagctgagcagcctgaccagcgaagatagcgccgtgtacttctgtgcccggtccatcacaacagtcgtgggctgcgctatggactattggggccagggaacaagcgtgaccgtgtctagtacgcgtatccagaaccctgatcctgccgtgtaccagctgcgggatagcaagagcagcgacaagagcgtgtgtctgttcaccgacttcgacagccagaccaacgtgtcccagagcaaggactccgacgtgtacatcaccgataagtgcgtgctggacatgcggagcatggacttcaagagcaactccgccgtggcctggtccaacaagtccgatttcgcctgcgccaacgccttcaacaacagcattatccccgaggacacattcttcccaagccccgagagcagcgactccaccgaccacgtgaagcccaaagagacagagaacaccaagcagcccagcaagagctgccacaagcccaaggccatcgtgcacaccgagaaagtgaacatgatgagcctgaccgtgctgggcctgcggatgctgttcgccaaaaccgtggccgtgaacttcctgctgaccgccaagctgttcttcctccgcgccaagagaagcggatctggcgtgaagcagaccctgaatttcgacctgctgaagctggctggcgacgtggaatccaacccaggcccttctagaggccatatgaccgagtacaagcccacggtgcgcctcgccacccgcgacgacgtccccagggccgtacgcaccctcgccgccgcgttcgccgactaccccgccacgcgccacaccgtcgatccggaccgccacatcgagcgggtcaccgagctgcaagaactcttcctcacgcgcgtcgggctcgacatcggcaaggtgtgggtcgcggacgacggcgccgcggtggcggtctggaccacgccggagagcgtcgaagcgggggcggtgttcgccgagatcggcccgcgcatggccgagttgagcggttcccggctggccgcgcagcaacagatggaaggcctcctggcgccgcaccggcccaaggagcccgcgtggttcctggccaccgtcggcgtctcgcccgaccaccagggcaagggtctgggcagcgccgtcgtgctccccggagtggaggcggccgagcgcgccggggtgcccgccttcctggagacctccgcgccccgcaacctccccttctacgagcggctcggcttcaccgtcaccgccgacgtcgaggtgcccgaaggaccgcgcacctggtgcatgacccgcaagcccggtgcctga

SEQ ID NO: 8333 - DNA, 3735 bp, synthetic construct
  source 1..3735: mol_type = other DNA
atggccttaccagtgaccgccttgctcctgccgctggccttgctgctccacgccgccaggccgctcgaggaggacctgaagaacgtgttcccacctgaggtggccgtgttcgagcctagcgaggccgagatcagccacacccagaaagccaccctcgtgtgcctggctaccggcttctaccccgaccatgtggaactgtcttggtgggtcaacggcaaagaggtgcacagcggcgtgtgtaccgacccccagccactgaaagaacagcccgccctgaacgacagccggtactgcctgagcagcagactgagagtgtccgccaccttctggcagaacccccggaaccacttcagatgccaggtgcagttctacggcctgagcgagaacgacgagtggacccaggacagagccaagcccgtgacccagatcgtgtctgccgaagcctggggcagagccgatgatgtgattaagatccactggcaggaaaagaagtccaacaccatcctgggcagccaggaaggcaacaccatgaagaccaacgacacctacatgaagttcagctggctgaccgtgcccgagaagtccctggacaaagaacacagatgcatcgtgcggcacgaaaacaacaagaacggcgtggaccaggaaatcatcttcccacccatcaagaccgatgtgattacaatggaccccaaggacaactgctccaaggacgccaacgataccctgctgctccagctgaccaacaccagcgcctactacatgtacttgttgctgctgctgaagtccgtggtgtacttcgccatcatcacatgctgcctgctgcggagaaccgccttctgctgcaacggcgagaagtctagggccaagcgatctggatctggagcaacaaacttctcactactcaaacaagcaggtgacgtggaggagaatcccgggcctactagcatggccttaccagtgaccgccttgctcctgccgctggccttgctgctccacgccgccaggccggaggttcagctgcttgagtctggcggaggactggttcaacctggcggaagcctgagactgtcttgtgccgccagcggcttcacctttagcagctacgccatgagctgggtccgacaggctcctggcaaaggactggaatgggtgtccagcatcagcggcagcggcgactacatctactacgccgatagcgtgaagggcagattcaccatcagccgggacatcagcaagaacaccctgtacctccagatgaacagcctgagagccgaggacaccgccgtgtactactgtgccaaagaaggcaccggcgctaacagcagcctggccgattatagaggccagggcacactggtcaccgtgtctagtggcggaggaagcggcggaggatctcaggtccagctcgtcgagtccggcggcggcctcgtccaggccggcgactccgtcaccctctcctgcaccgcctccggccgcaccttctcctcctacgccctcgcctggttccgccagcgccccggcaaggagcgcgagttcgtcgccggcctccgctggggcggccccaccaactacgccgactccgtcaaggaccgcttcaccatctccggcgactccgccaagcacaccatgtacctccagatgaactccctcaagcccgaggacaccgccgtctactactgcggctacaaccccggcggctgggccgtcccctcccagtacgagtacgactcctggggccagggcacccaggtcaccgtctcctccggtaccggcggaggcggatctggcggcggaggtagcggtggcggaggatctgaattcgacatccagatgacacagagccctagcagcctgtctgccagcgtgggagacagagtgaccatcacatgcaaggccagcgaccacatcaacaactggctggcctggtatcagcagaagcctggacaggcccctaagctgctgatctacggcgctaccacactggaaacaggcgtgcccagcagattttctggcagcggctctggcaccgactacaccctgacaatatccagcctccagcctgaggacttcgccacctactactgtcagcagagctggaacaccccttggacattcggccagggcaccaagctggaaatcaagagaggcggaggcggaagtggaggcggaggatctggcggcggaggctctcaagttcagcttcaacagcctggcgctgagctggtcaaacctggcgcttctgtgaagatgagctgcaaagccagcggctacgccttcagcagctactggatcaactggatgaagcagaaacccggccagggactcgaatggatcggccaaatctatcccggcgacggcgacaccaactacaacggcaagttcaagggcagagccacactgaccgccgatacctctagcagcacagcctacatgcagctgagcagcctgaccagcgaagatagcgccgtgtacttctgtgcccggtccatcacaacagtcgtgggctgcgctatggactattggggccagggaacaagcgtgaccgtgtctagtacgcgtatccagaaccctgatcctgccgtgtaccagctgcgggatagcaagagcagcgacaagagcgtgtgtctgttcaccgacttcgacagccagaccaacgtgtcccagagcaaggactccgacgtgtacatcaccgataagtgcgtgctggacatgcggagcatggacttcaagagcaactccgccgtggcctggtccaacaagtccgatttcgcctgcgccaacgccttcaacaacagcattatccccgaggacacattcttcccaagccccgagagcagcgactccaccgaccacgtgaagcccaaagagacagagaacaccaagcagcccagcaagagctgccacaagcccaaggccatcgtgcacaccgagaaagtgaacatgatgagcctgaccgtgctgggcctgcggatgctgttcgccaaaaccgtggccgtgaacttcctgctgaccgccaagctgttcttcctccgcgccaagagaagcggatctggcgtgaagcagaccctgaatttcgacctgctgaagctggctggcgacgtggaatccaacccaggcccttctagaggccatatgaccgagtacaagcccacggtgcgcctcgccacccgcgacgacgtccccagggccgtacgcaccctcgccgccgcgttcgccgactaccccgccacgcgccacaccgtcgatccggaccgccacatcgagcgggtcaccgagctgcaagaactcttcctcacgcgcgtcgggctcgacatcggcaaggtgtgggtcgcggacgacggcgccgcggtggcggtctggaccacgccggagagcgtcgaagcgggggcggtgttcgccgagatcggcccgcgcatggccgagttgagcggttcccggctggccgcgcagcaacagatggaaggcctcctggcgccgcaccggcccaaggagcccgcgtggttcctggccaccgtcggcgtctcgcccgaccaccagggcaagggtctgggcagcgccgtcgtgctccccggagtggaggcggccgagcgcgccggggtgcccgccttcctggagacctccgcgccccgcaacctccccttctacgagcggctcggcttcaccgtcaccgccgacgtcgaggtgcccgaaggaccgcgcacctggtgcatgacccgcaagcccggtgcctga

SEQ ID NO: 8334 - DNA, 3735 bp, synthetic construct; identical to SEQ ID NO: 8333
  source 1..3735: mol_type = other DNA

SEQ ID NO: 8335 - DNA, 2571 bp, synthetic construct
  source 1..2571: mol_type = other DNA
atggccttaccagtgaccgccttgctcctgccgctggccttgctgctccacgccgccaggccgctcgaggaggacctgaagaacgtgttcccacctgaggtggccgtgttcgagcctagcgaggccgagatcagccacacccagaaagccaccctcgtgtgcctggctaccggcttctaccccgaccatgtggaactgtcttggtgggtcaacggcaaagaggtgcacagcggcgtgtgtaccgacccccagccactgaaagaacagcccgccctgaacgacagccggtactgcctgagcagcagactgagagtgtccgccaccttctggcagaacccccggaaccacttcagatgccaggtgcagttctacggcctgagcgagaacgacgagtggacccaggacagagccaagcccgtgacccagatcgtgtctgccgaagcctggggcagagccgatgatgtgattaagatccactggcaggaaaagaagtccaacaccatcctgggcagccaggaaggcaacaccatgaagaccaacgacacctacatgaagttcagctggctgaccgtgcccgagaagtccctggacaaagaacacagatgcatcgtgcggcacgaaaacaacaagaacggcgtggaccaggaaatcatcttcccacccatcaagaccgatgtgattacaatggaccccaaggacaactgctccaaggacgccaacgataccctgctgctccagctgaccaacaccagcgcctactacatgtacttgttgctgctgctgaagtccgtggtgtacttcgccatcatcacatgctgcctgctgcggagaaccgccttctgctgcaacggcgagaagtctagggccaagcgatctggatctggagcaacaaacttctcactactcaaacaagcaggtgacgtggaggagaatcccgggcctactagcatggccctgcccgtgacagccctgctgctgcctctggctctgctgctgcacgccgccagacccgatgaattcggctctgacctgggcatcaagctgctgttcgccgctgccaagggccaggacgacgaagtgcggattctgctggctgctggggccgacgtgaacgccaaggatttcgagggctacacccccctgcacgtggccgcctatgatggacacctggaaatcgtggaagtgctgctgaaggctggcgctgatgtgaatgccaaagacagccagggccggacccctctgcatgaagccgcctacagcggccatctggaaattgtggaagtgctgctgaaagccggggcagacgtgaacgctcaggacgacgctggcgagacaccagccgatctggctgcagcttggggccacgaagatatcgccgaggtgctgcagaagacgcgtatccagaaccctgatcctgccgtgtaccagctgcgggatagcaagagcagcgacaagagcgtgtgtctgttcaccgacttcgacagccagaccaacgtgtcccagagcaaggactccgacgtgtacatcaccgataagtgcgtgctggacatgcggagcatggacttcaagagcaactccgccgtggcctggtccaacaagtccgatttcgcctgcgccaacgccttcaacaacagcattatccccgaggacacattcttcccaagccccgagagcagcgactccaccgaccacgtgaagcccaaagagacagagaacaccaagcagcccagcaagagctgccacaagcccaaggccatcgtgcacaccgagaaagtgaacatgatgagcctgaccgtgctgggcctgcggatgctgttcgccaaaaccgtggccgtgaacttcctgctgaccgccaagctgttcttcctccgcgccaagagaagcggatctggcgtgaagcagaccctgaatttcgacctgctgaagctggctggcgacgtggaatccaacccaggcccttctagaggccatatgaccgagtacaagcccacggtgcgcctcgccacccgcgacgacgtccccagggccgtacgcaccctcgccgccgcgttcgccgactaccccgccacgcgccacaccgtcgatccggaccgccacatcgagcgggtcaccgagctgcaagaactcttcctcacgcgcgtcgggctcgacatcggcaaggtgtgggtcgcggacgacggcgccgcggtggcggtctggaccacgccggagagcgtcgaagcgggggcggtgttcgccgagatcggcccgcgcatggccgagttgagcggttcccggctggccgcgcagcaacagatggaaggcctcctggcgccgcaccggcccaaggagcccgcgtggttcctggccaccgtcggcgtctcgcccgaccaccagggcaagggtctgggcagcgccgtcgtgctccccggagtggaggcggccgagcgcgccggggtgcccgccttcctggagacctccgcgccccgcaacctccccttctacgagcggctcggcttcaccgtcaccgccgacgtcgaggtgcccgaaggaccgcgcacctggtgcatgacccgcaagcccggtgcctga

SEQ ID NO: 8336 - DNA, 2358 bp, synthetic construct
  source 1..2358: mol_type = other DNA
atggccttaccagtgaccgccttgctcctgccgctggccttgctgctccacgccgccaggccgctcgaggaggacctgaagaacgtgttcccacctgaggtggccgtgttcgagcctagcgaggccgagatcagccacacccagaaagccaccctcgtgtgcctggctaccggcttctaccccgaccatgtggaactgtcttggtgggtcaacggcaaagaggtgcacagcggcgtgtgtaccgacccccagccactgaaagaacagcccgccctgaacgacagccggtactgcctgagcagcagactgagagtgtccgccaccttctggcagaacccccggaaccacttcagatgccaggtgcagttctacggcctgagcgagaacgacgagtggacccaggacagagccaagcccgtgacccagatcgtgtctgccgaagcctggggcagagccgatgatgtgattaagatccactggcaggaaaagaagtccaacaccatcctgggcagccaggaaggcaacaccatgaagaccaacgacacctacatgaagttcagctggctgaccgtgcccgagaagtccctggacaaagaacacagatgcatcgtgcggcacgaaaacaacaagaacggcgtggaccaggaaatcatcttcccacccatcaagaccgatgtgattacaatggaccccaaggacaactgctccaaggacgccaacgataccctgctgctccagctgaccaacaccagcgcctactacatgtacttgttgctgctgctgaagtccgtggtgtacttcgccatcatcacatgctgcctgctgcggagaaccgccttctgctgcaacggcgagaagtctagggccaagcgatctggatctggagcaacaaacttctcactactcaaacaagcaggtgacgtggaggagaatcccgggcctactagcatggactggatttggcgcatccttttccttgtcggcgctgctaccggcgcccattccttcgaaggcagcggattcgaatacgccaaagagatgcggaacgcctactgggagatcgccctgctgcccaatctgaccaaccagcagaagagagcccccatcagaaagctgtacgacgacccctcccagagcagcgagctgctgtctgaggctaaaaaactgaacgatagccagacgcgtatccagaaccctgatcctgccgtgtaccagctgcgggatagcaagagcagcgacaagagcgtgtgtctgttcaccgacttcgacagccagaccaacgtgtcccagagcaaggactccgacgtgtacatcaccgataagtgcgtgctggacatgcggagcatggacttcaagagcaactccgccgtggcctggtccaacaagtccgatttcgcctgcgccaacgccttcaacaacagcattatccccgaggacacattcttcccaagccccgagagcagcgactccaccgaccacgtgaagcccaaagagacagagaacaccaagcagcccagcaagagctgccacaagcccaaggccatcgtgcacaccgagaaagtgaacatgatgagcctgaccgtgctgggcctgcggatgctgttcgccaaaaccgtggccgtgaacttcctgctgaccgccaagctgttcttcctccgcgccaagagaagcggatctggcgtgaagcagaccctgaatttcgacctgctgaagctggctggcgacgtggaatccaacccaggcccttctagaggccatatgaccgagtacaagcccacggtgcgcctcgccacccgcgacgacgtccccagggccgtacgcaccctcgccgccgcgttcgccgactaccccgccacgcgccacaccgtcgatccggaccgccacatcgagcgggtcaccgagctgcaagaactcttcctcacgcgcgtcgggctcgacatcggcaaggtgtgggtcgcggacgacggcgccgcggtggcggtctggaccacgccggagagcgtcgaagcgggggcggtgttcgccgagatcggcccgcgcatggccgagttgagcggttcccggctggccgcgcagcaacagatggaaggcctcctggcgccgcaccggcccaaggagcccgcgtggttcctggccaccgtcggcgtctcgcccgaccaccagggcaagggtctgggcagcgccgtcgtgctccccggagtggaggcggccgagcgcgccggggtgcccgccttcctggagacctccgcgccccgcaacctccccttctacgagcggctcggcttcaccgtcaccgccgacgtcgaggtgcccgaaggaccgcgcacctggtgcatgacccgcaagcccggtgcctga

SEQ ID NO: 8337 - DNA, 3024 bp, synthetic construct
  source 1..3024: mol_type = other DNA
atggccttaccagtgaccgccttgctcctgccgctggccttgctgctccacgccgccaggccgctcgaggaggacctgaagaacgtgttcccacctgaggtggccgtgttcgagcctagcgaggccgagatcagccacacccagaaagccaccctcgtgtgcctggctaccggcttctaccccgaccatgtggaactgtcttggtgggtcaacggcaaagaggtgcacagcggcgtgtgtaccgacccccagccactgaaagaacagcccgccctgaacgacagccggtactgcctgagcagcagactgagagtgtccgccaccttctggcagaacccccggaaccacttcagatgccaggtgcagttctacggcctgagcgagaacgacgagtggacccaggacagagccaagcccgtgacccagatcgtgtctgccgaagcctggggcagagccgatgatgtgattaagatccactggcaggaaaagaagtccaacaccatcctgggcagccaggaaggcaacaccatgaagaccaacgacacctacatgaagttcagctggctgaccgtgcccgagaagtccctggacaaagaacacagatgcatcgtgcggcacgaaaacaacaagaacggcgtggaccaggaaatcatcttcccacccatcaagaccgatgtgattacaatggaccccaaggacaactgctccaaggacgccaacgataccctgctgctccagctgaccaacaccagcgcctactacatgtacttgttgctgctgctgaagtccgtggtgtacttcgccatcatcacatgctgcctgctgcggagaaccgccttctgctgcaacggcgagaagtctagggccaagcgatctggatctggagcaacaaacttctcactactcaaacaagcaggtgacgtggaggagaatcccgggcctactagcatggccctgcccgtgacagccctgctgctgcctctggctctgctgctgcacgccgccagacccgatgaattcgaggtgcaactggtggaaagcggcggaggcctggtgcaggctggcggatctctgagactgagctgtgccgccagcggcatcaccttcagcatcaacacaatgggctggtacagacaggcccctggcaagcagagggaactggtggccctgatctccagcatcggcgacacctactacgccgacagcgtgaagggccggttcaccatcagccgggacaacgccaagaacaccgtgtacctccagatgaacagcctgaagcccgaggacaccgccgtgtactactgcaagcggttcagaacagccgcccagggcaccgattattggggccagggaacacaagtgaccgtgtcctctctcgagggaggaggcggctccgggggaggcggaagtggaggcggaggatctgggtctggaggaagcggatctggaggctcagggtcagggggctcaggcagtggaggctctttcgaagtgcaactggtggaatctgggggcggactggtgcagccaggcggaagtctgaggctgtcttgtgccgcctccggcagcatcttcggcttcaacgacatggcctggtatcggcaggctcccggaaaacagcgcgagctggtggctctgattagcagagtgggcgtgaccagcagcgccgactctgtgaagggcagattcacaatctccagagtgaacgccaaggatacagtgtacctccagatgaactctctgaaacctgaggatacagcagtgtactattgctacatggaccagcggctggacggcagcacactggcctactggggacagggaactcaagtgacagtgtctagcacgcgtatccagaaccctgatcctgccgtgtaccagctgcgggatagcaagagcagcgacaagagcgtgtgtctgttcaccgacttcgacagccagaccaacgtgtcccagagcaaggactccgacgtgtacatcaccgataagtgcgtgctggacatgcggagcatggacttcaagagcaactccgccgtggcctggtccaacaagtccgatttcgcctgcgccaacgccttcaacaacagcattatccccgaggacacattcttcccaagccccgagagcagcgactccaccgaccacgtgaagcccaaagagacagagaacaccaagcagcccagcaagagctgccacaagcccaaggccatcgtgcacaccgagaaagtgaacatgatgagcctgaccgtgctgggcctgcggatgctgttcgccaaaaccgtggccgtgaacttcctgctgaccgccaagctgttcttcctccgcgccaagagaagcggatctggcgtgaagcagaccctgaatttcgacctgctgaagctggctggcgacgtggaatccaacccaggcccttctagaggccatatgaccgagtacaagcccacggtgcgcctcgccacccgcgacgacgtccccagggccgtacgcaccctcgccgccgcgttcgccgactaccccgccacgcgccacaccgtcgatccggaccgccacatcgagcgggtcaccgagctgcaagaactcttcctcacgcgcgtcgggctcgacatcggcaaggtgtgggtcgcggacgacggcgccgcggtggcggtctggaccacgccggagagcgtcgaagcgggggcggtgttcgccgagatcggcccgcgcatggccgagttgagcggttcccggctggccgcgcagcaacagatggaaggcctcctggcgccgcaccggcccaaggagcccgcgtggttcctggccaccgtcggcgtctcgcccgaccaccagggcaagggtctgggcagcgccgtcgtgctccccggagtggaggcggccgagcgcgccggggtgcccgccttcctggagacctccgcgccccgcaacctccccttctacgagcggctcggcttcaccgtcaccgccgacgtcgaggtgcccgaaggaccgcgcacctggtgcatgacccgcaagcccggtgcctga

SEQ ID NO: 8338 - DNA, 2766 bp, synthetic construct
  source 1..2766: mol_type = other DNA
atggccttaccagtgaccgccttgctcctgccgctggccttgctgctccacgccgccaggccgctcgaggaggacctgaagaacgtgttcccacctgaggtggccgtgttcgagcctagcgaggccgagatcagccacacccagaaagccaccctcgtgtgcctggctaccggcttctaccccgaccatgtggaactgtcttggtgggtcaacggcaaagaggtgcacagcggcgtgtgtaccgacccccagccactgaaagaacagcccgccctgaacgacagccggtactgcctgagcagcagactgagagtgtccgccaccttctggcagaacccccggaaccacttcagatgccaggtgcagttctacggcctgagcgagaacgacgagtggacccaggacagagccaagcccgtgacccagatcgtgtctgccgaagcctggggcagagccgatgatgtgattaagatccactggcaggaaaagaagtccaacaccatcctgggcagccaggaaggcaacaccatgaagaccaacgacacctacatgaagttcagctggctgaccgtgcccgagaagtccctggacaaagaacacagatgcatcgtgcggcacgaaaacaacaagaacggcgtggaccaggaaatcatcttcccacccatcaagaccgatgtgattacaatggaccccaaggacaactgctccaaggacgccaacgataccctgctgctccagctgaccaacaccagcgcctactacatgtacttgttgctgctgctgaagtccgtggtgtacttcgccatcatcacatgctgcctgctgcggagaaccgccttctgctgcaacggcgagaagtctagggccaagcgatctggatctggagcaacaaacttctcactactcaaacaagcaggtgacgtggaggagaatcccgggcctactagcatggcccttccagtcactgccttgctgttgcctctggcgctcctgctccacgccgctagaccgggcatgagaaccgaggacctgcctaaggccgtggtgttcctggaaccccagtggtacagagtgctggaaaaggacagcgtgaccctgaagtgccagggcgcctacagccccgaggacaatagcacccagtggttccacaacgagagcctgatctccagccaggccagcagctacttcatcgacgccgccaccgtggacgacagcggcgagtatagatgccagaccaacctgagcaccctgagcgaccccgtgcagctggaagtgcacatcggatggctgctgctgcaggcccccagatgggtgttcaaagaagaggaccccatccacctgagatgccactcttggaagaacaccgccctgcacaaagtgacctacctgcagaacggcaagggcagaaagtacttccaccacaacagcgacttctacatccccaaggccaccctgaaggactccggctcctacttctgcagaggcctcgtgggcagcaagaacgtgtccagcgagacagtgaacatcaccatcacccagggcctggccgtgtctaccatcagcagctttttcccacccggctaccagacgcgtatccagaaccctgatcctgccgtgtaccagctgcgggatagcaagagcagcgacaagagcgtgtgtctgttcaccgacttcgacagccagaccaacgtgtcccagagcaaggactccgacgtgtacatcaccgataagtgcgtgctggacatgcggagcatggacttcaagagcaactccgccgtggcctggtccaacaagtccgatttcgcctgcgccaacgccttcaacaacagcattatccccgaggacacattcttcccaagccccgagagcagcgactccaccgaccacgtgaagcccaaagagacagagaacaccaagcagcccagcaagagctgccacaagcccaaggccatcgtgcacaccgagaaagtgaacatgatgagcctgaccgtgctgggcctgcggatgctgttcgccaaaaccgtggccgtgaacttcctgctgaccgccaagctgttcttcctccgcgccaagagaagcggatctggcgtgaagcagaccctgaatttcgacctgctgaagctggctggcgacgtggaatccaacccaggcccttctagaggccatatgaccgagtacaagcccacggtgcgcctcgccacccgcgacgacgtccccagggccgtacgcaccctcgccgccgcgttcgccgactaccccgccacgcgccacaccgtcgatccggaccgccacatcgagcgggtcaccgagctgcaagaactcttcctcacgcgcgtcgggctcgacatcggcaaggtgtgggtcgcggacgacggcgccgcggtggcggtctggaccacgccggagagcgtcgaagcgggggcggtgttcgccgagatcggcccgcgcatggccgagttgagcggttcccggctggccgcgcagcaacagatggaaggcctcctggcgccgcaccggcccaaggagcccgcgtggttcctggccaccgtcggcgtctcgcccgaccaccagggcaagggtctgggcagcgccgtcgtgctccccggagtggaggcggccgagcgcgccggggtgcccgccttcctggagacctccgcgccccgcaacctccccttctacgagcggctcggcttcaccgtcaccgccgacgtcgaggtgcccgaaggaccgcgcacctggtgcatgacccgcaagcccggtgcctga

SEQ ID NO: 8339 - DNA, 2772 bp, synthetic construct
  source 1..2772: mol_type = other DNA
atggccttaccagtgaccgccttgctcctgccgctggccttgctgctccacgccgccaggccgctcgaggaggacctgaagaacgtgttcccacctgaggtggccgtgttcgagcctagcgaggccgagatcagccacacccagaaagccaccctcgtgtgcctggctaccggcttctaccccgaccatgtggaactgtcttggtgggtcaacggcaaagaggtgcacagcggcgtgtgtaccgacccccagccactgaaagaacagcccgccctgaacgacagccggtactgcctgagcagcagactgagagtgtccgccaccttctggcagaacccccggaaccacttcagatgccaggtgcagttctacggcctgagcgagaacgacgagtggacccaggacagagccaagcccgtgacccagatcgtgtctgccgaagcctggggcagagccgatgatgtgattaagatccactggcaggaaaagaagtccaacaccatcctgggcagccaggaaggcaacaccatgaagaccaacgacacctacatgaagttcagctggctgaccgtgcccgagaagtccctggacaaagaacacagatgcatcgtgcggcacgaaaacaacaagaacggcgtggaccaggaaatcatcttcccacccatcaagaccgatgtgattacaatggaccccaaggacaactgctccaaggacgccaacgataccctgctgctccagctgaccaacaccagcgcctactacatgtacttgttgctgctgctgaagtccgtggtgtacttcgccatcatcacatgctgcctgctgcggagaaccgccttctgctgcaacggcgagaagtctagggccaagcgatctggatctggagcaacaaacttctcactactcaaacaagcaggtgacgtggaggagaatcccgggcctactagcgccaccatggccttaccagtgaccgccttgctcctgccgctggccttgctgctccacgccgccaggccgggcatgcggactgaagacctcccaaaggctgtggtgttcctggagcctcaatggtacagggtgctggagaaggacagtgtgactctgaagtgccagggagcctactcccctgaggacaattccacacagtggtttcacaatgagagcctcatctcaagccaggcctccagctacttcattgacgctgccacagtggacgacagtggagagtacaggtgccagacaaacctctccaccctcagtgacccggtgcagctagaagtccatatcggctggctgttgctccaggcccctcggtgggtgttcaaggaggaagaccctattcacctgaggtgtcacagctggaagaacactgctctgcataaggtcacatatttacagaatggcaaaggcaggaagtattttcatcataattctgacttctacattccaaaagccacactcaaagacagcggctcctacttctgcagggggcttgttgggagtaaaaatgtgtcttcagagactgtgaacatcaccatcactcaaggtttggcagtgtcaaccatctcatcattctttccacctggctaccaaacgcgtatccagaaccctgatcctgccgtgtaccagctgcgggatagcaagagcagcgacaagagcgtgtgtctgttcaccgacttcgacagccagaccaacgtgtcccagagcaaggactccgacgtgtacatcaccgataagtgcgtgctggacatgcggagcatggacttcaagagcaactccgccgtggcctggtccaacaagtccgatttcgcctgcgccaacgccttcaacaacagcattatccccgaggacacattcttcccaagccccgagagcagcgactccaccgaccacgtgaagcccaaagagacagagaacaccaagcagcccagcaagagctgccacaagcccaaggccatcgtgcacaccgagaaagtgaacatgatgagcctgaccgtgctgggcctgcggatgctgttcgccaaaaccgtggccgtgaacttcctgctgaccgccaagctgttcttcctccgcgccaagagaagcggatctggcgtgaagcagaccctgaatttcgacctgctgaagctggctggcgacgtggaatccaacccaggcccttctagaggccatatgaccgagtacaagcccacggtgcgcctcgccacccgcgacgacgtccccagggccgtacgcaccctcgccgccgcgttcgccgactaccccgccacgcgccacaccgtcgatccggaccgccacatcgagcgggtcaccgagctgcaagaactcttcctcacgcgcgtcgggctcgacatcggcaaggtgtgggtcgcggacgacggcgccgcggtggcggtctggaccacgccggagagcgtcgaagcgggggcggtgttcgccgagatcggcccgcgcatggccgagttgagcggttcccggctggccgcgcagcaacagatggaaggcctcctggcgccgcaccggcccaaggagcccgcgtggttcctggccaccgtcggcgtctcgcccgaccaccagggcaagggtctgggcagcgccgtcgtgctccccggagtggaggcggccgagcgcgccggggtgcccgccttcctggagacctccgcgccccgcaacctccccttctacgagcggctcggcttcaccgtcaccgccgacgtcgaggtgcccgaaggaccgcgcacctggtgcatgacccgcaagcccggtgcctga

SEQ ID NO: 8340 - DNA, 2916 bp, synthetic construct
  source 1..2916: mol_type = other DNA
atggccttaccagtgaccgccttgctcctgccgctggccttgctgctccacgccgccaggccgctcgagatccagaaccctgatcctgccgtgtaccagctgcgggatagcaagagcagcgacaagagcgtgtgtctgttcaccgacttcgacagccagaccaacgtgtcccagagcaaggactccgacgtgtacatcaccgataagtgcgtgctggacatgcggagcatggacttcaagagcaactccgccgtggcctggtccaacaagtccgatttcgcctgcgccaacgccttcaacaacagcattatccccgaggacacattcttcccaagccccgagagcagcgactccaccgaccacgtgaagcccaaagagacagagaacaccaagcagcccagcaagagctgccacaagcccaaggccatcgtgcacaccgagaaagtgaacatgatgagcctgaccgtgctgggcctgcggatgctgttcgccaaaaccgtggccgtgaacttcctgctgaccgccaagctgttcttcctcagggccaagcgatctggatctggagcaacaaacttctcactactcaaacaagcaggtgacgtggaggagaatcccgggcctactagcatggccttaccagtgaccgccttgctcctgccgctggccttgctgctccacgccgccaggccggacatccagatgacacagactacatcctccctgtctgcctctctgggagacagagtcaccatcagttgcagggcaagtcaggacattagtaaatatttaaattggtatcagcagaaaccagatggaactgttaaactcctgatctaccatacatcaagattacactcaggagtcccatcaaggttcagtggcagtgggtctggaacagattattctctcaccattagcaacctggagcaagaagatattgccacttacttttgccaacagggtaatacgcttccgtacacgttcggaggggggaccaagctggagatcacaggtggcggtggctcgggcggtggtgggtcgggtggcggcggatctgaggtgaaactgcaggagtcaggacctggcctggtggcgccctcacagagcctgtccgtcacatgcactgtctcaggggtctcattacccgactatggtgtaagctggattcgccagcctccacgaaagggtctggagtggctgggagtaatatggggtagtgaaaccacatactataattcagctctcaaatccagactgaccatcatcaaggacaactccaagagccaagttttcttaaaaatgaacagtctgcaaactgatgacacagccatttactactgtgccaaacattattactacggtggtagctatgctatggactactggggtcaaggaacctcagtcaccgtctcctcaacgcgtgaggacctgaagaacgtgttcccacctgaggtggccgtgttcgagcctagcgaggccgagatcagccacacccagaaagccaccctcgtgtgcctggctaccggcttctaccccgaccatgtggaactgtcttggtgggtcaacggcaaagaggtgcacagcggcgtgtgtaccgacccccagccactgaaagaacagcccgccctgaacgacagccggtactgcctgagcagcagactgagagtgtccgccaccttctggcagaacccccggaaccacttcagatgccaggtgcagttctacggcctgagcgagaacgacgagtggacccaggacagagccaagcccgtgacccagatcgtgtctgccgaagcctggggcagagccgatgatgtgattaagatccactggcaggaaaagaagtccaacaccatcctgggcagccaggaaggcaacaccatgaagaccaacgacacctacatgaagttcagctggctgaccgtgcccgagaagtccctggacaaagaacacagatgcatcgtgcggcacgaaaacaacaagaacggcgtggaccaggaaatcatcttcccacccatcaagaccgatgtgattacaatggaccccaaggacaactgctccaaggacgccaacgataccctgctgctccagctgaccaacaccagcgcctactacatgtacttgttgctgctgctgaagtccgtggtgtacttcgccatcatcacatgctgcctgctgcggagaaccgccttctgctgcaacggcgagaagtctcgcgccaagagaagcggatctggcgtgaagcagaccctgaatttcgacctgctgaagctggctggcgacgtggaatccaacccaggcccttctagaggccatatgaccgagtacaagcccacggtgcgcctcgccacccgcgacgacgtccccagggccgtacgcaccctcgccgccgcgttcgccgactaccccgccacgcgccacaccgtcgatccggaccgccacatcgagcgggtcaccgagctgcaagaactcttcctcacgcgcgtcgggctcgacatcggcaaggtgtgggtcgcggacgacggcgccgcggtggcggtctggaccacgccggagagcgtcgaagcgggggcggtgttcgccgagatcggcccgcgcatggccgagttgagcggttcccggctggccgcgcagcaacagatggaaggcctcctggcgccgcaccggcccaaggagcccgcgtggttcctggccaccgtcggcgtctcgcccgaccaccagggcaagggtctgggcagcgccgtcgtgctccccggagtggaggcggccgagcgcgccggggtgcccgccttcctggagacctccgcgccccgcaacctccccttctacgagcggctcggcttcaccgtcaccgccgacgtcgaggtgcccgaaggaccgcgcacctggtgcatgacccgcaagcccggtgcctga

SEQ ID NO: 8341 - DNA, 2919 bp, synthetic construct
  source 1..2919: mol_type = other DNA
atggccttaccagtgaccgccttgctcctgccgctggccttgctgctccacgccgccaggccgctcgagatccagaaccctgatcctgccgtgtaccagctgcgggatagcaagagcagcgacaagagcgtgtgtctgttcaccgacttcgacagccagaccaacgtgtcccagagcaaggactccgacgtgtacatcaccgataagtgcgtgctggacatgcggagcatggacttcaagagcaactccgccgtggcctggtccaacaagtccgatttcgcctgcgccaacgccttcaacaacagcattatccccgaggacacattcttcccaagccccgagagcagcgactccaccgaccacgtgaagcccaaagagacagagaacaccaagcagcccagcaagagctgccacaagcccaaggccatcgtgcacaccgagaaagtgaacatgatgagcctgaccgtgctgggcctgcggatgctgttcgccaaaaccgtggccgtgaacttcctgctgaccgccaagctgttcttcctcagggccaagcgatctggatctggagcaacaaacttctcactactcaaacaagcaggtgacgtggaggagaatcccgggcctactagcaccatggccttaccagtgaccgccttgctcctgccgctggccttgctgctccacgccgccaggccggagatcgtgatgacccagagccctgccaccctgtctctgagccctggcgaaagagccaccctgagctgtagagccagccaggacatcagcaagtacctgaactggtatcagcagaagcccggccaggcccccagactgctgatctaccacaccagcagactgcacagcggcatccccgccagattttctggctctggcagcggcaccgactacaccctgacaatcagcagcctccagcccgaggacttcgccgtgtacttctgtcagcaaggcaacaccctgccctacaccttcggccagggcaccaagctggaaatcaagggcggaggcggaagtggaggcggaggatctggcggcggaggctctcaggtgcaactccaggaatctggccctggcctcgtgaagcccagcgagacactgagcctgacctgtaccgtgtccggcgtgtccctgcctgactatggcgtgtcctggatcagacagccccctggcaagggcctggaatggatcggagtgatttggggcagcgaaaccacctactacaacagctccctgaagtccagagtgaccatctccaaggacaactccaagaaccaggtgtccctgaagctgagcagcgtgacagccgccgacaccgccgtgtattactgcgccaagcactactactacggcggcagctacgctatggactactggggccagggaaccctcgtgaccgtgtctagtacgcgtgaggacctgaagaacgtgttcccacctgaggtggccgtgttcgagcctagcgaggccgagatcagccacacccagaaagccaccctcgtgtgcctggctaccggcttctaccccgaccatgtggaactgtcttggtgggtcaacggcaaagaggtgcacagcggcgtgtgtaccgacccccagccactgaaagaacagcccgccctgaacgacagccggtactgcctgagcagcagactgagagtgtccgccaccttctggcagaacccccggaaccacttcagatgccaggtgcagttctacggcctgagcgagaacgacgagtggacccaggacagagccaagcccgtgacccagatcgtgtctgccgaagcctggggcagagccgatgatgtgattaagatccactggcaggaaaagaagtccaacaccatcctgggcagccaggaaggcaacaccatgaagaccaacgacacctacatgaagttcagctggctgaccgtgcccgagaagtccctggacaaagaacacagatgcatcgtgcggcacgaaaacaacaagaacggcgtggaccaggaaatcatcttcccacccatcaagaccgatgtgattacaatggaccccaaggacaactgctccaaggacgccaacgataccctgctgctccagctgaccaacaccagcgcctactacatgtacttgttgctgctgctgaagtccgtggtgtacttcgccatcatcacatgctgcctgctgcggagaaccgccttctgctgcaacggcgagaagtctcgcgccaagagaagcggatctggcgtgaagcagaccctgaatttcgacctgctgaagctggctggcgacgtggaatccaacccaggcccttctagaggccatatgaccgagtacaagcccacggtgcgcctcgccacccgcgacgacgtccccagggccgtacgcaccctcgccgccgcgttcgccgactaccccgccacgcgccacaccgtcgatccggaccgccacatcgagcgggtcaccgagctgcaagaactcttcctcacgcgcgtcgggctcgacatcggcaaggtgtgggtcgcggacgacggcgccgcggtggcggtctggaccacgccggagagcgtcgaagcgggggcggtgttcgccgagatcggcccgcgcatggccgagttgagcggttcccggctggccgcgcagcaacagatggaaggcctcctggcgccgcaccggcccaaggagcccgcgtggttcctggccaccgtcggcgtctcgcccgaccaccagggcaagggtctgggcagcgccgtcgtgctccccggagtggaggcggccgagcgcgccggggtgcccgccttcctggagacctccgcgccccgcaacctccccttctacgagcggctcggcttcaccgtcaccgccgacgtcgaggtgcccgaaggaccgcgcacctggtgcatgacccgcaagcccggtgcctga

SEQ ID NO: 8342 - DNA, 2922 bp, synthetic construct
  source 1..2922: mol_type = other DNA
atggccttaccagtgaccgccttgctcctgccgctggccttgctgctccacgccgccaggccgctcgagatccagaaccctgatcctgccgtgtaccagctgcgggatagcaagagcagcgacaagagcgtgtgtctgttcaccgacttcgacagccagaccaacgtgtcccagagcaaggactccgacgtgtacatcaccgataagtgcgtgctggacatgcggagcatggacttcaagagcaactccgccgtggcctggtccaacaagtccgatttcgcctgcgccaacgccttcaacaacagcattatccccgaggacacattcttcccaagccccgagagcagcgactccaccgaccacgtgaagcccaaagagacagagaacaccaagcagcccagcaagagctgccacaagcccaaggccatcgtgcacaccgagaaagtgaacatgatgagcctgaccgtgctgggcctgcggatgctgttcgccaaaaccgtggccgtgaacttcctgctgaccgccaagctgttcttcctcagggccaagcgatctggatctggagcaacaaacttctcactactcaaacaagcaggtgacgtggaggagaatcccgggcctactagcaccatggccttaccagtgaccgccttgctcctgccgctggccttgctgctccacgccgccaggccggacgagatcgtgctgacacagagccccgccaccctgtcactgtctccaggcgaaagagccaccctgagctgtagcgccagcagcagcgtgtcctacatgcactggtatcagcagaagcccggccaggcccccagactgctgatctacgataccagcaagctggcctccggcatccccgccagattttctggcagcggctccggcaccgacttcaccctgacaatcagcagcctggaacccgaggacgtggccgtgtactactgttttcaaggcagcgtgtaccccttcaccttcggccagggcaccaagctggaaatcaagagaggtggcggtggctcgggcggtggtgggtcgggtggcggcggatctcaggtgcagctccaggaatctggccctggcctcgtgaagcctagccagaccctgagcctgacctgtaccgtgtctggcggcagcatcagcacaagcggcatgggcgtgggctggatcagacagcaccctggcaagggcctggaatggatcggccacatttggtgggacgacgacaagcggtacaaccccgccctgaagtccagagtgaccatcagcgtggacaccagcaagaaccagttcagcctgaagctgagcagcgtgacagccgccgataccgccgtgtattattgcgcccggatggaactgtggtcctactacttcgactactggggccagggaaccctcgtgaccgtgtctagtacgcgtgaggacctgaagaacgtgttcccacctgaggtggccgtgttcgagcctagcgaggccgagatcagccacacccagaaagccaccctcgtgtgcctggctaccggcttctaccccgaccatgtggaactgtcttggtgggtcaacggcaaagaggtgcacagcggcgtgtgtaccgacccccagccactgaaagaacagcccgccctgaacgacagccggtactgcctgagcagcagactgagagtgtccgccaccttctggcagaacccccggaaccacttcagatgccaggtgcagttctacggcctgagcgagaacgacgagtggacccaggacagagccaagcccgtgacccagatcgtgtctgccgaagcctggggcagagccgatgatgtgattaagatccactggcaggaaaagaagtccaacaccatcctgggcagccaggaaggcaacaccatgaagaccaacgacacctacatgaagttcagctggctgaccgtgcccgagaagtccctggacaaagaacacagatgcatcgtgcggcacgaaaacaacaagaacggcgtggaccaggaaatcatcttcccacccatcaagaccgatgtgattacaatggaccccaaggacaactgctccaaggacgccaacgataccctgctgctccagctgaccaacaccagcgcctactacatgtacttgttgctgctgctgaagtccgtggtgtacttcgccatcatcacatgctgcctgctgcggagaaccgccttctgctgcaacggcgagaagtctcgcgccaagagaagcggatctggcgtgaagcagaccctgaatttcgacctgctgaagctggctggcgacgtggaatccaacccaggcccttctagaggccatatgaccgagtacaagcccacggtgcgcctcgccacccgcgacgacgtccccagggccgtacgcaccctcgccgccgcgttcgccgactaccccgccacgcgccacaccgtcgatccggaccgccacatcgagcgggtcaccgagctgcaagaactcttcctcacgcgcgtcgggctcgacatcggcaaggtgtgggtcgcggacgacggcgccgcggtggcggtctggaccacgccggagagcgtcgaagcgggggcggtgttcgccgagatcggcccgcgcatggccgagttgagcggttcccggctggccgcgcagcaacagatggaaggcctcctggcgccgcaccggcccaaggagcccgcgtggttcctggccaccgtcggcgtctcgcccgaccaccagggcaagggtctgggcagcgccgtcgtgctccccggagtggaggcggccgagcgcgccggggtgcccgccttcctggagacctccgcgccccgcaacctccccttctacgagcggctcggcttcaccgtcaccgccgacgtcgaggtgcccgaaggaccgcgcacctggtgcatgacccgcaagcccggtgcctga

SEQ ID NO: 8343 - DNA, 2910 bp, synthetic construct
  source 1..2910: mol_type = other DNA
atggccttaccagtgaccgccttgctcctgccgctggccttgctgctccacgccgccaggccgctcgagatccagaaccctgatcctgccgtgtaccagctgcgggatagcaagagcagcgacaagagcgtgtgtctgttcaccgacttcgacagccagaccaacgtgtcccagagcaaggactccgacgtgtacatcaccgataagtgcgtgctggacatgcggagcatggacttcaagagcaactccgccgtggcctggtccaacaagtccgatttcgcctgcgccaacgccttcaacaacagcattatccccgaggacacattcttcccaagccccgagagcagcgactccaccgaccacgtgaagcccaaagagacagagaacaccaagcagcccagcaagagctgccacaagcccaaggccatcgtgcacaccgagaaagtgaacatgatgagcctgaccgtgctgggcctgcggatgctgttcgccaaaaccgtggccgtgaacttcctgctgaccgccaagctgttcttcctcagggccaagcgatctggatctggagcaacaaacttctcactactcaaacaagcaggtgacgtggaggagaatcccgggcctactagcatggccttaccagtgaccgccttgctcctgccgctggccttgctgctccacgccgccaggccggacatccagatgacacagagccctagcagcctgtctgccagcgtgggagacagagtgaccatcacctgtagagccagccaggacatcagcaactacctgaactggtatcagcagaagcccggcaaggcccctaagctgctgatctactacaccagcagactgcacagcggcgtgcccagcagattttctggctctggcagcggcaccgacttcaccctgacaatatctagcctccagcctgaggacttcgccacctactattgccagcagggcaacaccctgccttacacatttggacagggcaccaaggtggaaatcaagagaggcggaggcggaagtggaggcggaggatctggcggcggaggctctgaagtgcagctggttgaatcaggtggcggcctggttcaacctggcggatctctgagactgagctgtgccgccagcggcttcaccttcagcgactactttatgagctgggtccgacaggcccctggcaaaggacttgaatgggtcgccaccatcagcaatggcggcacctacacttactaccccgacagcgtgaagggcagattcaccatctccagagacaacagcaagaacaccctgtacctccagatgaactccctgagagccgaggacaccgccgtgtactactgcgccagattcgacggctacatcttcgactattggggccagggcaccctggtcacagtctcttctacgcgtgaggacctgaagaacgtgttcccacctgaggtggccgtgttcgagcctagcgaggccgagatcagccacacccagaaagccaccctcgtgtgcctggctaccggcttctaccccgaccatgtggaactgtcttggtgggtcaacggcaaagaggtgcacagcggcgtgtgtaccgacccccagccactgaaagaacagcccgccctgaacgacagccggtactgcctgagcagcagactgagagtgtccgccaccttctggcagaacccccggaaccacttcagatgccaggtgcagttctacggcctgagcgagaacgacgagtggacccaggacagagccaagcccgtgacccagatcgtgtctgccgaagcctggggcagagccgatgatgtgattaagatccactggcaggaaaagaagtccaacaccatcctgggcagccaggaaggcaacaccatgaagaccaacgacacctacatgaagttcagctggctgaccgtgcccgagaagtccctggacaaagaacacagatgcatcgtgcggcacgaaaacaacaagaacggcgtggaccaggaaatcatcttcccacccatcaagaccgatgtgattacaatggaccccaaggacaactgctccaaggacgccaacgataccctgctgctccagctgaccaacaccagcgcctactacatgtacttgttgctgctgctgaagtccgtggtgtacttcgccatcatcacatgctgcctgctgcggagaaccgccttctgctgcaacggcgagaagtctcgcgccaagagaagcggatctggcgtgaagcagaccctgaatttcgacctgctgaagctggctggcgacgtggaatccaacccaggcccttctagaggccatatgaccgagtacaagcccacggtgcgcctcgccacccgcgacgacgtccccagggccgtacgcaccctcgccgccgcgttcgccgactaccccgccacgcgccacaccgtcgatccggaccgccacatcgagcgggtcaccgagctgcaagaactcttcctcacgcgcgtcgggctcgacatcggcaaggtgtgggtcgcggacgacggcgccgcggtggcggtctggaccacgccggagagcgtcgaagcgggggcggtgttcgccgagatcggcccgcgcatggccgagttgagcggttcccggctggccgcgcagcaacagatggaaggcctcctggcgccgcaccggcccaaggagcccgcgtggttcctggccaccgtcggcgtctcgcccgaccaccagggcaagggtctgggcagcgccgtcgtgctccccggagtggaggcggccgagcgcgccggggtgcccgccttcctggagacctccgcgccccgcaacctccccttctacgagcggctcggcttcaccgtcaccgccgacgtcgaggtgcccgaaggaccgcgcacctggtgcatgacccgcaagcccggtgcctga

SEQ ID NO: 8344 - DNA, 2922 bp, synthetic construct
  source 1..2922: mol_type = other DNA
atggccttaccagtgaccgccttgctcctgccgctggccttgctgctccacgccgccaggccgctcgagatccagaaccctgatcctgccgtgtaccagctgcgggatagcaagagcagcgacaagagcgtgtgtctgttcaccgacttcgacagccagaccaacgtgtcccagagcaaggactccgacgtgtacatcaccgataagtgcgtgctggacatgcggagcatggacttcaagagcaactccgccgtggcctggtccaacaagtccgatttcgcctgcgccaacgccttcaacaacagcattatccccgaggacacattcttcccaagccccgagagcagcgactccaccgaccacgtgaagcccaaagagacagagaacaccaagcagcccagcaagagctgccacaagcccaaggccatcgtgcacaccgagaaagtgaacatgatgagcctgaccgtgctgggcctgcggatgctgttcgccaaaaccgtggccgtgaacttcctgctgaccgccaagctgttcttcctcagggccaagcgatctggatctggagcaacaaacttctcactactcaaacaagcaggtgacgtggaggagaatcccgggcctactagcatggccttaccagtgaccgccttgctcctgccgctggccttgctgctccacgccgccaggccggacatccagatgacacagagccctagcagcctgtctgccagcgtgggagacagagtgaccatcacatgcaaggccagcgaccacatcaacaactggctggcctggtatcagcagaagcctggacaggcccctaagctgctgatctacggcgctaccacactggaaacaggcgtgcccagcagattttctggcagcggctctggcaccgactacaccctgacaatatccagcctccagcctgaggacttcgccacctactactgtcagcagagctggaacaccccttggacattcggccagggcaccaagctggaaatcaagagaggcggaggcggaagtggaggcggaggatctggcggcggaggctctcaagttcagcttcaacagcctggcgctgagctggtcaaacctggcgcttctgtgaagatgagctgcaaagccagcggctacgccttcagcagctactggatcaactggatgaagcagaaacccggccagggactcgaatggatcggccaaatctatcccggcgacggcgacaccaactacaacggcaagttcaagggcagagccacactgaccgccgatacctctagcagcacagcctacatgcagctgagcagcctgaccagcgaagatagcgccgtgtacttctgtgcccggtccatcacaacagtcgtgggctgcgctatggactattggggccagggaacaagcgtgaccgtgtctagtacgcgtgaggacctgaagaacgtgttcccacctgaggtggccgtgttcgagcctagcgaggccgagatcagccacacccagaaagccaccctcgtgtgcctggctaccggcttctaccccgaccatgtggaactgtcttggtgggtcaacggcaaagaggtgcacagcggcgtgtgtaccgacccccagccactgaaagaacagcccgccctgaacgacagccggtactgcctgagcagcagactgagagtgtccgccaccttctggcagaacccccggaaccacttcagatgccaggtgcagttctacggcctgagcgagaacgacgagtggacccaggacagagccaagcccgtgacccagatcgtgtctgccgaagcctggggcagagccgatgatgtgattaagatccactggcaggaaaagaagtccaacaccatcctgggcagccaggaaggcaacaccatgaagaccaacgacacctacatgaagttcagctggctgaccgtgcccgagaagtccctggacaaagaacacagatgcatcgtgcggcacgaaaacaacaagaacggcgtggaccaggaaatcatcttcccacccatcaagaccgatgtgattacaatggaccccaaggacaactgctccaaggacgccaacgataccctgctgctccagctgaccaacaccagcgcctactacatgtacttgttgctgctgctgaagtccgtggtgtacttcgccatcatcacatgctgcctgctgcggagaaccgccttctgctgcaacggcgagaagtctcgcgccaagagaagcggatctggcgtgaagcagaccctgaatttcgacctgctgaagctggctggcgacgtggaatccaacccaggcccttctagaggccatatgaccgagtacaagcccacggtgcgcctcgccacccgcgacgacgtccccagggccgtacgcaccctcgccgccgcgttcgccgactaccccgccacgcgccacaccgtcgatccggaccgccacatcgagcgggtcaccgagctgcaagaactcttcctcacgcgcgtcgggctcgacatcggcaaggtgtgggtcgcggacgacggcgccgcggtggcggtctggaccacgccggagagcgtcgaagcgggggcggtgttcgccgagatcggcccgcgcatggccgagttgagcggttcccggctggccgcgcagcaacagatggaaggcctcctggcgccgcaccggcccaaggagcccgcgtggttcctggccaccgtcggcgtctcgcccgaccaccagggcaagggtctgggcagcgccgtcgtgctccccggagtggaggcggccgagcgcgccggggtgcccgccttcctggagacctccgcgccccgcaacctccccttctacgagcggctcggcttcaccgtcaccgccgacgtcgaggtgcccgaaggaccgcgcacctggtgcatgacccgcaagcccggtgcctga

SEQ ID NO: 8345 - DNA, 2928 bp, synthetic construct
  source 1..2928: mol_type = other DNA
atggccttaccagtgaccgccttgctcctgccgctggccttgctgctccacgccgccaggccgctcgagatccagaaccctgatcctgccgtgtaccagctgcgggatagcaagagcagcgacaagagcgtgtgtctgttcaccgacttcgacagccagaccaacgtgtcccagagcaaggactccgacgtgtacatcaccgataagtgcgtgctggacatgcggagcatggacttcaagagcaactccgccgtggcctggtccaacaagtccgatttcgcctgcgccaacgccttcaacaacagcattatccccgaggacacattcttcccaagccccgagagcagcgactccaccgaccacgtgaagcccaaagagacagagaacaccaagcagcccagcaagagctgccacaagcccaaggccatcgtgcacaccgagaaagtgaacatgatgagcctgaccgtgctgggcctgcggatgctgttcgccaaaaccgtggccgtgaacttcctgctgaccgccaagctgttcttcctcagggccaagcgatctggatctggagcaacaaacttctcactactcaaacaagcaggtgacgtggaggagaatcccgggcctactagcatggccttaccagtgaccgccttgctcctgccgctggccttgctgctccacgccgccaggccgcagatcgtgctgtctcagtctcctgccatcctgagcgcttccccaggcgagaaagtgaccatgacctgtagagccagcagcagcgtgtcctacatgcactggtatcagcagaagcccggcagcagccctaagccttggatctacgccaccagcaatctggcctctggcgtgccagccagattttctggctctggcagcggcaccagctacagcttcacaatcagcagagtggaagccgaggacgccgccacctactattgtcagcagtggaccttcaatcctcctaccttcggcggaggcacccggctggaaatcaaaagaacagtggctgctggcggaggcggaagtggaggcggaggatctggcggcggaggctctcaggcttatctgcaacagagcggagccgaactcgtcagacctggcgcttctgtgaagatgagctgcaaggccagcggctacaccttcaccagctataatatgcactgggtcaagcagacccctcggcagggactcgaatggatcggcggaatctatcccggcaacggcgacacctcctacaaccagaagttcaagggcaaagccacactgaccgtgggcaagagcagcagcaccgcctatatgcagctcagcagcctgaccagcgaggacagcgccgtgtacttctgcgccagatacgactacaactacgctatggactactggggccagggcaccagcgtgacagttagctctgccagcacgcgtgaggacctgaagaacgtgttcccacctgaggtggccgtgttcgagcctagcgaggccgagatcagccacacccagaaagccaccctcgtgtgcctggctaccggcttctaccccgaccatgtggaactgtcttggtgggtcaacggcaaagaggtgcacagcggcgtgtgtaccgacccccagccactgaaagaacagcccgccctgaacgacagccggtactgcctgagcagcagactgagagtgtccgccaccttctggcagaacccccggaaccacttcagatgccaggtgcagttctacggcctgagcgagaacgacgagtggacccaggacagagccaagcccgtgacccagatcgtgtctgccgaagcctggggcagagccgatgatgtgattaagatccactggcaggaaaagaagtccaacaccatcctgggcagccaggaaggcaacaccatgaagaccaacgacacctacatgaagttcagctggctgaccgtgcccgagaagtccctggacaaagaacacagatgcatcgtgcggcacgaaaacaacaagaacggcgtggaccaggaaatcatcttcccacccatcaagaccgatgtgattacaatggaccccaaggacaactgctccaaggacgccaacgataccctgctgctccagctgaccaacaccagcgcctactacatgtacttgttgctgctgctgaagtccgtggtgtacttcgccatcatcacatgctgcctgctgcggagaaccgccttctgctgcaacggcgagaagtctcgcgccaagagaagcggatctggcgtgaagcagaccctgaatttcgacctgctgaagctggctggcgacgtggaatccaacccaggcccttctagaggccatatgaccgagtacaagcccacggtgcgcctcgccacccgcgacgacgtccccagggccgtacgcaccctcgccgccgcgttcgccgactaccccgccacgcgccacaccgtcgatccggaccgccacatcgagcgggtcaccgagctgcaagaactcttcctcacgcgcgtcgggctcgacatcggcaaggtgtgggtcgcggacgacggcgccgcggtggcggtctggaccacgccggagagcgtcgaagcgggggcggtgttcgccgagatcggcccgcgcatggccgagttgagcggttcccggctggccgcgcagcaacagatggaaggcctcctggcgccgcaccggcccaaggagcccgcgtggttcctggccaccgtcggcgtctcgcccgaccaccagggcaagggtctgggcagcgccgtcgtgctccccggagtggaggcggccgagcgcgccggggtgcccgccttcctggagacctccgcgccccgcaacctccccttctacgagcggctcggcttcaccgtcaccgccgacgtcgaggtgcccgaaggaccgcgcacctggtgcatgacccgcaagcccggtgcctga

SEQ ID NO: 8346 - DNA, 2922 bp, synthetic construct
  source 1..2922: mol_type = other DNA
atggccttaccagtgaccgccttgctcctgccgctggccttgctgctccacgccgccaggccgctcgagatccagaaccctgatcctgccgtgtaccagctgcgggatagcaagagcagcgacaagagcgtgtgtctgttcaccgacttcgacagccagaccaacgtgtcccagagcaaggactccgacgtgtacatcaccgataagtgcgtgctggacatgcggagcatggacttcaagagcaactccgccgtggcctggtccaacaagtccgatttcgcctgcgccaacgccttcaacaacagcattatccccgaggacacattcttcccaagccccgagagcagcgactccaccgaccacgtgaagcccaaagagacagagaacaccaagcagcccagcaagagctgccacaagcccaaggccatcgtgcacaccgagaaagtgaacatgatgagcctgaccgtgctgggcctgcggatgctgttcgccaaaaccgtggccgtgaacttcctgctgaccgccaagctgttcttcctcagggccaagcgatctggatctggagcaacaaacttctcactactcaaacaagcaggtgacgtggaggagaatcccgggcctactagcatggccttaccagtgaccgccttgctcctgccgctggccttgctgctccacgccgccaggccggagatcgtgctgacacagagccctgccaccctgtctctgagccctggcgaaagagccaccctgagctgtagagccagccagagcgtgtccagctacctggcctggtatcagcagaagcccggccaggctccccggctgctgatctacgatgccagcaatagagccaccggcatccccgccagattttccggctctggcagcggcaccgacttcaccctgaccatcagctccctggaacccgaggacttcgccgtgtactactgccagcagcggagcaactggcccatcacattcggccagggcacccggctggaaatcaaaggcggaggcggaagtggaggcggaggatctggcggcggaggctctgaggtgcagcttgttgagtctggcggaggactggtgcagcccgatagaagcctgagactgtcttgtgccgccagcggcttcaccttccacgattatgccatgcactgggtccgacaggcccctggcaaaggacttgaatgggtgtccaccatctcttggaacagcggcacaatcggctacgccgactctgtgaagggcagattcaccatcagccgggacaacgccaagaacagcctgtacctccagatgaactccctgagagccgaggacacagccctgtactactgcgccaaggacatccagtacggcaactactactacggcatggacgtgtggggccagggcacaacagtgacagtctcttctacgcgtgaggacctgaagaacgtgttcccacctgaggtggccgtgttcgagcctagcgaggccgagatcagccacacccagaaagccaccctcgtgtgcctggctaccggcttctaccccgaccatgtggaactgtcttggtgggtcaacggcaaagaggtgcacagcggcgtgtgtaccgacccccagccactgaaagaacagcccgccctgaacgacagccggtactgcctgagcagcagactgagagtgtccgccaccttctggcagaacccccggaaccacttcagatgccaggtgcagttctacggcctgagcgagaacgacgagtggacccaggacagagccaagcccgtgacccagatcgtgtctgccgaagcctggggcagagccgatgatgtgattaagatccactggcaggaaaagaagtccaacaccatcctgggcagccaggaaggcaacaccatgaagaccaacgacacctacatgaagttcagctggctgaccgtgcccgagaagtccctggacaaagaacacagatgcatcgtgcggcacgaaaacaacaagaacggcgtggaccaggaaatcatcttcccacccatcaagaccgatgtgattacaatggaccccaaggacaactgctccaaggacgccaacgataccctgctgctccagctgaccaacaccagcgcctactacatgtacttgttgctgctgctgaagtccgtggtgtacttcgccatcatcacatgctgcctgctgcggagaaccgccttctgctgcaacggcgagaagtctcgcgccaagagaagcggatctggcgtgaagcagaccctgaatttcgacctgctgaagctggctggcgacgtggaatccaacccaggcccttctagaggccatatgaccgagtacaagcccacggtgcgcctcgccacccgcgacgacgtccccagggccgtacgcaccctcgccgccgcgttcgccgactaccccgccacgcgccacaccgtcgatccggaccgccacatcgagcgggtcaccgagctgcaagaactcttcctcacgcgcgtcgggctcgacatcggcaaggtgtgggtcgcggacgacggcgccgcggtggcggtctggaccacgccggagagcgtcgaagcgggggcggtgttcgccgagatcggcccgcgcatggccgagttgagcggttcccggctggccgcgcagcaacagatggaaggcctcctggcgccgcaccggcccaaggagcccgcgtggttcctggccaccgtcggcgtctcgcccgaccaccagggcaagggtctgggcagcgccgtcgtgctccccggagtggaggcggccgagcgcgccggggtgcccgccttcctggagacctccgcgccccgcaacctccccttctacgagcggctcggcttcaccgtcaccgccgacgtcgaggtgcccgaaggaccgcgcacctggtgcatgacccgcaagcccggtgcctga

SEQ ID NO: 8347 - DNA, 2916 bp, synthetic construct
  source 1..2916: mol_type = other DNA
atggccttaccagtgaccgccttgctcctgccgctggccttgctgctccacgccgccaggccgctcgagatccagaaccctgatcctgccgtgtaccagctgcgggatagcaagagcagcgacaagagcgtgtgtctgttcaccgacttcgacagccagaccaacgtgtcccagagcaaggactccgacgtgtacatcaccgataagtgcgtgctggacatgcggagcatggacttcaagagcaactccgccgtggcctggtccaacaagtccgatttcgcctgcgccaacgccttcaacaacagcattatccccgaggacacattcttcccaagccccgagagcagcgactccaccgaccacgtgaagcccaaagagacagagaacaccaagcagcccagcaagagctgccacaagcccaaggccatcgtgcacaccgagaaagtgaacatgatgagcctgaccgtgctgggcctgcggatgctgttcgccaaaaccgtggccgtgaacttcctgctgaccgccaagctgttcttcctcagggccaagcgatctggatctggagcaacaaacttctcactactcaaacaagcaggtgacgtggaggagaatcccgggcctactagcatggccttaccagtgaccgccttgctcctgccgctggccttgctgctccacgccgccaggccggacatccagatgacccagagccccagcagcctgtctgccagcgtgggcgacagagtgaccatcacctgtagagccagccaggacgtgaacaccgccgtggcctggtatcagcagaagcctggcaaggcccccaagctgctgatctacagcgccagcttcctggaaagcggcgtgcccagcagattcagcggaagcagaagcggcaccgacttcaccctgaccatcagctccctccagcccgaggacttcgccacctactactgccagcagcactacaccacccctcccaccttcggccagaccaaggtggaaatcaagagaggcggaggcggaagtggaggcggaggatctggcggcggaggctctgaagtgcaactggtggaatctggcggcggactggtgcagcctggcggatctctgagactgagctgtgccgccagcggcttcaacatcaaggacacctacatccactgggtgcgccaggcccctggaaagggactggaatgggtggcccggatctaccccaccaacggctacaccagatacgccgacagcgtgaagggccggttcaccatcagcgccgacaccagcaagaataccgcctacctccagatgaacagcctgcgggccgaggataccgccgtgtactactgctcaagatggggaggcgacggcttctacgctatggacgtgtggggccagggcacccttgtgaccgtgtcatctacgcgtgaggacctgaagaacgtgttcccacctgaggtggccgtgttcgagcctagcgaggccgagatcagccacacccagaaagccaccctcgtgtgcctggctaccggcttctaccccgaccatgtggaactgtcttggtgggtcaacggcaaagaggtgcacagcggcgtgtgtaccgacccccagccactgaaagaacagcccgccctgaacgacagccggtactgcctgagcagcagactgagagtgtccgccaccttctggcagaacccccggaaccacttcagatgccaggtgcagttctacggcctgagcgagaacgacgagtggacccaggacagagccaagcccgtgacccagatcgtgtctgccgaagcctggggcagagccgatgatgtgattaagatccactggcaggaaaagaagtccaacaccatcctgggcagccaggaaggcaacaccatgaagaccaacgacacctacatgaagttcagctggctgaccgtgcccgagaagtccctggacaaagaacacagatgcatcgtgcggcacgaaaacaacaagaacggcgtggaccaggaaatcatcttcccacccatcaagaccgatgtgattacaatggaccccaaggacaactgctccaaggacgccaacgataccctgctgctccagctgaccaacaccagcgcctactacatgtacttgttgctgctgctgaagtccgtggtgtacttcgccatcatcacatgctgcctgctgcggagaaccgccttctgctgcaacggcgagaagtctcgcgccaagagaagcggatctggcgtgaagcagaccctgaatttcgacctgctgaagctggctggcgacgtggaatccaacccaggcccttctagaggccatatgaccgagtacaagcccacggtgcgcctcgccacccgcgacgacgtccccagggccgtacgcaccctcgccgccgcgttcgccgactaccccgccacgcgccacaccgtcgatccggaccgccacatcgagcgggtcaccgagctgcaagaactcttcctcacgcgcgtcgggctcgacatcggcaaggtgtgggtcgcggacgacggcgccgcggtggcggtctggaccacgccggagagcgtcgaagcgggggcggtgttcgccgagatcggcccgcgcatggccgagttgagcggttcccggctggccgcgcagcaacagatggaaggcctcctggcgccgcaccggcccaaggagcccgcgtggttcctggccaccgtcggcgtctcgcccgaccaccagggcaagggtctgggcagcgccgtcgtgctccccggagtggaggcggccgagcgcgccggggtgcccgccttcctggagacctccgcgccccgcaacctccccttctacgagcggctcggcttcaccgtcaccgccgacgtcgaggtgcccgaaggaccgcgcacctggtgcatgacccgcaagcccggtgcctga

SEQ ID NO: 8348 - DNA, 2553 bp, synthetic construct
  source 1..2553: mol_type = other DNA
atggccttaccagtgaccgccttgctcctgccgctggccttgctgctccacgccgccaggccgctcgagatccagaaccctgatcctgccgtgtaccagctgcgggatagcaagagcagcgacaagagcgtgtgtctgttcaccgacttcgacagccagaccaacgtgtcccagagcaaggactccgacgtgtacatcaccgataagtgcgtgctggacatgcggagcatggacttcaagagcaactccgccgtggcctggtccaacaagtccgatttcgcctgcgccaacgccttcaacaacagcattatccccgaggacacattcttcccaagccccgagagcagcgactccaccgaccacgtgaagcccaaagagacagagaacaccaagcagcccagcaagagctgccacaagcccaaggccatcgtgcacaccgagaaagtgaacatgatgagcctgaccgtgctgggcctgcggatgctgttcgccaaaaccgtggccgtgaacttcctgctgaccgccaagctgttcttcctcagggccaagcgatctggatctggagcaacaaacttctcactactcaaacaagcaggtgacgtggaggagaatcccgggcctactagcatggccctgcccgtgacagccctgctgctgcctctggctctgctgctgcacgccgccagacccgatgaattcgaggtgcaactggtggaaagcggcggaggcctggtgcaggctggcggatctctgagactgagctgtgccgccagcggcatcaccttcagcatcaacacaatgggctggtacagacaggcccctggcaagcagagggaactggtggccctgatctccagcatcggcgacacctactacgccgacagcgtgaagggccggttcaccatcagccgggacaacgccaagaacaccgtgtacctccagatgaacagcctgaagcccgaggacaccgccgtgtactactgcaagcggttcagaacagccgcccagggcaccgattattggggccagggaacacaagtgaccgtgtcctctacgcgtgaggacctgaagaacgtgttcccacctgaggtggccgtgttcgagcctagcgaggccgagatcagccacacccagaaagccaccctcgtgtgcctggctaccggcttctaccccgaccatgtggaactgtcttggtgggtcaacggcaaagaggtgcacagcggcgtgtgtaccgacccccagccactgaaagaacagcccgccctgaacgacagccggtactgcctgagcagcagactgagagtgtccgccaccttctggcagaacccccggaaccacttcagatgccaggtgcagttctacggcctgagcgagaacgacgagtggacccaggacagagccaagcccgtgacccagatcgtgtctgccgaagcctggggcagagccgatgatgtgattaagatccactggcaggaaaagaagtccaacaccatcctgggcagccaggaaggcaacaccatgaagaccaacgacacctacatgaagttcagctggctgaccgtgcccgagaagtccctggacaaagaacacagatgcatcgtgcggcacgaaaacaacaagaacggcgtggaccaggaaatcatcttcccacccatcaagaccgatgtgattacaatggaccccaaggacaactgctccaaggacgccaacgataccctgctgctccagctgaccaacaccagcgcctactacatgtacttgttgctgctgctgaagtccgtggtgtacttcgccatcatcacatgctgcctgctgcggagaaccgccttctgctgcaacggcgagaagtctcgcgccaagagaagcggatctggcgtgaagcagaccctgaatttcgacctgctgaagctggctggcgacgtggaatccaacccaggcccttctagaggccatatgaccgagtacaagcccacggtgcgcctcgccacccgcgacgacgtccccagggccgtacgcaccctcgccgccgcgttcgccgactaccccgccacgcgccacaccgtcgatccggaccgccacatcgagcgggtcaccgagctgcaagaactcttcctcacgcgcgtcgggctcgacatcggcaaggtgtgggtcgcggacgacggcgccgcggtggcggtctggaccacgccggagagcgtcgaagcgggggcggtgttcgccgagatcggcccgcgcatggccgagttgagcggttcccggctggccgcgcagcaacagatggaaggcctcctggcgccgcaccggcccaaggagcccgcgtggttcctggccaccgtcggcgtctcgcccgaccaccagggcaagggtctgggcagcgccgtcgtgctccccggagtggaggcggccgagcgcgccggggtgcccgccttcctggagacctccgcgccccgcaacctccccttctacgagcggctcggcttcaccgtcaccgccgacgtcgaggtgcccgaaggaccgcgcacctggtgcatgacccgcaagcccggtgcctga

SEQ ID NO: 8349 - DNA, 2553 bp, synthetic construct; identical to SEQ ID NO: 8348
  source 1..2553: mol_type = other DNA

SEQ ID NO: 8350 - DNA, 3348 bp, synthetic construct
  source 1..3348: mol_type = other DNA
atggccttaccagtgaccgccttgctcctgccgctggccttgctgctccacgccgccaggccgctcgagatccagaaccctgatcctgccgtgtaccagctgcgggatagcaagagcagcgacaagagcgtgtgtctgttcaccgacttcgacagccagaccaacgtgtcccagagcaaggactccgacgtgtacatcaccgataagtgcgtgctggacatgcggagcatggacttcaagagcaactccgccgtggcctggtccaacaagtccgatttcgcctgcgccaacgccttcaacaacagcattatccccgaggacacattcttcccaagccccgagagcagcgactccaccgaccacgtgaagcccaaagagacagagaacaccaagcagcccagcaagagctgccacaagcccaaggccatcgtgcacaccgagaaagtgaacatgatgagcctgaccgtgctgggcctgcggatgctgttcgccaaaaccgtggccgtgaacttcctgctgaccgccaagctgttcttcctcagggccaagcgatctggatctggagcaacaaacttctcactactcaaacaagcaggtgacgtggaggagaatcccgggcctactagcatggccttaccagtgaccgccttgctcctgccgctggccttgctgctccacgccgccaggccgcaggtccagctcgtcgagtccggcggcggcctcgtccaggccggcgactccgtcaccctctcctgcaccgcctccggccgcaccttctcctcctacgccctcgcctggttccgccagcgccccggcaaggagcgcgagttcgtcgccggcctccgctggggcggccccaccaactacgccgactccgtcaaggaccgcttcaccatctccggcgactccgccaagcacaccatgtacctccagatgaactccctcaagcccgaggacaccgccgtctactactgcggctacaaccccggcggctgggccgtcccctcccagtacgagtacgactcctggggccagggcacccaggtcaccgtctcctccggtaccggcggaggcggatctggcggcggaggtagcggtggcggaggatctgaattcgacatccagatgacacagagccctagcagcctgtctgccagcgtgggagacagagtgaccatcacatgcaaggccagcgaccacatcaacaactggctggcctggtatcagcagaagcctggacaggcccctaagctgctgatctacggcgctaccacactggaaacaggcgtgcccagcagattttctggcagcggctctggcaccgactacaccctgacaatatccagcctccagcctgaggacttcgccacctactactgtcagcagagctggaacaccccttggacattcggccagggcaccaagctggaaatcaagagaggcggaggcggaagtggaggcggaggatctggcggcggaggctctcaagttcagcttcaacagcctggcgctgagctggtcaaacctggcgcttctgtgaagatgagctgcaaagccagcggctacgccttcagcagctactggatcaactggatgaagcagaaacccggccagggactcgaatggatcggccaaatctatcccggcgacggcgacaccaactacaacggcaagttcaagggcagagccacactgaccgccgatacctctagcagcacagcctacatgcagctgagcagcctgaccagcgaagatagcgccgtgtacttctgtgcccggtccatcacaacagtcgtgggctgcgctatggactattggggccagggaacaagcgtgaccgtgtctagtacgcgtgaggacctgaagaacgtgttcccacctgaggtggccgtgttcgagcctagcgaggccgagatcagccacacccagaaagccaccctcgtgtgcctggctaccggcttctaccccgaccatgtggaactgtcttggtgggtcaacggcaaagaggtgcacagcggcgtgtgtaccgacccccagccactgaaagaacagcccgccctgaacgacagccggtactgcctgagcagcagactgagagtgtccgccaccttctggcagaacccccggaaccacttcagatgccaggtgcagttctacggcctgagcgagaacgacgagtggacccaggacagagccaagcccgtgacccagatcgtgtctgccgaagcctggggcagagccgatgatgtgattaagatccactggcaggaaaagaagtccaacaccatcctgggcagccaggaaggcaacaccatgaagaccaacgacacctacatgaagttcagctggctgaccgtgcccgagaagtccctggacaaagaacacagatgcatcgtgcggcacgaaaacaacaagaacggcgtggaccaggaaatcatcttcccacccatcaagaccgatgtgattacaatggaccccaaggacaactgctccaaggacgccaacgataccctgctgctccagctgaccaacaccagcgcctactacatgtacttgttgctgctgctgaagtccgtggtgtacttcgccatcatcacatgctgcctgctgcggagaaccgccttctgctgcaacggcgagaagtctcgcgccaagagaagcggatctggcgtgaagcagaccctgaatttcgacctgctgaagctggctggcgacgtggaatccaacccaggcccttctagaggccatatgaccgagtacaagcccacggtgcgcctcgccacccgcgacgacgtccccagggccgtacgcaccctcgccgccgcgttcgccgactaccccgccacgcgccacaccgtcgatccggaccgccacatcgagcgggtcaccgagctgcaagaactcttcctcacgcgcgtcgggctcgacatcggcaaggtgtgggtcgcggacgacggcgccgcggtggcggtctggaccacgccggagagcgtcgaagcgggggcggtgttcgccgagatcggcccgcgcatggccgagttgagcggttcccggctggccgcgcagcaacagatggaaggcctcctggcgccgcaccggcccaaggagcccgcgtggttcctggccaccgtcggcgtctcgcccgaccaccagggcaagggtctgggcagcgccgtcgtgctccccggagtggaggcggccgagcgcgccggggtgcccgccttcctggagacctccgcgccccgcaacctccccttctacgagcggctcggcttcaccgtcaccgccgacgtcgaggtgcccgaaggaccgcgcacctggtgcatgacccgcaagcccggtgcctga

SEQ ID NO: 8351 - DNA, 3735 bp, synthetic construct
  source 1..3735: mol_type = other DNA
atggccttaccagtgaccgccttgctcctgccgctggccttgctgctccacgccgccaggccgctcgagatccagaaccctgatcctgccgtgtaccagctgcgggatagcaagagcagcgacaagagcgtgtgtctgttcaccgacttcgacagccagaccaacgtgtcccagagcaaggactccgacgtgtacatcaccgataagtgcgtgctggacatgcggagcatggacttcaagagcaactccgccgtggcctggtccaacaagtccgatttcgcctgcgccaacgccttcaacaacagcattatccccgaggacacattcttcccaagccccgagagcagcgactccaccgaccacgtgaagcccaaagagacagagaacaccaagcagcccagcaagagctgccacaagcccaaggccatcgtgcacaccgagaaagtgaacatgatgagcctgaccgtgctgggcctgcggatgctgttcgccaaaaccgtggccgtgaacttcctgctgaccgccaagctgttcttcctcagggccaagcgatctggatctggagcaacaaacttctcactactcaaacaagcaggtgacgtggaggagaatcccgggcctactagcatggccttaccagtgaccgccttgctcctgccgctggccttgctgctccacgccgccaggccggaggttcagctgcttgagtctggcggaggactggttcaacctggcggaagcctgagactgtcttgtgccgccagcggcttcacctttagcagctacgccatgagctgggtccgacaggctcctggcaaaggactggaatgggtgtccagcatcagcggcagcggcgactacatctactacgccgatagcgtgaagggcagattcaccatcagccgggacatcagcaagaacaccctgtacctccagatgaacagcctgagagccgaggacaccgccgtgtactactgtgccaaagaaggcaccggcgctaacagcagcctggccgattatagaggccagggcacactggtcaccgtgtctagtggcggaggaagcggcggaggatctcaggtccagctcgtcgagtccggcggcggcctcgtccaggccggcgactccgtcaccctctcctgcaccgcctccggccgcaccttctcctcctacgccctcgcctggttccgccagcgccccggcaaggagcgcgagttcgtcgccggcctccgctggggcggccccaccaactacgccgactccgtcaaggaccgcttcaccatctccggcgactccgccaagcacaccatgtacctccagatgaactccctcaagcccgaggacaccgccgtctactactgcggctacaaccccggcggctgggccgtcccctcccagtacgagtacgactcctggggccagggcacccaggtcaccgtctcctccggtaccggcggaggcggatctggcggcggaggtagcggtggcggaggatctgaattcgacatccagatgacacagagccctagcagcctgtctgccagcgtgggagacagagtgaccatcacatgcaaggccagcgaccacatcaacaactggctggcctggtatcagcagaagcctggacaggcccctaagctgctgatctacggcgctaccacactggaaacaggcgtgcccagcagattttctggcagcggctctggcaccgactacaccctgacaatatccagcctccagcctgaggacttcgccacctactactgtcagcagagctggaacaccccttggacattcggccagggcaccaagctggaaatcaagagaggcggaggcggaagtggaggcggaggatctggcggcggaggctctcaagttcagcttcaacagcctggcgctgagctggtcaaacctggcgcttctgtgaagatgagctgcaaagccagcggctacgccttcagcagctactggatcaactggatgaagcagaaacccggccagggactcgaatggatcggccaaatctatcccggcgacggcgacaccaactacaacggcaagttcaagggcagagccacactgaccgccgatacctctagcagcacagcctacatgcagctgagcagcctgaccagcgaagatagcgccgtgtacttctgtgcccggtccatcacaacagtcgtgggctgcgctatggactattggggccagggaacaagcgtgaccgtgtctagtacgcgtgaggacctgaagaacgtgttcccacctgaggtggccgtgttcgagcctagcgaggccgagatcagccacacccagaaagccaccctcgtgtgcctggctaccggcttctaccccgaccatgtggaactgtcttggtgggtcaacggcaaagaggtgcacagcggcgtgtgtaccgacccccagccactgaaagaacagcccgccctgaacgacagccggtactgcctgagcagcagactgagagtgtccgccaccttctggcagaacccccggaaccacttcagatgccaggtgcagttctacggcctgagcgagaacgacgagtggacccaggacagagccaagcccgtgacccagatcgtgtctgccgaagcctggggcagagccgatgatgtgattaagatccactggcaggaaaagaagtccaacaccatcctgggcagccaggaaggcaacaccatgaagaccaacgacacctacatgaagttcagctggctgaccgtgcccgagaagtccctggacaaagaacacagatgcatcgtgcggcacgaaaacaacaagaacggcgtggaccaggaaatcatcttcccacccatcaagaccgatgtgattacaatggaccccaaggacaactgctccaaggacgccaacgataccctgctgctccagctgaccaacaccagcgcctactacatgtacttgttgctgctgctgaagtccgtggtgtacttcgccatcatcacatgctgcctgctgcggagaaccgccttctgctgcaacggcgagaagtctcgcgccaagagaagcggatctggcgtgaagcagaccctgaatttcgacctgctgaagctggctggcgacgtggaatccaacccaggcccttctagaggccatatgaccgagtacaagcccacggtgcgcctcgccacccgcgacgacgtccccagggccgtacgcaccctcgccgccgcgttcgccgactaccccgccacgcgccacaccgtcgatccggaccgccacatcgagcgggtcaccgagctgcaagaactcttcctcacgcgcgtcgggctcgacatcggcaaggtgtgggtcgcggacgacggcgccgcggtggcggtctggaccacgccggagagcgtcgaagcgggggcggtgttcgccgagatcggcccgcgcatggccgagttgagcggttcccggctggccgcgcagcaacagatggaaggcctcctggcgccgcaccggcccaaggagcccgcgtggttcctggccaccgtcggcgtctcgcccgaccaccagggcaagggtctgggcagcgccgtcgtgctccccggagtggaggcggccgagcgcgccggggtgcccgccttcctggagacctccgcgccccgcaacctccccttctacgagcggctcggcttcaccgtcaccgccgacgtcgaggtgcccgaaggaccgcgcacctggtgcatgacccgcaagcccggtgcctga

SEQ ID NO: 8352 - DNA, 3735 bp, synthetic construct; identical to SEQ ID NO: 8351
  source 1..3735: mol_type = other DNA

SEQ ID NO: 8353 - DNA, 2571 bp, synthetic construct
  source 1..2571: mol_type = other DNA
atggccttaccagtgaccgccttgctcctgccgctggccttgctgctccacgccgccaggccgctcgagatccagaaccctgatcctgccgtgtaccagctgcgggatagcaagagcagcgacaagagcgtgtgtctgttcaccgacttcgacagccagaccaacgtgtcccagagcaaggactccgacgtgtacatcaccgataagtgcgtgctggacatgcggagcatggacttcaagagcaactccgccgtggcctggtccaacaagtccgatttcgcctgcgccaacgccttcaacaacagcattatccccgaggacacattcttcccaagccccgagagcagcgactccaccgaccacgtgaagcccaaagagacagagaacaccaagcagcccagcaagagctgccacaagcccaaggccatcgtgcacaccgagaaagtgaacatgatgagcctgaccgtgctgggcctgcggatgctgttcgccaaaaccgtggccgtgaacttcctgctgaccgccaagctgttcttcctcagggccaagcgatctggatctggagcaacaaacttctcactactcaaacaagcaggtgacgtggaggagaatcccgggcctactagcatggccctgcccgtgacagccctgctgctgcctctggctctgctgctgcacgccgccagacccgatgaattcggctctgacctgggcatcaagctgctgttcgccgctgccaagggccaggacgacgaagtgcggattctgctggctgctggggccgacgtgaacgccaaggatttcgagggctacacccccctgcacgtggccgcctatgatggacacctggaaatcgtggaagtgctgctgaaggctggcgctgatgtgaatgccaaagacagccagggccggacccctctgcatgaagccgcctacagcggccatctggaaattgtggaagtgctgctgaaagccggggcagacgtgaacgctcaggacgacgctggcgagacaccagccgatctggctgcagcttggggccacgaagatatcgccgaggtgctgcagaagacgcgtgaggacctgaagaacgtgttcccacctgaggtggccgtgttcgagcctagcgaggccgagatcagccacacccagaaagccaccctcgtgtgcctggctaccggcttctaccccgaccatgtggaactgtcttggtgggtcaacggcaaagaggtgcacagcggcgtgtgtaccgacccccagccactgaaagaacagcccgccctgaacgacagccggtactgcctgagcagcagactgagagtgtccgccaccttctggcagaacccccggaaccacttcagatgccaggtgcagttctacggcctgagcgagaacgacgagtggacccaggacagagccaagcccgtgacccagatcgtgtctgccgaagcctggggcagagccgatgatgtgattaagatccactggcaggaaaagaagtccaacaccatcctgggcagccaggaaggcaacaccatgaagaccaacgacacctacatgaagttcagctggctgaccgtgcccgagaagtccctggacaaagaacacagatgcatcgtgcggcacgaaaacaacaagaacggcgtggaccaggaaatcatcttcccacccatcaagaccgatgtgattacaatggaccccaaggacaactgctccaaggacgccaacgataccctgctgctccagctgaccaacaccagcgcctactacatgtacttgttgctgctgctgaagtccgtggtgtacttcgccatcatcacatgctgcctgctgcggagaaccgccttctgctgcaacggcgagaagtctcgcgccaagagaagcggatctggcgtgaagcagaccctgaatttcgacctgctgaagctggctggcgacgtggaatccaacccaggcccttctagaggccatatgaccgagtacaagcccacggtgcgcctcgccacccgcgacgacgtccccagggccgtacgcaccctcgccgccgcgttcgccgactaccccgccacgcgccacaccgtcgatccggaccgccacatcgagcgggtcaccgagctgcaagaactcttcctcacgcgcgtcgggctcgacatcggcaaggtgtgggtcgcggacgacggcgccgcggtggcggtctggaccacgccggagagcgtcgaagcgggggcggtgttcgccgagatcggcccgcgcatggccgagttgagcggttcccggctggccgcgcagcaacagatggaaggcctcctggcgccgcaccggcccaaggagcccgcgtggttcctggccaccgtcggcgtctcgcccgaccaccagggcaagggtctgggcagcgccgtcgtgctccccggagtggaggcggccgagcgcgccggggtgcccgccttcctggagacctccgcgccccgcaacctccccttctacgagcggctcggcttcaccgtcaccgccgacgtcgaggtgcccgaaggaccgcgcacctggtgcatgacccgcaagcccggtgcctga

SEQ ID NO: 8354 - DNA, 2358 bp, synthetic construct
  source 1..2358: mol_type = other DNA
atggccttaccagtgaccgccttgctcctgccgctggccttgctgctccacgccgccaggccgctcgagatccagaaccctgatcctgccgtgtaccagctgcgggatagcaagagcagcgacaagagcgtgtgtctgttcaccgacttcgacagccagaccaacgtgtcccagagcaaggactccgacgtgtacatcaccgataagtgcgtgctggacatgcggagcatggacttcaagagcaactccgccgtggcctggtccaacaagtccgatttcgcctgcgccaacgccttcaacaacagcattatccccgaggacacattcttcccaagccccgagagcagcgactccaccgaccacgtgaagcccaaagagacagagaacaccaagcagcccagcaagagctgccacaagcccaaggccatcgtgcacaccgagaaagtgaacatgatgagcctgaccgtgctgggcctgcggatgctgttcgccaaaaccgtggccgtgaacttcctgctgaccgccaagctgttcttcctcagggccaagcgatctggatctggagcaacaaacttctcactactcaaacaagcaggtgacgtggaggagaatcccgggcctactagcatggactggatttggcgcatccttttccttgtcggcgctgctaccggcgcccattccttcgaaggcagcggattcgaatacgccaaagagatgcggaacgcctactgggagatcgccctgctgcccaatctgaccaaccagcagaagagagcccccatcagaaagctgtacgacgacccctcccagagcagcgagctgctgtctgaggctaaaaaactgaacgatagccagacgcgtgaggacctgaagaacgtgttcccacctgaggtggccgtgttcgagcctagcgaggccgagatcagccacacccagaaagccaccctcgtgtgcctggctaccggcttctaccccgaccatgtggaactgtcttggtgggtcaacggcaaagaggtgcacagcggcgtgtgtaccgacccccagccactgaaagaacagcccgccctgaacgacagccggtactgcctgagcagcagactgagagtgtccgccaccttctggcagaacccccggaaccacttcagatgccaggtgcagttctacggcctgagcgagaacgacgagtggacccaggacagagccaagcccgtgacccagatcgtgtctgccgaagcctggggcagagccgatgatgtgattaagatccactggcaggaaaagaagtccaacaccatcctgggcagccaggaaggcaacaccatgaagaccaacgacacctacatgaagttcagctggctgaccgtgcccgagaagtccctggacaaagaacacagatgcatcgtgcggcacgaaaacaacaagaacggcgtggaccaggaaatcatcttcccacccatcaagaccgatgtgattacaatggaccccaaggacaactgctccaaggacgccaacgataccctgctgctccagctgaccaacaccagcgcctactacatgtacttgttgctgctgctgaagtccgtggtgtacttcgccatcatcacatgctgcctgctgcggagaaccgccttctgctgcaacggcgagaagtctcgcgccaagagaagcggatctggcgtgaagcagaccctgaatttcgacctgctgaagctggctggcgacgtggaatccaacccaggcccttctagaggccatatgaccgagtacaagcccacggtgcgcctcgccacccgcgacgacgtccccagggccgtacgcaccctcgccgccgcgttcgccgactaccccgccacgcgccacaccgtcgatccggaccgccacatcgagcgggtcaccgagctgcaagaactcttcctcacgcgcgtcgggctcgacatcggcaaggtgtgggtcgcggacgacggcgccgcggtggcggtctggaccacgccggagagcgtcgaagcgggggcggtgttcgccgagatcggcccgcgcatggccgagttgagcggttcccggctggccgcgcagcaacagatggaaggcctcctggcgccgcaccggcccaaggagcccgcgtggttcctggccaccgtcggcgtctcgcccgaccaccagggcaagggtctgggcagcgccgtcgtgctccccggagtggaggcggccgagcgcgccggggtgcccgccttcctggagacctccgcgccccgcaacctccccttctacgagcggctcggcttcaccgtcaccgccgacgtcgaggtgcccgaaggaccgcgcacctggtgcatgacccgcaagcccggtgcctga

SEQ ID NO: 8355 - DNA, 3024 bp, synthetic construct
  source 1..3024: mol_type = other DNA
atggccttaccagtgaccgccttgctcctgccgctggccttgctgctccacgccgccaggccgctcgagatccagaaccctgatcctgccgtgtaccagctgcgggatagcaagagcagcgacaagagcgtgtgtctgttcaccgacttcgacagccagaccaacgtgtcccagagcaaggactccgacgtgtacatcaccgataagtgcgtgctggacatgcggagcatggacttcaagagcaactccgccgtggcctggtccaacaagtccgatttcgcctgcgccaacgccttcaacaacagcattatccccgaggacacattcttcccaagccccgagagcagcgactccaccgaccacgtgaagcccaaagagacagagaacaccaagcagcccagcaagagctgccacaagcccaaggccatcgtgcacaccgagaaagtgaacatgatgagcctgaccgtgctgggcctgcggatgctgttcgccaaaaccgtggccgtgaacttcctgctgaccgccaagctgttcttcctcagggccaagcgatctggatctggagcaacaaacttctcactactcaaacaagcaggtgacgtggaggagaatcccgggcctactagcatggccctgcccgtgacagccctgctgctgcctctggctctgctgctgcacgccgccagacccgatgaattcgaggtgcaactggtggaaagcggcggaggcctggtgcaggctggcggatctctgagactgagctgtgccgccagcggcatcaccttcagcatcaacacaatgggctggtacagacaggcccctggcaagcagagggaactggtggccctgatctccagcatcggcgacacctactacgccgacagcgtgaagggccggttcaccatcagccgggacaacgccaagaacaccgtgtacctccagatgaacagcctgaagcccgaggacaccgccgtgtactactgcaagcggttcagaacagccgcccagggcaccgattattggggccagggaacacaagtgaccgtgtcctctctcgagggaggaggcggctccgggggaggcggaagtggaggcggaggatctgggtctggaggaagcggatctggaggctcagggtcagggggctcaggcagtggaggctctttcgaagtgcaactggtggaatctgggggcggactggtgcagccaggcggaagtctgaggctgtcttgtgccgcctccggcagcatcttcggcttcaacgacatggcctggtatcggcaggctcccggaaaacagcgcgagctggtggctctgattagcagagtgggcgtgaccagcagcgccgactctgtgaagggcagattcacaatctccagagtgaacgccaaggatacagtgtacctccagatgaactctctgaaacctgaggatacagcagtgtactattgctacatggaccagcggctggacggcagcacactggcctactggggacagggaactcaagtgacagtgtctagcacgcgtgaggacctgaagaacgtgttcccacctgaggtggccgtgttcgagcctagcgaggccgagatcagccacacccagaaagccaccctcgtgtgcctggctaccggcttctaccccgaccatgtggaactgtcttggtgggtcaacggcaaagaggtgcacagcggcgtgtgtaccgacccccagccactgaaagaacagcccgccctgaacgacagccggtactgcctgagcagcagactgagagtgtccgccaccttctggcagaacccccggaaccacttcagatgccaggtgcagttctacggcctgagcgagaacgacgagtggacccaggacagagccaagcccgtgacccagatcgtgtctgccgaagcctggggcagagccgatgatgtgattaagatccactggcaggaaaagaagtccaacaccatcctgggcagccaggaaggcaacaccatgaagaccaacgacacctacatgaagttcagctggctgaccgtgcccgagaagtccctggacaaagaacacagatgcatcgtgcggcacgaaaacaacaagaacggcgtggaccaggaaatcatcttcccacccatcaagaccgatgtgattacaatggaccccaaggacaactgctccaaggacgccaacgataccctgctgctccagctgaccaacaccagcgcctactacatgtacttgttgctgctgctgaagtccgtggtgtacttcgccatcatcacatgctgcctgctgcggagaaccgccttctgctgcaacggcgagaagtctcgcgccaagagaagcggatctggcgtgaagcagaccctgaatttcgacctgctgaagctggctggcgacgtggaatccaacccaggcccttctagaggccatatgaccgagtacaagcccacggtgcgcctcgccacccgcgacgacgtccccagggccgtacgcaccctcgccgccgcgttcgccgactaccccgccacgcgccacaccgtcgatccggaccgccacatcgagcgggtcaccgagctgcaagaactcttcctcacgcgcgtcgggctcgacatcggcaaggtgtgggtcgcggacgacggcgccgcggtggcggtctggaccacgccggagagcgtcgaagcgggggcggtgttcgccgagatcggcccgcgcatggccgagttgagcggttcccggctggccgcgcagcaacagatggaaggcctcctggcgccgcaccggcccaaggagcccgcgtggttcctggccaccgtcggcgtctcgcccgaccaccagggcaagggtctgggcagcgccgtcgtgctccccggagtggaggcggccgagcgcgccggggtgcccgccttcctggagacctccgcgccccgcaacctccccttctacgagcggctcggcttcaccgtcaccgccgacgtcgaggtgcccgaaggaccgcgcacctggtgcatgacccgcaagcccggtgcctga

SEQ ID NO: 8356 - DNA, 2766 bp, synthetic construct
  source 1..2766: mol_type = other DNA
atggccttaccagtgaccgccttgctcctgccgctggccttgctgctccacgccgccaggccgctcgagatccagaaccctgatcctgccgtgtaccagctgcgggatagcaagagcagcgacaagagcgtgtgtctgttcaccgacttcgacagccagaccaacgtgtcccagagcaaggactccgacgtgtacatcaccgataagtgcgtgctggacatgcggagcatggacttcaagagcaactccgccgtggcctggtccaacaagtccgatttcgcctgcgccaacgccttcaacaacagcattatccccgaggacacattcttcccaagccccgagagcagcgactccaccgaccacgtgaagcccaaagagacagagaacaccaagcagcccagcaagagctgccacaagcccaaggccatcgtgcacaccgagaaagtgaacatgatgagcctgaccgtgctgggcctgcggatgctgttcgccaaaaccgtggccgtgaacttcctgctgaccgccaagctgttcttcctcagggccaagcgatctggatctggagcaacaaacttctcactactcaaacaagcaggtgacgtggaggagaatcccgggcctactagcatggcccttccagtcactgccttgctgttgcctctggcgctcctgctccacgccgctagaccgggcatgagaaccgaggacctgcctaaggccgtggtgttcctggaaccccagtggtacagagtgctggaaaaggacagcgtgaccctgaagtgccagggcgcctacagccccgaggacaatagcacccagtggttccacaacgagagcctgatctccagccaggccagcagctacttcatcgacgccgccaccgtggacgacagcggcgagtatagatgccagaccaacctgagcaccctgagcgaccccgtgcagctggaagtgcacatcggatggctgctgctgcaggcccccagatgggtgttcaaagaagaggaccccatccacctgagatgccactcttggaagaacaccgccctgcacaaagtgacctacctgcagaacggcaagggcagaaagtacttccaccacaacagcgacttctacatccccaaggccaccctgaaggactccggctcctacttctgcagaggcctcgtgggcagcaagaacgtgtccagcgagacagtgaacatcaccatcacccagggcctggccgtgtctaccatcagcagctttttcccacccggctaccagacgcgtgaggacctgaagaacgtgttcccacctgaggtggccgtgttcgagcctagcgaggccgagatcagccacacccagaaagccaccctcgtgtgcctggctaccggcttctaccccgaccatgtggaactgtcttggtgggtcaacggcaaagaggtgcacagcggcgtgtgtaccgacccccagccactgaaagaacagcccgccctgaacgacagccggtactgcctgagcagcagactgagagtgtccgccaccttctggcagaacccccggaaccacttcagatgccaggtgcagttctacggcctgagcgagaacgacgagtggacccaggacagagccaagcccgtgacccagatcgtgtctgccgaagcctggggcagagccgatgatgtgattaagatccactggcaggaaaagaagtccaacaccatcctgggcagccaggaaggcaacaccatgaagaccaacgacacctacatgaagttcagctggctgaccgtgcccgagaagtccctggacaaagaacacagatgcatcgtgcggcacgaaaacaacaagaacggcgtggaccaggaaatcatcttcccacccatcaagaccgatgtgattacaatggaccccaaggacaactgctccaaggacgccaacgataccctgctgctccagctgaccaacaccagcgcctactacatgtacttgttgctgctgctgaagtccgtggtgtacttcgccatcatcacatgctgcctgctgcggagaaccgccttctgctgcaacggcgagaagtctcgcgccaagagaagcggatctggcgtgaagcagaccctgaatttcgacctgctgaagctggctggcgacgtggaatccaacccaggcccttctagaggccatatgaccgagtacaagcccacggtgcgcctcgccacccgcgacgacgtccccagggccgtacgcaccctcgccgccgcgttcgccgactaccccgccacgcgccacaccgtcgatccggaccgccacatcgagcgggtcaccgagctgcaagaactcttcctcacgcgcgtcgggctcgacatcggcaaggtgtgggtcgcggacgacggcgccgcggtggcggtctggaccacgccggagagcgtcgaagcgggggcggtgttcgccgagatcggcccgcgcatggccgagttgagcggttcccggctggccgcgcagcaacagatggaaggcctcctggcgccgcaccggcccaaggagcccgcgtggttcctggccaccgtcggcgtctcgcccgaccaccagggcaagggtctgggcagcgccgtcgtgctccccggagtggaggcggccgagcgcgccggggtgcccgccttcctggagacctccgcgccccgcaacctccccttctacgagcggctcggcttcaccgtcaccgccgacgtcgaggtgcccgaaggaccgcgcacctggtgcatgacccgcaagcccggtgcctga

SEQ ID NO: 8357 - DNA, 2772 bp, synthetic construct
  source 1..2772: mol_type = other DNA
atggccttaccagtgaccgccttgctcctgccgctggccttgctgctccacgccgccaggccgctcgagatccagaaccctgatcctgccgtgtaccagctgcgggatagcaagagcagcgacaagagcgtgtgtctgttcaccgacttcgacagccagaccaacgtgtcccagagcaaggactccgacgtgtacatcaccgataagtgcgtgctggacatgcggagcatggacttcaagagcaactccgccgtggcctggtccaacaagtccgatttcgcctgcgccaacgccttcaacaacagcattatccccgaggacacattcttcccaagccccgagagcagcgactccaccgaccacgtgaagcccaaagagacagagaacaccaagcagcccagcaagagctgccacaagcccaaggccatcgtgcacaccgagaaagtgaacatgatgagcctgaccgtgctgggcctgcggatgctgttcgccaaaaccgtggccgtgaacttcctgctgaccgccaagctgttcttcctcagggccaagcgatctggatctggagcaacaaacttctcactactcaaacaagcaggtgacgtggaggagaatcccgggcctactagcgccaccatggccttaccagtgaccgccttgctcctgccgctggccttgctgctccacgccgccaggccgggcatgcggactgaagacctcccaaaggctgtggtgttcctggagcctcaatggtacagggtgctggagaaggacagtgtgactctgaagtgccagggagcctactcccctgaggacaattccacacagtggtttcacaatgagagcctcatctcaagccaggcctccagctacttcattgacgctgccacagtggacgacagtggagagtacaggtgccagacaaacctctccaccctcagtgacccggtgcagctagaagtccatatcggctggctgttgctccaggcccctcggtgggtgttcaaggaggaagaccctattcacctgaggtgtcacagctggaagaacactgctctgcataaggtcacatatttacagaatggcaaaggcaggaagtattttcatcataattctgacttctacattccaaaagccacactcaaagacagcggctcctacttctgcagggggcttgttgggagtaaaaatgtgtcttcagagactgtgaacatcaccatcactcaaggtttggcagtgtcaaccatctcatcattctttccacctggctaccaaacgcgtgaggacctgaagaacgtgttcccacctgaggtggccgtgttcgagcctagcgaggccgagatcagccacacccagaaagccaccctcgtgtgcctggctaccggcttctaccccgaccatgtggaactgtcttggtgggtcaacggcaaagaggtgcacagcggcgtgtgtaccgacccccagccactgaaagaacagcccgccctgaacgacagccggtactgcctgagcagcagactgagagtgtccgccaccttctggcagaacccccggaaccacttcagatgccaggtgcagttctacggcctgagcgagaacgacgagtggacccaggacagagccaagcccgtgacccagatcgtgtctgccgaagcctggggcagagccgatgatgtgattaagatccactggcaggaaaagaagtccaacaccatcctgggcagccaggaaggcaacaccatgaagaccaacgacacctacatgaagttcagctggctgaccgtgcccgagaagtccctggacaaagaacacagatgcatcgtgcggcacgaaaacaacaagaacggcgtggaccaggaaatcatcttcccacccatcaagaccgatgtgattacaatggaccccaaggacaactgctccaaggacgccaacgataccctgctgctccagctgaccaacaccagcgcctactacatgtacttgttgctgctgctgaagtccgtggtgtacttcgccatcatcacatgctgcctgctgcggagaaccgccttctgctgcaacggcgagaagtctcgcgccaagagaagcggatctggcgtgaagcagaccctgaatttcgacctgctgaagctggctggcgacgtggaatccaacccaggcccttctagaggccatatgaccgagtacaagcccacggtgcgcctcgccacccgcgacgacgtccccagggccgtacgcaccctcgccgccgcgttcgccgactaccccgccacgcgccacaccgtcgatccggaccgccacatcgagcgggtcaccgagctgcaagaactcttcctcacgcgcgtcgggctcgacatcggcaaggtgtgggtcgcggacgacggcgccgcggtggcggtctggaccacgccggagagcgtcgaagcgggggcggtgttcgccgagatcggcccgcgcatggccgagttgagcggttcccggctggccgcgcagcaacagatggaaggcctcctggcgccgcaccggcccaaggagcccgcgtggttcctggccaccgtcggcgtctcgcccgaccaccagggcaagggtctgggcagcgccgtcgtgctccccggagtggaggcggccgagcgcgccggggtgcccgccttcctggagacctccgcgccccgcaacctccccttctacgagcggctcggcttcaccgtcaccgccgacgtcgaggtgcccgaaggaccgcgcacctggtgcatgacccgcaagcccggtgcctga

SEQ ID NO: 8358 - DNA, 2916 bp, synthetic construct
  source 1..2916: mol_type = other DNA
atggccttaccagtgaccgccttgctcctgccgctggccttgctgctccacgccgccaggccgctcgaggaggacctgaagaacgtgttcccacctgaggtggccgtgttcgagcctagcgaggccgagatcagccacacccagaaagccaccctcgtgtgcctggctaccggcttctaccccgaccatgtggaactgtcttggtgggtcaacggcaaagaggtgcacagcggcgtgtctaccgacccccagccactgaaagaacagcccgccctgaacgacagccggtactgcctgagcagcagactgagagtgtccgccaccttctggcagaacccccggaaccacttcagatgccaggtgcagttctacggcctgagcgagaacgacgagtggacccaggacagagccaagcccgtgacccagatcgtgtctgccgaagcctggggcagagccgatgatgtgattaagatccactggcaggaaaagaagtccaacaccatcctgggcagccaggaaggcaacaccatgaagaccaacgacacctacatgaagttcagctggctgaccgtgcccgagaagtccctggacaaagaacacagatgcatcgtgcggcacgaaaacaacaagaacggcgtggaccaggaaatcatcttcccacccatcaagaccgatgtgattacaatggaccccaaggacaactgctccaaggacgccaacgataccctgctgctccagctgaccaacaccagcgcctactacatgtacttgttgctgctgctgaagtccgtggtgtacttcgccatcatcacatgctgcctgctgcggagaaccgccttctgctgcaacggcgagaagtctagggccaagcgatctggatctggagcaacaaacttctcactactcaaacaagcaggtgacgtggaggagaatcccgggcctactagcatggccttaccagtgaccgccttgctcctgccgctggccttgctgctccacgccgccaggccggacatccagatgacacagactacatcctccctgtctgcctctctgggagacagagtcaccatcagttgcagggcaagtcaggacattagtaaatatttaaattggtatcagcagaaaccagatggaactgttaaactcctgatctaccatacatcaagattacactcaggagtcccatcaaggttcagtggcagtgggtctggaacagattattctctcaccattagcaacctggagcaagaagatattgccacttacttttgccaacagggtaatacgcttccgtacacgttcggaggggggaccaagctggagatcacaggtggcggtggctcgggcggtggtgggtcgggtggcggcggatctgaggtgaaactgcaggagtcaggacctggcctggtggcgccctcacagagcctgtccgtcacatgcactgtctcaggggtctcattacccgactatggtgtaagctggattcgccagcctccacgaaagggtctggagtggctgggagtaatatggggtagtgaaaccacatactataattcagctctcaaatccagactgaccatcatcaaggacaactccaagagccaagttttcttaaaaatgaacagtctgcaaactgatgacacagccatttactactgtgccaaacattattactacggtggtagctatgctatggactactggggtcaaggaacctcagtcaccgtctcctcaacgcgtatccagaaccctgatcctgccgtgtaccagctgcgggatagcaagagcagcgacaagagcgtgtgtctgttcaccgacttcgacagccagaccaacgtgtcccagagcaaggactccgacgtgtacatcaccgataagaccgtgctggacatgcggagcatggacttcaagagcaactccgccgtggcctggtccaacaagtccgatttcgcctgcgccaacgccttcaacaacagcattatccccgaggacacattcttcccaagccccgagagcagcgactccaccgaccacgtgaagcccaaagagacagagaacaccaagcagcccagcaagagctgccacaagcccaaggccatcgtgcacaccgagaaagtgaacatgatgagcctgaccgtgctgggcctgcggatgctgttcgccaaaaccgtggccgtgaacttcctgctgaccgccaagctgttcttcctccgcgccaagagaagcggatctggcgtgaagcagaccctgaatttcgacctgctgaagctggctggcgacgtggaatccaacccaggcccttctagaggccatatgaccgagtacaagcccacggtgcgcctcgccacccgcgacgacgtccccagggccgtacgcaccctcgccgccgcgttcgccgactaccccgccacgcgccacaccgtcgatccggaccgccacatcgagcgggtcaccgagctgcaagaactcttcctcacgcgcgtcgggctcgacatcggcaaggtgtgggtcgcggacgacggcgccgcggtggcggtctggaccacgccggagagcgtcgaagcgggggcggtgttcgccgagatcggcccgcgcatggccgagttgagcggttcccggctggccgcgcagcaacagatggaaggcctcctggcgccgcaccggcccaaggagcccgcgtggttcctggccaccgtcggcgtctcgcccgaccaccagggcaagggtctgggcagcgccgtcgtgctccccggagtggaggcggccgagcgcgccggggtgcccgccttcctggagacctccgcgccccgcaacctccccttctacgagcggctcggcttcaccgtcaccgccgacgtcgaggtgcccgaaggaccgcgcacctggtgcatgacccgcaagcccggtgcctga

SEQ ID NO: 8359 - DNA, 2919 bp, synthetic construct
  source 1..2919: mol_type = other DNA
atggccttaccagtgaccgccttgctcctgccgctggccttgctgctccacgccgccaggccgctcgaggaggacctgaagaacgtgttcccacctgaggtggccgtgttcgagcctagcgaggccgagatcagccacacccagaaagccaccctcgtgtgcctggctaccggcttctaccccgaccatgtggaactgtcttggtgggtcaacggcaaagaggtgcacagcggcgtgtctaccgacccccagccactgaaagaacagcccgccctgaacgacagccggtactgcctgagcagcagactgagagtgtccgccaccttctggcagaacccccggaaccacttcagatgccaggtgcagttctacggcctgagcgagaacgacgagtggacccaggacagagccaagcccgtgacccagatcgtgtctgccgaagcctggggcagagccgatgatgtgattaagatccactggcaggaaaagaagtccaacaccatcctgggcagccaggaaggcaacaccatgaagaccaacgacacctacatgaagttcagctggctgaccgtgcccgagaagtccctggacaaagaacacagatgcatcgtgcggcacgaaaacaacaagaacggcgtggaccaggaaatcatcttcccacccatcaagaccgatgtgattacaatggaccccaaggacaactgctccaaggacgccaacgataccctgctgctccagctgaccaacaccagcgcctactacatgtacttgttgctgctgctgaagtccgtggtgtacttcgccatcatcacatgctgcctgctgcggagaaccgccttctgctgcaacggcgagaagtctagggccaagcgatctggatctggagcaacaaacttctcactactcaaacaagcaggtgacgtggaggagaatcccgggcctactagcaccatggccttaccagtgaccgccttgctcctgccgctggccttgctgctccacgccgccaggccggagatcgtgatgacccagagccctgccaccctgtctctgagccctggcgaaagagccaccctgagctgtagagccagccaggacatcagcaagtacctgaactggtatcagcagaagcccggccaggcccccagactgctgatctaccacaccagcagactgcacagcggcatccccgccagattttctggctctggcagcggcaccgactacaccctgacaatcagcagcctccagcccgaggacttcgccgtgtacttctgtcagcaaggcaacaccctgccctacaccttcggccagggcaccaagctggaaatcaagggcggaggcggaagtggaggcggaggatctggcggcggaggctctcaggtgcaactccaggaatctggccctggcctcgtgaagcccagcgagacactgagcctgacctgtaccgtgtccggcgtgtccctgcctgactatggcgtgtcctggatcagacagccccctggcaagggcctggaatggatcggagtgatttggggcagcgaaaccacctactacaacagctccctgaagtccagagtgaccatctccaaggacaactccaagaaccaggtgtccctgaagctgagcagcgtgacagccgccgacaccgccgtgtattactgcgccaagcactactactacggcggcagctacgctatggactactggggccagggaaccctcgtgaccgtgtctagtacgcgtatccagaaccctgatcctgccgtgtaccagctgcgggatagcaagagcagcgacaagagcgtgtgtctgttcaccgacttcgacagccagaccaacgtgtcccagagcaaggactccgacgtgtacatcaccgataagaccgtgctggacatgcggagcatggacttcaagagcaactccgccgtggcctggtccaacaagtccgatttcgcctgcgccaacgccttcaacaacagcattatccccgaggacacattcttcccaagccccgagagcagcgactccaccgaccacgtgaagcccaaagagacagagaacaccaagcagcccagcaagagctgccacaagcccaaggccatcgtgcacaccgagaaagtgaacatgatgagcctgaccgtgctgggcctgcggatgctgttcgccaaaaccgtggccgtgaacttcctgctgaccgccaagctgttcttcctccgcgccaagagaagcggatctggcgtgaagcagaccctgaatttcgacctgctgaagctggctggcgacgtggaatccaacccaggcccttctagaggccatatgaccgagtacaagcccacggtgcgcctcgccacccgcgacgacgtccccagggccgtacgcaccctcgccgccgcgttcgccgactaccccgccacgcgccacaccgtcgatccggaccgccacatcgagcgggtcaccgagctgcaagaactcttcctcacgcgcgtcgggctcgacatcggcaaggtgtgggtcgcggacgacggcgccgcggtggcggtctggaccacgccggagagcgtcgaagcgggggcggtgttcgccgagatcggcccgcgcatggccgagttgagcggttcccggctggccgcgcagcaacagatggaaggcctcctggcgccgcaccggcccaaggagcccgcgtggttcctggccaccgtcggcgtctcgcccgaccaccagggcaagggtctgggcagcgccgtcgtgctccccggagtggaggcggccgagcgcgccggggtgcccgccttcctggagacctccgcgccccgcaacctccccttctacgagcggctcggcttcaccgtcaccgccgacgtcgaggtgcccgaaggaccgcgcacctggtgcatgacccgcaagcccggtgcctga

SEQ ID NO: 8360 - DNA, 2922 bp, synthetic construct
  source 1..2922: mol_type = other DNA
atggccttaccagtgaccgccttgctcctgccgctggccttgctgctccacgccgccaggccgctcgaggaggacctgaagaacgtgttcccacctgaggtggccgtgttcgagcctagcgaggccgagatcagccacacccagaaagccaccctcgtgtgcctggctaccggcttctaccccgaccatgtggaactgtcttggtgggtcaacggcaaagaggtgcacagcggcgtgtctaccgacccccagccactgaaagaacagcccgccctgaacgacagccggtactgcctgagcagcagactgagagtgtccgccaccttctggcagaacccccggaaccacttcagatgccaggtgcagttctacggcctgagcgagaacgacgagtggacccaggacagagccaagcccgtgacccagatcgtgtctgccgaagcctggggcagagccgatgatgtgattaagatccactggcaggaaaagaagtccaacaccatcctgggcagccaggaaggcaacaccatgaagaccaacgacacctacatgaagttcagctggctgaccgtgcccgagaagtccctggacaaagaacacagatgcatcgtgcggcacgaaaacaacaagaacggcgtggaccaggaaatcatcttcccacccatcaagaccgatgtgattacaatggaccccaaggacaactgctccaaggacgccaacgataccctgctgctccagctgaccaacaccagcgcctactacatgtacttgttgctgctgctgaagtccgtggtgtacttcgccatcatcacatgctgcctgctgcggagaaccgccttctgctgcaacggcgagaagtctagggccaagcgatctggatctggagcaacaaacttctcactactcaaacaagcaggtgacgtggaggagaatcccgggcctactagcaccatggccttaccagtgaccgccttgctcctgccgctggccttgctgctccacgccgccaggccggacgagatcgtgctgacacagagccccgccaccctgtcactgtctccaggcgaaagagccaccctgagctgtagcgccagcagcagcgtgtcctacatgcactggtatcagcagaagcccggccaggcccccagactgctgatctacgataccagcaagctggcctccggcatccccgccagattttctggcagcggctccggcaccgacttcaccctgacaatcagcagcctggaacccgaggacgtggccgtgtactactgttttcaaggcagcgtgtaccccttcaccttcggccagggcaccaagctggaaatcaagagaggtggcggtggctcgggcggtggtgggtcgggtggcggcggatctcaggtgcagctccaggaatctggccctggcctcgtgaagcctagccagaccctgagcctgacctgtaccgtgtctggcggcagcatcagcacaagcggcatgggcgtgggctggatcagacagcaccctggcaagggcctggaatggatcggccacatttggtgggacgacgacaagcggtacaaccccgccctgaagtccagagtgaccatcagcgtggacaccagcaagaaccagttcagcctgaagctgagcagcgtgacagccgccgataccgccgtgtattattgcgcccggatggaactgtggtcctactacttcgactactggggccagggaaccctcgtgaccgtgtctagtacgcgtatccagaaccctgatcctgccgtgtaccagctgcgggatagcaagagcagcgacaagagcgtgtgtctgttcaccgacttcgacagccagaccaacgtgtcccagagcaaggactccgacgtgtacatcaccgataagaccgtgctggacatgcggagcatggacttcaagagcaactccgccgtggcctggtccaacaagtccgatttcgcctgcgccaacgccttcaacaacagcattatccccgaggacacattcttcccaagccccgagagcagcgactccaccgaccacgtgaagcccaaagagacagagaacaccaagcagcccagcaagagctgccacaagcccaaggccatcgtgcacaccgagaaagtgaacatgatgagcctgaccgtgctgggcctgcggatgctgttcgccaaaaccgtggccgtgaacttcctgctgaccgccaagctgttcttcctccgcgccaagagaagcggatctggcgtgaagcagaccctgaatttcgacctgctgaagctggctggcgacgtggaatccaacccaggcccttctagaggccatatgaccgagtacaagcccacggtgcgcctcgccacccgcgacgacgtccccagggccgtacgcaccctcgccgccgcgttcgccgactaccccgccacgcgccacaccgtcgatccggaccgccacatcgagcgggtcaccgagctgcaagaactcttcctcacgcgcgtcgggctcgacatcggcaaggtgtgggtcgcggacgacggcgccgcggtggcggtctggaccacgccggagagcgtcgaagcgggggcggtgttcgccgagatcggcccgcgcatggccgagttgagcggttcccggctggccgcgcagcaacagatggaaggcctcctggcgccgcaccggcccaaggagcccgcgtggttcctggccaccgtcggcgtctcgcccgaccaccagggcaagggtctgggcagcgccgtcgtgctccccggagtggaggcggccgagcgcgccggggtgcccgccttcctggagacctccgcgccccgcaacctccccttctacgagcggctcggcttcaccgtcaccgccgacgtcgaggtgcccgaaggaccgcgcacctggtgcatgacccgcaagcccggtgcctga

SEQ ID NO: 8361 - DNA, 2910 bp, synthetic construct
  source 1..2910: mol_type = other DNA
atggccttaccagtgaccgccttgctcctgccgctggccttgctgctccacgccgccaggccgctcgaggaggacctgaagaacgtgttcccacctgaggtggccgtgttcgagcctagcgaggccgagatcagccacacccagaaagccaccctcgtgtgcctggctaccggcttctaccccgaccatgtggaactgtcttggtgggtcaacggcaaagaggtgcacagcggcgtgtctaccgacccccagccactgaaagaacagcccgccctgaacgacagccggtactgcctgagcagcagactgagagtgtccgccaccttctggcagaacccccggaaccacttcagatgccaggtgcagttctacggcctgagcgagaacgacgagtggacccaggacagagccaagcccgtgacccagatcgtgtctgccgaagcctggggcagagccgatgatgtgattaagatccactggcaggaaaagaagtccaacaccatcctgggcagccaggaaggcaacaccatgaagaccaacgacacctacatgaagttcagctggctgaccgtgcccgagaagtccctggacaaagaacacagatgcatcgtgcggcacgaaaacaacaagaacggcgtggaccaggaaatcatcttcccacccatcaagaccgatgtgattacaatggaccccaaggacaactgctccaaggacgccaacgataccctgctgctccagctgaccaacaccagcgcctactacatgtacttgttgctgctgctgaagtccgtggtgtacttcgccatcatcacatgctgcctgctgcggagaaccgccttctgctgcaacggcgagaagtctagggccaagcgatctggatctggagcaacaaacttctcactactcaaacaagcaggtgacgtggaggagaatcccgggcctactagcatggccttaccagtgaccgccttgctcctgccgctggccttgctgctccacgccgccaggccggacatccagatgacacagagccctagcagcctgtctgccagcgtgggagacagagtgaccatcacctgtagagccagccaggacatcagcaactacctgaactggtatcagcagaagcccggcaaggcccctaagctgctgatctactacaccagcagactgcacagcggcgtgcccagcagattttctggctctggcagcggcaccgacttcaccctgacaatatctagcctccagcctgaggacttcgccacctactattgccagcagggcaacaccctgccttacacatttggacagggcaccaaggtggaaatcaagagaggcggaggcggaagtggaggcggaggatctggcggcggaggctctgaagtgcagctggttgaatcaggtggcggcctggttcaacctggcggatctctgagactgagctgtgccgccagcggcttcaccttcagcgactactttatgagctgggtccgacaggcccctggcaaaggacttgaatgggtcgccaccatcagcaatggcggcacctacacttactaccccgacagcgtgaagggcagattcaccatctccagagacaacagcaagaacaccctgtacctccagatgaactccctgagagccgaggacaccgccgtgtactactgcgccagattcgacggctacatcttcgactattggggccagggcaccctggtcacagtctcttctacgcgtatccagaaccctgatcctgccgtgtaccagctgcgggatagcaagagcagcgacaagagcgtgtgtctgttcaccgacttcgacagccagaccaacgtgtcccagagcaaggactccgacgtgtacatcaccgataagaccgtgctggacatgcggagcatggacttcaagagcaactccgccgtggcctggtccaacaagtccgatttcgcctgcgccaacgccttcaacaacagcattatccccgaggacacattcttcccaagccccgagagcagcgactccaccgaccacgtgaagcccaaagagacagagaacaccaagcagcccagcaagagctgccacaagcccaaggccatcgtgcacaccgagaaagtgaacatgatgagcctgaccgtgctgggcctgcggatgctgttcgccaaaaccgtggccgtgaacttcctgctgaccgccaagctgttcttcctccgcgccaagagaagcggatctggcgtgaagcagaccctgaatttcgacctgctgaagctggctggcgacgtggaatccaacccaggcccttctagaggccatatgaccgagtacaagcccacggtgcgcctcgccacccgcgacgacgtccccagggccgtacgcaccctcgccgccgcgttcgccgactaccccgccacgcgccacaccgtcgatccggaccgccacatcgagcgggtcaccgagctgcaagaactcttcctcacgcgcgtcgggctcgacatcggcaaggtgtgggtcgcggacgacggcgccgcggtggcggtctggaccacgccggagagcgtcgaagcgggggcggtgttcgccgagatcggcccgcgcatggccgagttgagcggttcccggctggccgcgcagcaacagatggaaggcctcctggcgccgcaccggcccaaggagcccgcgtggttcctggccaccgtcggcgtctcgcccgaccaccagggcaagggtctgggcagcgccgtcgtgctccccggagtggaggcggccgagcgcgccggggtgcccgccttcctggagacctccgcgccccgcaacctccccttctacgagcggctcggcttcaccgtcaccgccgacgtcgaggtgcccgaaggaccgcgcacctggtgcatgacccgcaagcccggtgcctga

SEQ ID NO: 8362 - DNA, 2922 bp, synthetic construct
  source 1..2922: mol_type = other DNA
atggccttaccagtgaccgccttgctcctgccgctggccttgctgctccacgccgccaggccgctcgaggaggacctgaagaacgtgttcccacctgaggtggccgtgttcgagcctagcgaggccgagatcagccacacccagaaagccaccctcgtgtgcctggctaccggcttctaccccgaccatgtggaactgtcttggtgggtcaacggcaaagaggtgcacagcggcgtgtctaccgacccccagccactgaaagaacagcccgccctgaacgacagccggtactgcctgagcagcagactgagagtgtccgccaccttctggcagaacccccggaaccacttcagatgccaggtgcagttctacggcctgagcgagaacgacgagtggacccaggacagagccaagcccgtgacccagatcgtgtctgccgaagcctggggcagagccgatgatgtgattaagatccactggcaggaaaagaagtccaacaccatcctgggcagccaggaaggcaacaccatgaagaccaacgacacctacatgaagttcagctggctgaccgtgcccgagaagtccctggacaaagaacacagatgcatcgtgcggcacgaaaacaacaagaacggcgtggaccaggaaatcatcttcccacccatcaagaccgatgtgattacaatggaccccaaggacaactgctccaaggacgccaacgataccctgctgctccagctgaccaacaccagcgcctactacatgtacttgttgctgctgctgaagtccgtggtgtacttcgccatcatcacatgctgcctgctgcggagaaccgccttctgctgcaacggcgagaagtctagggccaagcgatctggatctggagcaacaaacttctcactactcaaacaagcaggtgacgtggaggagaatcccgggcctactagcatggccttaccagtgaccgccttgctcctgccgctggccttgctgctccacgccgccaggccggacatccagatgacacagagccctagcagcctgtctgccagcgtgggagacagagtgaccatcacatgcaaggccagcgaccacatcaacaactggctggcctggtatcagcagaagcctggacaggcccctaagctgctgatctacggcgctaccacactggaaacaggcgtgcccagcagattttctggcagcggctctggcaccgactacaccctgacaatatccagcctccagcctgaggacttcgccacctactactgtcagcagagctggaacaccccttggacattcggccagggcaccaagctggaaatcaagagaggcggaggcggaagtggaggcggaggatctggcggcggaggctctcaagttcagcttcaacagcctggcgctgagctggtcaaacctggcgcttctgtgaagatgagctgcaaagccagcggctacgccttcagcagctactggatcaactggatgaagcagaaacccggccagggactcgaatggatcggccaaatctatcccggcgacggcgacaccaactacaacggcaagttcaagggcagagccacactgaccgccgatacctctagcagcacagcctacatgcagctgagcagcctgaccagcgaagatagcgccgtgtacttctgtgcccggtccatcacaacagtcgtgggctgcgctatggactattggggccagggaacaagcgtgaccgtgtctagtacgcgtatccagaaccctgatcctgccgtgtaccagctgcgggatagcaagagcagcgacaagagcgtgtgtctgttcaccgacttcgacagccagaccaacgtgtcccagagcaaggactccgacgtgtacatcaccgataagaccgtgctggacatgcggagcatggacttcaagagcaactccgccgtggcctggtccaacaagtccgatttcgcctgcgccaacgccttcaacaacagcattatccccgaggacacattcttcccaagccccgagagcagcgactccaccgaccacgtgaagcccaaagagacagagaacaccaagcagcccagcaagagctgccacaagcccaaggccatcgtgcacaccgagaaagtgaacatgatgagcctgaccgtgctgggcctgcggatgctgttcgccaaaaccgtggccgtgaacttcctgctgaccgccaagctgttcttcctccgcgccaagagaagcggatctggcgtgaagcagaccctgaatttcgacctgctgaagctggctggcgacgtggaatccaacccaggcccttctagaggccatatgaccgagtacaagcccacggtgcgcctcgccacccgcgacgacgtccccagggccgtacgcaccctcgccgccgcgttcgccgactaccccgccacgcgccacaccgtcgatccggaccgccacatcgagcgggtcaccgagctgcaagaactcttcctcacgcgcgtcgggctcgacatcggcaaggtgtgggtcgcggacgacggcgccgcggtggcggtctggaccacgccggagagcgtcgaagcgggggcggtgttcgccgagatcggcccgcgcatggccgagttgagcggttcccggctggccgcgcagcaacagatggaaggcctcctggcgccgcaccggcccaaggagcccgcgtggttcctggccaccgtcggcgtctcgcccgaccaccagggcaagggtctgggcagcgccgtcgtgctccccggagtggaggcggccgagcgcgccggggtgcccgccttcctggagacctccgcgccccgcaacctccccttctacgagcggctcggcttcaccgtcaccgccgacgtcgaggtgcccgaaggaccgcgcacctggtgcatgacccgcaagcccggtgcctga

SEQ ID NO: 8363 - DNA, 2928 bp, synthetic construct
  source 1..2928: mol_type = other DNA
atggccttaccagtgaccgccttgctcctgccgctggccttgctgctccacgccgccaggccgctcgaggaggacctgaagaacgtgttcccacctgaggtggccgtgttcgagcctagcgaggccgagatcagccacacccagaaagccaccctcgtgtgcctggctaccggcttctaccccgaccatgtggaactgtcttggtgggtcaacggcaaagaggtgcacagcggcgtgtctaccgacccccagccactgaaagaacagcccgccctgaacgacagccggtactgcctgagcagcagactgagagtgtccgccaccttctggcagaacccccggaaccacttcagatgccaggtgcagttctacggcctgagcgagaacgacgagtggacccaggacagagccaagcccgtgacccagatcgtgtctgccgaagcctggggcagagccgatgatgtgattaagatccactggcaggaaaagaagtccaacaccatcctgggcagccaggaaggcaacaccatgaagaccaacgacacctacatgaagttcagctggctgaccgtgcccgagaagtccctggacaaagaacacagatgcatcgtgcggcacgaaaacaacaagaacggcgtggaccaggaaatcatcttcccacccatcaagaccgatgtgattacaatggaccccaaggacaactgctccaaggacgccaacgataccctgctgctccagctgaccaacaccagcgcctactacatgtacttgttgctgctgctgaagtccgtggtgtacttcgccatcatcacatgctgcctgctgcggagaaccgccttctgctgcaacggcgagaagtctagggccaagcgatctggatctggagcaacaaacttctcactactcaaacaagcaggtgacgtggaggagaatcccgggcctactagcatggccttaccagtgaccgccttgctcctgccgctggccttgctgctccacgccgccaggccgcagatcgtgctgtctcagtctcctgccatcctgagcgcttccccaggcgagaaagtgaccatgacctgtagagccagcagcagcgtgtcctacatgcactggtatcagcagaagcccggcagcagccctaagccttggatctacgccaccagcaatctggcctctggcgtgccagccagattttctggctctggcagcggcaccagctacagcttcacaatcagcagagtggaagccgaggacgccgccacctactattgtcagcagtggaccttcaatcctcctaccttcggcggaggcacccggctggaaatcaaaagaacagtggctgctggcggaggcggaagtggaggcggaggatctggcggcggaggctctcaggcttatctgcaacagagcggagccgaactcgtcagacctggcgcttctgtgaagatgagctgcaaggccagcggctacaccttcaccagctataatatgcactgggtcaagcagacccctcggcagggactcgaatggatcggcggaatctatcccggcaacggcgacacctcctacaaccagaagttcaagggcaaagccacactgaccgtgggcaagagcagcagcaccgcctatatgcagctcagcagcctgaccagcgaggacagcgccgtgtacttctgcgccagatacgactacaactacgctatggactactggggccagggcaccagcgtgacagttagctctgccagcacgcgtatccagaaccctgatcctgccgtgtaccagctgcgggatagcaagagcagcgacaagagcgtgtgtctgttcaccgacttcgacagccagaccaacgtgtcccagagcaaggactccgacgtgtacatcaccgataagaccgtgctggacatgcggagcatggacttcaagagcaactccgccgtggcctggtccaacaagtccgatttcgcctgcgccaacgccttcaacaacagcattatccccgaggacacattcttcccaagccccgagagcagcgactccaccgaccacgtgaagcccaaagagacagagaacaccaagcagcccagcaagagctgccacaagcccaaggccatcgtgcacaccgagaaagtgaacatgatgagcctgaccgtgctgggcctgcggatgctgttcgccaaaaccgtggccgtgaacttcctgctgaccgccaagctgttcttcctccgcgccaagagaagcggatctggcgtgaagcagaccctgaatttcgacctgctgaagctggctggcgacgtggaatccaacccaggcccttctagaggccatatgaccgagtacaagcccacggtgcgcctcgccacccgcgacgacgtccccagggccgtacgcaccctcgccgccgcgttcgccgactaccccgccacgcgccacaccgtcgatccggaccgccacatcgagcgggtcaccgagctgcaagaactcttcctcacgcgcgtcgggctcgacatcggcaaggtgtgggtcgcggacgacggcgccgcggtggcggtctggaccacgccggagagcgtcgaagcgggggcggtgttcgccgagatcggcccgcgcatggccgagttgagcggttcccggctggccgcgcagcaacagatggaaggcctcctggcgccgcaccggcccaaggagcccgcgtggttcctggccaccgtcggcgtctcgcccgaccaccagggcaagggtctgggcagcgccgtcgtgctccccggagtggaggcggccgagcgcgccggggtgcccgccttcctggagacctccgcgccccgcaacctccccttctacgagcggctcggcttcaccgtcaccgccgacgtcgaggtgcccgaaggaccgcgcacctggtgcatgacccgcaagcccggtgcctga

SEQ ID NO: 8364 - DNA, 2922 bp, synthetic construct
  source 1..2922: mol_type = other DNA
atggccttaccagtgaccgccttgctcctgccgctggccttgctgctccacgccgccaggccgctcgaggaggacctgaagaacgtgttcccacctgaggtggccgtgttcgagcctagcgaggccgagatcagccacacccagaaagccaccctcgtgtgcctggctaccggcttctaccccgaccatgtggaactgtcttggtgggtcaacggcaaagaggtgcacagcggcgtgtctaccgacccccagccactgaaagaacagcccgccctgaacgacagccggtactgcctgagcagcagactgagagtgtccgccaccttctggcagaacccccggaaccacttcagatgccaggtgcagttctacggcctgagcgagaacgacgagtggacccaggacagagccaagcccgtgacccagatcgtgtctgccgaagcctggggcagagccgatgatgtgattaagatccactggcaggaaaagaagtccaacaccatcctgggcagccaggaaggcaacaccatgaagaccaacgacacctacatgaagttcagctggctgaccgtgcccgagaagtccctggacaaagaacacagatgcatcgtgcggcacgaaaacaacaagaacggcgtggaccaggaaatcatcttcccacccatcaagaccgatgtgattacaatggaccccaaggacaactgctccaaggacgccaacgataccctgctgctccagctgaccaacaccagcgcctactacatgtacttgttgctgctgctgaagtccgtggtgtacttcgccatcatcacatgctgcctgctgcggagaaccgccttctgctgcaacggcgagaagtctagggccaagcgatctggatctggagcaacaaacttctcactactcaaacaagcaggtgacgtggaggagaatcccgggcctactagcatggccttaccagtgaccgccttgctcctgccgctggccttgctgctccacgccgccaggccggagatcgtgctgacacagagccctgccaccctgtctctgagccctggcgaaagagccaccctgagctgtagagccagccagagcgtgtccagctacctggcctggtatcagcagaagcccggccaggctccccggctgctgatctacgatgccagcaatagagccaccggcatccccgccagattttccggctctggcagcggcaccgacttcaccctgaccatcagctccctggaacccgaggacttcgccgtgtactactgccagcagcggagcaactggcccatcacattcggccagggcacccggctggaaatcaaaggcggaggcggaagtggaggcggaggatctggcggcggaggctctgaggtgcagcttgttgagtctggcggaggactggtgcagcccgatagaagcctgagactgtcttgtgccgccagcggcttcaccttccacgattatgccatgcactgggtccgacaggcccctggcaaaggacttgaatgggtgtccaccatctcttggaacagcggcacaatcggctacgccgactctgtgaagggcagattcaccatcagccgggacaacgccaagaacagcctgtacctccagatgaactccctgagagccgaggacacagccctgtactactgcgccaaggacatccagtacggcaactactactacggcatggacgtgtggggccagggcacaacagtgacagtctcttctacgcgtatccagaaccctgatcctgccgtgtaccagctgcgggatagcaagagcagcgacaagagcgtgtgtctgttcaccgacttcgacagccagaccaacgtgtcccagagcaaggactccgacgtgtacatcaccgataagaccgtgctggacatgcggagcatggacttcaagagcaactccgccgtggcctggtccaacaagtccgatttcgcctgcgccaacgccttcaacaacagcattatccccgaggacacattcttcccaagccccgagagcagcgactccaccgaccacgtgaagcccaaagagacagagaacaccaagcagcccagcaagagctgccacaagcccaaggccatcgtgcacaccgagaaagtgaacatgatgagcctgaccgtgctgggcctgcggatgctgttcgccaaaaccgtggccgtgaacttcctgctgaccgccaagctgttcttcctccgcgccaagagaagcggatctggcgtgaagcagaccctgaatttcgacctgctgaagctggctggcgacgtggaatccaacccaggcccttctagaggccatatgaccgagtacaagcccacggtgcgcctcgccacccgcgacgacgtccccagggccgtacgcaccctcgccgccgcgttcgccgactaccccgccacgcgccacaccgtcgatccggaccgccacatcgagcgggtcaccgagctgcaagaactcttcctcacgcgcgtcgggctcgacatcggcaaggtgtgggtcgcggacgacggcgccgcggtggcggtctggaccacgccggagagcgtcgaagcgggggcggtgttcgccgagatcggcccgcgcatggccgagttgagcggttcccggctggccgcgcagcaacagatggaaggcctcctggcgccgcaccggcccaaggagcccgcgtggttcctggccaccgtcggcgtctcgcccgaccaccagggcaagggtctgggcagcgccgtcgtgctccccggagtggaggcggccgagcgcgccggggtgcccgccttcctggagacctccgcgccccgcaacctccccttctacgagcggctcggcttcaccgtcaccgccgacgtcgaggtgcccgaaggaccgcgcacctggtgcatgacccgcaagcccggtgcctga

SEQ ID NO: 8365 - DNA, 2916 bp, synthetic construct
  source 1..2916: mol_type = other DNA
atggccttaccagtgaccgccttgctcctgccgctggccttgctgctccacgccgccaggccgctcgaggaggacctgaagaacgtgttcccacctgaggtggccgtgttcgagcctagcgaggccgagatcagccacacccagaaagccaccctcgtgtgcctggctaccggcttctaccccgaccatgtggaactgtcttggtgggtcaacggcaaagaggtgcacagcggcgtgtctaccgacccccagccactgaaagaacagcccgccctgaacgacagccggtactgcctgagcagcagactgagagtgtccgccaccttctggcagaacccccggaaccacttcagatgccaggtgcagttctacggcctgagcgagaacgacgagtggacccaggacagagccaagcccgtgacccagatcgtgtctgccgaagcctggggcagagccgatgatgtgattaagatccactggcaggaaaagaagtccaacaccatcctgggcagccaggaaggcaacaccatgaagaccaacgacacctacatgaagttcagctggctgaccgtgcccgagaagtccctggacaaagaacacagatgcatcgtgcggcacgaaaacaacaagaacggcgtggaccaggaaatcatcttcccacccatcaagaccgatgtgattacaatggaccccaaggacaactgctccaaggacgccaacgataccctgctgctccagctgaccaacaccagcgcctactacatgtacttgttgctgctgctgaagtccgtggtgtacttcgccatcatcacatgctgcctgctgcggagaaccgccttctgctgcaacggcgagaagtctagggccaagcgatctggatctggagcaacaaacttctcactactcaaacaagcaggtgacgtggaggagaatcccgggcctactagcatggccttaccagtgaccgccttgctcctgccgctggccttgctgctccacgccgccaggccggacatccagatgacccagagccccagcagcctgtctgccagcgtgggcgacagagtgaccatcacctgtagagccagccaggacgtgaacaccgccgtggcctggtatcagcagaagcctggcaaggcccccaagctgctgatctacagcgccagcttcctggaaagcggcgtgcccagcagattcagcggaagcagaagcggcaccgacttcaccctgaccatcagctccctccagcccgaggacttcgccacctactactgccagcagcactacaccacccctcccaccttcggccagaccaaggtggaaatcaagagaggcggaggcggaagtggaggcggaggatctggcggcggaggctctgaagtgcaactggtggaatctggcggcggactggtgcagcctggcggatctctgagactgagctgtgccgccagcggcttcaacatcaaggacacctacatccactgggtgcgccaggcccctggaaagggactggaatgggtggcccggatctaccccaccaacggctacaccagatacgccgacagcgtgaagggccggttcaccatcagcgccgacaccagcaagaataccgcctacctccagatgaacagcctgcgggccgaggataccgccgtgtactactgctcaagatggggaggcgacggcttctacgctatggacgtgtggggccagggcacccttgtgaccgtgtcatctacgcgtatccagaaccctgatcctgccgtgtaccagctgcgggatagcaagagcagcgacaagagcgtgtgtctgttcaccgacttcgacagccagaccaacgtgtcccagagcaaggactccgacgtgtacatcaccgataagaccgtgctggacatgcggagcatggacttcaagagcaactccgccgtggcctggtccaacaagtccgatttcgcctgcgccaacgccttcaacaacagcattatccccgaggacacattcttcccaagccccgagagcagcgactccaccgaccacgtgaagcccaaagagacagagaacaccaagcagcccagcaagagctgccacaagcccaaggccatcgtgcacaccgagaaagtgaacatgatgagcctgaccgtgctgggcctgcggatgctgttcgccaaaaccgtggccgtgaacttcctgctgaccgccaagctgttcttcctccgcgccaagagaagcggatctggcgtgaagcagaccctgaatttcgacctgctgaagctggctggcgacgtggaatccaacccaggcccttctagaggccatatgaccgagtacaagcccacggtgcgcctcgccacccgcgacgacgtccccagggccgtacgcaccctcgccgccgcgttcgccgactaccccgccacgcgccacaccgtcgatccggaccgccacatcgagcgggtcaccgagctgcaagaactcttcctcacgcgcgtcgggctcgacatcggcaaggtgtgggtcgcggacgacggcgccgcggtggcggtctggaccacgccggagagcgtcgaagcgggggcggtgttcgccgagatcggcccgcgcatggccgagttgagcggttcccggctggccgcgcagcaacagatggaaggcctcctggcgccgcaccggcccaaggagcccgcgtggttcctggccaccgtcggcgtctcgcccgaccaccagggcaagggtctgggcagcgccgtcgtgctccccggagtggaggcggccgagcgcgccggggtgcccgccttcctggagacctccgcgccccgcaacctccccttctacgagcggctcggcttcaccgtcaccgccgacgtcgaggtgcccgaaggaccgcgcacctggtgcatgacccgcaagcccggtgcctga

SEQ ID NO: 8366 - DNA, 2553 bp, synthetic construct
  source 1..2553: mol_type = other DNA
atggccttaccagtgaccgccttgctcctgccgctggccttgctgctccacgccgccaggccgctcgaggaggacctgaagaacgtgttcccacctgaggtggccgtgttcgagcctagcgaggccgagatcagccacacccagaaagccaccctcgtgtgcctggctaccggcttctaccccgaccatgtggaactgtcttggtgggtcaacggcaaagaggtgcacagcggcgtgtctaccgacccccagccactgaaagaacagcccgccctgaacgacagccggtactgcctgagcagcagactgagagtgtccgccaccttctggcagaacccccggaaccacttcagatgccaggtgcagttctacggcctgagcgagaacgacgagtggacccaggacagagccaagcccgtgacccagatcgtgtctgccgaagcctggggcagagccgatgatgtgattaagatccactggcaggaaaagaagtccaacaccatcctgggcagccaggaaggcaacaccatgaagaccaacgacacctacatgaagttcagctggctgaccgtgcccgagaagtccctggacaaagaacacagatgcatcgtgcggcacgaaaacaacaagaacggcgtggaccaggaaatcatcttcccacccatcaagaccgatgtgattacaatggaccccaaggacaactgctccaaggacgccaacgataccctgctgctccagctgaccaacaccagcgcctactacatgtacttgttgctgctgctgaagtccgtggtgtacttcgccatcatcacatgctgcctgctgcggagaaccgccttctgctgcaacggcgagaagtctagggccaagcgatctggatctggagcaacaaacttctcactactcaaacaagcaggtgacgtggaggagaatcccgggcctactagcatggccctgcccgtgacagccctgctgctgcctctggctctgctgctgcacgccgccagacccgatgaattcgaggtgcaactggtggaaagcggcggaggcctggtgcaggctggcggatctctgagactgagctgtgccgccagcggcatcaccttcagcatcaacacaatgggctggtacagacaggcccctggcaagcagagggaactggtggccctgatctccagcatcggcgacacctactacgccgacagcgtgaagggccggttcaccatcagccgggacaacgccaagaacaccgtgtacctccagatgaacagcctgaagcccgaggacaccgccgtgtactactgcaagcggttcagaacagccgcccagggcaccgattattggggccagggaacacaagtgaccgtgtcctctacgcgtatccagaaccctgatcctgccgtgtaccagctgcgggatagcaagagcagcgacaagagcgtgtgtctgttcaccgacttcgacagccagaccaacgtgtcccagagcaaggactccgacgtgtacatcaccgataagaccgtgctggacatgcggagcatggacttcaagagcaactccgccgtggcctggtccaacaagtccgatttcgcctgcgccaacgccttcaacaacagcattatccccgaggacacattcttcccaagccccgagagcagcgactccaccgaccacgtgaagcccaaagagacagagaacaccaagcagcccagcaagagctgccacaagcccaaggccatcgtgcacaccgagaaagtgaacatgatgagcctgaccgtgctgggcctgcggatgctgttcgccaaaaccgtggccgtgaacttcctgctgaccgccaagctgttcttcctccgcgccaagagaagcggatctggcgtgaagcagaccctgaatttcgacctgctgaagctggctggcgacgtggaatccaacccaggcccttctagaggccatatgaccgagtacaagcccacggtgcgcctcgccacccgcgacgacgtccccagggccgtacgcaccctcgccgccgcgttcgccgactaccccgccacgcgccacaccgtcgatccggaccgccacatcgagcgggtcaccgagctgcaagaactcttcctcacgcgcgtcgggctcgacatcggcaaggtgtgggtcgcggacgacggcgccgcggtggcggtctggaccacgccggagagcgtcgaagcgggggcggtgttcgccgagatcggcccgcgcatggccgagttgagcggttcccggctggccgcgcagcaacagatggaaggcctcctggcgccgcaccggcccaaggagcccgcgtggttcctggccaccgtcggcgtctcgcccgaccaccagggcaagggtctgggcagcgccgtcgtgctccccggagtggaggcggccgagcgcgccggggtgcccgccttcctggagacctccgcgccccgcaacctccccttctacgagcggctcggcttcaccgtcaccgccgacgtcgaggtgcccgaaggaccgcgcacctggtgcatgacccgcaagcccggtgcctga

SEQ ID NO: 8367 - DNA, 2553 bp, synthetic construct; identical to SEQ ID NO: 8366
  source 1..2553: mol_type = other DNA

SEQ ID NO: 8368 - DNA, 3348 bp, synthetic construct
  source 1..3348: mol_type = other DNA
atggccttaccagtgaccgccttgctcctgccgctggccttgctgctccacgccgccaggccgctcgaggaggacctgaagaacgtgttcccacctgaggtggccgtgttcgagcctagcgaggccgagatcagccacacccagaaagccaccctcgtgtgcctggctaccggcttctaccccgaccatgtggaactgtcttggtgggtcaacggcaaagaggtgcacagcggcgtgtctaccgacccccagccactgaaagaacagcccgccctgaacgacagccggtactgcctgagcagcagactgagagtgtccgccaccttctggcagaacccccggaaccacttcagatgccaggtgcagttctacggcctgagcgagaacgacgagtggacccaggacagagccaagcccgtgacccagatcgtgtctgccgaagcctggggcagagccgatgatgtgattaagatccactggcaggaaaagaagtccaacaccatcctgggcagccaggaaggcaacaccatgaagaccaacgacacctacatgaagttcagctggctgaccgtgcccgagaagtccctggacaaagaacacagatgcatcgtgcggcacgaaaacaacaagaacggcgtggaccaggaaatcatcttcccacccatcaagaccgatgtgattacaatggaccccaaggacaactgctccaaggacgccaacgataccctgctgctccagctgaccaacaccagcgcctactacatgtacttgttgctgctgctgaagtccgtggtgtacttcgccatcatcacatgctgcctgctgcggagaaccgccttctgctgcaacggcgagaagtctagggccaagcgatctggatctggagcaacaaacttctcactactcaaacaagcaggtgacgtggaggagaatcccgggcctactagcatggccttaccagtgaccgccttgctcctgccgctggccttgctgctccacgccgccaggccgcaggtccagctcgtcgagtccggcggcggcctcgtccaggccggcgactccgtcaccctctcctgcaccgcctccggccgcaccttctcctcctacgccctcgcctggttccgccagcgccccggcaaggagcgcgagttcgtcgccggcctccgctggggcggccccaccaactacgccgactccgtcaaggaccgcttcaccatctccggcgactccgccaagcacaccatgtacctccagatgaactccctcaagcccgaggacaccgccgtctactactgcggctacaaccccggcggctgggccgtcccctcccagtacgagtacgactcctggggccagggcacccaggtcaccgtctcctccggtaccggcggaggcggatctggcggcggaggtagcggtggcggaggatctgaattcgacatccagatgacacagagccctagcagcctgtctgccagcgtgggagacagagtgaccatcacatgcaaggccagcgaccacatcaacaactggctggcctggtatcagcagaagcctggacaggcccctaagctgctgatctacggcgctaccacactggaaacaggcgtgcccagcagattttctggcagcggctctggcaccgactacaccctgacaatatccagcctccagcctgaggacttcgccacctactactgtcagcagagctggaacaccccttggacattcggccagggcaccaagctggaaatcaagagaggcggaggcggaagtggaggcggaggatctggcggcggaggctctcaagttcagcttcaacagcctggcgctgagctggtcaaacctggcgcttctgtgaagatgagctgcaaagccagcggctacgccttcagcagctactggatcaactggatgaagcagaaacccggccagggactcgaatggatcggccaaatctatcccggcgacggcgacaccaactacaacggcaagttcaagggcagagccacactgaccgccgatacctctagcagcacagcctacatgcagctgagcagcctgaccagcgaagatagcgccgtgtacttctgtgcccggtccatcacaacagtcgtgggctgcgctatggactattggggccagggaacaagcgtgaccgtgtctagtacgcgtatccagaaccctgatcctgccgtgtaccagctgcgggatagcaagagcagcgacaagagcgtgtgtctgttcaccgacttcgacagccagaccaacgtgtcccagagcaaggactccgacgtgtacatcaccgataagaccgtgctggacatgcggagcatggacttcaagagcaactccgccgtggcctggtccaacaagtccgatttcgcctgcgccaacgccttcaacaacagcattatccccgaggacacattcttcccaagccccgagagcagcgactccaccgaccacgtgaagcccaaagagacagagaacaccaagcagcccagcaagagctgccacaagcccaaggccatcgtgcacaccgagaaagtgaacatgatgagcctgaccgtgctgggcctgcggatgctgttcgccaaaaccgtggccgtgaacttcctgctgaccgccaagctgttcttcctccgcgccaagagaagcggatctggcgtgaagcagaccctgaatttcgacctgctgaagctggctggcgacgtggaatccaacccaggcccttctagaggccatatgaccgagtacaagcccacggtgcgcctcgccacccgcgacgacgtccccagggccgtacgcaccctcgccgccgcgttcgccgactaccccgccacgcgccacaccgtcgatccggaccgccacatcgagcgggtcaccgagctgcaagaactcttcctcacgcgcgtcgggctcgacatcggcaaggtgtgggtcgcggacgacggcgccgcggtggcggtctggaccacgccggagagcgtcgaagcgggggcggtgttcgccgagatcggcccgcgcatggccgagttgagcggttcccggctggccgcgcagcaacagatggaaggcctcctggcgccgcaccggcccaaggagcccgcgtggttcctggccaccgtcggcgtctcgcccgaccaccagggcaagggtctgggcagcgccgtcgtgctccccggagtggaggcggccgagcgcgccggggtgcccgccttcctggagacctccgcgccccgcaacctccccttctacgagcggctcggcttcaccgtcaccgccgacgtcgaggtgcccgaaggaccgcgcacctggtgcatgacccgcaagcccggtgcctga

SEQ ID NO: 8369 - DNA, 3735 bp, synthetic construct
  source 1..3735: mol_type = other DNA
atggccttaccagtgaccgccttgctcctgccgctggccttgctgctccacgccgccaggccgctcgaggaggacctgaagaacgtgttcccacctgaggtggccgtgttcgagcctagcgaggccgagatcagccacacccagaaagccaccctcgtgtgcctggctaccggcttctaccccgaccatgtggaactgtcttggtgggtcaacggcaaagaggtgcacagcggcgtgtctaccgacccccagccactgaaagaacagcccgccctgaacgacagccggtactgcctgagcagcagactgagagtgtccgccaccttctggcagaacccccggaaccacttcagatgccaggtgcagttctacggcctgagcgagaacgacgagtggacccaggacagagccaagcccgtgacccagatcgtgtctgccgaagcctggggcagagccgatgatgtgattaagatccactggcaggaaaagaagtccaacaccatcctgggcagccaggaaggcaacaccatgaagaccaacgacacctacatgaagttcagctggctgaccgtgcccgagaagtccctggacaaagaacacagatgcatcgtgcggcacgaaaacaacaagaacggcgtggaccaggaaatcatcttcccacccatcaagaccgatgtgattacaatggaccccaaggacaactgctccaaggacgccaacgataccctgctgctccagctgaccaacaccagcgcctactacatgtacttgttgctgctgctgaagtccgtggtgtacttcgccatcatcacatgctgcctgctgcggagaaccgccttctgctgcaacggcgagaagtctagggccaagcgatctggatctggagcaacaaacttctcactactcaaacaagcaggtgacgtggaggagaatcccgggcctactagcatggccttaccagtgaccgccttgctcctgccgctggccttgctgctccacgccgccaggccggaggttcagctgcttgagtctggcggaggactggttcaacctggcggaagcctgagactgtcttgtgccgccagcggcttcacctttagcagctacgccatgagctgggtccgacaggctcctggcaaaggactggaatgggtgtccagcatcagcggcagcggcgactacatctactacgccgatagcgtgaagggcagattcaccatcagccgggacatcagcaagaacaccctgtacctccagatgaacagcctgagagccgaggacaccgccgtgtactactgtgccaaagaaggcaccggcgctaacagcagcctggccgattatagaggccagggcacactggtcaccgtgtctagtggcggaggaagcggcggaggatctcaggtccagctcgtcgagtccggcggcggcctcgtccaggccggcgactccgtcaccctctcctgcaccgcctccggccgcaccttctcctcctacgccctcgcctggttccgccagcgccccggcaaggagcgcgagttcgtcgccggcctccgctggggcggccccaccaactacgccgactccgtcaaggaccgcttcaccatctccggcgactccgccaagcacaccatgtacctccagatgaactccctcaagcccgaggacaccgccgtctactactgcggctacaaccccggcggctgggccgtcccctcccagtacgagtacgactcctggggccagggcacccaggtcaccgtctcctccggtaccggcggaggcggatctggcggcggaggtagcggtggcggaggatctgaattcgacatccagatgacacagagccctagcagcctgtctgccagcgtgggagacagagtgaccatcacatgcaaggccagcgaccacatcaacaactggctggcctggtatcagcagaagcctggacaggcccctaagctgctgatctacggcgctaccacactggaaacaggcgtgcccagcagattttctggcagcggctctggcaccgactacaccctgacaatatccagcctccagcctgaggacttcgccacctactactgtcagcagagctggaacaccccttggacattcggccagggcaccaagctggaaatcaagagaggcggaggcggaagtggaggcggaggatctggcggcggaggctctcaagttcagcttcaacagcctggcgctgagctggtcaaacctggcgcttctgtgaagatgagctgcaaagccagcggctacgccttcagcagctactggatcaactggatgaagcagaaacccggccagggactcgaatggatcggccaaatctatcccggcgacggcgacaccaactacaacggcaagttcaagggcagagccacactgaccgccgatacctctagcagcacagcctacatgcagctgagcagcctgaccagcgaagatagcgccgtgtacttctgtgcccggtccatcacaacagtcgtgggctgcgctatggactattggggccagggaacaagcgtgaccgtgtctagtacgcgtatccagaaccctgatcctgccgtgtaccagctgcgggatagcaagagcagcgacaagagcgtgtgtctgttcaccgacttcgacagccagaccaacgtgtcccagagcaaggactccgacgtgtacatcaccgataagaccgtgctggacatgcggagcatggacttcaagagcaactccgccgtggcctggtccaacaagtccgatttcgcctgcgccaacgccttcaacaacagcattatccccgaggacacattcttcccaagccccgagagcagcgactccaccgaccacgtgaagcccaaagagacagagaacaccaagcagcccagcaagagctgccacaagcccaaggccatcgtgcacaccgagaaagtgaacatgatgagcctgaccgtgctgggcctgcggatgctgttcgccaaaaccgtggccgtgaacttcctgctgaccgccaagctgttcttcctccgcgccaagagaagcggatctggcgtgaagcagaccctgaatttcgacctgctgaagctggctggcgacgtggaatccaacccaggcccttctagaggccatatgaccgagtacaagcccacggtgcgcctcgccacccgcgacgacgtccccagggccgtacgcaccctcgccgccgcgttcgccgactaccccgccacgcgccacaccgtcgatccggaccgccacatcgagcgggtcaccgagctgcaagaactcttcctcacgcgcgtcgggctcgacatcggcaaggtgtgggtcgcggacgacggcgccgcggtggcggtctggaccacgccggagagcgtcgaagcgggggcggtgttcgccgagatcggcccgcgcatggccgagttgagcggttcccggctggccgcgcagcaacagatggaaggcctcctggcgccgcaccggcccaaggagcccgcgtggttcctggccaccgtcggcgtctcgcccgaccaccagggcaagggtctgggcagcgccgtcgtgctccccggagtggaggcggccgagcgcgccggggtgcccgccttcctggagacctccgcgccccgcaacctccccttctacgagcggctcggcttcaccgtcaccgccgacgtcgaggtgcccgaaggaccgcgcacctggtgcatgacccgcaagcccggtgcctga

SEQ ID NO: 8370 - DNA, 3735 bp, synthetic construct; identical to SEQ ID NO: 8369
  source 1..3735: mol_type = other DNA

SEQ ID NO: 8371 - DNA, 2571 bp, synthetic construct
  source 1..2571: mol_type = other DNA
atggccttaccagtgaccgccttgctcctgccgctggccttgctgctccacgccgccaggccgctcgaggaggacctgaagaacgtgttcccacctgaggtggccgtgttcgagcctagcgaggccgagatcagccacacccagaaagccaccctcgtgtgcctggctaccggcttctaccccgaccatgtggaactgtcttggtgggtcaacggcaaagaggtgcacagcggcgtgtctaccgacccccagccactgaaagaacagcccgccctgaacgacagccggtactgcctgagcagcagactgagagtgtccgccaccttctggcagaacccccggaaccacttcagatgccaggtgcagttctacggcctgagcgagaacgacgagtggacccaggacagagccaagcccgtgacccagatcgtgtctgccgaagcctggggcagagccgatgatgtgattaagatccactggcaggaaaagaagtccaacaccatcctgggcagccaggaaggcaacaccatgaagaccaacgacacctacatgaagttcagctggctgaccgtgcccgagaagtccctggacaaagaacacagatgcatcgtgcggcacgaaaacaacaagaacggcgtggaccaggaaatcatcttcccacccatcaagaccgatgtgattacaatggaccccaaggacaactgctccaaggacgccaacgataccctgctgctccagctgaccaacaccagcgcctactacatgtacttgttgctgctgctgaagtccgtggtgtacttcgccatcatcacatgctgcctgctgcggagaaccgccttctgctgcaacggcgagaagtctagggccaagcgatctggatctggagcaacaaacttctcactactcaaacaagcaggtgacgtggaggagaatcccgggcctactagcatggccctgcccgtgacagccctgctgctgcctctggctctgctgctgcacgccgccagacccgatgaattcggctctgacctgggcatcaagctgctgttcgccgctgccaagggccaggacgacgaagtgcggattctgctggctgctggggccgacgtgaacgccaaggatttcgagggctacacccccctgcacgtggccgcctatgatggacacctggaaatcgtggaagtgctgctgaaggctggcgctgatgtgaatgccaaagacagccagggccggacccctctgcatgaagccgcctacagcggccatctggaaattgtggaagtgctgctgaaagccggggcagacgtgaacgctcaggacgacgctggcgagacaccagccgatctggctgcagcttggggccacgaagatatcgccgaggtgctgcagaagacgcgtatccagaaccctgatcctgccgtgtaccagctgcgggatagcaagagcagcgacaagagcgtgtgtctgttcaccgacttcgacagccagaccaacgtgtcccagagcaaggactccgacgtgtacatcaccgataagaccgtgctggacatgcggagcatggacttcaagagcaactccgccgtggcctggtccaacaagtccgatttcgcctgcgccaacgccttcaacaacagcattatccccgaggacacattcttcccaagccccgagagcagcgactccaccgaccacgtgaagcccaaagagacagagaacaccaagcagcccagcaagagctgccacaagcccaaggccatcgtgcacaccgagaaagtgaacatgatgagcctgaccgtgctgggcctgcggatgctgttcgccaaaaccgtggccgtgaacttcctgctgaccgccaagctgttcttcctccgcgccaagagaagcggatctggcgtgaagcagaccctgaatttcgacctgctgaagctggctggcgacgtggaatccaacccaggcccttctagaggccatatgaccgagtacaagcccacggtgcgcctcgccacccgcgacgacgtccccagggccgtacgcaccctcgccgccgcgttcgccgactaccccgccacgcgccacaccgtcgatccggaccgccacatcgagcgggtcaccgagctgcaagaactcttcctcacgcgcgtcgggctcgacatcggcaaggtgtgggtcgcggacgacggcgccgcggtggcggtctggaccacgccggagagcgtcgaagcgggggcggtgttcgccgagatcggcccgcgcatggccgagttgagcggttcccggctggccgcgcagcaacagatggaaggcctcctggcgccgcaccggcccaaggagcccgcgtggttcctggccaccgtcggcgtctcgcccgaccaccagggcaagggtctgggcagcgccgtcgtgctccccggagtggaggcggccgagcgcgccggggtgcccgccttcctggagacctccgcgccccgcaacctccccttctacgagcggctcggcttcaccgtcaccgccgacgtcgaggtgcccgaaggaccgcgcacctggtgcatgacccgcaagcccggtgcctga

SEQ ID NO: 8372 - DNA, 2358 bp, synthetic construct
  source 1..2358: mol_type = other DNA
atggccttaccagtgaccgccttgctcctgccgctggccttgctgctccacgccgccaggccgctcgaggaggacctgaagaacgtgttcccacctgaggtggccgtgttcgagcctagcgaggccgagatcagccacacccagaaagccaccctcgtgtgcctggctaccggcttctaccccgaccatgtggaactgtcttggtgggtcaacggcaaagaggtgcacagcggcgtgtctaccgacccccagccactgaaagaacagcccgccctgaacgacagccggtactgcctgagcagcagactgagagtgtccgccaccttctggcagaacccccggaaccacttcagatgccaggtgcagttctacggcctgagcgagaacgacgagtggacccaggacagagccaagcccgtgacccagatcgtgtctgccgaagcctggggcagagccgatgatgtgattaagatccactggcaggaaaagaagtccaacaccatcctgggcagccaggaaggcaacaccatgaagaccaacgacacctacatgaagttcagctggctgaccgtgcccgagaagtccctggacaaagaacacagatgcatcgtgcggcacgaaaacaacaagaacggcgtggaccaggaaatcatcttcccacccatcaagaccgatgtgattacaatggaccccaaggacaactgctccaaggacgccaacgataccctgctgctccagctgaccaacaccagcgcctactacatgtacttgttgctgctgctgaagtccgtggtgtacttcgccatcatcacatgctgcctgctgcggagaaccgccttctgctgcaacggcgagaagtctagggccaagcgatctggatctggagcaacaaacttctcactactcaaacaagcaggtgacgtggaggagaatcccgggcctactagcatggactggatttggcgcatccttttccttgtcggcgctgctaccggcgcccattccttcgaaggcagcggattcgaatacgccaaagagatgcggaacgcctactgggagatcgccctgctgcccaatctgaccaaccagcagaagagagcccccatcagaaagctgtacgacgacccctcccagagcagcgagctgctgtctgaggctaaaaaactgaacgatagccagacgcgtatccagaaccctgatcctgccgtgtaccagctgcgggatagcaagagcagcgacaagagcgtgtgtctgttcaccgacttcgacagccagaccaacgtgtcccagagcaaggactccgacgtgtacatcaccgataagaccgtgctggacatgcggagcatggacttcaagagcaactccgccgtggcctggtccaacaagtccgatttcgcctgcgccaacgccttcaacaacagcattatccccgaggacacattcttcccaagccccgagagcagcgactccaccgaccacgtgaagcccaaagagacagagaacaccaagcagcccagcaagagctgccacaagcccaaggccatcgtgcacaccgagaaagtgaacatgatgagcctgaccgtgctgggcctgcggatgctgttcgccaaaaccgtggccgtgaacttcctgctgaccgccaagctgttcttcctccgcgccaagagaagcggatctggcgtgaagcagaccctgaatttcgacctgctgaagctggctggcgacgtggaatccaacccaggcccttctagaggccatatgaccgagtacaagcccacggtgcgcctcgccacccgcgacgacgtccccagggccgtacgcaccctcgccgccgcgttcgccgactaccccgccacgcgccacaccgtcgatccggaccgccacatcgagcgggtcaccgagctgcaagaactcttcctcacgcgcgtcgggctcgacatcggcaaggtgtgggtcgcggacgacggcgccgcggtggcggtctggaccacgccggagagcgtcgaagcgggggcggtgttcgccgagatcggcccgcgcatggccgagttgagcggttcccggctggccgcgcagcaacagatggaaggcctcctggcgccgcaccggcccaaggagcccgcgtggttcctggccaccgtcggcgtctcgcccgaccaccagggcaagggtctgggcagcgccgtcgtgctccccggagtggaggcggccgagcgcgccggggtgcccgccttcctggagacctccgcgccccgcaacctccccttctacgagcggctcggcttcaccgtcaccgccgacgtcgaggtgcccgaaggaccgcgcacctggtgcatgacccgcaagcccggtgcctga

SEQ ID NO: 8373 - DNA, 3024 bp, synthetic construct
  source 1..3024: mol_type = other DNA
atggccttaccagtgaccgccttgctcctgccgctggccttgctgctccacgccgccaggccgctcgaggaggacctgaagaacgtgttcccacctgaggtggccgtgttcgagcctagcgaggccgagatcagccacacccagaaagccaccctcgtgtgcctggctaccggcttctaccccgaccatgtggaactgtcttggtgggtcaacggcaaagaggtgcacagcggcgtgtctaccgacccccagccactgaaagaacagcccgccctgaacgacagccggtactgcctgagcagcagactgagagtgtccgccaccttctggcagaacccccggaaccacttcagatgccaggtgcagttctacggcctgagcgagaacgacgagtggacccaggacagagccaagcccgtgacccagatcgtgtctgccgaagcctggggcagagccgatgatgtgattaagatccactggcaggaaaagaagtccaacaccatcctgggcagccaggaaggcaacaccatgaagaccaacgacacctacatgaagttcagctggctgaccgtgcccgagaagtccctggacaaagaacacagatgcatcgtgcggcacgaaaacaacaagaacggcgtggaccaggaaatcatcttcccacccatcaagaccgatgtgattacaatggaccccaaggacaactgctccaaggacgccaacgataccctgctgctccagctgaccaacaccagcgcctactacatgtacttgttgctgctgctgaagtccgtggtgtacttcgccatcatcacatgctgcctgctgcggagaaccgccttctgctgcaacggcgagaagtctagggccaagcgatctggatctggagcaacaaacttctcactactcaaacaagcaggtgacgtggaggagaatcccgggcctactagcatggccctgcccgtgacagccctgctgctgcctctggctctgctgctgcacgccgccagacccgatgaattcgaggtgcaactggtggaaagcggcggaggcctggtgcaggctggcggatctctgagactgagctgtgccgccagcggcatcaccttcagcatcaacacaatgggctggtacagacaggcccctggcaagcagagggaactggtggccctgatctccagcatcggcgacacctactacgccgacagcgtgaagggccggttcaccatcagccgggacaacgccaagaacaccgtgtacctccagatgaacagcctgaagcccgaggacaccgccgtgtactactgcaagcggttcagaacagccgcccagggcaccgattattggggccagggaacacaagtgaccgtgtcctctctcgagggaggaggcggctccgggggaggcggaagtggaggcggaggatctgggtctggaggaagcggatctggaggctcagggtcagggggctcaggcagtggaggctctttcgaagtgcaactggtggaatctgggggcggactggtgcagccaggcggaagtctgaggctgtcttgtgccgcctccggcagcatcttcggcttcaacgacatggcctggtatcggcaggctcccggaaaacagcgcgagctggtggctctgattagcagagtgggcgtgaccagcagcgccgactctgtgaagggcagattcacaatctccagagtgaacgccaaggatacagtgtacctccagatgaactctctgaaacctgaggatacagcagtgtactattgctacatggaccagcggctggacggcagcacactggcctactggggacagggaactcaagtgacagtgtctagcacgcgtatccagaaccctgatcctgccgtgtaccagctgcgggatagcaagagcagcgacaagagcgtgtgtctgttcaccgacttcgacagccagaccaacgtgtcccagagcaaggactccgacgtgtacatcaccgataagaccgtgctggacatgcggagcatggacttcaagagcaactccgccgtggcctggtccaacaagtccgatttcgcctgcgccaacgccttcaacaacagcattatccccgaggacacattcttcccaagccccgagagcagcgactccaccgaccacgtgaagcccaaagagacagagaacaccaagcagcccagcaagagctgccacaagcccaaggccatcgtgcacaccgagaaagtgaacatgatgagcctgaccgtgctgggcctgcggatgctgttcgccaaaaccgtggccgtgaacttcctgctgaccgccaagctgttcttcctccgcgccaagagaagcggatctggcgtgaagcagaccctgaatttcgacctgctgaagctggctggcgacgtggaatccaacccaggcccttctagaggccatatgaccgagtacaagcccacggtgcgcctcgccacccgcgacgacgtccccagggccgtacgcaccctcgccgccgcgttcgccgactaccccgccacgcgccacaccgtcgatccggaccgccacatcgagcgggtcaccgagctgcaagaactcttcctcacgcgcgtcgggctcgacatcggcaaggtgtgggtcgcggacgacggcgccgcggtggcggtctggaccacgccggagagcgtcgaagcgggggcggtgttcgccgagatcggcccgcgcatggccgagttgagcggttcccggctggccgcgcagcaacagatggaaggcctcctggcgccgcaccggcccaaggagcccgcgtggttcctggccaccgtcggcgtctcgcccgaccaccagggcaagggtctgggcagcgccgtcgtgctccccggagtggaggcggccgagcgcgccggggtgcccgccttcctggagacctccgcgccccgcaacctccccttctacgagcggctcggcttcaccgtcaccgccgacgtcgaggtgcccgaaggaccgcgcacctggtgcatgacccgcaagcccggtgcctga

SEQ ID NO: 8374 - DNA, 2766 bp, synthetic construct
  source 1..2766: mol_type = other DNA
atggccttaccagtgaccgccttgctcctgccgctggccttgctgctccacgccgccaggccgctcgaggaggacctgaagaacgtgttcccacctgaggtggccgtgttcgagcctagcgaggccgagatcagccacacccagaaagccaccctcgtgtgcctggctaccggcttctaccccgaccatgtggaactgtcttggtgggtcaacggcaaagaggtgcacagcggcgtgtctaccgacccccagccactgaaagaacagcccgccctgaacgacagccggtactgcctgagcagcagactgagagtgtccgccaccttctggcagaacccccggaaccacttcagatgccaggtgcagttctacggcctgagcgagaacgacgagtggacccaggacagagccaagcccgtgacccagatcgtgtctgccgaagcctggggcagagccgatgatgtgattaagatccactggcaggaaaagaagtccaacaccatcctgggcagccaggaaggcaacaccatgaagaccaacgacacctacatgaagttcagctggctgaccgtgcccgagaagtccctggacaaagaacacagatgcatcgtgcggcacgaaaacaacaagaacggcgtggaccaggaaatcatcttcccacccatcaagaccgatgtgattacaatggaccccaaggacaactgctccaaggacgccaacgataccctgctgctccagctgaccaacaccagcgcctactacatgtacttgttgctgctgctgaagtccgtggtgtacttcgccatcatcacatgctgcctgctgcggagaaccgccttctgctgcaacggcgagaagtctagggccaagcgatctggatctggagcaacaaacttctcactactcaaacaagcaggtgacgtggaggagaatcccgggcctactagcatggcccttccagtcactgccttgctgttgcctctggcgctcctgctccacgccgctagaccgggcatgagaaccgaggacctgcctaaggccgtggtgttcctggaaccccagtggtacagagtgctggaaaaggacagcgtgaccctgaagtgccagggcgcctacagccccgaggacaatagcacccagtggttccacaacgagagcctgatctccagccaggccagcagctacttcatcgacgccgccaccgtggacgacagcggcgagtatagatgccagaccaacctgagcaccctgagcgaccccgtgcagctggaagtgcacatcggatggctgctgctgcaggcccccagatgggtgttcaaagaagaggaccccatccacctgagatgccactcttggaagaacaccgccctgcacaaagtgacctacctgcagaacggcaagggcagaaagtacttccaccacaacagcgacttctacatccccaaggccaccctgaaggactccggctcctacttctgcagaggcctcgtgggcagcaagaacgtgtccagcgagacagtgaacatcaccatcacccagggcctggccgtgtctaccatcagcagctttttcccacccggctaccagacgcgtatccagaaccctgatcctgccgtgtaccagctgcgggatagcaagagcagcgacaagagcgtgtgtctgttcaccgacttcgacagccagaccaacgtgtcccagagcaaggactccgacgtgtacatcaccgataagaccgtgctggacatgcggagcatggacttcaagagcaactccgccgtggcctggtccaacaagtccgatttcgcctgcgccaacgccttcaacaacagcattatccccgaggacacattcttcccaagccccgagagcagcgactccaccgaccacgtgaagcccaaagagacagagaacaccaagcagcccagcaagagctgccacaagcccaaggccatcgtgcacaccgagaaagtgaacatgatgagcctgaccgtgctgggcctgcggatgctgttcgccaaaaccgtggccgtgaacttcctgctgaccgccaagctgttcttcctccgcgccaagagaagcggatctggcgtgaagcagaccctgaatttcgacctgctgaagctggctggcgacgtggaatccaacccaggcccttctagaggccatatgaccgagtacaagcccacggtgcgcctcgccacccgcgacgacgtccccagggccgtacgcaccctcgccgccgcgttcgccgactaccccgccacgcgccacaccgtcgatccggaccgccacatcgagcgggtcaccgagctgcaagaactcttcctcacgcgcgtcgggctcgacatcggcaaggtgtgggtcgcggacgacggcgccgcggtggcggtctggaccacgccggagagcgtcgaagcgggggcggtgttcgccgagatcggcccgcgcatggccgagttgagcggttcccggctggccgcgcagcaacagatggaaggcctcctggcgccgcaccggcccaaggagcccgcgtggttcctggccaccgtcggcgtctcgcccgaccaccagggcaagggtctgggcagcgccgtcgtgctccccggagtggaggcggccgagcgcgccggggtgcccgccttcctggagacctccgcgccccgcaacctccccttctacgagcggctcggcttcaccgtcaccgccgacgtcgaggtgcccgaaggaccgcgcacctggtgcatgacccgcaagcccggtgcctga

SEQ ID NO: 8375 - DNA, 2772 bp, synthetic construct
  source 1..2772: mol_type = other DNA
atggccttaccagtgaccgccttgctcctgccgctggccttgctgctccacgccgccaggccgctcgaggaggacctgaagaacgtgttcccacctgaggtggccgtgttcgagcctagcgaggccgagatcagccacacccagaaagccaccctcgtgtgcctggctaccggcttctaccccgaccatgtggaactgtcttggtgggtcaacggcaaagaggtgcacagcggcgtgtctaccgacccccagccactgaaagaacagcccgccctgaacgacagccggtactgcctgagcagcagactgagagtgtccgccaccttctggcagaacccccggaaccacttcagatgccaggtgcagttctacggcctgagcgagaacgacgagtggacccaggacagagccaagcccgtgacccagatcgtgtctgccgaagcctggggcagagccgatgatgtgattaagatccactggcaggaaaagaagtccaacaccatcctgggcagccaggaaggcaacaccatgaagaccaacgacacctacatgaagttcagctggctgaccgtgcccgagaagtccctggacaaagaacacagatgcatcgtgcggcacgaaaacaacaagaacggcgtggaccaggaaatcatcttcccacccatcaagaccgatgtgattacaatggaccccaaggacaactgctccaaggacgccaacgataccctgctgctccagctgaccaacaccagcgcctactacatgtacttgttgctgctgctgaagtccgtggtgtacttcgccatcatcacatgctgcctgctgcggagaaccgccttctgctgcaacggcgagaagtctagggccaagcgatctggatctggagcaacaaacttctcactactcaaacaagcaggtgacgtggaggagaatcccgggcctactagcgccaccatggccttaccagtgaccgccttgctcctgccgctggccttgctgctccacgccgccaggccgggcatgcggactgaagacctcccaaaggctgtggtgttcctggagcctcaatggtacagggtgctggagaaggacagtgtgactctgaagtgccagggagcctactcccctgaggacaattccacacagtggtttcacaatgagagcctcatctcaagccaggcctccagctacttcattgacgctgccacagtggacgacagtggagagtacaggtgccagacaaacctctccaccctcagtgacccggtgcagctagaagtccatatcggctggctgttgctccaggcccctcggtgggtgttcaaggaggaagaccctattcacctgaggtgtcacagctggaagaacactgctctgcataaggtcacatatttacagaatggcaaaggcaggaagtattttcatcataattctgacttctacattccaaaagccacactcaaagacagcggctcctacttctgcagggggcttgttgggagtaaaaatgtgtcttcagagactgtgaacatcaccatcactcaaggtttggcagtgtcaaccatctcatcattctttccacctggctaccaaacgcgtatccagaaccctgatcctgccgtgtaccagctgcgggatagcaagagcagcgacaagagcgtgtgtctgttcaccgacttcgacagccagaccaacgtgtcccagagcaaggactccgacgtgtacatcaccgataagaccgtgctggacatgcggagcatggacttcaagagcaactccgccgtggcctggtccaacaagtccgatttcgcctgcgccaacgccttcaacaacagcattatccccgaggacacattcttcccaagccccgagagcagcgactccaccgaccacgtgaagcccaaagagacagagaacaccaagcagcccagcaagagctgccacaagcccaaggccatcgtgcacaccgagaaagtgaacatgatgagcctgaccgtgctgggcctgcggatgctgttcgccaaaaccgtggccgtgaacttcctgctgaccgccaagctgttcttcctccgcgccaagagaagcggatctggcgtgaagcagaccctgaatttcgacctgctgaagctggctggcgacgtggaatccaacccaggcccttctagaggccatatgaccgagtacaagcccacggtgcgcctcgccacccgcgacgacgtccccagggccgtacgcaccctcgccgccgcgttcgccgactaccccgccacgcgccacaccgtcgatccggaccgccacatcgagcgggtcaccgagctgcaagaactcttcctcacgcgcgtcgggctcgacatcggcaaggtgtgggtcgcggacgacggcgccgcggtggcggtctggaccacgccggagagcgtcgaagcgggggcggtgttcgccgagatcggcccgcgcatggccgagttgagcggttcccggctggccgcgcagcaacagatggaaggcctcctggcgccgcaccggcccaaggagcccgcgtggttcctggccaccgtcggcgtctcgcccgaccaccagggcaagggtctgggcagcgccgtcgtgctccccggagtggaggcggccgagcgcgccggggtgcccgccttcctggagacctccgcgccccgcaacctccccttctacgagcggctcggcttcaccgtcaccgccgacgtcgaggtgcccgaaggaccgcgcacctggtgcatgacccgcaagcccggtgcctga

SEQ ID NO: 8376 - DNA, 2916 bp, synthetic construct
  source 1..2916: mol_type = other DNA
atggccttaccagtgaccgccttgctcctgccgctggccttgctgctccacgccgccaggccgctcgagatccagaaccctgatcctgccgtgtaccagctgcgggatagcaagagcagcgacaagagcgtgtgtctgttcaccgacttcgacagccagaccaacgtgtcccagagcaaggactccgacgtgtacatcaccgataagaccgtgctggacatgcggagcatggacttcaagagcaactccgccgtggcctggtccaacaagtccgatttcgcctgcgccaacgccttcaacaacagcattatccccgaggacacattcttcccaagccccgagagcagcgactccaccgaccacgtgaagcccaaagagacagagaacaccaagcagcccagcaagagctgccacaagcccaaggccatcgtgcacaccgagaaagtgaacatgatgagcctgaccgtgctgggcctgcggatgctgttcgccaaaaccgtggccgtgaacttcctgctgaccgccaagctgttcttcctcagggccaagcgatctggatctggagcaacaaacttctcactactcaaacaagcaggtgacgtggaggagaatcccgggcctactagcatggccttaccagtgaccgccttgctcctgccgctggccttgctgctccacgccgccaggccggacatccagatgacacagactacatcctccctgtctgcctctctgggagacagagtcaccatcagttgcagggcaagtcaggacattagtaaatatttaaattggtatcagcagaaaccagatggaactgttaaactcctgatctaccatacatcaagattacactcaggagtcccatcaaggttcagtggcagtgggtctggaacagattattctctcaccattagcaacctggagcaagaagatattgccacttacttttgccaacagggtaatacgcttccgtacacgttcggaggggggaccaagctggagatcacaggtggcggtggctcgggcggtggtgggtcgggtggcggcggatctgaggtgaaactgcaggagtcaggacctggcctggtggcgccctcacagagcctgtccgtcacatgcactgtctcaggggtctcattacccgactatggtgtaagctggattcgccagcctccacgaaagggtctggagtggctgggagtaatatggggtagtgaaaccacatactataattcagctctcaaatccagactgaccatcatcaaggacaactccaagagccaagttttcttaaaaatgaacagtctgcaaactgatgacacagccatttactactgtgccaaacattattactacggtggtagctatgctatggactactggggtcaaggaacctcagtcaccgtctcctcaacgcgtgaggacctgaagaacgtgttcccacctgaggtggccgtgttcgagcctagcgaggccgagatcagccacacccagaaagccaccctcgtgtgcctggctaccggcttctaccccgaccatgtggaactgtcttggtgggtcaacggcaaagaggtgcacagcggcgtgtctaccgacccccagccactgaaagaacagcccgccctgaacgacagccggtactgcctgagcagcagactgagagtgtccgccaccttctggcagaacccccggaaccacttcagatgccaggtgcagttctacggcctgagcgagaacgacgagtggacccaggacagagccaagcccgtgacccagatcgtgtctgccgaagcctggggcagagccgatgatgtgattaagatccactggcaggaaaagaagtccaacaccatcctgggcagccaggaaggcaacaccatgaagaccaacgacacctacatgaagttcagctggctgaccgtgcccgagaagtccctggacaaagaacacagatgcatcgtgcggcacgaaaacaacaagaacggcgtggaccaggaaatcatcttcccacccatcaagaccgatgtgattacaatggaccccaaggacaactgctccaaggacgccaacgataccctgctgctccagctgaccaacaccagcgcctactacatgtacttgttgctgctgctgaagtccgtggtgtacttcgccatcatcacatgctgcctgctgcggagaaccgccttctgctgcaacggcgagaagtctcgcgccaagagaagcggatctggcgtgaagcagaccctgaatttcgacctgctgaagctggctggcgacgtggaatccaacccaggcccttctagaggccatatgaccgagtacaagcccacggtgcgcctcgccacccgcgacgacgtccccagggccgtacgcaccctcgccgccgcgttcgccgactaccccgccacgcgccacaccgtcgatccggaccgccacatcgagcgggtcaccgagctgcaagaactcttcctcacgcgcgtcgggctcgacatcggcaaggtgtgggtcgcggacgacggcgccgcggtggcggtctggaccacgccggagagcgtcgaagcgggggcggtgttcgccgagatcggcccgcgcatggccgagttgagcggttcccggctggccgcgcagcaacagatggaaggcctcctggcgccgcaccggcccaaggagcccgcgtggttcctggccaccgtcggcgtctcgcccgaccaccagggcaagggtctgggcagcgccgtcgtgctccccggagtggaggcggccgagcgcgccggggtgcccgccttcctggagacctccgcgccccgcaacctccccttctacgagcggctcggcttcaccgtcaccgccgacgtcgaggtgcccgaaggaccgcgcacctggtgcatgacccgcaagcccggtgcctga

SEQ ID NO: 8377 - DNA, 2919 bp, synthetic construct
  source 1..2919: mol_type = other DNA
atggccttaccagtgaccgccttgctcctgccgctggccttgctgctccacgccgccaggccgctcgagatccagaaccctgatcctgccgtgtaccagctgcgggatagcaagagcagcgacaagagcgtgtgtctgttcaccgacttcgacagccagaccaacgtgtcccagagcaaggactccgacgtgtacatcaccgataagaccgtgctggacatgcggagcatggacttcaagagcaactccgccgtggcctggtccaacaagtccgatttcgcctgcgccaacgccttcaacaacagcattatccccgaggacacattcttcccaagccccgagagcagcgactccaccgaccacgtgaagcccaaagagacagagaacaccaagcagcccagcaagagctgccacaagcccaaggccatcgtgcacaccgagaaagtgaacatgatgagcctgaccgtgctgggcctgcggatgctgttcgccaaaaccgtggccgtgaacttcctgctgaccgccaagctgttcttcctcagggccaagcgatctggatctggagcaacaaacttctcactactcaaacaagcaggtgacgtggaggagaatcccgggcctactagcaccatggccttaccagtgaccgccttgctcctgccgctggccttgctgctccacgccgccaggccggagatcgtgatgacccagagccctgccaccctgtctctgagccctggcgaaagagccaccctgagctgtagagccagccaggacatcagcaagtacctgaactggtatcagcagaagcccggccaggcccccagactgctgatctaccacaccagcagactgcacagcggcatccccgccagattttctggctctggcagcggcaccgactacaccctgacaatcagcagcctccagcccgaggacttcgccgtgtacttctgtcagcaaggcaacaccctgccctacaccttcggccagggcaccaagctggaaatcaagggcggaggcggaagtggaggcggaggatctggcggcggaggctctcaggtgcaactccaggaatctggccctggcctcgtgaagcccagcgagacactgagcctgacctgtaccgtgtccggcgtgtccctgcctgactatggcgtgtcctggatcagacagccccctggcaagggcctggaatggatcggagtgatttggggcagcgaaaccacctactacaacagctccctgaagtccagagtgaccatctccaaggacaactccaagaaccaggtgtccctgaagctgagcagcgtgacagccgccgacaccgccgtgtattactgcgccaagcactactactacggcggcagctacgctatggactactggggccagggaaccctcgtgaccgtgtctagtacgcgtgaggacctgaagaacgtgttcccacctgaggtggccgtgttcgagcctagcgaggccgagatcagccacacccagaaagccaccctcgtgtgcctggctaccggcttctaccccgaccatgtggaactgtcttggtgggtcaacggcaaagaggtgcacagcggcgtgtctaccgacccccagccactgaaagaacagcccgccctgaacgacagccggtactgcctgagcagcagactgagagtgtccgccaccttctggcagaacccccggaaccacttcagatgccaggtgcagttctacggcctgagcgagaacgacgagtggacccaggacagagccaagcccgtgacccagatcgtgtctgccgaagcctggggcagagccgatgatgtgattaagatccactggcaggaaaagaagtccaacaccatcctgggcagccaggaaggcaacaccatgaagaccaacgacacctacatgaagttcagctggctgaccgtgcccgagaagtccctggacaaagaacacagatgcatcgtgcggcacgaaaacaacaagaacggcgtggaccaggaaatcatcttcccacccatcaagaccgatgtgattacaatggaccccaaggacaactgctccaaggacgccaacgataccctgctgctccagctgaccaacaccagcgcctactacatgtacttgttgctgctgctgaagtccgtggtgtacttcgccatcatcacatgctgcctgctgcggagaaccgccttctgctgcaacggcgagaagtctcgcgccaagagaagcggatctggcgtgaagcagaccctgaatttcgacctgctgaagctggctggcgacgtggaatccaacccaggcccttctagaggccatatgaccgagtacaagcccacggtgcgcctcgccacccgcgacgacgtccccagggccgtacgcaccctcgccgccgcgttcgccgactaccccgccacgcgccacaccgtcgatccggaccgccacatcgagcgggtcaccgagctgcaagaactcttcctcacgcgcgtcgggctcgacatcggcaaggtgtgggtcgcggacgacggcgccgcggtggcggtctggaccacgccggagagcgtcgaagcgggggcggtgttcgccgagatcggcccgcgcatggccgagttgagcggttcccggctggccgcgcagcaacagatggaaggcctcctggcgccgcaccggcccaaggagcccgcgtggttcctggccaccgtcggcgtctcgcccgaccaccagggcaagggtctgggcagcgccgtcgtgctccccggagtggaggcggccgagcgcgccggggtgcccgccttcctggagacctccgcgccccgcaacctccccttctacgagcggctcggcttcaccgtcaccgccgacgtcgaggtgcccgaaggaccgcgcacctggtgcatgacccgcaagcccggtgcctga

SEQ ID NO: 8378 - DNA, 2922 bp, synthetic construct
  source 1..2922: mol_type = other DNA
atggccttaccagtgaccgccttgctcctgccgctggccttgctgctccacgccgccaggccgctcgagatccagaaccctgatcctgccgtgtaccagctgcgggatagcaagagcagcgacaagagcgtgtgtctgttcaccgacttcgacagccagaccaacgtgtcccagagcaaggactccgacgtgtacatcaccgataagaccgtgctggacatgcggagcatggacttcaagagcaactccgccgtggcctggtccaacaagtccgatttcgcctgcgccaacgccttcaacaacagcattatccccgaggacacattcttcccaagccccgagagcagcgactccaccgaccacgtgaagcccaaagagacagagaacaccaagcagcccagcaagagctgccacaagcccaaggccatcgtgcacaccgagaaagtgaacatgatgagcctgaccgtgctgggcctgcggatgctgttcgccaaaaccgtggccgtgaacttcctgctgaccgccaagctgttcttcctcagggccaagcgatctggatctggagcaacaaacttctcactactcaaacaagcaggtgacgtggaggagaatcccgggcctactagcaccatggccttaccagtgaccgccttgctcctgccgctggccttgctgctccacgccgccaggccggacgagatcgtgctgacacagagccccgccaccctgtcactgtctccaggcgaaagagccaccctgagctgtagcgccagcagcagcgtgtcctacatgcactggtatcagcagaagcccggccaggcccccagactgctgatctacgataccagcaagctggcctccggcatccccgccagattttctggcagcggctccggcaccgacttcaccctgacaatcagcagcctggaacccgaggacgtggccgtgtactactgttttcaaggcagcgtgtaccccttcaccttcggccagggcaccaagctggaaatcaagagaggtggcggtggctcgggcggtggtgggtcgggtggcggcggatctcaggtgcagctccaggaatctggccctggcctcgtgaagcctagccagaccctgagcctgacctgtaccgtgtctggcggcagcatcagcacaagcggcatgggcgtgggctggatcagacagcaccctggcaagggcctggaatggatcggccacatttggtgggacgacgacaagcggtacaaccccgccctgaagtccagagtgaccatcagcgtggacaccagcaagaaccagttcagcctgaagctgagcagcgtgacagccgccgataccgccgtgtattattgcgcccggatggaactgtggtcctactacttcgactactggggccagggaaccctcgtgaccgtgtctagtacgcgtgaggacctgaagaacgtgttcccacctgaggtggccgtgttcgagcctagcgaggccgagatcagccacacccagaaagccaccctcgtgtgcctggctaccggcttctaccccgaccatgtggaactgtcttggtgggtcaacggcaaagaggtgcacagcggcgtgtctaccgacccccagccactgaaagaacagcccgccctgaacgacagccggtactgcctgagcagcagactgagagtgtccgccaccttctggcagaacccccggaaccacttcagatgccaggtgcagttctacggcctgagcgagaacgacgagtggacccaggacagagccaagcccgtgacccagatcgtgtctgccgaagcctggggcagagccgatgatgtgattaagatccactggcaggaaaagaagtccaacaccatcctgggcagccaggaaggcaacaccatgaagaccaacgacacctacatgaagttcagctggctgaccgtgcccgagaagtccctggacaaagaacacagatgcatcgtgcggcacgaaaacaacaagaacggcgtggaccaggaaatcatcttcccacccatcaagaccgatgtgattacaatggaccccaaggacaactgctccaaggacgccaacgataccctgctgctccagctgaccaacaccagcgcctactacatgtacttgttgctgctgctgaagtccgtggtgtacttcgccatcatcacatgctgcctgctgcggagaaccgccttctgctgcaacggcgagaagtctcgcgccaagagaagcggatctggcgtgaagcagaccctgaatttcgacctgctgaagctggctggcgacgtggaatccaacccaggcccttctagaggccatatgaccgagtacaagcccacggtgcgcctcgccacccgcgacgacgtccccagggccgtacgcaccctcgccgccgcgttcgccgactaccccgccacgcgccacaccgtcgatccggaccgccacatcgagcgggtcaccgagctgcaagaactcttcctcacgcgcgtcgggctcgacatcggcaaggtgtgggtcgcggacgacggcgccgcggtggcggtctggaccacgccggagagcgtcgaagcgggggcggtgttcgccgagatcggcccgcgcatggccgagttgagcggttcccggctggccgcgcagcaacagatggaaggcctcctggcgccgcaccggcccaaggagcccgcgtggttcctggccaccgtcggcgtctcgcccgaccaccagggcaagggtctgggcagcgccgtcgtgctccccggagtggaggcggccgagcgcgccggggtgcccgccttcctggagacctccgcgccccgcaacctccccttctacgagcggctcggcttcaccgtcaccgccgacgtcgaggtgcccgaaggaccgcgcacctggtgcatgacccgcaagcccggtgcctga

SEQ ID NO: 8379 - DNA, 2910 bp, synthetic construct
  source 1..2910: mol_type = other DNA
atggccttaccagtgaccgccttgctcctgccgctggccttgctgctccacgccgccaggccgctcgagatccagaaccctgatcctgccgtgtaccagctgcgggatagcaagagcagcgacaagagcgtgtgtctgttcaccgacttcgacagccagaccaacgtgtcccagagcaaggactccgacgtgtacatcaccgataagaccgtgctggacatgcggagcatggacttcaagagcaactccgccgtggcctggtccaacaagtccgatttcgcctgcgccaacgccttcaacaacagcattatccccgaggacacattcttcccaagccccgagagcagcgactccaccgaccacgtgaagcccaaagagacagagaacaccaagcagcccagcaagagctgccacaagcccaaggccatcgtgcacaccgagaaagtgaacatgatgagcctgaccgtgctgggcctgcggatgctgttcgccaaaaccgtggccgtgaacttcctgctgaccgccaagctgttcttcctcagggccaagcgatctggatctggagcaacaaacttctcactactcaaacaagcaggtgacgtggaggagaatcccgggcctactagcatggccttaccagtgaccgccttgctcctgccgctggccttgctgctccacgccgccaggccggacatccagatgacacagagccctagcagcctgtctgccagcgtgggagacagagtgaccatcacctgtagagccagccaggacatcagcaactacctgaactggtatcagcagaagcccggcaaggcccctaagctgctgatctactacaccagcagactgcacagcggcgtgcccagcagattttctggctctggcagcggcaccgacttcaccctgacaatatctagcctccagcctgaggacttcgccacctactattgccagcagggcaacaccctgccttacacatttggacagggcaccaaggtggaaatcaagagaggcggaggcggaagtggaggcggaggatctggcggcggaggctctgaagtgcagctggttgaatcaggtggcggcctggttcaacctggcggatctctgagactgagctgtgccgccagcggcttcaccttcagcgactactttatgagctgggtccgacaggcccctggcaaaggacttgaatgggtcgccaccatcagcaatggcggcacctacacttactaccccgacagcgtgaagggcagattcaccatctccagagacaacagcaagaacaccctgtacctccagatgaactccctgagagccgaggacaccgccgtgtactactgcgccagattcgacggctacatcttcgactattggggccagggcaccctggtcacagtctcttctacgcgtgaggacctgaagaacgtgttcccacctgaggtggccgtgttcgagcctagcgaggccgagatcagccacacccagaaagccaccctcgtgtgcctggctaccggcttctaccccgaccatgtggaactgtcttggtgggtcaacggcaaagaggtgcacagcggcgtgtctaccgacccccagccactgaaagaacagcccgccctgaacgacagccggtactgcctgagcagcagactgagagtgtccgccaccttctggcagaacccccggaaccacttcagatgccaggtgcagttctacggcctgagcgagaacgacgagtggacccaggacagagccaagcccgtgacccagatcgtgtctgccgaagcctggggcagagccgatgatgtgattaagatccactggcaggaaaagaagtccaacaccatcctgggcagccaggaaggcaacaccatgaagaccaacgacacctacatgaagttcagctggctgaccgtgcccgagaagtccctggacaaagaacacagatgcatcgtgcggcacgaaaacaacaagaacggcgtggaccaggaaatcatcttcccacccatcaagaccgatgtgattacaatggaccccaaggacaactgctccaaggacgccaacgataccctgctgctccagctgaccaacaccagcgcctactacatgtacttgttgctgctgctgaagtccgtggtgtacttcgccatcatcacatgctgcctgctgcggagaaccgccttctgctgcaacggcgagaagtctcgcgccaagagaagcggatctggcgtgaagcagaccctgaatttcgacctgctgaagctggctggcgacgtggaatccaacccaggcccttctagaggccatatgaccgagtacaagcccacggtgcgcctcgccacccgcgacgacgtccccagggccgtacgcaccctcgccgccgcgttcgccgactaccccgccacgcgccacaccgtcgatccggaccgccacatcgagcgggtcaccgagctgcaagaactcttcctcacgcgcgtcgggctcgacatcggcaaggtgtgggtcgcggacgacggcgccgcggtggcggtctggaccacgccggagagcgtcgaagcgggggcggtgttcgccgagatcggcccgcgcatggccgagttgagcggttcccggctggccgcgcagcaacagatggaaggcctcctggcgccgcaccggcccaaggagcccgcgtggttcctggccaccgtcggcgtctcgcccgaccaccagggcaagggtctgggcagcgccgtcgtgctccccggagtggaggcggccgagcgcgccggggtgcccgccttcctggagacctccgcgccccgcaacctccccttctacgagcggctcggcttcaccgtcaccgccgacgtcgaggtgcccgaaggaccgcgcacctggtgcatgacccgcaagcccggtgcctga

SEQ ID NO: 8380 - DNA, 2922 bp, synthetic construct
  source 1..2922: mol_type = other DNA
atggccttaccagtgaccgccttgctcctgccgctggccttgctgctccacgccgccaggccgctcgagatccagaaccctgatcctgccgtgtaccagctgcgggatagcaagagcagcgacaagagcgtgtgtctgttcaccgacttcgacagccagaccaacgtgtcccagagcaaggactccgacgtgtacatcaccgataagaccgtgctggacatgcggagcatggacttcaagagcaactccgccgtggcctggtccaacaagtccgatttcgcctgcgccaacgccttcaacaacagcattatccccgaggacacattcttcccaagccccgagagcagcgactccaccgaccacgtgaagcccaaagagacagagaacaccaagcagcccagcaagagctgccacaagcccaaggccatcgtgcacaccgagaaagtgaacatgatgagcctgaccgtgctgggcctgcggatgctgttcgccaaaaccgtggccgtgaacttcctgctgaccgccaagctgttcttcctcagggccaagcgatctggatctggagcaacaaacttctcactactcaaacaagcaggtgacgtggaggagaatcccgggcctactagcatggccttaccagtgaccgccttgctcctgccgctggccttgctgctccacgccgccaggccggacatccagatgacacagagccctagcagcctgtctgccagcgtgggagacagagtgaccatcacatgcaaggccagcgaccacatcaacaactggctggcctggtatcagcagaagcctggacaggcccctaagctgctgatctacggcgctaccacactggaaacaggcgtgcccagcagattttctggcagcggctctggcaccgactacaccctgacaatatccagcctccagcctgaggacttcgccacctactactgtcagcagagctggaacaccccttggacattcggccagggcaccaagctggaaatcaagagaggcggaggcggaagtggaggcggaggatctggcggcggaggctctcaagttcagcttcaacagcctggcgctgagctggtcaaacctggcgcttctgtgaagatgagctgcaaagccagcggctacgccttcagcagctactggatcaactggatgaagcagaaacccggccagggactcgaatggatcggccaaatctatcccggcgacggcgacaccaactacaacggcaagttcaagggcagagccacactgaccgccgatacctctagcagcacagcctacatgcagctgagcagcctgaccagcgaagatagcgccgtgtacttctgtgcccggtccatcacaacagtcgtgggctgcgctatggactattggggccagggaacaagcgtgaccgtgtctagtacgcgtgaggacctgaagaacgtgttcccacctgaggtggccgtgttcgagcctagcgaggccgagatcagccacacccagaaagccaccctcgtgtgcctggctaccggcttctaccccgaccatgtggaactgtcttggtgggtcaacggcaaagaggtgcacagcggcgtgtctaccgacccccagccactgaaagaacagcccgccctgaacgacagccggtactgcctgagcagcagactgagagtgtccgccaccttctggcagaacccccggaaccacttcagatgccaggtgcagttctacggcctgagcgagaacgacgagtggacccaggacagagccaagcccgtgacccagatcgtgtctgccgaagcctggggcagagccgatgatgtgattaagatccactggcaggaaaagaagtccaacaccatcctgggcagccaggaaggcaacaccatgaagaccaacgacacctacatgaagttcagctggctgaccgtgcccgagaagtccctggacaaagaacacagatgcatcgtgcggcacgaaaacaacaagaacggcgtggaccaggaaatcatcttcccacccatcaagaccgatgtgattacaatggaccccaaggacaactgctccaaggacgccaacgataccctgctgctccagctgaccaacaccagcgcctactacatgtacttgttgctgctgctgaagtccgtggtgtacttcgccatcatcacatgctgcctgctgcggagaaccgccttctgctgcaacggcgagaagtctcgcgccaagagaagcggatctggcgtgaagcagaccctgaatttcgacctgctgaagctggctggcgacgtggaatccaacccaggcccttctagaggccatatgaccgagtacaagcccacggtgcgcctcgccacccgcgacgacgtccccagggccgtacgcaccctcgccgccgcgttcgccgactaccccgccacgcgccacaccgtcgatccggaccgccacatcgagcgggtcaccgagctgcaagaactcttcctcacgcgcgtcgggctcgacatcggcaaggtgtgggtcgcggacgacggcgccgcggtggcggtctggaccacgccggagagcgtcgaagcgggggcggtgttcgccgagatcggcccgcgcatggccgagttgagcggttcccggctggccgcgcagcaacagatggaaggcctcctggcgccgcaccggcccaaggagcccgcgtggttcctggccaccgtcggcgtctcgcccgaccaccagggcaagggtctgggcagcgccgtcgtgctccccggagtggaggcggccgagcgcgccggggtgcccgccttcctggagacctccgcgccccgcaacctccccttctacgagcggctcggcttcaccgtcaccgccgacgtcgaggtgcccgaaggaccgcgcacctggtgcatgacccgcaagcccggtgcctga

SEQ ID NO: 8381 - DNA, 2928 bp, synthetic construct
  source 1..2928: mol_type = other DNA
atggccttaccagtgaccgccttgctcctgccgctggccttgctgctccacgccgccaggccgctcgagatccagaaccctgatcctgccgtgtaccagctgcgggatagcaagagcagcgacaagagcgtgtgtctgttcaccgacttcgacagccagaccaacgtgtcccagagcaaggactccgacgtgtacatcaccgataagaccgtgctggacatgcggagcatggacttcaagagcaactccgccgtggcctggtccaacaagtccgatttcgcctgcgccaacgccttcaacaacagcattatccccgaggacacattcttcccaagccccgagagcagcgactccaccgaccacgtgaagcccaaagagacagagaacaccaagcagcccagcaagagctgccacaagcccaaggccatcgtgcacaccgagaaagtgaacatgatgagcctgaccgtgctgggcctgcggatgctgttcgccaaaaccgtggccgtgaacttcctgctgaccgccaagctgttcttcctcagggccaagcgatctggatctggagcaacaaacttctcactactcaaacaagcaggtgacgtggaggagaatcccgggcctactagcatggccttaccagtgaccgccttgctcctgccgctggccttgctgctccacgccgccaggccgcagatcgtgctgtctcagtctcctgccatcctgagcgcttccccaggcgagaaagtgaccatgacctgtagagccagcagcagcgtgtcctacatgcactggtatcagcagaagcccggcagcagccctaagccttggatctacgccaccagcaatctggcctctggcgtgccagccagattttctggctctggcagcggcaccagctacagcttcacaatcagcagagtggaagccgaggacgccgccacctactattgtcagcagtggaccttcaatcctcctaccttcggcggaggcacccggctggaaatcaaaagaacagtggctgctggcggaggcggaagtggaggcggaggatctggcggcggaggctctcaggcttatctgcaacagagcggagccgaactcgtcagacctggcgcttctgtgaagatgagctgcaaggccagcggctacaccttcaccagctataatatgcactgggtcaagcagacccctcggcagggactcgaatggatcggcggaatctatcccggcaacggcgacacctcctacaaccagaagttcaagggcaaagccacactgaccgtgggcaagagcagcagcaccgcctatatgcagctcagcagcctgaccagcgaggacagcgccgtgtacttctgcgccagatacgactacaactacgctatggactactggggccagggcaccagcgtgacagttagctctgccagcacgcgtgaggacctgaagaacgtgttcccacctgaggtggccgtgttcgagcctagcgaggccgagatcagccacacccagaaagccaccctcgtgtgcctggctaccggcttctaccccgaccatgtggaactgtcttggtgggtcaacggcaaagaggtgcacagcggcgtgtctaccgacccccagccactgaaagaacagcccgccctgaacgacagccggtactgcctgagcagcagactgagagtgtccgccaccttctggcagaacccccggaaccacttcagatgccaggtgcagttctacggcctgagcgagaacgacgagtggacccaggacagagccaagcccgtgacccagatcgtgtctgccgaagcctggggcagagccgatgatgtgattaagatccactggcaggaaaagaagtccaacaccatcctgggcagccaggaaggcaacaccatgaagaccaacgacacctacatgaagttcagctggctgaccgtgcccgagaagtccctggacaaagaacacagatgcatcgtgcggcacgaaaacaacaagaacggcgtggaccaggaaatcatcttcccacccatcaagaccgatgtgattacaatggaccccaaggacaactgctccaaggacgccaacgataccctgctgctccagctgaccaacaccagcgcctactacatgtacttgttgctgctgctgaagtccgtggtgtacttcgccatcatcacatgctgcctgctgcggagaaccgccttctgctgcaacggcgagaagtctcgcgccaagagaagcggatctggcgtgaagcagaccctgaatttcgacctgctgaagctggctggcgacgtggaatccaacccaggcccttctagaggccatatgaccgagtacaagcccacggtgcgcctcgccacccgcgacgacgtccccagggccgtacgcaccctcgccgccgcgttcgccgactaccccgccacgcgccacaccgtcgatccggaccgccacatcgagcgggtcaccgagctgcaagaactcttcctcacgcgcgtcgggctcgacatcggcaaggtgtgggtcgcggacgacggcgccgcggtggcggtctggaccacgccggagagcgtcgaagcgggggcggtgttcgccgagatcggcccgcgcatggccgagttgagcggttcccggctggccgcgcagcaacagatggaaggcctcctggcgccgcaccggcccaaggagcccgcgtggttcctggccaccgtcggcgtctcgcccgaccaccagggcaagggtctgggcagcgccgtcgtgctccccggagtggaggcggccgagcgcgccggggtgcccgccttcctggagacctccgcgccccgcaacctccccttctacgagcggctcggcttcaccgtcaccgccgacgtcgaggtgcccgaaggaccgcgcacctggtgcatgacccgcaagcccggtgcctga

SEQ ID NO: 8382 - DNA, 2922 bp, synthetic construct
  source 1..2922: mol_type = other DNA
atggccttaccagtgaccgccttgctcctgccgctggccttgctgctccacgccgccaggccgctcgagatccagaaccctgatcctgccgtgtaccagctgcgggatagcaagagcagcgacaagagcgtgtgtctgttcaccgacttcgacagccagaccaacgtgtcccagagcaaggactccgacgtgtacatcaccgataagaccgtgctggacatgcggagcatggacttcaagagcaactccgccgtggcctggtccaacaagtccgatttcgcctgcgccaacgccttcaacaacagcattatccccgaggacacattcttcccaagccccgagagcagcgactccaccgaccacgtgaagcccaaagagacagagaacaccaagcagcccagcaagagctgccacaagcccaaggccatcgtgcacaccgagaaagtgaacatgatgagcctgaccgtgctgggcctgcggatgctgttcgccaaaaccgtggccgtgaacttcctgctgaccgccaagctgttcttcctcagggccaagcgatctggatctggagcaacaaacttctcactactcaaacaagcaggtgacgtggaggagaatcccgggcctactagcatggccttaccagtgaccgccttgctcctgccgctggccttgctgctccacgccgccaggccggagatcgtgctgacacagagccctgccaccctgtctctgagccctggcgaaagagccaccctgagctgtagagccagccagagcgtgtccagctacctggcctggtatcagcagaagcccggccaggctccccggctgctgatctacgatgccagcaatagagccaccggcatccccgccagattttccggctctggcagcggcaccgacttcaccctgaccatcagctccctggaacccgaggacttcgccgtgtactactgccagcagcggagcaactggcccatcacattcggccagggcacccggctggaaatcaaaggcggaggcggaagtggaggcggaggatctggcggcggaggctctgaggtgcagcttgttgagtctggcggaggactggtgcagcccgatagaagcctgagactgtcttgtgccgccagcggcttcaccttccacgattatgccatgcactgggtccgacaggcccctggcaaaggacttgaatgggtgtccaccatctcttggaacagcggcacaatcggctacgccgactctgtgaagggcagattcaccatcagccgggacaacgccaagaacagcctgtacctccagatgaactccctgagagccgaggacacagccctgtactactgcgccaaggacatccagtacggcaactactactacggcatggacgtgtggggccagggcacaacagtgacagtctcttctacgcgtgaggacctgaagaacgtgttcccacctgaggtggccgtgttcgagcctagcgaggccgagatcagccacacccagaaagccaccctcgtgtgcctggctaccggcttctaccccgaccatgtggaactgtcttggtgggtcaacggcaaagaggtgcacagcggcgtgtctaccgacccccagccactgaaagaacagcccgccctgaacgacagccggtactgcctgagcagcagactgagagtgtccgccaccttctggcagaacccccggaaccacttcagatgccaggtgcagttctacggcctgagcgagaacgacgagtggacccaggacagagccaagcccgtgacccagatcgtgtctgccgaagcctggggcagagccgatgatgtgattaagatccactggcaggaaaagaagtccaacaccatcctgggcagccaggaaggcaacaccatgaagaccaacgacacctacatgaagttcagctggctgaccgtgcccgagaagtccctggacaaagaacacagatgcatcgtgcggcacgaaaacaacaagaacggcgtggaccaggaaatcatcttcccacccatcaagaccgatgtgattacaatggaccccaaggacaactgctccaaggacgccaacgataccctgctgctccagctgaccaacaccagcgcctactacatgtacttgttgctgctgctgaagtccgtggtgtacttcgccatcatcacatgctgcctgctgcggagaaccgccttctgctgcaacggcgagaagtctcgcgccaagagaagcggatctggcgtgaagcagaccctgaatttcgacctgctgaagctggctggcgacgtggaatccaacccaggcccttctagaggccatatgaccgagtacaagcccacggtgcgcctcgccacccgcgacgacgtccccagggccgtacgcaccctcgccgccgcgttcgccgactaccccgccacgcgccacaccgtcgatccggaccgccacatcgagcgggtcaccgagctgcaagaactcttcctcacgcgcgtcgggctcgacatcggcaaggtgtgggtcgcggacgacggcgccgcggtggcggtctggaccacgccggagagcgtcgaagcgggggcggtgttcgccgagatcggcccgcgcatggccgagttgagcggttcccggctggccgcgcagcaacagatggaaggcctcctggcgccgcaccggcccaaggagcccgcgtggttcctggccaccgtcggcgtctcgcccgaccaccagggcaagggtctgggcagcgccgtcgtgctccccggagtggaggcggccgagcgcgccggggtgcccgccttcctggagacctccgcgccccgcaacctccccttctacgagcggctcggcttcaccgtcaccgccgacgtcgaggtgcccgaaggaccgcgcacctggtgcatgacccgcaagcccggtgcctga

SEQ ID NO: 8383 - DNA, 2916 bp, synthetic construct
  source 1..2916: mol_type = other DNA
atggccttaccagtgaccgccttgctcctgccgctggccttgctgctccacgccgccaggccgctcgagatccagaaccctgatcctgccgtgtaccagctgcgggatagcaagagcagcgacaagagcgtgtgtctgttcaccgacttcgacagccagaccaacgtgtcccagagcaaggactccgacgtgtacatcaccgataagaccgtgctggacatgcggagcatggacttcaagagcaactccgccgtggcctggtccaacaagtccgatttcgcctgcgccaacgccttcaacaacagcattatccccgaggacacattcttcccaagccccgagagcagcgactccaccgaccacgtgaagcccaaagagacagagaacaccaagcagcccagcaagagctgccacaagcccaaggccatcgtgcacaccgagaaagtgaacatgatgagcctgaccgtgctgggcctgcggatgctgttcgccaaaaccgtggccgtgaacttcctgctgaccgccaagctgttcttcctcagggccaagcgatctggatctggagcaacaaacttctcactactcaaacaagcaggtgacgtggaggagaatcccgggcctactagcatggccttaccagtgaccgccttgctcctgccgctggccttgctgctccacgccgccaggccggacatccagatgacccagagccccagcagcctgtctgccagcgtgggcgacagagtgaccatcacctgtagagccagccaggacgtgaacaccgccgtggcctggtatcagcagaagcctggcaaggcccccaagctgctgatctacagcgccagcttcctggaaagcggcgtgcccagcagattcagcggaagcagaagcggcaccgacttcaccctgaccatcagctccctccagcccgaggacttcgccacctactactgccagcagcactacaccacccctcccaccttcggccagaccaaggtggaaatcaagagaggcggaggcggaagtggaggcggaggatctggcggcggaggctctgaagtgcaactggtggaatctggcggcggactggtgcagcctggcggatctctgagactgagctgtgccgccagcggcttcaacatcaaggacacctacatccactgggtgcgccaggcccctggaaagggactggaatgggtggcccggatctaccccaccaacggctacaccagatacgccgacagcgtgaagggccggttcaccatcagcgccgacaccagcaagaataccgcctacctccagatgaacagcctgcgggccgaggataccgccgtgtactactgctcaagatggggaggcgacggcttctacgctatggacgtgtggggccagggcacccttgtgaccgtgtcatctacgcgtgaggacctgaagaacgtgttcccacctgaggtggccgtgttcgagcctagcgaggccgagatcagccacacccagaaagccaccctcgtgtgcctggctaccggcttctaccccgaccatgtggaactgtcttggtgggtcaacggcaaagaggtgcacagcggcgtgtctaccgacccccagccactgaaagaacagcccgccctgaacgacagccggtactgcctgagcagcagactgagagtgtccgccaccttctggcagaacccccggaaccacttcagatgccaggtgcagttctacggcctgagcgagaacgacgagtggacccaggacagagccaagcccgtgacccagatcgtgtctgccgaagcctggggcagagccgatgatgtgattaagatccactggcaggaaaagaagtccaacaccatcctgggcagccaggaaggcaacaccatgaagaccaacgacacctacatgaagttcagctggctgaccgtgcccgagaagtccctggacaaagaacacagatgcatcgtgcggcacgaaaacaacaagaacggcgtggaccaggaaatcatcttcccacccatcaagaccgatgtgattacaatggaccccaaggacaactgctccaaggacgccaacgataccctgctgctccagctgaccaacaccagcgcctactacatgtacttgttgctgctgctgaagtccgtggtgtacttcgccatcatcacatgctgcctgctgcggagaaccgccttctgctgcaacggcgagaagtctcgcgccaagagaagcggatctggcgtgaagcagaccctgaatttcgacctgctgaagctggctggcgacgtggaatccaacccaggcccttctagaggccatatgaccgagtacaagcccacggtgcgcctcgccacccgcgacgacgtccccagggccgtacgcaccctcgccgccgcgttcgccgactaccccgccacgcgccacaccgtcgatccggaccgccacatcgagcgggtcaccgagctgcaagaactcttcctcacgcgcgtcgggctcgacatcggcaaggtgtgggtcgcggacgacggcgccgcggtggcggtctggaccacgccggagagcgtcgaagcgggggcggtgttcgccgagatcggcccgcgcatggccgagttgagcggttcccggctggccgcgcagcaacagatggaaggcctcctggcgccgcaccggcccaaggagcccgcgtggttcctggccaccgtcggcgtctcgcccgaccaccagggcaagggtctgggcagcgccgtcgtgctccccggagtggaggcggccgagcgcgccggggtgcccgccttcctggagacctccgcgccccgcaacctccccttctacgagcggctcggcttcaccgtcaccgccgacgtcgaggtgcccgaaggaccgcgcacctggtgcatgacccgcaagcccggtgcctga

SEQ ID NO: 8384 - DNA, 2553 bp, synthetic construct
  source 1..2553: mol_type = other DNA
atggccttaccagtgaccgccttgctcctgccgctggccttgctgctccacgccgccaggccgctcgagatccagaaccctgatcctgccgtgtaccagctgcgggatagcaagagcagcgacaagagcgtgtgtctgttcaccgacttcgacagccagaccaacgtgtcccagagcaaggactccgacgtgtacatcaccgataagaccgtgctggacatgcggagcatggacttcaagagcaactccgccgtggcctggtccaacaagtccgatttcgcctgcgccaacgccttcaacaacagcattatccccgaggacacattcttcccaagccccgagagcagcgactccaccgaccacgtgaagcccaaagagacagagaacaccaagcagcccagcaagagctgccacaagcccaaggccatcgtgcacaccgagaaagtgaacatgatgagcctgaccgtgctgggcctgcggatgctgttcgccaaaaccgtggccgtgaacttcctgctgaccgccaagctgttcttcctcagggccaagcgatctggatctggagcaacaaacttctcactactcaaacaagcaggtgacgtggaggagaatcccgggcctactagcatggccctgcccgtgacagccctgctgctgcctctggctctgctgctgcacgccgccagacccgatgaattcgaggtgcaactggtggaaagcggcggaggcctggtgcaggctggcggatctctgagactgagctgtgccgccagcggcatcaccttcagcatcaacacaatgggctggtacagacaggcccctggcaagcagagggaactggtggccctgatctccagcatcggcgacacctactacgccgacagcgtgaagggccggttcaccatcagccgggacaacgccaagaacaccgtgtacctccagatgaacagcctgaagcccgaggacaccgccgtgtactactgcaagcggttcagaacagccgcccagggcaccgattattggggccagggaacacaagtgaccgtgtcctctacgcgtgaggacctgaagaacgtgttcccacctgaggtggccgtgttcgagcctagcgaggccgagatcagccacacccagaaagccaccctcgtgtgcctggctaccggcttctaccccgaccatgtggaactgtcttggtgggtcaacggcaaagaggtgcacagcggcgtgtctaccgacccccagccactgaaagaacagcccgccctgaacgacagccggtactgcctgagcagcagactgagagtgtccgccaccttctggcagaacccccggaaccacttcagatgccaggtgcagttctacggcctgagcgagaacgacgagtggacccaggacagagccaagcccgtgacccagatcgtgtctgccgaagcctggggcagagccgatgatgtgattaagatccactggcaggaaaagaagtccaacaccatcctgggcagccaggaaggcaacaccatgaagaccaacgacacctacatgaagttcagctggctgaccgtgcccgagaagtccctggacaaagaacacagatgcatcgtgcggcacgaaaacaacaagaacggcgtggaccaggaaatcatcttcccacccatcaagaccgatgtgattacaatggaccccaaggacaactgctccaaggacgccaacgataccctgctgctccagctgaccaacaccagcgcctactacatgtacttgttgctgctgctgaagtccgtggtgtacttcgccatcatcacatgctgcctgctgcggagaaccgccttctgctgcaacggcgagaagtctcgcgccaagagaagcggatctggcgtgaagcagaccctgaatttcgacctgctgaagctggctggcgacgtggaatccaacccaggcccttctagaggccatatgaccgagtacaagcccacggtgcgcctcgccacccgcgacgacgtccccagggccgtacgcaccctcgccgccgcgttcgccgactaccccgccacgcgccacaccgtcgatccggaccgccacatcgagcgggtcaccgagctgcaagaactcttcctcacgcgcgtcgggctcgacatcggcaaggtgtgggtcgcggacgacggcgccgcggtggcggtctggaccacgccggagagcgtcgaagcgggggcggtgttcgccgagatcggcccgcgcatggccgagttgagcggttcccggctggccgcgcagcaacagatggaaggcctcctggcgccgcaccggcccaaggagcccgcgtggttcctggccaccgtcggcgtctcgcccgaccaccagggcaagggtctgggcagcgccgtcgtgctccccggagtggaggcggccgagcgcgccggggtgcccgccttcctggagacctccgcgccccgcaacctccccttctacgagcggctcggcttcaccgtcaccgccgacgtcgaggtgcccgaaggaccgcgcacctggtgcatgacccgcaagcccggtgcctga

SEQ ID NO: 8385 - DNA, 2553 bp, synthetic construct; identical to SEQ ID NO: 8384
  source 1..2553: mol_type = other DNA

SEQ ID NO: 8386 - DNA, 3348 bp, synthetic construct
  source 1..3348: mol_type = other DNA
atggccttaccagtgaccgccttgctcctgccgctggccttgctgctccacgccgccaggccgctcgagatccagaaccctgatcctgccgtgtaccagctgcgggatagcaagagcagcgacaagagcgtgtgtctgttcaccgacttcgacagccagaccaacgtgtcccagagcaaggactccgacgtgtacatcaccgataagaccgtgctggacatgcggagcatggacttcaagagcaactccgccgtggcctggtccaacaagtccgatttcgcctgcgccaacgccttcaacaacagcattatccccgaggacacattcttcccaagccccgagagcagcgactccaccgaccacgtgaagcccaaagagacagagaacaccaagcagcccagcaagagctgccacaagcccaaggccatcgtgcacaccgagaaagtgaacatgatgagcctgaccgtgctgggcctgcggatgctgttcgccaaaaccgtggccgtgaacttcctgctgaccgccaagctgttcttcctcagggccaagcgatctggatctggagcaacaaacttctcactactcaaacaagcaggtgacgtggaggagaatcccgggcctactagcatggccttaccagtgaccgccttgctcctgccgctggccttgctgctccacgccgccaggccgcaggtccagctcgtcgagtccggcggcggcctcgtccaggccggcgactccgtcaccctctcctgcaccgcctccggccgcaccttctcctcctacgccctcgcctggttccgccagcgccccggcaaggagcgcgagttcgtcgccggcctccgctggggcggccccaccaactacgccgactccgtcaaggaccgcttcaccatctccggcgactccgccaagcacaccatgtacctccagatgaactccctcaagcccgaggacaccgccgtctactactgcggctacaaccccggcggctgggccgtcccctcccagtacgagtacgactcctggggccagggcacccaggtcaccgtctcctccggtaccggcggaggcggatctggcggcggaggtagcggtggcggaggatctgaattcgacatccagatgacacagagccctagcagcctgtctgccagcgtgggagacagagtgaccatcacatgcaaggccagcgaccacatcaacaactggctggcctggtatcagcagaagcctggacaggcccctaagctgctgatctacggcgctaccacactggaaacaggcgtgcccagcagattttctggcagcggctctggcaccgactacaccctgacaatatccagcctccagcctgaggacttcgccacctactactgtcagcagagctggaacaccccttggacattcggccagggcaccaagctggaaatcaagagaggcggaggcggaagtggaggcggaggatctggcggcggaggctctcaagttcagcttcaacagcctggcgctgagctggtcaaacctggcgcttctgtgaagatgagctgcaaagccagcggctacgccttcagcagctactggatcaactggatgaagcagaaacccggccagggactcgaatggatcggccaaatctatcccggcgacggcgacaccaactacaacggcaagttcaagggcagagccacactgaccgccgatacctctagcagcacagcctacatgcagctgagcagcctgaccagcgaagatagcgccgtgtacttctgtgcccggtccatcacaacagtcgtgggctgcgctatggactattggggccagggaacaagcgtgaccgtgtctagtacgcgtgaggacctgaagaacgtgttcccacctgaggtggccgtgttcgagcctagcgaggccgagatcagccacacccagaaagccaccctcgtgtgcctggctaccggcttctaccccgaccatgtggaactgtcttggtgggtcaacggcaaagaggtgcacagcggcgtgtctaccgacccccagccactgaaagaacagcccgccctgaacgacagccggtactgcctgagcagcagactgagagtgtccgccaccttctggcagaacccccggaaccacttcagatgccaggtgcagttctacggcctgagcgagaacgacgagtggacccaggacagagccaagcccgtgacccagatcgtgtctgccgaagcctggggcagagccgatgatgtgattaagatccactggcaggaaaagaagtccaacaccatcctgggcagccaggaaggcaacaccatgaagaccaacgacacctacatgaagttcagctggctgaccgtgcccgagaagtccctggacaaagaacacagatgcatcgtgcggcacgaaaacaacaagaacggcgtggaccaggaaatcatcttcccacccatcaagaccgatgtgattacaatggaccccaaggacaactgctccaaggacgccaacgataccctgctgctccagctgaccaacaccagcgcctactacatgtacttgttgctgctgctgaagtccgtggtgtacttcgccatcatcacatgctgcctgctgcggagaaccgccttctgctgcaacggcgagaagtctcgcgccaagagaagcggatctggcgtgaagcagaccctgaatttcgacctgctgaagctggctggcgacgtggaatccaacccaggcccttctagaggccatatgaccgagtacaagcccacggtgcgcctcgccacccgcgacgacgtccccagggccgtacgcaccctcgccgccgcgttcgccgactaccccgccacgcgccacaccgtcgatccggaccgccacatcgagcgggtcaccgagctgcaagaactcttcctcacgcgcgtcgggctcgacatcggcaaggtgtgggtcgcggacgacggcgccgcggtggcggtctggaccacgccggagagcgtcgaagcgggggcggtgttcgccgagatcggcccgcgcatggccgagttgagcggttcccggctggccgcgcagcaacagatggaaggcctcctggcgccgcaccggcccaaggagcccgcgtggttcctggccaccgtcggcgtctcgcccgaccaccagggcaagggtctgggcagcgccgtcgtgctccccggagtggaggcggccgagcgcgccggggtgcccgccttcctggagacctccgcgccccgcaacctccccttctacgagcggctcggcttcaccgtcaccgccgacgtcgaggtgcccgaaggaccgcgcacctggtgcatgacccgcaagcccggtgcctga

SEQ ID NO: 8387 - DNA, 3735 bp, synthetic construct
  source 1..3735: mol_type = other DNA
atggccttaccagtgaccgccttgctcctgccgctggccttgctgctccacgccgccaggccgctcgagatccagaaccctgatcctgccgtgtaccagctgcgggatagcaagagcagcgacaagagcgtgtgtctgttcaccgacttcgacagccagaccaacgtgtcccagagcaaggactccgacgtgtacatcaccgataagaccgtgctggacatgcggagcatggacttcaagagcaactccgccgtggcctggtccaacaagtccgatttcgcctgcgccaacgccttcaacaacagcattatccccgaggacacattcttcccaagccccgagagcagcgactccaccgaccacgtgaagcccaaagagacagagaacaccaagcagcccagcaagagctgccacaagcccaaggccatcgtgcacaccgagaaagtgaacatgatgagcctgaccgtgctgggcctgcggatgctgttcgccaaaaccgtggccgtgaacttcctgctgaccgccaagctgttcttcctcagggccaagcgatctggatctggagcaacaaacttctcactactcaaacaagcaggtgacgtggaggagaatcccgggcctactagcatggccttaccagtgaccgccttgctcctgccgctggccttgctgctccacgccgccaggccggaggttcagctgcttgagtctggcggaggactggttcaacctggcggaagcctgagactgtcttgtgccgccagcggcttcacctttagcagctacgccatgagctgggtccgacaggctcctggcaaaggactggaatgggtgtccagcatcagcggcagcggcgactacatctactacgccgatagcgtgaagggcagattcaccatcagccgggacatcagcaagaacaccctgtacctccagatgaacagcctgagagccgaggacaccgccgtgtactactgtgccaaagaaggcaccggcgctaacagcagcctggccgattatagaggccagggcacactggtcaccgtgtctagtggcggaggaagcggcggaggatctcaggtccagctcgtcgagtccggcggcggcctcgtccaggccggcgactccgtcaccctctcctgcaccgcctccggccgcaccttctcctcctacgccctcgcctggttccgccagcgccccggcaaggagcgcgagttcgtcgccggcctccgctggggcggccccaccaactacgccgactccgtcaaggaccgcttcaccatctccggcgactccgccaagcacaccatgtacctccagatgaactccctcaagcccgaggacaccgccgtctactactgcggctacaaccccggcggctgggccgtcccctcccagtacgagtacgactcctggggccagggcacccaggtcaccgtctcctccggtaccggcggaggcggatctggcggcggaggtagcggtggcggaggatctgaattcgacatccagatgacacagagccctagcagcctgtctgccagcgtgggagacagagtgaccatcacatgcaaggccagcgaccacatcaacaactggctggcctggtatcagcagaagcctggacaggcccctaagctgctgatctacggcgctaccacactggaaacaggcgtgcccagcagattttctggcagcggctctggcaccgactacaccctgacaatatccagcctccagcctgaggacttcgccacctactactgtcagcagagctggaacaccccttggacattcggccagggcaccaagctggaaatcaagagaggcggaggcggaagtggaggcggaggatctggcggcggaggctctcaagttcagcttcaacagcctggcgctgagctggtcaaacctggcgcttctgtgaagatgagctgcaaagccagcggctacgccttcagcagctactggatcaactggatgaagcagaaacccggccagggactcgaatggatcggccaaatctatcccggcgacggcgacaccaactacaacggcaagttcaagggcagagccacactgaccgccgatacctctagcagcacagcctacatgcagctgagcagcctgaccagcgaagatagcgccgtgtacttctgtgcccggtccatcacaacagtcgtgggctgcgctatggactattggggccagggaacaagcgtgaccgtgtctagtacgcgtgaggacctgaagaacgtgttcccacctgaggtggccgtgttcgagcctagcgaggccgagatcagccacacccagaaagccaccctcgtgtgcctggctaccggcttctaccccgaccatgtggaactgtcttggtgggtcaacggcaaagaggtgcacagcggcgtgtctaccgacccccagccactgaaagaacagcccgccctgaacgacagccggtactgcctgagcagcagactgagagtgtccgccaccttctggcagaacccccggaaccacttcagatgccaggtgcagttctacggcctgagcgagaacgacgagtggacccaggacagagccaagcccgtgacccagatcgtgtctgccgaagcctggggcagagccgatgatgtgattaagatccactggcaggaaaagaagtccaacaccatcctgggcagccaggaaggcaacaccatgaagaccaacgacacctacatgaagttcagctggctgaccgtgcccgagaagtccctggacaaagaacacagatgcatcgtgcggcacgaaaacaacaagaacggcgtggaccaggaaatcatcttcccacccatcaagaccgatgtgattacaatggaccccaaggacaactgctccaaggacgccaacgataccctgctgctccagctgaccaacaccagcgcctactacatgtacttgttgctgctgctgaagtccgtggtgtacttcgccatcatcacatgctgcctgctgcggagaaccgccttctgctgcaacggcgagaagtctcgcgccaagagaagcggatctggcgtgaagcagaccctgaatttcgacctgctgaagctggctggcgacgtggaatccaacccaggcccttctagaggccatatgaccgagtacaagcccacggtgcgcctcgccacccgcgacgacgtccccagggccgtacgcaccctcgccgccgcgttcgccgactaccccgccacgcgccacaccgtcgatccggaccgccacatcgagcgggtcaccgagctgcaagaactcttcctcacgcgcgtcgggctcgacatcggcaaggtgtgggtcgcggacgacggcgccgcggtggcggtctggaccacgccggagagcgtcgaagcgggggcggtgttcgccgagatcggcccgcgcatggccgagttgagcggttcccggctggccgcgcagcaacagatggaaggcctcctggcgccgcaccggcccaaggagcccgcgtggttcctggccaccgtcggcgtctcgcccgaccaccagggcaagggtctgggcagcgccgtcgtgctccccggagtggaggcggccgagcgcgccggggtgcccgccttcctggagacctccgcgccccgcaacctccccttctacgagcggctcggcttcaccgtcaccgccgacgtcgaggtgcccgaaggaccgcgcacctggtgcatgacccgcaagcccggtgcctga

SEQ ID NO: 8388 - DNA, 3735 bp, synthetic construct; identical to SEQ ID NO: 8387
  source 1..3735: mol_type = other DNA

SEQ ID NO: 8389 - DNA, 2571 bp, synthetic construct
  source 1..2571: mol_type = other DNA
atggccttaccagtgaccgccttgctcctgccgctggccttgctgctccacgccgccaggccgctcgagatccagaaccctgatcctgccgtgtaccagctgcgggatagcaagagcagcgacaagagcgtgtgtctgttcaccgacttcgacagccagaccaacgtgtcccagagcaaggactccgacgtgtacatcaccgataagaccgtgctggacatgcggagcatggacttcaagagcaactccgccgtggcctggtccaacaagtccgatttcgcctgcgccaacgccttcaacaacagcattatccccgaggacacattcttcccaagccccgagagcagcgactccaccgaccacgtgaagcccaaagagacagagaacaccaagcagcccagcaagagctgccacaagcccaaggccatcgtgcacaccgagaaagtgaacatgatgagcctgaccgtgctgggcctgcggatgctgttcgccaaaaccgtggccgtgaacttcctgctgaccgccaagctgttcttcctcagggccaagcgatctggatctggagcaacaaacttctcactactcaaacaagcaggtgacgtggaggagaatcccgggcctactagcatggccctgcccgtgacagccctgctgctgcctctggctctgctgctgcacgccgccagacccgatgaattcggctctgacctgggcatcaagctgctgttcgccgctgccaagggccaggacgacgaagtgcggattctgctggctgctggggccgacgtgaacgccaaggatttcgagggctacacccccctgcacgtggccgcctatgatggacacctggaaatcgtggaagtgctgctgaaggctggcgctgatgtgaatgccaaagacagccagggccggacccctctgcatgaagccgcctacagcggccatctggaaattgtggaagtgctgctgaaagccggggcagacgtgaacgctcaggacgacgctggcgagacaccagccgatctggctgcagcttggggccacgaagatatcgccgaggtgctgcagaagacgcgtgaggacctgaagaacgtgttcccacctgaggtggccgtgttcgagcctagcgaggccgagatcagccacacccagaaagccaccctcgtgtgcctggctaccggcttctaccccgaccatgtggaactgtcttggtgggtcaacggcaaagaggtgcacagcggcgtgtctaccgacccccagccactgaaagaacagcccgccctgaacgacagccggtactgcctgagcagcagactgagagtgtccgccaccttctggcagaacccccggaaccacttcagatgccaggtgcagttctacggcctgagcgagaacgacgagtggacccaggacagagccaagcccgtgacccagatcgtgtctgccgaagcctggggcagagccgatgatgtgattaagatccactggcaggaaaagaagtccaacaccatcctgggcagccaggaaggcaacaccatgaagaccaacgacacctacatgaagttcagctggctgaccgtgcccgagaagtccctggacaaagaacacagatgcatcgtgcggcacgaaaacaacaagaacggcgtggaccaggaaatcatcttcccacccatcaagaccgatgtgattacaatggaccccaaggacaactgctccaaggacgccaacgataccctgctgctccagctgaccaacaccagcgcctactacatgtacttgttgctgctgctgaagtccgtggtgtacttcgccatcatcacatgctgcctgctgcggagaaccgccttctgctgcaacggcgagaagtctcgcgccaagagaagcggatctggcgtgaagcagaccctgaatttcgacctgctgaagctggctggcgacgtggaatccaacccaggcccttctagaggccatatgaccgagtacaagcccacggtgcgcctcgccacccgcgacgacgtccccagggccgtacgcaccctcgccgccgcgttcgccgactaccccgccacgcgccacaccgtcgatccggaccgccacatcgagcgggtcaccgagctgcaagaactcttcctcacgcgcgtcgggctcgacatcggcaaggtgtgggtcgcggacgacggcgccgcggtggcggtctggaccacgccggagagcgtcgaagcgggggcggtgttcgccgagatcggcccgcgcatggccgagttgagcggttcccggctggccgcgcagcaacagatggaaggcctcctggcgccgcaccggcccaaggagcccgcgtggttcctggccaccgtcggcgtctcgcccgaccaccagggcaagggtctgggcagcgccgtcgtgctccccggagtggaggcggccgagcgcgccggggtgcccgccttcctggagacctccgcgccccgcaacctccccttctacgagcggctcggcttcaccgtcaccgccgacgtcgaggtgcccgaaggaccgcgcacctggtgcatgacccgcaagcccggtgcctga

SEQ ID NO: 8390 - DNA, 2358 bp, synthetic construct
  source 1..2358: mol_type = other DNA
atggccttaccagtgaccgccttgctcctgccgctggccttgctgctccacgccgccaggccgctcgagatccagaaccctgatcctgccgtgtaccagctgcgggatagcaagagcagcgacaagagcgtgtgtctgttcaccgacttcgacagccagaccaacgtgtcccagagcaaggactccgacgtgtacatcaccgataagaccgtgctggacatgcggagcatggacttcaagagcaactccgccgtggcctggtccaacaagtccgatttcgcctgcgccaacgccttcaacaacagcattatccccgaggacacattcttcccaagccccgagagcagcgactccaccgaccacgtgaagcccaaagagacagagaacaccaagcagcccagcaagagctgccacaagcccaaggccatcgtgcacaccgagaaagtgaacatgatgagcctgaccgtgctgggcctgcggatgctgttcgccaaaaccgtggccgtgaacttcctgctgaccgccaagctgttcttcctcagggccaagcgatctggatctggagcaacaaacttctcactactcaaacaagcaggtgacgtggaggagaatcccgggcctactagcatggactggatttggcgcatccttttccttgtcggcgctgctaccggcgcccattccttcgaaggcagcggattcgaatacgccaaagagatgcggaacgcctactgggagatcgccctgctgcccaatctgaccaaccagcagaagagagcccccatcagaaagctgtacgacgacccctcccagagcagcgagctgctgtctgaggctaaaaaactgaacgatagccagacgcgtgaggacctgaagaacgtgttcccacctgaggtggccgtgttcgagcctagcgaggccgagatcagccacacccagaaagccaccctcgtgtgcctggctaccggcttctaccccgaccatgtggaactgtcttggtgggtcaacggcaaagaggtgcacagcggcgtgtctaccgacccccagccactgaaagaacagcccgccctgaacgacagccggtactgcctgagcagcagactgagagtgtccgccaccttctggcagaacccccggaaccacttcagatgccaggtgcagttctacggcctgagcgagaacgacgagtggacccaggacagagccaagcccgtgacccagatcgtgtctgccgaagcctggggcagagccgatgatgtgattaagatccactggcaggaaaagaagtccaacaccatcctgggcagccaggaaggcaacaccatgaagaccaacgacacctacatgaagttcagctggctgaccgtgcccgagaagtccctggacaaagaacacagatgcatcgtgcggcacgaaaacaacaagaacggcgtggaccaggaaatcatcttcccacccatcaagaccgatgtgattacaatggaccccaaggacaactgctccaaggacgccaacgataccctgctgctccagctgaccaacaccagcgcctactacatgtacttgttgctgctgctgaagtccgtggtgtacttcgccatcatcacatgctgcctgctgcggagaaccgccttctgctgcaacggcgagaagtctcgcgccaagagaagcggatctggcgtgaagcagaccctgaatttcgacctgctgaagctggctggcgacgtggaatccaacccaggcccttctagaggccatatgaccgagtacaagcccacggtgcgcctcgccacccgcgacgacgtccccagggccgtacgcaccctcgccgccgcgttcgccgactaccccgccacgcgccacaccgtcgatccggaccgccacatcgagcgggtcaccgagctgcaagaactcttcctcacgcgcgtcgggctcgacatcggcaaggtgtgggtcgcggacgacggcgccgcggtggcggtctggaccacgccggagagcgtcgaagcgggggcggtgttcgccgagatcggcccgcgcatggccgagttgagcggttcccggctggccgcgcagcaacagatggaaggcctcctggcgccgcaccggcccaaggagcccgcgtggttcctggccaccgtcggcgtctcgcccgaccaccagggcaagggtctgggcagcgccgtcgtgctccccggagtggaggcggccgagcgcgccggggtgcccgccttcctggagacctccgcgccccgcaacctccccttctacgagcggctcggcttcaccgtcaccgccgacgtcgaggtgcccgaaggaccgcgcacctggtgcatgacccgcaagcccggtgcctga

SEQ ID NO: 8391 - DNA, 3024 bp, synthetic construct
  source 1..3024: mol_type = other DNA
atggccttaccagtgaccgccttgctcctgccgctggccttgctgctccacgccgccaggccgctcgagatccagaaccctgatcctgccgtgtaccagctgcgggatagcaagagcagcgacaagagcgtgtgtctgttcaccgacttcgacagccagaccaacgtgtcccagagcaaggactccgacgtgtacatcaccgataagaccgtgctggacatgcggagcatggacttcaagagcaactccgccgtggcctggtccaacaagtccgatttcgcctgcgccaacgccttcaacaacagcattatccccgaggacacattcttcccaagccccgagagcagcgactccaccgaccacgtgaagcccaaagagacagagaacaccaagcagcccagcaagagctgccacaagcccaaggccatcgtgcacaccgagaaagtgaacatgatgagcctgaccgtgctgggcctgcggatgctgttcgccaaaaccgtggccgtgaacttcctgctgaccgccaagctgttcttcctcagggccaagcgatctggatctggagcaacaaacttctcactactcaaacaagcaggtgacgtggaggagaatcccgggcctactagcatggccctgcccgtgacagccctgctgctgcctctggctctgctgctgcacgccgccagacccgatgaattcgaggtgcaactggtggaaagcggcggaggcctggtgcaggctggcggatctctgagactgagctgtgccgccagcggcatcaccttcagcatcaacacaatgggctggtacagacaggcccctggcaagcagagggaactggtggccctgatctccagcatcggcgacacctactacgccgacagcgtgaagggccggttcaccatcagccgggacaacgccaagaacaccgtgtacctccagatgaacagcctgaagcccgaggacaccgccgtgtactactgcaagcggttcagaacagccgcccagggcaccgattattggggccagggaacacaagtgaccgtgtcctctctcgagggaggaggcggctccgggggaggcggaagtggaggcggaggatctgggtctggaggaagcggatctggaggctcagggtcagggggctcaggcagtggaggctctttcgaagtgcaactggtggaatctgggggcggactggtgcagccaggcggaagtctgaggctgtcttgtgccgcctccggcagcatcttcggcttcaacgacatggcctggtatcggcaggctcccggaaaacagcgcgagctggtggctctgattagcagagtgggcgtgaccagcagcgccgactctgtgaagggcagattcacaatctccagagtgaacgccaaggatacagtgtacctccagatgaactctctgaaacctgaggatacagcagtgtactattgctacatggaccagcggctggacggcagcacactggcctactggggacagggaactcaagtgacagtgtctagcacgcgtgaggacctgaagaacgtgttcccacctgaggtggccgtgttcgagcctagcgaggccgagatcagccacacccagaaagccaccctcgtgtgcctggctaccggcttctaccccgaccatgtggaactgtcttggtgggtcaacggcaaagaggtgcacagcggcgtgtctaccgacccccagccactgaaagaacagcccgccctgaacgacagccggtactgcctgagcagcagactgagagtgtccgccaccttctggcagaacccccggaaccacttcagatgccaggtgcagttctacggcctgagcgagaacgacgagtggacccaggacagagccaagcccgtgacccagatcgtgtctgccgaagcctggggcagagccgatgatgtgattaagatccactggcaggaaaagaagtccaacaccatcctgggcagccaggaaggcaacaccatgaagaccaacgacacctacatgaagttcagctggctgaccgtgcccgagaagtccctggacaaagaacacagatgcatcgtgcggcacgaaaacaacaagaacggcgtggaccaggaaatcatcttcccacccatcaagaccgatgtgattacaatggaccccaaggacaactgctccaaggacgccaacgataccctgctgctccagctgaccaacaccagcgcctactacatgtacttgttgctgctgctgaagtccgtggtgtacttcgccatcatcacatgctgcctgctgcggagaaccgccttctgctgcaacggcgagaagtctcgcgccaagagaagcggatctggcgtgaagcagaccctgaatttcgacctgctgaagctggctggcgacgtggaatccaacccaggcccttctagaggccatatgaccgagtacaagcccacggtgcgcctcgccacccgcgacgacgtccccagggccgtacgcaccctcgccgccgcgttcgccgactaccccgccacgcgccacaccgtcgatccggaccgccacatcgagcgggtcaccgagctgcaagaactcttcctcacgcgcgtcgggctcgacatcggcaaggtgtgggtcgcggacgacggcgccgcggtggcggtctggaccacgccggagagcgtcgaagcgggggcggtgttcgccgagatcggcccgcgcatggccgagttgagcggttcccggctggccgcgcagcaacagatggaaggcctcctggcgccgcaccggcccaaggagcccgcgtggttcctggccaccgtcggcgtctcgcccgaccaccagggcaagggtctgggcagcgccgtcgtgctccccggagtggaggcggccgagcgcgccggggtgcccgccttcctggagacctccgcgccccgcaacctccccttctacgagcggctcggcttcaccgtcaccgccgacgtcgaggtgcccgaaggaccgcgcacctggtgcatgacccgcaagcccggtgcctga

SEQ ID NO: 8392 - DNA, 2766 bp, synthetic construct
  source 1..2766: mol_type = other DNA
atggccttaccagtgaccgccttgctcctgccgctggccttgctgctccacgccgccaggccgctcgagatccagaaccctgatcctgccgtgtaccagctgcgggatagcaagagcagcgacaagagcgtgtgtctgttcaccgacttcgacagccagaccaacgtgtcccagagcaaggactccgacgtgtacatcaccgataagaccgtgctggacatgcggagcatggacttcaagagcaactccgccgtggcctggtccaacaagtccgatttcgcctgcgccaacgccttcaacaacagcattatccccgaggacacattcttcccaagccccgagagcagcgactccaccgaccacgtgaagcccaaagagacagagaacaccaagcagcccagcaagagctgccacaagcccaaggccatcgtgcacaccgagaaagtgaacatgatgagcctgaccgtgctgggcctgcggatgctgttcgccaaaaccgtggccgtgaacttcctgctgaccgccaagctgttcttcctcagggccaagcgatctggatctggagcaacaaacttctcactactcaaacaagcaggtgacgtggaggagaatcccgggcctactagcatggcccttccagtcactgccttgctgttgcctctggcgctcctgctccacgccgctagaccgggcatgagaaccgaggacctgcctaaggccgtggtgttcctggaaccccagtggtacagagtgctggaaaaggacagcgtgaccctgaagtgccagggcgcctacagccccgaggacaatagcacccagtggttccacaacgagagcctgatctccagccaggccagcagctacttcatcgacgccgccaccgtggacgacagcggcgagtatagatgccagaccaacctgagcaccctgagcgaccccgtgcagctggaagtgcacatcggatggctgctgctgcaggcccccagatgggtgttcaaagaagaggaccccatccacctgagatgccactcttggaagaacaccgccctgcacaaagtgacctacctgcagaacggcaagggcagaaagtacttccaccacaacagcgacttctacatccccaaggccaccctgaaggactccggctcctacttctgcagaggcctcgtgggcagcaagaacgtgtccagcgagacagtgaacatcaccatcacccagggcctggccgtgtctaccatcagcagctttttcccacccggctaccagacgcgtgaggacctgaagaacgtgttcccacctgaggtggccgtgttcgagcctagcgaggccgagatcagccacacccagaaagccaccctcgtgtgcctggctaccggcttctaccccgaccatgtggaactgtcttggtgggtcaacggcaaagaggtgcacagcggcgtgtctaccgacccccagccactgaaagaacagcccgccctgaacgacagccggtactgcctgagcagcagactgagagtgtccgccaccttctggcagaacccccggaaccacttcagatgccaggtgcagttctacggcctgagcgagaacgacgagtggacccaggacagagccaagcccgtgacccagatcgtgtctgccgaagcctggggcagagccgatgatgtgattaagatccactggcaggaaaagaagtccaacaccatcctgggcagccaggaaggcaacaccatgaagaccaacgacacctacatgaagttcagctggctgaccgtgcccgagaagtccctggacaaagaacacagatgcatcgtgcggcacgaaaacaacaagaacggcgtggaccaggaaatcatcttcccacccatcaagaccgatgtgattacaatggaccccaaggacaactgctccaaggacgccaacgataccctgctgctccagctgaccaacaccagcgcctactacatgtacttgttgctgctgctgaagtccgtggtgtacttcgccatcatcacatgctgcctgctgcggagaaccgccttctgctgcaacggcgagaagtctcgcgccaagagaagcggatctggcgtgaagcagaccctgaatttcgacctgctgaagctggctggcgacgtggaatccaacccaggcccttctagaggccatatgaccgagtacaagcccacggtgcgcctcgccacccgcgacgacgtccccagggccgtacgcaccctcgccgccgcgttcgccgactaccccgccacgcgccacaccgtcgatccggaccgccacatcgagcgggtcaccgagctgcaagaactcttcctcacgcgcgtcgggctcgacatcggcaaggtgtgggtcgcggacgacggcgccgcggtggcggtctggaccacgccggagagcgtcgaagcgggggcggtgttcgccgagatcggcccgcgcatggccgagttgagcggttcccggctggccgcgcagcaacagatggaaggcctcctggcgccgcaccggcccaaggagcccgcgtggttcctggccaccgtcggcgtctcgcccgaccaccagggcaagggtctgggcagcgccgtcgtgctccccggagtggaggcggccgagcgcgccggggtgcccgccttcctggagacctccgcgccccgcaacctccccttctacgagcggctcggcttcaccgtcaccgccgacgtcgaggtgcccgaaggaccgcgcacctggtgcatgacccgcaagcccggtgcctga

SEQ ID NO: 8393 - DNA, 2772 bp, synthetic construct
  source 1..2772: mol_type = other DNA
atggccttaccagtgaccgccttgctcctgccgctggccttgctgctccacgccgccaggccgctcgagatccagaaccctgatcctgccgtgtaccagctgcgggatagcaagagcagcgacaagagcgtgtgtctgttcaccgacttcgacagccagaccaacgtgtcccagagcaaggactccgacgtgtacatcaccgataagaccgtgctggacatgcggagcatggacttcaagagcaactccgccgtggcctggtccaacaagtccgatttcgcctgcgccaacgccttcaacaacagcattatccccgaggacacattcttcccaagccccgagagcagcgactccaccgaccacgtgaagcccaaagagacagagaacaccaagcagcccagcaagagctgccacaagcccaaggccatcgtgcacaccgagaaagtgaacatgatgagcctgaccgtgctgggcctgcggatgctgttcgccaaaaccgtggccgtgaacttcctgctgaccgccaagctgttcttcctcagggccaagcgatctggatctggagcaacaaacttctcactactcaaacaagcaggtgacgtggaggagaatcccgggcctactagcgccaccatggccttaccagtgaccgccttgctcctgccgctggccttgctgctccacgccgccaggccgggcatgcggactgaagacctcccaaaggctgtggtgttcctggagcctcaatggtacagggtgctggagaaggacagtgtgactctgaagtgccagggagcctactcccctgaggacaattccacacagtggtttcacaatgagagcctcatctcaagccaggcctccagctacttcattgacgctgccacagtggacgacagtggagagtacaggtgccagacaaacctctccaccctcagtgacccggtgcagctagaagtccatatcggctggctgttgctccaggcccctcggtgggtgttcaaggaggaagaccctattcacctgaggtgtcacagctggaagaacactgctctgcataaggtcacatatttacagaatggcaaaggcaggaagtattttcatcataattctgacttctacattccaaaagccacactcaaagacagcggctcctacttctgcagggggcttgttgggagtaaaaatgtgtcttcagagactgtgaacatcaccatcactcaaggtttggcagtgtcaaccatctcatcattctttccacctggctaccaaacgcgtgaggacctgaagaacgtgttcccacctgaggtggccgtgttcgagcctagcgaggccgagatcagccacacccagaaagccaccctcgtgtgcctggctaccggcttctaccccgaccatgtggaactgtcttggtgggtcaacggcaaagaggtgcacagcggcgtgtctaccgacccccagccactgaaagaacagcccgccctgaacgacagccggtactgcctgagcagcagactgagagtgtccgccaccttctggcagaacccccggaaccacttcagatgccaggtgcagttctacggcctgagcgagaacgacgagtggacccaggacagagccaagcccgtgacccagatcgtgtctgccgaagcctggggcagagccgatgatgtgattaagatccactggcaggaaaagaagtccaacaccatcctgggcagccaggaaggcaacaccatgaagaccaacgacacctacatgaagttcagctggctgaccgtgcccgagaagtccctggacaaagaacacagatgcatcgtgcggcacgaaaacaacaagaacggcgtggaccaggaaatcatcttcccacccatcaagaccgatgtgattacaatggaccccaaggacaactgctccaaggacgccaacgataccctgctgctccagctgaccaacaccagcgcctactacatgtacttgttgctgctgctgaagtccgtggtgtacttcgccatcatcacatgctgcctgctgcggagaaccgccttctgctgcaacggcgagaagtctcgcgccaagagaagcggatctggcgtgaagcagaccctgaatttcgacctgctgaagctggctggcgacgtggaatccaacccaggcccttctagaggccatatgaccgagtacaagcccacggtgcgcctcgccacccgcgacgacgtccccagggccgtacgcaccctcgccgccgcgttcgccgactaccccgccacgcgccacaccgtcgatccggaccgccacatcgagcgggtcaccgagctgcaagaactcttcctcacgcgcgtcgggctcgacatcggcaaggtgtgggtcgcggacgacggcgccgcggtggcggtctggaccacgccggagagcgtcgaagcgggggcggtgttcgccgagatcggcccgcgcatggccgagttgagcggttcccggctggccgcgcagcaacagatggaaggcctcctggcgccgcaccggcccaaggagcccgcgtggttcctggccaccgtcggcgtctcgcccgaccaccagggcaagggtctgggcagcgccgtcgtgctccccggagtggaggcggccgagcgcgccggggtgcccgccttcctggagacctccgcgccccgcaacctccccttctacgagcggctcggcttcaccgtcaccgccgacgtcgaggtgcccgaaggaccgcgcacctggtgcatgacccgcaagcccggtgcctga

SEQ ID NO: 8394 - DNA, 26 bp, synthetic construct
  source 1..26: mol_type = other DNA
gggggggggggggggggggggggggg

SEQ ID NO: 8395 - DNA, 26 bp, synthetic construct
  source 1..26: mol_type = other DNA
gggggggggggggggggggggggggg

SEQ ID NO: 8396 - DNA, 4598 bp, synthetic construct
  source 1..4598: mol_type = other DNA
ggatccagctggatgtctgcattgccgaggccaccagggctggctcagcaactgtcggggaatcaccagggtctgagaaatcttgtgcgcatgtgaggggctgtgggagcagagaaccactgggtgggaaattctaatccccaccctgctggaaactctctgggtggccccaacatgctaatcctccggcaaacctctgtttcctcctcaaaaggcaggaggtcggaaagaataaacaatgagagtcacattaaaaacacaaaatcctacggaaatactgaagaatgagtctcagcactaaggaaaagcctccagcagctcctgctttctgagggtgaaggatagacgctgtggctctgcatgactcactagcactctatcacggccatattctggcagggtcagtggctccaactaacatttgtttggtactttacagtttattaaatagatgtttatatggagaagctctcatttctttctcagaagagcctggctaggaaggtggatgaggcaccatattcattttgcaggtgaaattcctgagatgtaaggagctgctgtgacttgctcaaggccttatatcgagtaaacggtagcgctggggcttagacgcaggtgttctgatttatagttcaaaacctctatcaatgagagagcaatctcctggtaatgtgatagatttcccaacttaatgccaacataccataaacctcccattctgctaatgcccagcctaagttggggagaccactccagattccaagatgtacagtttgctttgctgggcctttttcccatgcctgcctttactctgccagagttatattgctggggttttgaagaagatcctattaaataaaagaataagcagtattattaagtagccctgcatttcaggtttccttgagtggcaggccaggcctggccgtgaacgttcactgaaatcatggcctcttggccaagattgatagcttgtgcctgtccctgagtcccagtccatcacgagcagctggtttctaagatgctatttcccgtataaagcatgagaccgtgacttgccagccccacagagccccgcccttgtccatcactggcatctggactccagcctgggttggggcaaagagggaaatgagatcatgtcctaaccctgatcctcttgtcccacagatgtgaagcagaccctgaatttcgacctgctgaagctggctggcgacgtggaatccaacccaggccctatggccttaccagtgaccgccttgctcctgccgctggccttgctgctccacgccgccaggccggacatccagatgacacagactacatcctccctgtctgcctctctgggagacagagtcaccatcagttgcagggcaagtcaggacattagtaagtacctgaactggtatcagcagaaaccagatggaactgttaaactcctgatctaccatacatcaagattacactcaggagtcccatcaaggttcagtggcagtgggtctggaacagattattctctcaccattagcaacctggagcaagaagatattgccacttacttttgccaacagggtaatacgcttccgtacacgttcggaggggggaccaagctggagatcacactcgaggacctgaagaacgtgttcccacctgaggtggccgtgttcgagcctagcgaggccgagatcagccacacccagaaagccaccctcgtgtgcctggctaccggcttctaccccgaccatgtggaactgtcttggtgggtcaacggcaaagaggtgcacagcggcgtgtgtaccgacccccagccactgaaagaacagcccgccctgaacgacagccggtactgcctgagcagcagactgagagtgtccgccaccttctggcagaacccccggaaccacttcagatgccaggtgcagttctacggcctgagcgagaacgacgagtggacccaggacagagccaagcccgtgacccagatcgtgtctgccgaagcctggggcagagccgattgcgacgtgaagctggtggaaaagagcttcgagacagacaccaacctgaacttccagaacctgagcgtgatcggcttcagaatcctgctgctgaaagtggccggctttaacctgctgatgaccctgcggctgtggtccagcagggccaagcgatctggatctggagcaacaaacttctcactactcaaacaagcaggtgacgtggaggagaatcccgggcctactagtatggactggatttggcgcatccttttccttgtcggcgctgctaccggcgcgcattccttcgaagtgaaactgcaggagtcaggacctggcctggtggcgccctcacagagcctgtccgtcacatgcactgtctcaggggtctcattacccgactatggtgtaagctggattcgccagcctccacgaaagggtctggagtggctgggagtaatatggggtagtgaaaccacatactataattcagctctcaaatccagactgaccatcatcaaggacaactccaagagccaagttttcttaaaaatgaacagtctgcaaactgatgacacagccatttactactgtgccaaacattattactacggtggtagctatgctatggactactggggccaaggaacctcagtcaccgtctcctcaacgcgtatccagaaccctgatcctgccgtgtaccagctgcgggatagcaagagcagcgacaagagcgtgtgtctgttcaccgacttcgacagccagaccaacgtgtcccagagcaaggactccgacgtgtacatcaccgataagtgcgtgctggacatgcggagcatggacttcaagagcaactccgccgtggcctggtccaacaagtccgatttcgcctgcgccaacgccttcaacaacagcattatccccgaggacacattcttcccaagccccgagagcagctgcggctttaccagcgagagctaccagcagggcgtgctgagcgccaccatcctgtacgagatcctgctgggcaaggccaccctgtacgccgtgctggtgtctgccctggtgctgatggctatggtcaagcggaaggacagccggggatgaccagacatgataagatacattgatgagtttggacaaaccacaactagaatgcagtgaaaaaaatgctttatttgtgaaatttgtgatgctattgctttatttgtaaccattataagctgcaataaacaagttaacaacaacaattgcattcattttatgtttcaggttcagggggaggtgtgggaggttttttaaagcaagtaaaacctctacaaatgtggtatggaattaattctaaaatacagcatagcaaaactttaacctccaaatcaagcctctacttgaatccttttctgagggatgaataaggcataggcatcaggggctgttgccaatgtgcattagctgtttgcagcctcaccttctttcatggagtttaagatatagtgtattttcccaaggtttgaactagctcttcatttctttatgttttaaatgcactgacctcccacattccctttttagtaaaatattcagaaataatttaaatacatcattgcaatgaaaataaatgttttttattaggcagaatccagatgctcaaggcccttcataatatcccccagtttagtagttggacttagggaacaaaggaacctttaatagaaattggacagcaagaaagcgagcttctagcttatcctgtatatcacagacaaaactgtgctagacatgaggtctatggacttcaagagcaacagtgctgtggcctggagcaacaaatctgactttgcatgtgcaaacgccttcaacaacagcattattccagaagacaccttcttccccagcccaggtaagggcagctttggtgccttcgcaggctgtttccttgcttcaggaatggccaggttctgcccagagctctggtcaatgatgtctaaaactcctctgattggtggtctcggccttatccattgccaccaaaaccctctttttactaagaaacagtgagccttgttctggcagtccagagaatgacacgggaaaaaagcagatgaagagaaggtggcaggagagggcacgtggcccagcctcagtctctccaactgagttcctgcctgcctgcctttgctcagactgtttgccccttactgctcttctaggcctcattctaagccccttctccaagttgcctctccttatttctccctgtctgccaaaaaatctttcccagctcactaagtcagtctcacgcagtcactcattaacccaccaatcactgattgtgccggcacatgaatgcaccaggtgttgaagtggaggaattaaaaagtcagatgaggggtgtgcccagaggaagcaccattctagttgggggagcccatctgtcagctgggaaaagtccaaataacttcagattggaatgtgttttaactcagggttgagaaaacagccaccttcaggacaaaagtcagggaagggctctctgaagaaatgctacttgaagataccagccctaccaagggcagggagaggaccctatagaggcctgggaca

SEQ ID NO: 8397 - DNA, 4598 bp, synthetic construct
  source 1..4598: mol_type = other DNA
ggatccagctggatgtctgcattgccgaggccaccagggctggctcagcaactgtcggggaatcaccagggtctgagaaatcttgtgcgcatgtgaggggctgtgggagcagagaaccactgggtgggaaattctaatccccaccctgctggaaactctctgggtggccccaacatgctaatcctccggcaaacctctgtttcctcctcaaaaggcaggaggtcggaaagaataaacaatgagagtcacattaaaaacacaaaatcctacggaaatactgaagaatgagtctcagcactaaggaaaagcctccagcagctcctgctttctgagggtgaaggatagacgctgtggctctgcatgactcactagcactctatcacggccatattctggcagggtcagtggctccaactaacatttgtttggtactttacagtttattaaatagatgtttatatggagaagctctcatttctttctcagaagagcctggctaggaaggtggatgaggcaccatattcattttgcaggtgaaattcctgagatgtaaggagctgctgtgacttgctcaaggccttatatcgagtaaacggtagcgctggggcttagacgcaggtgttctgatttatagttcaaaacctctatcaatgagagagcaatctcctggtaatgtgatagatttcccaacttaatgccaacataccataaacctcccattctgctaatgcccagcctaagttggggagaccactccagattccaagatgtacagtttgctttgctgggcctttttcccatgcctgcctttactctgccagagttatattgctggggttttgaagaagatcctattaaataaaagaataagcagtattattaagtagccctgcatttcaggtttccttgagtggcaggccaggcctggccgtgaacgttcactgaaatcatggcctcttggccaagattgatagcttgtgcctgtccctgagtcccagtccatcacgagcagctggtttctaagatgctatttcccgtataaagcatgagaccgtgacttgccagccccacagagccccgcccttgtccatcactggcatctggactccagcctgggttggggcaaagagggaaatgagatcatgtcctaaccctgatcctcttgtcccacagatgtgaagcagaccctgaatttcgacctgctgaagctggctggcgacgtggaatccaacccaggccctatggccttaccagtgaccgccttgctcctgccgctggccttgctgctccacgccgccaggccggacatccagatgacacagactacatcctccctgtctgcctctctgggagacagagtcaccatcagttgcagggcaagtcaggacattagtaagtacctgaactggtatcagcagaaaccagatggaactgttaaactcctgatctaccatacatcaagattacactcaggagtcccatcaaggttcagtggcagtgggtctggaacagattattctctcaccattagcaacctggagcaagaagatattgccacttacttttgccaacagggtaatacgcttccgtacacgttcggaggggggaccaagctggagatcacactcgaggacctgaagaacgtgttcccacctgaggtggccgtgttcgagcctagcgaggccgagatcagccacacccagaaagccaccctcgtgtgcctggctaccggcttctaccccgaccatgtggaactgtcttggtgggtcaacggcaaagaggtgcacagcggcgtgtgtaccgacccccagccactgaaagaacagcccgccctgaacgacagccggtactgcctgagcagcagactgagagtgtccgccaccttctggcagaacccccggaaccacttcagatgccaggtgcagttctacggcctgagcgagaacgacgagtggacccaggacagagccaagcccgtgacccagatcgtgtctgccgaagcctggggcagagccgattgcggctttaccagcgagagctaccagcagggcgtgctgagcgccaccaacctgagcgtgatcggcttcagaatcctgctgctgaaagtggccggctttaacctgctgatgaccctgcggctgtggtccagcagggccaagcgatctggatctggagcaacaaacttctcactactcaaacaagcaggtgacgtggaggagaatcccgggcctactagtatggactggatttggcgcatccttttccttgtcggcgctgctaccggcgcgcattccttcgaagtgaaactgcaggagtcaggacctggcctggtggcgccctcacagagcctgtccgtcacatgcactgtctcaggggtctcattacccgactatggtgtaagctggattcgccagcctccacgaaagggtctggagtggctgggagtaatatggggtagtgaaaccacatactataattcagctctcaaatccagactgaccatcatcaaggacaactccaagagccaagttttcttaaaaatgaacagtctgcaaactgatgacacagccatttactactgtgccaaacattattactacggtggtagctatgctatggactactggggccaaggaacctcagtcaccgtctcctcaacgcgtatccagaaccctgatcctgccgtgtaccagctgcgggatagcaagagcagcgacaagagcgtgtgtctgttcaccgacttcgacagccagaccaacgtgtcccagagcaaggactccgacgtgtacatcaccgataagtgcgtgctggacatgcggagcatggacttcaagagcaactccgccgtggcctggtccaacaagtccgatttcgcctgcgccaacgccttcaacaacagcattatccccgaggacacattcttcccaagccccgagagcagctgcgacgtgaagctggtggaaaagagcttcgagacagacaccaacctgaacttccagatcctgtacgagatcctgctgggcaaggccaccctgtacgccgtgctggtgtctgccctggtgctgatggctatggtcaagcggaaggacagccggggatgaccagacatgataagatacattgatgagtttggacaaaccacaactagaatgcagtgaaaaaaatgctttatttgtgaaatttgtgatgctattgctttatttgtaaccattataagctgcaataaacaagttaacaacaacaattgcattcattttatgtttcaggttcagggggaggtgtgggaggttttttaaagcaagtaaaacctctacaaatgtggtatggaattaattctaaaatacagcatagcaaaactttaacctccaaatcaagcctctacttgaatccttttctgagggatgaataaggcataggcatcaggggctgttgccaatgtgcattagctgtttgcagcctcaccttctttcatggagtttaagatatagtgtattttcccaaggtttgaactagctcttcatttctttatgttttaaatgcactgacctcccacattccctttttagtaaaatattcagaaataatttaaatacatcattgcaatgaaaataaatgttttttattaggcagaatccagatgctcaaggcccttcataatatcccccagtttagtagttggacttagggaacaaaggaacctttaatagaaattggacagcaagaaagcgagcttctagcttatcctgtatatcacagacaaaactgtgctagacatgaggtctatggacttcaagagcaacagtgctgtggcctggagcaacaaatctgactttgcatgtgcaaacgccttcaacaacagcattattccagaagacaccttcttccccagcccaggtaagggcagctttggtgccttcgcaggctgtttccttgcttcaggaatggccaggttctgcccagagctctggtcaatgatgtctaaaactcctctgattggtggtctcggccttatccattgccaccaaaaccctctttttactaagaaacagtgagccttgttctggcagtccagagaatgacacgggaaaaaagcagatgaagagaaggtggcaggagagggcacgtggcccagcctcagtctctccaactgagttcctgcctgcctgcctttgctcagactgtttgccccttactgctcttctaggcctcattctaagccccttctccaagttgcctctccttatttctccctgtctgccaaaaaatctttcccagctcactaagtcagtctcacgcagtcactcattaacccaccaatcactgattgtgccggcacatgaatgcaccaggtgttgaagtggaggaattaaaaagtcagatgaggggtgtgcccagaggaagcaccattctagttgggggagcccatctgtcagctgggaaaagtccaaataacttcagattggaatgtgttttaactcagggttgagaaaacagccaccttcaggacaaaagtcagggaagggctctctgaagaaatgctacttgaagataccagccctaccaagggcagggagaggaccctatagaggcctgggaca

SEQ ID NO: 8398 - DNA, 4910 bp, synthetic construct
  source 1..4910: mol_type = other DNA
ggatccagctggatgtctgcattgccgaggccaccagggctggctcagcaactgtcggggaatcaccagggtctgagaaatcttgtgcgcatgtgaggggctgtgggagcagagaaccactgggtgggaaattctaatccccaccctgctggaaactctctgggtggccccaacatgctaatcctccggcaaacctctgtttcctcctcaaaaggcaggaggtcggaaagaataaacaatgagagtcacattaaaaacacaaaatcctacggaaatactgaagaatgagtctcagcactaaggaaaagcctccagcagctcctgctttctgagggtgaaggatagacgctgtggctctgcatgactcactagcactctatcacggccatattctggcagggtcagtggctccaactaacatttgtttggtactttacagtttattaaatagatgtttatatggagaagctctcatttctttctcagaagagcctggctaggaaggtggatgaggcaccatattcattttgcaggtgaaattcctgagatgtaaggagctgctgtgacttgctcaaggccttatatcgagtaaacggtagcgctggggcttagacgcaggtgttctgatttatagttcaaaacctctatcaatgagagagcaatctcctggtaatgtgatagatttcccaacttaatgccaacataccataaacctcccattctgctaatgcccagcctaagttggggagaccactccagattccaagatgtacagtttgctttgctgggcctttttcccatgcctgcctttactctgccagagttatattgctggggttttgaagaagatcctattaaataaaagaataagcagtattattaagtagccctgcatttcaggtttccttgagtggcaggccaggcctggccgtgaacgttcactgaaatcatggcctcttggccaagattgatagcttgtgcctgtccctgagtcccagtccatcacgagcagctggtttctaagatgctatttcccgtataaagcatgagaccgtgacttgccagccccacagagccccgcccttgtccatcactggcatctggactccagcctgggttggggcaaagagggaaatgagatcatgtcctaaccctgatcctcttgtcccacagatgtgaagcagaccctgaatttcgacctgctgaagctggctggcgacgtggaatccaacccaggccctatggccttaccagtgaccgccttgctcctgccgctggccttgctgctccacgccgccaggccggacatccagatgacacagactacatcctccctgtctgcctctctgggagacagagtcaccatcagttgcagggcaagtcaggacattagtaagtacctgaactggtatcagcagaaaccagatggaactgttaaactcctgatctaccatacatcaagattacactcaggagtcccatcaaggttcagtggcagtgggtctggaacagattattctctcaccattagcaacctggagcaagaagatattgccacttacttttgccaacagggtaatacgcttccgtacacgttcggaggggggaccaagctggagatcacactcgaggacctgaagaacgtgttcccacctgaggtggccgtgttcgagcctagcgaggccgagatcagccacacccagaaagccaccctcgtgtgcctggctaccggcttctaccccgaccatgtggaactgtcttggtgggtcaacggcaaagaggtgcacagcggcgtgtgtaccgacccccagccactgaaagaacagcccgccctgaacgacagccggtactgcctgagcagcagactgagagtgtccgccaccttctggcagaacccccggaaccacttcagatgccaggtgcagttctacggcctgagcgagaacgacgagtggacccaggacagagccaagcccgtgacccagatcgtgtctgccgaagcctggggcagagccgatgatgtgattaagatccactggcaggaaaagaagtccaacaccatcctgggcagccaggaaggcaacaccatgaagaccaacgacacctacatgaagttcagctggctgaccgtgcccgagaagtccctggacaaagaacacagatgcatcgtgcggcacgaaaacaacaagaacggcgtggaccaggaaatcatcttcccacccatcaagaccgatgtgattacaatggaccccaaggacaactgctccaaggacgccaacgataccctgctgctccagctgaccaacaccagcgcctactacatgtacttgttgctgctgctgaagtccgtggtgtacttcgccatcatcacatgctgcctgctgatggctatggtcaagcggaaggacagccggggaagggccaagcgatctggatctggagcaacaaacttctcactactcaaacaagcaggtgacgtggaggagaatcccgggcctactagtatggactggatttggcgcatccttttccttgtcggcgctgctaccggcgcgcattccttcgaagtgaaactgcaggagtcaggacctggcctggtggcgccctcacagagcctgtccgtcacatgcactgtctcaggggtctcattacccgactatggtgtaagctggattcgccagcctccacgaaagggtctggagtggctgggagtaatatggggtagtgaaaccacatactataattcagctctcaaatccagactgaccatcatcaaggacaactccaagagccaagttttcttaaaaatgaacagtctgcaaactgatgacacagccatttactactgtgccaaacattattactacggtggtagctatgctatggactactggggccaaggaacctcagtcaccgtctcctcaacgcgtatccagaaccctgatcctgccgtgtaccagctgcgggatagcaagagcagcgacaagagcgtgtgtctgttcaccgacttcgacagccagaccaacgtgtcccagagcaaggactccgacgtgtacatcaccgataagtgcgtgctggacatgcggagcatggacttcaagagcaactccgccgtggcctggtccaacaagtccgatttcgcctgcgccaacgccttcaacaacagcattatccccgaggacacattcttcccaagccccgagagcagcgactccaccgaccacgtgaagcccaaagagacagagaacaccaagcagcccagcaagagctgccacaagcccaaggccatcgtgcacaccgagaaagtgaacatgatgagcctgaccgtgctgggcctgcggatgctgttcgccaaaaccgtggccgtgaacttcctgctgaccgccaagctgttcttcctcctcaccgcctgaccagacatgataagatacattgatgagtttggacaaaccacaactagaatgcagtgaaaaaaatgctttatttgtgaaatttgtgatgctattgctttatttgtaaccattataagctgcaataaacaagttaacaacaacaattgcattcattttatgtttcaggttcagggggaggtgtgggaggttttttaaagcaagtaaaacctctacaaatgtggtatggaattaattctaaaatacagcatagcaaaactttaacctccaaatcaagcctctacttgaatccttttctgagggatgaataaggcataggcatcaggggctgttgccaatgtgcattagctgtttgcagcctcaccttctttcatggagtttaagatatagtgtattttcccaaggtttgaactagctcttcatttctttatgttttaaatgcactgacctcccacattccctttttagtaaaatattcagaaataatttaaatacatcattgcaatgaaaataaatgttttttattaggcagaatccagatgctcaaggcccttcataatatcccccagtttagtagttggacttagggaacaaaggaacctttaatagaaattggacagcaagaaagcgagcttctagcttatcctgtatatcacagacaaaactgtgctagacatgaggtctatggacttcaagagcaacagtgctgtggcctggagcaacaaatctgactttgcatgtgcaaacgccttcaacaacagcattattccagaagacaccttcttccccagcccaggtaagggcagctttggtgccttcgcaggctgtttccttgcttcaggaatggccaggttctgcccagagctctggtcaatgatgtctaaaactcctctgattggtggtctcggccttatccattgccaccaaaaccctctttttactaagaaacagtgagccttgttctggcagtccagagaatgacacgggaaaaaagcagatgaagagaaggtggcaggagagggcacgtggcccagcctcagtctctccaactgagttcctgcctgcctgcctttgctcagactgtttgccccttactgctcttctaggcctcattctaagccccttctccaagttgcctctccttatttctccctgtctgccaaaaaatctttcccagctcactaagtcagtctcacgcagtcactcattaacccaccaatcactgattgtgccggcacatgaatgcaccaggtgttgaagtggaggaattaaaaagtcagatgaggggtgtgcccagaggaagcaccattctagttgggggagcccatctgtcagctgggaaaagtccaaataacttcagattggaatgtgttttaactcagggttgagaaaacagccaccttcaggacaaaagtcagggaagggctctctgaagaaatgctacttgaagataccagccctaccaagggcagggagaggaccctatagaggcctgggaca

SEQ ID NO: 8399 - DNA, 6097 bp, synthetic construct
  source 1..6097: mol_type = other DNA
  misc_feature 4089: note = n is a, c, g, or t
ggatccagctggatgtctgcattgccgaggccaccagggctggctcagcaactgtcggggaatcaccagggtctgagaaatcttgtgcgcatgtgaggggctgtgggagcagagaaccactgggtgggaaattctaatccccaccctgctggaaactctctgggtggccccaacatgctaatcctccggcaaacctctgtttcctcctcaaaaggcaggaggtcggaaagaataaacaatgagagtcacattaaaaacacaaaatcctacggaaatactgaagaatgagtctcagcactaaggaaaagcctccagcagctcctgctttctgagggtgaaggatagacgctgtggctctgcatgactcactagcactctatcacggccatattctggcagggtcagtggctccaactaacatttgtttggtactttacagtttattaaatagatgtttatatggagaagctctcatttctttctcagaagagcctggctaggaaggtggatgaggcaccatattcattttgcaggtgaaattcctgagatgtaaggagctgctgtgacttgctcaaggccttatatcgagtaaacggtagcgctggggcttagacgcaggtgttctgatttatagttcaaaacctctatcaatgagagagcaatctcctggtaatgtgatagatttcccaacttaatgccaacataccataaacctcccattctgctaatgcccagcctaagttggggagaccactccagattccaagatgtacagtttgctttgctgggcctttttcccatgcctgcctttactctgccagagttatattgctggggttttgaagaagatcctattaaataaaagaataagcagtattattaagtagccctgcatttcaggtttccttgagtggcaggccaggcctggccgtgaacgttcactgaaatcatggcctcttggccaagattgatagcttgtgcctgtccctgagtcccagtccatcacgagcagctggtttctaagatgctatttcccgtataaagcatgagaccgtgacttgccagccccacagagccccgcccttgtccatcactggcatctggactccagcctgggttggggcaaagagggaaatgagatcatgtcctaaccctgatcctcttgtcccacagatgtgaagcagaccctgaatttcgacctgctgaagctggctggcgacgtggaatccaacccaggccctatggccttaccagtgaccgccttgctcctgccgctggccttgctgctccacgccgccaggccggacatccagatgacacagagccctagcagcctgtctgccagcgtgggagacagagtgaccatcacatgcaaggccagcgaccacatcaacaactggctggcctggtatcagcagaagcctggacaggcccctaagctgctgatctacggcgctaccacactggaaacaggcgtgcccagcagattttctggcagcggctctggcaccgactacaccctgacaatatccagcctccagcctgaggacttcgccacctactactgtcagcagagctggaacaccccttggacattcggccagggcaccaagctggaaatcaagagactcgaggacctgaagaacgtgttcccacctgaggtggccgtgttcgagcctagcgaggccgagatcagccacacccagaaagccaccctcgtgtgcctggctaccggcttctaccccgaccatgtggaactgtcttggtgggtcaacggcaaagaggtgcacagcggcgtgtctaccgacccccagccactgaaagaacagcccgccctgaacgacagccggtactgcctgagcagcagactgagagtgtccgccaccttctggcagaacccccggaaccacttcagatgccaggtgcagttctacggcctgagcgagaacgacgagtggacccaggacagagccaagcccgtgacccagatcgtgtctgccgaagcctggggcagagccgattgcgacgtgaagctggtggaaaagagcttcgagacagacaccaacctgaacttccagaacctgagcgtgatcggcttcagaatcctgctgctgaaagtggccggctttaacctgctgatgaccctgcggctgtggtccagcagggccaagcgatctggatctggagcaacaaacttctcactactcaaacaagcaggtgacgtggaggagaatcccgggcctactagtatggactggatttggcgcatccttttccttgtcggcgctgctaccggcgcgcattccttcgaacaagttcagcttcaacagcctggcgctgagctggtcaaacctggcgcttctgtgaagatgagctgcaaagccagcggctacgccttcagcagctactggatcaactggatgaagcagaaacccggccagggactcgaatggatcggccaaatctatcccggcgacggcgacaccaactacaacggcaagttcaagggcagagccacactgaccgccgatacctctagcagcacagcctacatgcagctgagcagcctgaccagcgaagatagcgccgtgtacttctgtgcccggtccatcacaacagtcgtgggctgcgctatggactattggggccagggaacaagcgtgaccgtgtctagtacgcgtatccagaaccctgatcctgccgtgtaccagctgcgggatagcaagagcagcgacaagagcgtgtgtctgttcaccgacttcgacagccagaccaacgtgtcccagagcaaggactccgacgtgtacatcaccgataagaccgtgctggacatgcggagcatggacttcaagagcaactccgccgtggcctggtccaacaagtccgatttcgcctgcgccaacgccttcaacaacagcattatccccgaggacacattcttcccaagccccgagagcagctgcggctttaccagcgagagctaccagcagggcgtgctgagcgccaccatcctgtacgagatcctgctgggcaaggccaccctgtacgccgtgctggtgtctgccctggtgctgatggctatggtcaagcggaaggacagccggggatgagatatccagaaccctgaccctgccgtgtaccagctgagagactctaaatccagtgacaagtctgtctgcctattcaccgattttgattctcaaacaaatgtgtcacaaagtaaggattctgatgtgtatatcacagacaaaactgtgctagacatgaggtctatggacttcaagagcaacagtgctgtggcctggagcaacaaatctgactttgcatgtgcaaacgccttcaacaacagcattattccagaagacaccttcttccccagcccaggtaagggcagctttggtgccttcgcaggctgtttccttgcttcaggaatggccaggttctgcccagagctctggtcaatgatgtctaaaactcctctgattggtggtctcggccttatccattgccaccaaaaccctctttttactaagaaacagtgagccttgttctggcagtccagagaatgacacgggaaaaaagcagatgaagagaaggtggcaggagagggcacgtggcccagcctcagtctctccaactgagttcctgcctgcctgcctttgctcagactgtttgccccttactgctcttctaggcctcattctaagccccttctccaagttgcctctccttatttctccctgtctgccaaaaaatctttcccagctcactaagtcagtctcacgcagtcactcattaacccaccaatcactgattgtgccggcacatgaatgcaccaggtgttgaagtggaggaattaaaaagtcagatgaggggtgtgcccagaggaagcaccattctagttgggggagcccatctgtcagctgggaaaagtccaaataacttcagattggaatgtgttttaactcagggttgagaaaacagccaccttcaggacaaaagtcagggaagggctctctgaagaaatgctacttgaagataccagccctaccaagggcagggagaggaccctatagaggcctgggacattttttttttttttttttttttgagatggagttttgctcttgttgcccaggctggagtgcaatggtgcatcttggctcactacaacctctgcctcccaggttcaagtgattctcctgcctcagcctcccaagtagctgggattacaggcacccaccaccatgcccggctaattttttgtatttttagtagagacagggtttcactatgttggccaggctggtctcgaactcctgacctcaggtgatccacccgcttcagcctcccaaagtgctgggattacaggcgtgagccaccacacccggcctgcttttcttaaagatcaatctgagtgctgtacggagagtgggttgtaagccaagagtagaagcagaaagggagcagttgcagcagagagatgatggaggcctgggcagggtggtggcagggaggtaaccaacaccattcaggtttcaaaggtagaaccatgcagggatgagaaagcaaagaggggatcaaggaaggcagctggattttggcctgagcagctgagtcaatgatagtgccgtttactaagaagaaaccaaggaaaaaatttggggtgcagggatcaaaactttttggaacatatgaaagtacgtgtttatactctttatggcccttgtcactatgtatgcctcgctgcctccattggactctagaatgaagccaggcaagagcagggtctatgtgtgatggcacatgtggccagggtcatgcaacatgtactttgtacaaacagtgtatattgagtaaatagaaatggtgtccaggagccgaggtatcggtcctgccagggccaggggctctccctagcaggtgctcatatgctgtaagttccctccagatctctccacaaggaggcatggaaaggctgtagttgttcacctgcccaagaactaggaggtctggggtgggagagtcagcctgctctggatgctgaaagaatgtctgtttttccttttagaaagttcctgtgatgtcaagctggtcgagaaaagctttgaaacaggtaagacaggggtctagcctgggtttgcacaggattgcggaagtgatgaacccgcaataaccctgcctggatgagggagtgggaagaaattagtagatgtgggaatgaatgatgaggaatggaaacagcggttcaagacctgcccagagctgggtggggtctctcctgaatccctctcaccgtctctgactttccgttctaagcactttgaggatgagtttctagcttcaatagaccaaggactctctcctaggcctctgtattcctttcaacagctccactgtcaagagagccagagagagcttctgggtggcccagctgtgaaatttctgagtcccttagggatagccctaaacgaaccagatcatcctgaggacagccaagaggttttgccttctttcaagacaagcaacagtactcacataggctgtgggcaatggtcctgtctctcaagaatcccctgccactcctcacacccaccctgggcccatattcatttccatttgagttgttcttattgagtcatccttcctgtggcagcggaactcactaaggggcccatctggacccgaggtattgtgaagataaattctgagcacctaccccatccccagaagggctcagaaataaaataagagccaagtctagtcggtgtttcctgtcttgaaacacaatactgttggccctggaagaatgcacagaatctgtttgtaaggggatatgcacagaagctgcaagggacaggaggtgcaggagctgcaggcctcccccacccagcctgctctgccttggggaaaaccgtgggtgtgtcctgcaggccatgcaggcctgggacatgcaagcccataaccgctgtggcctcttggttttacagatacgaacctaaactttcaaaacctgtcagtgattgggttccgaatcctcctcctgaaagtggccgggtttaatctgctcatgacgctgcggctgtggtccagctga

SEQ ID NO: 8400 - DNA, 6097 bp, synthetic construct
  misc_feature 4089: note = n is a, c, g, or t
  source 1..6097: mol_type = other DNA
ggatccagctggatgtctgcattgccgaggccaccagggctggctcagcaactgtcggggaatcaccagggtctgagaaatcttgtgcgcatgtgaggggctgtgggagcagagaaccactgggtgggaaattctaatccccaccctgctggaaactctctgggtggccccaacatgctaatcctccggcaaacctctgtttcctcctcaaaaggcaggaggtcggaaagaataaacaatgagagtcacattaaaaacacaaaatcctacggaaatactgaagaatgagtctcagcactaaggaaaagcctccagcagctcctgctttctgagggtgaaggatagacgctgtggctctgcatgactcactagcactctatcacggccatattctggcagggtcagtggctccaactaacatttgtttggtactttacagtttattaaatagatgtttatatggagaagctctcatttctttctcagaagagcctggctaggaaggtggatgaggcaccatattcattttgcaggtgaaattcctgagatgtaaggagctgctgtgacttgctcaaggccttatatcgagtaaacggtagcgctggggcttagacgcaggtgttctgatttatagttcaaaacctctatcaatgagagagcaatctcctggtaatgtgatagatttcccaacttaatgccaacataccataaacctcccattctgctaatgcccagcctaagttggggagaccactccagattccaagatgtacagtttgctttgctgggcctttttcccatgcctgcctttactctgccagagttatattgctggggttttgaagaagatcctattaaataaaagaataagcagtattattaagtagccctgcatttcaggtttccttgagtggcaggccaggcctggccgtgaacgttcactgaaatcatggcctcttggccaagattgatagcttgtgcctgtccctgagtcccagtccatcacgagcagctggtttctaagatgctatttcccgtataaagcatgagaccgtgacttgccagccccacagagccccgcccttgtccatcactggcatctggactccagcctgggttggggcaaagagggaaatgagatcatgtcctaaccctgatcctcttgtcccacagatgtgaagcagaccctgaatttcgacctgctgaagctggctggcgacgtggaatccaacccaggccctatggccttaccagtgaccgccttgctcctgccgctggccttgctgctccacgccgccaggccggacatccagatgacacagagccctagcagcctgtctgccagcgtgggagacagagtgaccatcacatgcaaggccagcgaccacatcaacaactggctggcctggtatcagcagaagcctggacaggcccctaagctgctgatctacggcgctaccacactggaaacaggcgtgcccagcagattttctggcagcggctctggcaccgactacaccctgacaatatccagcctccagcctgaggacttcgccacctactactgtcagcagagctggaacaccccttggacattcggccagggcaccaagctggaaatcaagagactcgaggacctgaagaacgtgttcccacctgaggtggccgtgttcgagcctagcgaggccgagatcagccacacccagaaagccaccctcgtgtgcctggctaccggcttctaccccgaccatgtggaactgtcttggtgggtcaacggcaaagaggtgcacagcggcgtgtctaccgacccccagccactgaaagaacagcccgccctgaacgacagccggtactgcctgagcagcagactgagagtgtccgccaccttctggcagaacccccggaaccacttcagatgccaggtgcagttctacggcctgagcgagaacgacgagtggacccaggacagagccaagcccgtgacccagatcgtgtctgccgaagcctggggcagagccgattgcggctttaccagcgagagctaccagcagggcgtgctgagcgccaccaacctgagcgtgatcggcttcagaatcctgctgctgaaagtggccggctttaacctgctgatgaccctgcggctgtggtccagcagggccaagcgatctggatctggagcaacaaacttctcactactcaaacaagcaggtgacgtggaggagaatcccgggcctactagtatggactggatttggcgcatccttttccttgtcggcgctgctaccggcgcgcattccttcgaacaagttcagcttcaacagcctggcgctgagctggtcaaacctggcgcttctgtgaagatgagctgcaaagccagcggctacgccttcagcagctactggatcaactggatgaagcagaaacccggccagggactcgaatggatcggccaaatctatcccggcgacggcgacaccaactacaacggcaagttcaagggcagagccacactgaccgccgatacctctagcagcacagcctacatgcagctgagcagcctgaccagcgaagatagcgccgtgtacttctgtgcccggtccatcacaacagtcgtgggctgcgctatggactattggggccagggaacaagcgtgaccgtgtctagtacgcgtatccagaaccctgatcctgccgtgtaccagctgcgggatagcaagagcagcgacaagagcgtgtgtctgttcaccgacttcgacagccagaccaacgtgtcccagagcaaggactccgacgtgtacatcaccgataagaccgtgctggacatgcggagcatggacttcaagagcaactccgccgtggcctggtccaacaagtccgatttcgcctgcgccaacgccttcaacaacagcattatccccgaggacacattcttcccaagccccgagagcagctgcgacgtgaagctggtggaaaagagcttcgagacagacaccaacctgaacttccagatcctgtacgagatcctgctgggcaaggccaccctgtacgccgtgctggtgtctgccctggtgctgatggctatggtcaagcggaaggacagccggggatgagatatccagaaccctgaccctgccgtgtaccagctgagagactctaaatccagtgacaagtctgtctgcctattcaccgattttgattctcaaacaaatgtgtcacaaagtaaggattctgatgtgtatatcacagacaaaactgtgctagacatgaggtctatggacttcaagagcaacagtgctgtggcctggagcaacaaatctgactttgcatgtgcaaacgccttcaacaacagcattattccagaagacaccttcttccccagcccaggtaagggcagctttggtgccttcgcaggctgtttccttgcttcaggaatggccaggttctgcccagagctctggtcaatgatgtctaaaactcctctgattggtggtctcggccttatccattgccaccaaaaccctctttttactaagaaacagtgagccttgttctggcagtccagagaatgacacgggaaaaaagcagatgaagagaaggtggcaggagagggcacgtggcccagcctcagtctctccaactgagttcctgcctgcctgcctttgctcagactgtttgccccttactgctcttctaggcctcattctaagccccttctccaagttgcctctccttatttctccctgtctgccaaaaaatctttcccagctcactaagtcagtctcacgcagtcactcattaacccaccaatcactgattgtgccggcacatgaatgcaccaggtgttgaagtggaggaattaaaaagtcagatgaggggtgtgcccagaggaagcaccattctagttgggggagcccatctgtcagctgggaaaagtccaaataacttcagattggaatgtgttttaactcagggttgagaaaacagccaccttcaggacaaaagtcagggaagggctctctgaagaaatgctacttgaagataccagccctaccaagggcagggagaggaccctatagaggcctgggacattttttttttttttttttttttgagatggagttttgctcttgttgcccaggctggagtgcaatggtgcatcttggctcactacaacctctgcctcccaggttcaagtgattctcctgcctcagcctcccaagtagctgggattacaggcacccaccaccatgcccggctaattttttgtatttttagtagagacagggtttcactatgttggccaggctggtctcgaactcctgacctcaggtgatccacccgcttcagcctcccaaagtgctgggattacaggcgtgagccaccacacccggcctgcttttcttaaagatcaatctgagtgctgtacggagagtgggttgtaagccaagagtagaagcagaaagggagcagttgcagcagagagatgatggaggcctgggcagggtggtggcagggaggtaaccaacaccattcaggtttcaaaggtagaaccatgcagggatgagaaagcaaagaggggatcaaggaaggcagctggattttggcctgagcagctgagtcaatgatagtgccgtttactaagaagaaaccaaggaaaaaatttggggtgcagggatcaaaactttttggaacatatgaaagtacgtgtttatactctttatggcccttgtcactatgtatgcctcgctgcctccattggactctagaatgaagccaggcaagagcagggtctatgtgtgatggcacatgtggccagggtcatgcaacatgtactttgtacaaacagtgtatattgagtaaatagaaatggtgtccaggagccgaggtatcggtcctgccagggccaggggctctccctagcaggtgctcatatgctgtaagttccctccagatctctccacaaggaggcatggaaaggctgtagttgttcacctgcccaagaactaggaggtctggggtgggagagtcagcctgctctggatgctgaaagaatgtctgtttttccttttagaaagttcctgtgatgtcaagctggtcgagaaaagctttgaaacaggtaagacaggggtctagcctgggtttgcacaggattgcggaagtgatgaacccgcaataaccctgcctggatgagggagtgggaagaaattagtagatgtgggaatgaatgatgaggaatggaaacagcggttcaagacctgcccagagctgggtggggtctctcctgaatccctctcaccgtctctgactttccgttctaagcactttgaggatgagtttctagcttcaatagaccaaggactctctcctaggcctctgtattcctttcaacagctccactgtcaagagagccagagagagcttctgggtggcccagctgtgaaatttctgagtcccttagggatagccctaaacgaaccagatcatcctgaggacagccaagaggttttgccttctttcaagacaagcaacagtactcacataggctgtgggcaatggtcctgtctctcaagaatcccctgccactcctcacacccaccctgggcccatattcatttccatttgagttgttcttattgagtcatccttcctgtggcagcggaactcactaaggggcccatctggacccgaggtattgtgaagataaattctgagcacctaccccatccccagaagggctcagaaataaaataagagccaagtctagtcggtgtttcctgtcttgaaacacaatactgttggccctggaagaatgcacagaatctgtttgtaaggggatatgcacagaagctgcaagggacaggaggtgcaggagctgcaggcctcccccacccagcctgctctgccttggggaaaaccgtgggtgtgtcctgcaggccatgcaggcctgggacatgcaagcccataaccgctgtggcctcttggttttacagatacgaacctaaactttcaaaacctgtcagtgattgggttccgaatcctcctcctgaaagtggccgggtttaatctgctcatgacgctgcggctgtggtccagctga

SEQ ID NO: 8401 - DNA, 6409 bp, synthetic construct
  misc_feature 4401: note = n is a, c, g, or t
  source 1..6409: mol_type = other DNA
ggatccagctggatgtctgcattgccgaggccaccagggctggctcagcaactgtcggggaatcaccagggtctgagaaatcttgtgcgcatgtgaggggctgtgggagcagagaaccactgggtgggaaattctaatccccaccctgctggaaactctctgggtggccccaacatgctaatcctccggcaaacctctgtttcctcctcaaaaggcaggaggtcggaaagaataaacaatgagagtcacattaaaaacacaaaatcctacggaaatactgaagaatgagtctcagcactaaggaaaagcctccagcagctcctgctttctgagggtgaaggatagacgctgtggctctgcatgactcactagcactctatcacggccatattctggcagggtcagtggctccaactaacatttgtttggtactttacagtttattaaatagatgtttatatggagaagctctcatttctttctcagaagagcctggctaggaaggtggatgaggcaccatattcattttgcaggtgaaattcctgagatgtaaggagctgctgtgacttgctcaaggccttatatcgagtaaacggtagcgctggggcttagacgcaggtgttctgatttatagttcaaaacctctatcaatgagagagcaatctcctggtaatgtgatagatttcccaacttaatgccaacataccataaacctcccattctgctaatgcccagcctaagttggggagaccactccagattccaagatgtacagtttgctttgctgggcctttttcccatgcctgcctttactctgccagagttatattgctggggttttgaagaagatcctattaaataaaagaataagcagtattattaagtagccctgcatttcaggtttccttgagtggcaggccaggcctggccgtgaacgttcactgaaatcatggcctcttggccaagattgatagcttgtgcctgtccctgagtcccagtccatcacgagcagctggtttctaagatgctatttcccgtataaagcatgagaccgtgacttgccagccccacagagccccgcccttgtccatcactggcatctggactccagcctgggttggggcaaagagggaaatgagatcatgtcctaaccctgatcctcttgtcccacagatgtgaagcagaccctgaatttcgacctgctgaagctggctggcgacgtggaatccaacccaggccctatggccttaccagtgaccgccttgctcctgccgctggccttgctgctccacgccgccaggccggacatccagatgacacagagccctagcagcctgtctgccagcgtgggagacagagtgaccatcacatgcaaggccagcgaccacatcaacaactggctggcctggtatcagcagaagcctggacaggcccctaagctgctgatctacggcgctaccacactggaaacaggcgtgcccagcagattttctggcagcggctctggcaccgactacaccctgacaatatccagcctccagcctgaggacttcgccacctactactgtcagcagagctggaacaccccttggacattcggccagggcaccaagctggaaatcaagagactcgaggacctgaagaacgtgttcccacctgaggtggccgtgttcgagcctagcgaggccgagatcagccacacccagaaagccaccctcgtgtgcctggctaccggcttctaccccgaccatgtggaactgtcttggtgggtcaacggcaaagaggtgcacagcggcgtgtctaccgacccccagccactgaaagaacagcccgccctgaacgacagccggtactgcctgagcagcagactgagagtgtccgccaccttctggcagaacccccggaaccacttcagatgccaggtgcagttctacggcctgagcgagaacgacgagtggacccaggacagagccaagcccgtgacccagatcgtgtctgccgaagcctggggcagagccgatgatgtgattaagatccactggcaggaaaagaagtccaacaccatcctgggcagccaggaaggcaacaccatgaagaccaacgacacctacatgaagttcagctggctgaccgtgcccgagaagtccctggacaaagaacacagatgcatcgtgcggcacgaaaacaacaagaacggcgtggaccaggaaatcatcttcccacccatcaagaccgatgtgattacaatggaccccaaggacaactgctccaaggacgccaacgataccctgctgctccagctgaccaacaccagcgcctactacatgtacttgttgctgctgctgaagtccgtggtgtacttcgccatcatcacatgctgcctgctgatggctatggtcaagcggaaggacagccggggaagggccaagcgatctggatctggagcaacaaacttctcactactcaaacaagcaggtgacgtggaggagaatcccgggcctactagtatggactggatttggcgcatccttttccttgtcggcgctgctaccggcgcgcattccttcgaacaagttcagcttcaacagcctggcgctgagctggtcaaacctggcgcttctgtgaagatgagctgcaaagccagcggctacgccttcagcagctactggatcaactggatgaagcagaaacccggccagggactcgaatggatcggccaaatctatcccggcgacggcgacaccaactacaacggcaagttcaagggcagagccacactgaccgccgatacctctagcagcacagcctacatgcagctgagcagcctgaccagcgaagatagcgccgtgtacttctgtgcccggtccatcacaacagtcgtgggctgcgctatggactattggggccagggaacaagcgtgaccgtgtctagtacgcgtatccagaaccctgatcctgccgtgtaccagctgcgggatagcaagagcagcgacaagagcgtgtgtctgttcaccgacttcgacagccagaccaacgtgtcccagagcaaggactccgacgtgtacatcaccgataagaccgtgctggacatgcggagcatggacttcaagagcaactccgccgtggcctggtccaacaagtccgatttcgcctgcgccaacgccttcaacaacagcattatccccgaggacacattcttcccaagccccgagagcagcgactccaccgaccacgtgaagcccaaagagacagagaacaccaagcagcccagcaagagctgccacaagcccaaggccatcgtgcacaccgagaaagtgaacatgatgagcctgaccgtgctgggcctgcggatgctgttcgccaaaaccgtggccgtgaacttcctgctgaccgccaagctgttcttcctcctcaccgcctgagatatccagaaccctgaccctgccgtgtaccagctgagagactctaaatccagtgacaagtctgtctgcctattcaccgattttgattctcaaacaaatgtgtcacaaagtaaggattctgatgtgtatatcacagacaaaactgtgctagacatgaggtctatggacttcaagagcaacagtgctgtggcctggagcaacaaatctgactttgcatgtgcaaacgccttcaacaacagcattattccagaagacaccttcttccccagcccaggtaagggcagctttggtgccttcgcaggctgtttccttgcttcaggaatggccaggttctgcccagagctctggtcaatgatgtctaaaactcctctgattggtggtctcggccttatccattgccaccaaaaccctctttttactaagaaacagtgagccttgttctggcagtccagagaatgacacgggaaaaaagcagatgaagagaaggtggcaggagagggcacgtggcccagcctcagtctctccaactgagttcctgcctgcctgcctttgctcagactgtttgccccttactgctcttctaggcctcattctaagccccttctccaagttgcctctccttatttctccctgtctgccaaaaaatctttcccagctcactaagtcagtctcacgcagtcactcattaacccaccaatcactgattgtgccggcacatgaatgcaccaggtgttgaagtggaggaattaaaaagtcagatgaggggtgtgcccagaggaagcaccattctagttgggggagcccatctgtcagctgggaaaagtccaaataacttcagattggaatgtgttttaactcagggttgagaaaacagccaccttcaggacaaaagtcagggaagggctctctgaagaaatgctacttgaagataccagccctaccaagggcagggagaggaccctatagaggcctgggacattttttttttttttttttttttgagatggagttttgctcttgttgcccaggctggagtgcaatggtgcatcttggctcactacaacctctgcctcccaggttcaagtgattctcctgcctcagcctcccaagtagctgggattacaggcacccaccaccatgcccggctaattttttgtatttttagtagagacagggtttcactatgttggccaggctggtctcgaactcctgacctcaggtgatccacccgcttcagcctcccaaagtgctgggattacaggcgtgagccaccacacccggcctgcttttcttaaagatcaatctgagtgctgtacggagagtgggttgtaagccaagagtagaagcagaaagggagcagttgcagcagagagatgatggaggcctgggcagggtggtggcagggaggtaaccaacaccattcaggtttcaaaggtagaaccatgcagggatgagaaagcaaagaggggatcaaggaaggcagctggattttggcctgagcagctgagtcaatgatagtgccgtttactaagaagaaaccaaggaaaaaatttggggtgcagggatcaaaactttttggaacatatgaaagtacgtgtttatactctttatggcccttgtcactatgtatgcctcgctgcctccattggactctagaatgaagccaggcaagagcagggtctatgtgtgatggcacatgtggccagggtcatgcaacatgtactttgtacaaacagtgtatattgagtaaatagaaatggtgtccaggagccgaggtatcggtcctgccagggccaggggctctccctagcaggtgctcatatgctgtaagttccctccagatctctccacaaggaggcatggaaaggctgtagttgttcacctgcccaagaactaggaggtctggggtgggagagtcagcctgctctggatgctgaaagaatgtctgtttttccttttagaaagttcctgtgatgtcaagctggtcgagaaaagctttgaaacaggtaagacaggggtctagcctgggtttgcacaggattgcggaagtgatgaacccgcaataaccctgcctggatgagggagtgggaagaaattagtagatgtgggaatgaatgatgaggaatggaaacagcggttcaagacctgcccagagctgggtggggtctctcctgaatccctctcaccgtctctgactttccgttctaagcactttgaggatgagtttctagcttcaatagaccaaggactctctcctaggcctctgtattcctttcaacagctccactgtcaagagagccagagagagcttctgggtggcccagctgtgaaatttctgagtcccttagggatagccctaaacgaaccagatcatcctgaggacagccaagaggttttgccttctttcaagacaagcaacagtactcacataggctgtgggcaatggtcctgtctctcaagaatcccctgccactcctcacacccaccctgggcccatattcatttccatttgagttgttcttattgagtcatccttcctgtggcagcggaactcactaaggggcccatctggacccgaggtattgtgaagataaattctgagcacctaccccatccccagaagggctcagaaataaaataagagccaagtctagtcggtgtttcctgtcttgaaacacaatactgttggccctggaagaatgcacagaatctgtttgtaaggggatatgcacagaagctgcaagggacaggaggtgcaggagctgcaggcctcccccacccagcctgctctgccttggggaaaaccgtgggtgtgtcctgcaggccatgcaggcctgggacatgcaagcccataaccgctgtggcctcttggttttacagatacgaacctaaactttcaaaacctgtcagtgattgggttccgaatcctcctcctgaaagtggccgggtttaatctgctcatgacgctgcggctgtggtccagctga

SEQ ID NO: 8402 - DNA, 6403 bp, synthetic construct
  source 1..6403: mol_type = other DNA
  misc_feature 4395: note = n is a, c, g, or t
ggatccagctggatgtctgcattgccgaggccaccagggctggctcagcaactgtcggggaatcaccagggtctgagaaatcttgtgcgcatgtgaggggctgtgggagcagagaaccactgggtgggaaattctaatccccaccctgctggaaactctctgggtggccccaacatgctaatcctccggcaaacctctgtttcctcctcaaaaggcaggaggtcggaaagaataaacaatgagagtcacattaaaaacacaaaatcctacggaaatactgaagaatgagtctcagcactaaggaaaagcctccagcagctcctgctttctgagggtgaaggatagacgctgtggctctgcatgactcactagcactctatcacggccatattctggcagggtcagtggctccaactaacatttgtttggtactttacagtttattaaatagatgtttatatggagaagctctcatttctttctcagaagagcctggctaggaaggtggatgaggcaccatattcattttgcaggtgaaattcctgagatgtaaggagctgctgtgacttgctcaaggccttatatcgagtaaacggtagcgctggggcttagacgcaggtgttctgatttatagttcaaaacctctatcaatgagagagcaatctcctggtaatgtgatagatttcccaacttaatgccaacataccataaacctcccattctgctaatgcccagcctaagttggggagaccactccagattccaagatgtacagtttgctttgctgggcctttttcccatgcctgcctttactctgccagagttatattgctggggttttgaagaagatcctattaaataaaagaataagcagtattattaagtagccctgcatttcaggtttccttgagtggcaggccaggcctggccgtgaacgttcactgaaatcatggcctcttggccaagattgatagcttgtgcctgtccctgagtcccagtccatcacgagcagctggtttctaagatgctatttcccgtataaagcatgagaccgtgacttgccagccccacagagccccgcccttgtccatcactggcatctggactccagcctgggttggggcaaagagggaaatgagatcatgtcctaaccctgatcctcttgtcccacagatgtgaagcagaccctgaatttcgacctgctgaagctggctggcgacgtggaatccaacccaggccctatggccttaccagtgaccgccttgctcctgccgctggccttgctgctccacgccgccaggccggacatccagatgacacagagccctagcagcctgtctgccagcgtgggagacagagtgaccatcacatgcaaggccagcgaccacatcaacaactggctggcctggtatcagcagaagcctggacaggcccctaagctgctgatctacggcgctaccacactggaaacaggcgtgcccagcagattttctggcagcggctctggcaccgactacaccctgacaatatccagcctccagcctgaggacttcgccacctactactgtcagcagagctggaacaccccttggacattcggccagggcaccaagctggaaatcaagagactcgaggacctgaagaacgtgttcccacctgaggtggccgtgttcgagcctagcgaggccgagatcagccacacccagaaagccaccctcgtgtgcctggctaccggcttctaccccgaccatgtggaactgtcttggtgggtcaacggcaaagaggtgcacagcggcgtgtctaccgacccccagccactgaaagaacagcccgccctgaacgacagccggtactgcctgagcagcagactgagagtgtccgccaccttctggcagaacccccggaaccacttcagatgccaggtgcagttctacggcctgagcgagaacgacgagtggacccaggacagagccaagcccgtgacccagatcgtgtctgccgaagcctggggcagagccgatgatgtgattaagatccactggcaggaaaagaagtccaacaccatcctgggcagccaggaaggcaacaccatgaagaccaacgacacctacatgaagttcagctggctgaccgtgcccgagaagtccctggacaaagaacacagatgcatcgtgcggcacgaaaacaacaagaacggcgtggaccaggaaatcatcttcccacccatcaagaccgatgtgattacaatggaccccaaggacaactgctccaaggacgccaacgataccctgctgctccagctgaccaacaccagcgcctactacatgtacttgttgctgctgctgaagtccgtggtgtacttcgccatcatcacatgctgcctgctgcggagaaccgccttctgctgcaacggcgagaagtctagggccaagcgatctggatctggagcaacaaacttctcactactcaaacaagcaggtgacgtggaggagaatcccgggcctactagtatggactggatttggcgcatccttttccttgtcggcgctgctaccggcgcgcattccttcgaacaagttcagcttcaacagcctggcgctgagctggtcaaacctggcgcttctgtgaagatgagctgcaaagccagcggctacgccttcagcagctactggatcaactggatgaagcagaaacccggccagggactcgaatggatcggccaaatctatcccggcgacggcgacaccaactacaacggcaagttcaagggcagagccacactgaccgccgatacctctagcagcacagcctacatgcagctgagcagcctgaccagcgaagatagcgccgtgtacttctgtgcccggtccatcacaacagtcgtgggctgcgctatggactattggggccagggaacaagcgtgaccgtgtctagtacgcgtatccagaaccctgatcctgccgtgtaccagctgcgggatagcaagagcagcgacaagagcgtgtgtctgttcaccgacttcgacagccagaccaacgtgtcccagagcaaggactccgacgtgtacatcaccgataagaccgtgctggacatgcggagcatggacttcaagagcaactccgccgtggcctggtccaacaagtccgatttcgcctgcgccaacgccttcaacaacagcattatccccgaggacacattcttcccaagccccgagagcagcgactccaccgaccacgtgaagcccaaagagacagagaacaccaagcagcccagcaagagctgccacaagcccaaggccatcgtgcacaccgagaaagtgaacatgatgagcctgaccgtgctgggcctgcggatgctgttcgccaaaaccgtggccgtgaacttcctgctgaccgccaagctgttcttcctctgagatatccagaaccctgaccctgccgtgtaccagctgagagactctaaatccagtgacaagtctgtctgcctattcaccgattttgattctcaaacaaatgtgtcacaaagtaaggattctgatgtgtatatcacagacaaaactgtgctagacatgaggtctatggacttcaagagcaacagtgctgtggcctggagcaacaaatctgactttgcatgtgcaaacgccttcaacaacagcattattccagaagacaccttcttccccagcccaggtaagggcagctttggtgccttcgcaggctgtttccttgcttcaggaatggccaggttctgcccagagctctggtcaatgatgtctaaaactcctctgattggtggtctcggccttatccattgccaccaaaaccctctttttactaagaaacagtgagccttgttctggcagtccagagaatgacacgggaaaaaagcagatgaagagaaggtggcaggagagggcacgtggcccagcctcagtctctccaactgagttcctgcctgcctgcctttgctcagactgtttgccccttactgctcttctaggcctcattctaagccccttctccaagttgcctctccttatttctccctgtctgccaaaaaatctttcccagctcactaagtcagtctcacgcagtcactcattaacccaccaatcactgattgtgccggcacatgaatgcaccaggtgttgaagtggaggaattaaaaagtcagatgaggggtgtgcccagaggaagcaccattctagttgggggagcccatctgtcagctgggaaaagtccaaataacttcagattggaatgtgttttaactcagggttgagaaaacagccaccttcaggacaaaagtcagggaagggctctctgaagaaatgctacttgaagataccagccctaccaagggcagggagaggaccctatagaggcctgggacattttttttttttttttttttttgagatggagttttgctcttgttgcccaggctggagtgcaatggtgcatcttggctcactacaacctctgcctcccaggttcaagtgattctcctgcctcagcctcccaagtagctgggattacaggcacccaccaccatgcccggctaattttttgtatttttagtagagacagggtttcactatgttggccaggctggtctcgaactcctgacctcaggtgatccacccgcttcagcctcccaaagtgctgggattacaggcgtgagccaccacacccggcctgcttttcttaaagatcaatctgagtgctgtacggagagtgggttgtaagccaagagtagaagcagaaagggagcagttgcagcagagagatgatggaggcctgggcagggtggtggcagggaggtaaccaacaccattcaggtttcaaaggtagaaccatgcagggatgagaaagcaaagaggggatcaaggaaggcagctggattttggcctgagcagctgagtcaatgatagtgccgtttactaagaagaaaccaaggaaaaaatttggggtgcagggatcaaaactttttggaacatatgaaagtacgtgtttatactctttatggcccttgtcactatgtatgcctcgctgcctccattggactctagaatgaagccaggcaagagcagggtctatgtgtgatggcacatgtggccagggtcatgcaacatgtactttgtacaaacagtgtatattgagtaaatagaaatggtgtccaggagccgaggtatcggtcctgccagggccaggggctctccctagcaggtgctcatatgctgtaagttccctccagatctctccacaaggaggcatggaaaggctgtagttgttcacctgcccaagaactaggaggtctggggtgggagagtcagcctgctctggatgctgaaagaatgtctgtttttccttttagaaagttcctgtgatgtcaagctggtcgagaaaagctttgaaacaggtaagacaggggtctagcctgggtttgcacaggattgcggaagtgatgaacccgcaataaccctgcctggatgagggagtgggaagaaattagtagatgtgggaatgaatgatgaggaatggaaacagcggttcaagacctgcccagagctgggtggggtctctcctgaatccctctcaccgtctctgactttccgttctaagcactttgaggatgagtttctagcttcaatagaccaaggactctctcctaggcctctgtattcctttcaacagctccactgtcaagagagccagagagagcttctgggtggcccagctgtgaaatttctgagtcccttagggatagccctaaacgaaccagatcatcctgaggacagccaagaggttttgccttctttcaagacaagcaacagtactcacataggctgtgggcaatggtcctgtctctcaagaatcccctgccactcctcacacccaccctgggcccatattcatttccatttgagttgttcttattgagtcatccttcctgtggcagcggaactcactaaggggcccatctggacccgaggtattgtgaagataaattctgagcacctaccccatccccagaagggctcagaaataaaataagagccaagtctagtcggtgtttcctgtcttgaaacacaatactgttggccctggaagaatgcacagaatctgtttgtaaggggatatgcacagaagctgcaagggacaggaggtgcaggagctgcaggcctcccccacccagcctgctctgccttggggaaaaccgtgggtgtgtcctgcaggccatgcaggcctgggacatgcaagcccataaccgctgtggcctcttggttttacagatacgaacctaaactttcaaaacctgtcagtgattgggttccgaatcctcctcctgaaagtggccgggtttaatctgctcatgacgctgcggctgtggtccagctga

SEQ ID NO: 8403 - DNA, 4636 bp, synthetic construct
  source 1..4636: mol_type = other DNA
ggatccagctggatgtctgcattgccgaggccaccagggctggctcagcaactgtcggggaatcaccagggtctgagaaatcttgtgcgcatgtgaggggctgtgggagcagagaaccactgggtgggaaattctaatccccaccctgctggaaactctctgggtggccccaacatgctaatcctccggcaaacctctgtttcctcctcaaaaggcaggaggtcggaaagaataaacaatgagagtcacattaaaaacacaaaatcctacggaaatactgaagaatgagtctcagcactaaggaaaagcctccagcagctcctgctttctgagggtgaaggatagacgctgtggctctgcatgactcactagcactctatcacggccatattctggcagggtcagtggctccaactaacatttgtttggtactttacagtttattaaatagatgtttatatggagaagctctcatttctttctcagaagagcctggctaggaaggtggatgaggcaccatattcattttgcaggtgaaattcctgagatgtaaggagctgctgtgacttgctcaaggccttatatcgagtaaacggtagcgctggggcttagacgcaggtgttctgatttatagttcaaaacctctatcaatgagagagcaatctcctggtaatgtgatagatttcccaacttaatgccaacataccataaacctcccattctgctaatgcccagcctaagttggggagaccactccagattccaagatgtacagtttgctttgctgggcctttttcccatgcctgcctttactctgccagagttatattgctggggttttgaagaagatcctattaaataaaagaataagcagtattattaagtagccctgcatttcaggtttccttgagtggcaggccaggcctggccgtgaacgttcactgaaatcatggcctcttggccaagattgatagcttgtgcctgtccctgagtcccagtccatcacgagcagctggtttctaagatgctatttcccgtataaagcatgagaccgtgacttgccagccccacagagccccgcccttgtccatcactggcatctggactccagcctgggttggggcaaagagggaaatgagatcatgtcctaaccctgatcctcttgtcccacagatgtgaagcagaccctgaatttcgacctgctgaagctggctggcgacgtggaatccaacccaggccctatggccttaccagtgaccgccttgctcctgccgctggccttgctgctccacgccgccaggccgctcgaggaggacctgaagaacgtgttcccacctgaggtggccgtgttcgagcctagcgaggccgagatcagccacacccagaaagccaccctcgtgtgcctggctaccggcttctaccccgaccatgtggaactgtcttggtgggtcaacggcaaagaggtgcacagcggcgtgtgtaccgacccccagccactgaaagaacagcccgccctgaacgacagccggtactgcctgagcagcagactgagagtgtccgccaccttctggcagaacccccggaaccacttcagatgccaggtgcagttctacggcctgagcgagaacgacgagtggacccaggacagagccaagcccgtgacccagatcgtgtctgccgaagcctggggcagagccgattgcgacgtgaagctggtggaaaagagcttcgagacagacaccaacctgaacttccagaacctgagcgtgatcggcttcagaatcctgctgctgaaagtggccggctttaacctgctgatgaccctgcggctgtggtccagcagggccaagcgatctggatctggagcaacaaacttctcactactcaaacaagcaggtgacgtggaggagaatcccgggcctactagcatggccttaccagtgaccgccttgctcctgccgctggccttgctgctccacgccgccaggccggacatccagatgacacagagccctagcagcctgtctgccagcgtgggagacagagtgaccatcacatgcaaggccagcgaccacatcaacaactggctggcctggtatcagcagaagcctggacaggcccctaagctgctgatctacggcgctaccacactggaaacaggcgtgcccagcagattttctggcagcggctctggcaccgactacaccctgacaatatccagcctccagcctgaggacttcgccacctactactgtcagcagagctggaacaccccttggacattcggccagggcaccaagctggaaatcaagagaggcggaggcggaagtggaggcggaggatctggcggcggaggctctcaagttcagcttcaacagcctggcgctgagctggtcaaacctggcgcttctgtgaagatgagctgcaaagccagcggctacgccttcagcagctactggatcaactggatgaagcagaaacccggccagggactcgaatggatcggccaaatctatcccggcgacggcgacaccaactacaacggcaagttcaagggcagagccacactgaccgccgatacctctagcagcacagcctacatgcagctgagcagcctgaccagcgaagatagcgccgtgtacttctgtgcccggtccatcacaacagtcgtgggctgcgctatggactattggggccagggaacaagcgtgaccgtgtctagtacgcgtatccagaaccctgatcctgccgtgtaccagctgcgggatagcaagagcagcgacaagagcgtgtgtctgttcaccgacttcgacagccagaccaacgtgtcccagagcaaggactccgacgtgtacatcaccgataagtgcgtgctggacatcaacaagtccgattgcggagcatggacttcaagagcaactccgccgtggcctggtccaacaagtccgatttcgcctgcgccaacgccttcaacaacagcattatccccgaggacacattcttcccaagccccgagagcagctgcggctttaccagcgagagctaccagcagaacctgagcgtgatcggcttcagaatcctgctgctgaaagtggccggctttaacctgctgatgaccctgcggctgtggtccagctgaccagacatgataagatacattgatgagtttggacaaaccacaactagaatgcagtgaaaaaaatgctttatttgtgaaatttgtgatgctattgctttatttgtaaccattataagctgcaataaacaagttaacaacaacaattgcattcattttatgtttcaggttcagggggaggtgtgggaggttttttaaagcaagtaaaacctctacaaatgtggtatggaattaattctaaaatacagcatagcaaaactttaacctccaaatcaagcctctacttgaatccttttctgagggatgaataaggcataggcatcaggggctgttgccaatgtgcattagctgtttgcagcctcaccttctttcatggagtttaagatatagtgtattttcccaaggtttgaactagctcttcatttctttatgttttaaatgcactgacctcccacattccctttttagtaaaatattcagaaataatttaaatacatcattgcaatgaaaataaatgttttttattaggcagaatccagatgctcaaggcccttcataatatcccccagtttagtagttggacttagggaacaaaggaacctttaatagaaattggacagcaagaaagcgagcttctagcttatcctgtatatcacagacaaaactgtgctagacatgaggtctatggacttcaagagcaacagtgctgtggcctggagcaacaaatctgactttgcatgtgcaaacgccttcaacaacagcattattccagaagacaccttcttccccagcccaggtaagggcagctttggtgccttcgcaggctgtttccttgcttcaggaatggccaggttctgcccagagctctggtcaatgatgtctaaaactcctctgattggtggtctcggccttatccattgccaccaaaaccctctttttactaagaaacagtgagccttgttctggcagtccagagaatgacacgggaaaaaagcagatgaagagaaggtggcaggagagggcacgtggcccagcctcagtctctccaactgagttcctgcctgcctgcctttgctcagactgtttgccccttactgctcttctaggcctcattctaagccccttctccaagttgcctctccttatttctccctgtctgccaaaaaatctttcccagctcactaagtcagtctcacgcagtcactcattaacccaccaatcactgattgtgccggcacatgaatgcaccaggtgttgaagtggaggaattaaaaagtcagatgaggggtgtgcccagaggaagcaccattctagttgggggagcccatctgtcagctgggaaaagtccaaataacttcagattggaatgtgttttaactcagggttgagaaaacagccaccttcaggacaaaagtcagggaagggctctctgaagaaatgctacttgaagataccagccctaccaagggcagggagaggaccctatagaggcctgggaca

SEQ ID NO: 8404 - DNA, 6126 bp, synthetic construct
  source 1..6126: mol_type = other DNA
  misc_feature 4118: note = n is a, c, g, or t
ggatccagctggatgtctgcattgccgaggccaccagggctggctcagcaactgtcggggaatcaccagggtctgagaaatcttgtgcgcatgtgaggggctgtgggagcagagaaccactgggtgggaaattctaatccccaccctgctggaaactctctgggtggccccaacatgctaatcctccggcaaacctctgtttcctcctcaaaaggcaggaggtcggaaagaataaacaatgagagtcacattaaaaacacaaaatcctacggaaatactgaagaatgagtctcagcactaaggaaaagcctccagcagctcctgctttctgagggtgaaggatagacgctgtggctctgcatgactcactagcactctatcacggccatattctggcagggtcagtggctccaactaacatttgtttggtactttacagtttattaaatagatgtttatatggagaagctctcatttctttctcagaagagcctggctaggaaggtggatgaggcaccatattcattttgcaggtgaaattcctgagatgtaaggagctgctgtgacttgctcaaggccttatatcgagtaaacggtagcgctggggcttagacgcaggtgttctgatttatagttcaaaacctctatcaatgagagagcaatctcctggtaatgtgatagatttcccaacttaatgccaacataccataaacctcccattctgctaatgcccagcctaagttggggagaccactccagattccaagatgtacagtttgctttgctgggcctttttcccatgcctgcctttactctgccagagttatattgctggggttttgaagaagatcctattaaataaaagaataagcagtattattaagtagccctgcatttcaggtttccttgagtggcaggccaggcctggccgtgaacgttcactgaaatcatggcctcttggccaagattgatagcttgtgcctgtccctgagtcccagtccatcacgagcagctggtttctaagatgctatttcccgtataaagcatgagaccgtgacttgccagccccacagagccccgcccttgtccatcactggcatctggactccagcctgggttggggcaaagagggaaatgagatcatgtcctaaccctgatcctcttgtcccacagatgtgaagcagaccctgaatttcgacctgctgaagctggctggcgacgtggaatccaacccaggccctatggccttaccagtgaccgccttgctcctgccgctggccttgctgctccacgccgccaggccgctcgaggaggacctgaagaacgtgttcccacctgaggtggccgtgttcgagcctagcgaggccgagatcagccacacccagaaagccaccctcgtgtgcctggctaccggcttctaccccgaccatgtggaactgtcttggtgggtcaacggcaaagaggtgcacagcggcgtgtgtaccgacccccagccactgaaagaacagcccgccctgaacgacagccggtactgcctgagcagcagactgagagtgtccgccaccttctggcagaacccccggaaccacttcagatgccaggtgcagttctacggcctgagcgagaacgacgagtggacccaggacagagccaagcccgtgacccagatcgtgtctgccgaagcctggggcagagccgattgcgacgtgaagctggtggaaaagagcttcgagacagacaccaacctgaacttccagaacctgagcgtgatcggcttcagaatcctgctgctgaaagtggccggctttaacctgctgatgaccctgcggctgtggtccagcagggccaagcgatctggatctggagcaacaaacttctcactactcaaacaagcaggtgacgtggaggagaatcccgggcctactagcatggccttaccagtgaccgccttgctcctgccgctggccttgctgctccacgccgccaggccggacatccagatgacacagagccctagcagcctgtctgccagcgtgggagacagagtgaccatcacatgcaaggccagcgaccacatcaacaactggctggcctggtatcagcagaagcctggacaggcccctaagctgctgatctacggcgctaccacactggaaacaggcgtgcccagcagattttctggcagcggctctggcaccgactacaccctgacaatatccagcctccagcctgaggacttcgccacctactactgtcagcagagctggaacaccccttggacattcggccagggcaccaagctggaaatcaagagaggcggaggcggaagtggaggcggaggatctggcggcggaggctctcaagttcagcttcaacagcctggcgctgagctggtcaaacctggcgcttctgtgaagatgagctgcaaagccagcggctacgccttcagcagctactggatcaactggatgaagcagaaacccggccagggactcgaatggatcggccaaatctatcccggcgacggcgacaccaactacaacggcaagttcaagggcagagccacactgaccgccgatacctctagcagcacagcctacatgcagctgagcagcctgaccagcgaagatagcgccgtgtacttctgtgcccggtccatcacaacagtcgtgggctgcgctatggactattggggccagggaacaagcgtgaccgtgtctagtacgcgtatccagaaccctgatcctgccgtgtaccagctgcgggatagcaagagcagcgacaagagcgtgtgtctgttcaccgacttcgacagccagaccaacgtgtcccagagcaaggactccgacgtgtacatcaccgataagtgcgtgctggacatcaacaagtccgattgcggagcatggacttcaagagcaactccgccgtggcctggtccaacaagtccgatttcgcctgcgccaacgccttcaacaacagcattatccccgaggacacattcttcccaagccccgagagcagctgcggctttaccagcgagagctaccagcagaacctgagcgtgatcggcttcagaatcctgctgctgaaagtggccggctttaacctgctgatgaccctgcggctgtggtccagctgagatatccagaaccctgaccctgccgtgtaccagctgagagactctaaatccagtgacaagtctgtctgcctattcaccgattttgattctcaaacaaatgtgtcacaaagtaaggattctgatgtgtatatcacagacaaaactgtgctagacatgaggtctatggacttcaagagcaacagtgctgtggcctggagcaacaaatctgactttgcatgtgcaaacgccttcaacaacagcattattccagaagacaccttcttccccagcccaggtaagggcagctttggtgccttcgcaggctgtttccttgcttcaggaatggccaggttctgcccagagctctggtcaatgatgtctaaaactcctctgattggtggtctcggccttatccattgccaccaaaaccctctttttactaagaaacagtgagccttgttctggcagtccagagaatgacacgggaaaaaagcagatgaagagaaggtggcaggagagggcacgtggcccagcctcagtctctccaactgagttcctgcctgcctgcctttgctcagactgtttgccccttactgctcttctaggcctcattctaagccccttctccaagttgcctctccttatttctccctgtctgccaaaaaatctttcccagctcactaagtcagtctcacgcagtcactcattaacccaccaatcactgattgtgccggcacatgaatgcaccaggtgttgaagtggaggaattaaaaagtcagatgaggggtgtgcccagaggaagcaccattctagttgggggagcccatctgtcagctgggaaaagtccaaataacttcagattggaatgtgttttaactcagggttgagaaaacagccaccttcaggacaaaagtcagggaagggctctctgaagaaatgctacttgaagataccagccctaccaagggcagggagaggaccctatagaggcctgggacattttttttttttttttttttttgagatggagttttgctcttgttgcccaggctggagtgcaatggtgcatcttggctcactacaacctctgcctcccaggttcaagtgattctcctgcctcagcctcccaagtagctgggattacaggcacccaccaccatgcccggctaattttttgtatttttagtagagacagggtttcactatgttggccaggctggtctcgaactcctgacctcaggtgatccacccgcttcagcctcccaaagtgctgggattacaggcgtgagccaccacacccggcctgcttttcttaaagatcaatctgagtgctgtacggagagtgggttgtaagccaagagtagaagcagaaagggagcagttgcagcagagagatgatggaggcctgggcagggtggtggcagggaggtaaccaacaccattcaggtttcaaaggtagaaccatgcagggatgagaaagcaaagaggggatcaaggaaggcagctggattttggcctgagcagctgagtcaatgatagtgccgtttactaagaagaaaccaaggaaaaaatttggggtgcagggatcaaaactttttggaacatatgaaagtacgtgtttatactctttatggcccttgtcactatgtatgcctcgctgcctccattggactctagaatgaagccaggcaagagcagggtctatgtgtgatggcacatgtggccagggtcatgcaacatgtactttgtacaaacagtgtatattgagtaaatagaaatggtgtccaggagccgaggtatcggtcctgccagggccaggggctctccctagcaggtgctcatatgctgtaagttccctccagatctctccacaaggaggcatggaaaggctgtagttgttcacctgcccaagaactaggaggtctggggtgggagagtcagcctgctctggatgctgaaagaatgtctgtttttccttttagaaagttcctgtgatgtcaagctggtcgagaaaagctttgaaacaggtaagacaggggtctagcctgggtttgcacaggattgcggaagtgatgaacccgcaataaccctgcctggatgagggagtgggaagaaattagtagatgtgggaatgaatgatgaggaatggaaacagcggttcaagacctgcccagagctgggtggggtctctcctgaatccctctcaccgtctctgactttccgttctaagcactttgaggatgagtttctagcttcaatagaccaaggactctctcctaggcctctgtattcctttcaacagctccactgtcaagagagccagagagagcttctgggtggcccagctgtgaaatttctgagtcccttagggatagccctaaacgaaccagatcatcctgaggacagccaagaggttttgccttctttcaagacaagcaacagtactcacataggctgtgggcaatggtcctgtctctcaagaatcccctgccactcctcacacccaccctgggcccatattcatttccatttgagttgttcttattgagtcatccttcctgtggcagcggaactcactaaggggcccatctggacccgaggtattgtgaagataaattctgagcacctaccccatccccagaagggctcagaaataaaataagagccaagtctagtcggtgtttcctgtcttgaaacacaatactgttggccctggaagaatgcacagaatctgtttgtaaggggatatgcacagaagctgcaagggacaggaggtgcaggagctgcaggcctcccccacccagcctgctctgccttggggaaaaccgtgggtgtgtcctgcaggccatgcaggcctgggacatgcaagcccataaccgctgtggcctcttggttttacagatacgaacctaaactttcaaaacctgtcagtgattgggttccgaatcctcctcctgaaagtggccgggtttaatctgctcatgacgctgcggctgtggtccagctga

SEQ ID NO: 8405 - DNA, 5189 bp, synthetic construct
  source 1..5189: mol_type = other DNA
ggatccagctggatgtctgcattgccgaggccaccagggctggctcagcaactgtcggggaatcaccagggtctgagaaatcttgtgcgcatgtgaggggctgtgggagcagagaaccactgggtgggaaattctaatccccaccctgctggaaactctctgggtggccccaacatgctaatcctccggcaaacctctgtttcctcctcaaaaggcaggaggtcggaaagaataaacaatgagagtcacattaaaaacacaaaatcctacggaaatactgaagaatgagtctcagcactaaggaaaagcctccagcagctcctgctttctgagggtgaaggatagacgctgtggctctgcatgactcactagcactctatcacggccatattctggcagggtcagtggctccaactaacatttgtttggtactttacagtttattaaatagatgtttatatggagaagctctcatttctttctcagaagagcctggctaggaaggtggatgaggcaccatattcattttgcaggtgaaattcctgagatgtaaggagctgctgtgacttgctcaaggccttatatcgagtaaacggtagcgctggggcttagacgcaggtgttctgatttatagttcaaaacctctatcaatgagagagcaatctcctggtaatgtgatagatttcccaacttaatgccaacataccataaacctcccattctgctaatgcccagcctaagttggggagaccactccagattccaagatgtacagtttgctttgctgggcctttttcccatgcctgcctttactctgccagagttatattgctggggttttgaagaagatcctattaaataaaagaataagcagtattattaagtagccctgcatttcaggtttccttgagtggcaggccaggcctggccgtgaacgttcactgaaatcatggcctcttggccaagattgatagcttgtgcctgtccctgagtcccagtccatcacgagcagctggtttctaagatgctatttcccgtataaagcatgagaccgtgacttgccagccccacagagccccgcccttgtccatcactggcatctggactccagcctgggttggggcaaagagggaaatgagatcatgtcctaaccctgatcctcttgtcccacagatgtgaagcagaccctgaatttcgacctgctgaagctggctggcgacgtggaatccaacccaggccctatggccttaccagtgaccgccttgctcctgccgctggccttgctgctccacgccgccaggccggaattcaatgctggcgtgacccagacacctaagttccaggtgctgaaaaccggccagagcatgaccctgcaatgcgcccaggacatgaaccatgagtacatgagctggtacagacaggaccccggcatgggcctgagactgatccactactctgtggctatccagaccaccgaccagggcgaagtgcccaatggctacaacgtgtccagaagcaccatcgaggacttcccactgagactgctgtctgccgctcctagccagaccagcgtgtacttttgtgccagcagctacctgggcaacaccggcgagctgttttttggcgagggcagcagactgaccgtgctcgaggacctgaagaacgtgttcccacctgaggtggccgtgttcgagcctagcgaggccgagatcagccacacccagaaagccaccctcgtgtgcctggctaccggcttctaccccgaccatgtggaactgtcttggtgggtcaacggcaaagaggtgcacagcggcgtgtctaccgacccccagccactgaaagaacagcccgccctgaacgacagccggtactgcctgagcagcagactgagagtgtccgccaccttctggcagaacccccggaaccacttcagatgccaggtgcagttctacggcctgagcgagaacgacgagtggacccaggacagagccaagcccgtgacccagatcgtgtctgccgaagcctggggcagagccgattgcggatcccagagcttcggcctgctggaccccaagctgtgctacctgctggatggcatcctgttcatctacggcgtgatcctgaccgccctgttcctgagagtgaagttcagcagaagcgccgacgcccctgcctaccagcagggacagaaccaactgtacaacgagctgaacctgggcagacgggaagagtacgacgtgctggacaagcggagaggcagggaccctgagatgggcggaaagccccggagaaagaacccccaggaaggactgtataacgaactccagaaagacaagatggccgaagcctacagcgagatcggcatgaagggcgagcggagaagaggcaagggccacgatggcctgtaccagggcctgagcaccgccaccaaggacacctatgacgccctgcacatgcaggccctgcctccaagaagggccaagcgatctggatctggagcaacaaacttctcactactcaaacaagcaggtgacgtggaggagaatcccgggcctactagtatggactggatttggcgcatccttttccttgtcggcgctgctaccggcgcgcattccttcgaacaagaagtgacacagatccctgccgctctgtctgtgcctgagggcgaaaacctggtgctgaactgctccttcaccgacagcgccatctacaacctccagtggttcaggcaggaccctggaaagggactgacaagcctgctgctgatccagagcagccagagagagcagacctccggcagactgaatgccagcctggataagagcagcggcaggtctaccctgtatatcgccgcttctcagcctggcgatagcgccacatatctgtgtgctgtgcggcctacaagcggcggcagctacatccctacatttggcagaggcaccagcctgatcgtgcacccttatacgcgtatccagaaccctgatcctgccgtgtaccagctgcgggatagcaagagcagcgacaagagcgtgtgtctgttcaccgacttcgacagccagaccaacgtgtcccagagcaaggactccgacgtgtacatcaccgataagaccgtgctggacatgcggagcatggacttcaagagcaactccgccgtggcctggtccaacaagtccgatttcgcctgcgccaacgccttcaacaacagcattatccccgaggacacattcttcccaagccccgagagcagctgcggtacccagagttttgggttgttggaccctaaattgtgctatctgttggacggaatcctgttcatttacggagtgatcctgaccgcattgttcctgcgggttaagttttccagatccgcagacgcacccgcttaccaacaagggcagaaccaactctacaatgaacttaatttggggcggagggaagagtacgacgttctggacaaaaggaggggacgagatcccgagatgggcggaaagcctcgaaggaagaatccgcaagaggggctttataacgaactccagaaagataaaatggcagaagcctatagtgagattgggatgaagggagaaaggaggaggggtaaaggtcacgatgggttgtaccaaggattgagcacagccactaaagatacctatgatgcgctccacatgcaggccctgccgccaagataatgaccagacatgataagatacattgatgagtttggacaaaccacaactagaatgcagtgaaaaaaatgctttatttgtgaaatttgtgatgctattgctttatttgtaaccattataagctgcaataaacaagttaacaacaacaattgcattcattttatgtttcaggttcagggggaggtgtgggaggttttttaaagcaagtaaaacctctacaaatgtggtatggaattaattctaaaatacagcatagcaaaactttaacctccaaatcaagcctctacttgaatccttttctgagggatgaataaggcataggcatcaggggctgttgccaatgtgcattagctgtttgcagcctcaccttctttcatggagtttaagatatagtgtattttcccaaggtttgaactagctcttcatttctttatgttttaaatgcactgacctcccacattccctttttagtaaaatattcagaaataatttaaatacatcattgcaatgaaaataaatgttttttattaggcagaatccagatgctcaaggcccttcataatatcccccagtttagtagttggacttagggaacaaaggaacctttaatagaaattggacagcaagaaagcgagcttctagcttatcctgtatatcacagacaaaactgtgctagacatgaggtctatggacttcaagagcaacagtgctgtggcctggagcaacaaatctgactttgcatgtgcaaacgccttcaacaacagcattattccagaagacaccttcttccccagcccaggtaagggcagctttggtgccttcgcaggctgtttccttgcttcaggaatggccaggttctgcccagagctctggtcaatgatgtctaaaactcctctgattggtggtctcggccttatccattgccaccaaaaccctctttttactaagaaacagtgagccttgttctggcagtccagagaatgacacgggaaaaaagcagatgaagagaaggtggcaggagagggcacgtggcccagcctcagtctctccaactgagttcctgcctgcctgcctttgctcagactgtttgccccttactgctcttctaggcctcattctaagccccttctccaagttgcctctccttatttctccctgtctgccaaaaaatctttcccagctcactaagtcagtctcacgcagtcactcattaacccaccaatcactgattgtgccggcacatgaatgcaccaggtgttgaagtggaggaattaaaaagtcagatgaggggtgtgcccagaggaagcaccattctagttgggggagcccatctgtcagctgggaaaagtccaaataacttcagattggaatgtgttttaactcagggttgagaaaacagccaccttcaggacaaaagtcagggaagggctctctgaagaaatgctacttgaagataccagccctaccaagggcagggagaggaccctatagaggcctgggaca

SEQ ID NO: 8406 - DNA, 5192 bp, synthetic construct
  source 1..5192: mol_type = other DNA
ggatccagctggatgtctgcattgccgaggccaccagggctggctcagcaactgtcggggaatcaccagggtctgagaaatcttgtgcgcatgtgaggggctgtgggagcagagaaccactgggtgggaaattctaatccccaccctgctggaaactctctgggtggccccaacatgctaatcctccggcaaacctctgtttcctcctcaaaaggcaggaggtcggaaagaataaacaatgagagtcacattaaaaacacaaaatcctacggaaatactgaagaatgagtctcagcactaaggaaaagcctccagcagctcctgctttctgagggtgaaggatagacgctgtggctctgcatgactcactagcactctatcacggccatattctggcagggtcagtggctccaactaacatttgtttggtactttacagtttattaaatagatgtttatatggagaagctctcatttctttctcagaagagcctggctaggaaggtggatgaggcaccatattcattttgcaggtgaaattcctgagatgtaaggagctgctgtgacttgctcaaggccttatatcgagtaaacggtagcgctggggcttagacgcaggtgttctgatttatagttcaaaacctctatcaatgagagagcaatctcctggtaatgtgatagatttcccaacttaatgccaacataccataaacctcccattctgctaatgcccagcctaagttggggagaccactccagattccaagatgtacagtttgctttgctgggcctttttcccatgcctgcctttactctgccagagttatattgctggggttttgaagaagatcctattaaataaaagaataagcagtattattaagtagccctgcatttcaggtttccttgagtggcaggccaggcctggccgtgaacgttcactgaaatcatggcctcttggccaagattgatagcttgtgcctgtccctgagtcccagtccatcacgagcagctggtttctaagatgctatttcccgtataaagcatgagaccgtgacttgccagccccacagagccccgcccttgtccatcactggcatctggactccagcctgggttggggcaaagagggaaatgagatcatgtcctaaccctgatcctcttgtcccacagatgtgaagcagaccctgaatttcgacctgctgaagctggctggcgacgtggaatccaacccaggccctatggccttaccagtgaccgccttgctcctgccgctggccttgctgctccacgccgccaggccggacatccagatgacacagagccctagcagcctgtctgccagcgtgggagacagagtgaccatcacatgcaaggccagcgaccacatcaacaactggctggcctggtatcagcagaagcctggacaggcccctaagctgctgatctacggcgctaccacactggaaacaggcgtgcccagcagattttctggcagcggctctggcaccgactacaccctgacaatatccagcctccagcctgaggacttcgccacctactactgtcagcagagctggaacaccccttggacattcggccagggcaccaagctggaaatcaagagactcgaggacctgaagaacgtgttcccacctgaggtggccgtgttcgagcctagcgaggccgagatcagccacacccagaaagccaccctcgtgtgcctggctaccggcttctaccccgaccatgtggaactgtcttggtgggtcaacggcaaagaggtgcacagcggcgtgtctaccgacccccagccactgaaagaacagcccgccctgaacgacagccggtactgcctgagcagcagactgagagtgtccgccaccttctggcagaacccccggaaccacttcagatgccaggtgcagttctacggcctgagcgagaacgacgagtggacccaggacagagccaagcccgtgacccagatcgtgtctgccgaagcctggggcagagccgattgcggatcccagagcttcggcctgctggaccccaagctgtgctacctgctggatggcatcctgttcatctacggcgtgatcctgaccgccctgttcctgagagtgaagttcagcagaagcgccgacgcccctgcctaccagcagggacagaaccaactgtacaacgagctgaacctgggcagacgggaagagtacgacgtgctggacaagcggagaggcagggaccctgagatgggcggaaagccccggagaaagaacccccaggaaggactgtataacgaactccagaaagacaagatggccgaagcctacagcgagatcggcatgaagggcgagcggagaagaggcaagggccacgatggcctgtaccagggcctgagcaccgccaccaaggacacctatgacgccctgcacatgcaggccctgcctccaagaagggccaagcgatctggatctggagcaacaaacttctcactactcaaacaagcaggtgacgtggaggagaatcccgggcctactagtatggactggatttggcgcatccttttccttgtcggcgctgctaccggcgcgcattccttcgaacaagttcagcttcaacagcctggcgctgagctggtcaaacctggcgcttctgtgaagatgagctgcaaagccagcggctacgccttcagcagctactggatcaactggatgaagcagaaacccggccagggactcgaatggatcggccaaatctatcccggcgacggcgacaccaactacaacggcaagttcaagggcagagccacactgaccgccgatacctctagcagcacagcctacatgcagctgagcagcctgaccagcgaagatagcgccgtgtacttctgtgcccggtccatcacaacagtcgtgggctgcgctatggactattggggccagggaacaagcgtgaccgtgtctagtacgcgtatccagaaccctgatcctgccgtgtaccagctgcgggatagcaagagcagcgacaagagcgtgtgtctgttcaccgacttcgacagccagaccaacgtgtcccagagcaaggactccgacgtgtacatcaccgataagaccgtgctggacatgcggagcatggacttcaagagcaactccgccgtggcctggtccaacaagtccgatttcgcctgcgccaacgccttcaacaacagcattatccccgaggacacattcttcccaagccccgagagcagctgcggtacccagagttttgggttgttggaccctaaattgtgctatctgttggacggaatcctgttcatttacggagtgatcctgaccgcattgttcctgcgggttaagttttccagatccgcagacgcacccgcttaccaacaagggcagaaccaactctacaatgaacttaatttggggcggagggaagagtacgacgttctggacaaaaggaggggacgagatcccgagatgggcggaaagcctcgaaggaagaatccgcaagaggggctttataacgaactccagaaagataaaatggcagaagcctatagtgagattgggatgaagggagaaaggaggaggggtaaaggtcacgatgggttgtaccaaggattgagcacagccactaaagatacctatgatgcgctccacatgcaggccctgccgccaagataatgaccagacatgataagatacattgatgagtttggacaaaccacaactagaatgcagtgaaaaaaatgctttatttgtgaaatttgtgatgctattgctttatttgtaaccattataagctgcaataaacaagttaacaacaacaattgcattcattttatgtttcaggttcagggggaggtgtgggaggttttttaaagcaagtaaaacctctacaaatgtggtatggaattaattctaaaatacagcatagcaaaactttaacctccaaatcaagcctctacttgaatccttttctgagggatgaataaggcataggcatcaggggctgttgccaatgtgcattagctgtttgcagcctcaccttctttcatggagtttaagatatagtgtattttcccaaggtttgaactagctcttcatttctttatgttttaaatgcactgacctcccacattccctttttagtaaaatattcagaaataatttaaatacatcattgcaatgaaaataaatgttttttattaggcagaatccagatgctcaaggcccttcataatatcccccagtttagtagttggacttagggaacaaaggaacctttaatagaaattggacagcaagaaagcgagcttctagcttatcctgtatatcacagacaaaactgtgctagacatgaggtctatggacttcaagagcaacagtgctgtggcctggagcaacaaatctgactttgcatgtgcaaacgccttcaacaacagcattattccagaagacaccttcttccccagcccaggtaagggcagctttggtgccttcgcaggctgtttccttgcttcaggaatggccaggttctgcccagagctctggtcaatgatgtctaaaactcctctgattggtggtctcggccttatccattgccaccaaaaccctctttttactaagaaacagtgagccttgttctggcagtccagagaatgacacgggaaaaaagcagatgaagagaaggtggcaggagagggcacgtggcccagcctcagtctctccaactgagttcctgcctgcctgcctttgctcagactgtttgccccttactgctcttctaggcctcattctaagccccttctccaagttgcctctccttatttctccctgtctgccaaaaaatctttcccagctcactaagtcagtctcacgcagtcactcattaacccaccaatcactgattgtgccggcacatgaatgcaccaggtgttgaagtggaggaattaaaaagtcagatgaggggtgtgcccagaggaagcaccattctagttgggggagcccatctgtcagctgggaaaagtccaaataacttcagattggaatgtgttttaactcagggttgagaaaacagccaccttcaggacaaaagtcagggaagggctctctgaagaaatgctacttgaagataccagccctaccaagggcagggagaggaccctatagaggcctgggaca

SEQ ID NO: 8407 - DNA, 28 bp, synthetic construct
  source 1..28: mol_type = other DNA
gggggggggggggggggggggggggggg

SEQ ID NO: 8408 - DNA, 28 bp, synthetic construct
  source 1..28: mol_type = other DNA
gggggggggggggggggggggggggggg

SEQ ID NO: 8409 - DNA, 28 bp, synthetic construct
  source 1..28: mol_type = other DNA
gggggggggggggggggggggggggggg

SEQ ID NO: 8410 - DNA, 28 bp, synthetic construct
  source 1..28: mol_type = other DNA
gggggggggggggggggggggggggggg

SEQ ID NO: 8411 - DNA, 28 bp, synthetic construct
  source 1..28: mol_type = other DNA
gggggggggggggggggggggggggggg

SEQ ID NO: 8412 - DNA, 28 bp, synthetic construct
  source 1..28: mol_type = other DNA
gggggggggggggggggggggggggggg

SEQ ID NO: 8413 - DNA, 28 bp, synthetic construct
  source 1..28: mol_type = other DNA
gggggggggggggggggggggggggggg

SEQ ID NO: 8414 - DNA, 28 bp, synthetic construct
  source 1..28: mol_type = other DNA
gggggggggggggggggggggggggggg

SEQ ID NO: 8415 - DNA, 28 bp, synthetic construct
  source 1..28: mol_type = other DNA
gggggggggggggggggggggggggggg

SEQ ID NO: 8416 - protein, 563 aa, synthetic construct
MGFTTKIIFLYNLVLVYAGFDDPRKAIELVQKRYGRPCDCSGGQVSEPPSDRVSQVTCSGKTAYLMPDQRWKCKSIPKDTSPSGPLQECPCNSYQSSVHSSCYTSYQQCRSGNKTYYTATLLKTQTGGTSDVQVLGSTNKLIQSPCNGIKGQSICWSTTAPIHVSDGGGPLDTTRIKSVQRKLEEIHKALYPELQYHPLAIPKVRDNLMVDAQTLNILNATYNLLLMSNTSLVDDCWLCLKLGPPTPLAIPNFLLSYVTRSSDNISCLIIPPLLVQPMQFSNSSCLFSPSYNSTEEIDLGHVAFSNCTSITNVTGPICAVNGSVFLCGNNMAYTYLPTNWTGLCVLATLLPDIDIIPGDEPVPIPAIDHFIYRPKRAIQFIPLLAGLGITAAFTTGATGLGVSVTQYTKLSNQLISDVQILSSTIQDLQDQVDSLAEVVLQNRRGLDLLTAEQGGICLALQEKCCFYVNKSGIVRDKIKTLQEELERRRKDLASNPLWTGLQGLLPYLLPFLGPLLTLLLLLTIGPCIFNRLTAFINDKLNIIHAMVLTQQYQVLRTDEEAQD

SEQ ID NO: 8417 - protein, 546 aa, synthetic construct
MGFTTKIIFLYNLVLVYAGFDDPRKAIELVQKRYGRPCDCSGGQVSEPPSDRVSQVTCSGKTAYLMPDQRWKCKSIPKDTSPSGPLQECPCNSYQSSVHSSCYTSYQQCRSGNKTYYTATLLKTQTGGTSDVQVLGSTNKLIQSPCNGIKGQSICWSTTAPIHVSDGGGPLDTTRIKSVQRKLEEIHKALYPELQYHPLAIPKVRDNLMVDAQTLNILNATYNLLLMSNTSLVDDCWLCLKLGPPTPLAIPNFLLSYVTRSSDNISCLIIPPLLVQPMQFSNSSCLFSPSYNSTEEIDLGHVAFSNCTSITNVTGPICAVNGSVFLCGNNMAYTYLPTNWTGLCVLATLLPDIDIIPGDEPVPIPAIDHFIYRPKRAIQFIPLLAGLGITAAFTTGATGLGVSVTQYTKLSNQLISDVQILSSTIQDLQDQVDSLAEVVLQNRRGLDLLTAEQGGICLALQEKCCFYVNKSGIVRDKIKTLQEELERRRKDLASNPLWTGLQGLLPYLLPFLGPLLTLLLLLTIGPCIFNRLTAFINDKLNIIHAM

SEQ ID NO: 8418 - protein, 562 aa, synthetic construct
MGFTTKIIFLYNLVLVYAGFDDPRKAIELVQKRYGRPCDCSGGQVSEPPSDRVSQVTCSGKTAYLMPDQRWKCKSIPKDTSPSGPLQECPCNSYQSSVHSSCYTSYQQCRSGNKTYYTATLLKTQTGGTSDVQVLGSTNKLIQSPCNGIKGQSICWSTTAPIHVSDGGGPLDTTRIKSVQRKLEEIHKALYPELQYHPLAIPKVRDNLMVDAQTLNILNATYNLLLMSNTSLVDDCWLCLKLGPPTPLAIPNFLLSYVTRSSDNISCLIIPPLLVQPMQFSNSSCLFSPSYNSTEEIDLGHVAFSNCTSITNVTGPICAVNGSVFLCGNNMAYTYLPTNWTGLCVLATLLPDIDIIPGDEPVPIPAIDHFIYRPKRAIQFIPLLAGLGITAAFTTGATGLGVSVTQYTKLSNQLISDVQILSSTIQDLQDQVDSLAEVVLQNRRGLDLLTAEQGGICLALQEKCCFYVNKSGIVRDKIKTLQEELERRRKDLASNPLWTGLQGLLPYLLPFLGPLLTLLLLLTIGPCIFNRLVQFVKDRISVVQALVLTQQYHQLKPLEYEP

SEQ ID NO: 8419 - protein, 563 aa, synthetic construct; identical to SEQ ID NO: 8416

SEQ ID NO: 8420 - protein, 563 aa, synthetic construct; identical to SEQ ID NO: 8416

SEQ ID NO: 8421 - protein, 538 aa, Homo sapiens
MALPYHIFLFTVLLPSFTLTAPPPCRCMTSSSPYQEFLWRMQRPGNIDAPSYRSLSKGTPTFTAHTHMPRNCYHSATLCMHANTHYWTGKMINPSCPGGLGVTVCWTYFTQTGMSDGGGVQDQAREKHVKEVISQLTRVHGTSSPYKGLDLSKLHETLRTHTRLVSLFNTTLTGLHEVSAQNPTNCWICLPLNFRPYVSIPVPEQWNNFSTEINTTSVLVGPLVSNLEITHTSNLTCVKFSNTTYTTNSQCIRWVTPPTQIVCLPSGIFFVCGTSAYRCLNGSSESMCFLSFLVPPMTIYTEQDLYSYVISKPRNKRVPILPFVIGAGVLGALGTGIGGITTSTQFYYKLSQELNGDMERVADSLVTLQDQLNSLAAVVLQNRRALDLLTAERGGTCLFLGEECCYYVNQSGIVTEKVKEIRDRIQRRAEELRNTGPWGLLSQWMPWILPFLGPLAAIILLLLFGPCIFNLLVNFVSSRIEAVKLQMEPKMQSKTKIYRRPLDRPASPRSDVNDIKGTPPEEISAAQPLLRPNSAGSS

SEQ ID NO: 8422 - protein, 538 aa, synthetic construct
MGLLLLVLILTPSLAAYRHPDFPLLEKAQQLLQSTGSPYSTNCWLCTSSSTETPGTAYPASPREWTSIEAELHISYRWDPNLKGLMRPANSLLSTVKQDFPDIRQKPPIFGPIFTNINLMGIAPICVMAKRKNGTNVGTLPSTVCNVTFTVDSNQQTYQTYTHNQFRHQPRFPKPPNITFPQGTLLDKSSRFCQGRPSSCSTRNFWFRPADYNQCLQISNLSSTAEWVLLDQTRNSLFWENKTKGANQSQTPCVQVLAGMTIATSYLGISAVSEFFGTSLTPLFHFHISTCLKTQGAFYICGQSIHQCLPSNWTGTCTIGYVTPDIFIAPGNLSLPIPIYGNSPLPRVRRAIHFIPLLAGLGILAGTGTGIAGITKASLTYSQLSKEIANNIDTMAKALTTMQEQIDSLAAVVLQNRRGLDMLTAAQGGICLALDEKCCFWVNQSGKVQDNIRQLLNQASSLRERATQGWLNWEGTWKWFSWVLPLTGPLVSLLLLLLFGPCLLNLITQFVSSRLQAIKLQTNLSAGRHPRNIQESPF

SEQ ID NO: 8423 - protein, 539 aa, synthetic construct
METDTLLLWVLLLWVPGSTGDAPPPCRCMTSSSPYQEFLWRMQRPGNIDAPSYRSLSKGTPTFTAHTHMPRNCYHSATLCMHANTHYWTGKMINPSCPGGLGVTVCWTYFTQTGMSDGGGVQDQAREKHVKEVISQLTRVHGTSSPYKGLDLSKLHETLRTHTRLVSLFNTTLTGLHEVSAQNPTNCWICLPLNFRPYVSIPVPEQWNNFSTEINTTSVLVGPLVSNLEITHTSNLTCVKFSNTTYTTNSQCIRWVTPPTQIVCLPSGIFFVCGTSAYRCLNGSSESMCFLSFLVPPMTIYTEQDLYSYVISKPRNKRVPILPFVIGAGVLGALGTGIGGITTSTQFYYKLSQELNGDMERVADSLVTLQDQLNSLAAVVLQNRRALDLLTAERGGTCLFLGEECCYYVNQSGIVTEKVKEIRDRIQRRAEELRNTGPWGLLSQWMPWILPFLGPLAAIILLLLFGPCIFNLLVNFVSSRIEAVKLQMEPKMQSKTKIYRRPLDRPASPRSDVNDIKGTPPEEISAAQPLLRPNSAGSS

SEQ ID NO: 8424 - protein, 542 aa, synthetic construct
MALPYHTFLFTVLLPPFALTAPPPCCCTTSSSPYQEFLWRTRLPGNIDAPSYRSLSKGNSTFTAHTHMPRNCYNSATLCMHANTHYWTGKMINPSCPGGLGATVCWTYFTHTSMSDGGGIQGQAREKQVKEAISQLTRGHSTPSPYKGLVLSKLHETLRTHTRLVSLFNTTLTRLHEVSAQNPTNCWMCLPLHFRPYISIPVPEQWNNFSTEINTTSVLVGPLVSNLEITHTSNLTCVKFSNTIDTTSSQCIRWVTPPTRIVCLPSGIFFVCGTSAYHCLNGSSESMCFLSFLVPPMTIYTEQDLYNHVVPKPHNKRVPILPFVIRAGVLGRLGTGIGSITTSTQFYYKLSQEINGDMEQVTDSLVTLQDQLNSLAAVVLQNRRALDLLTAKRGGTCLFLGEERCYYVNQSRIVTEKVKEIRDRIQCRAEELQNTERWGLLSQWMPWTLPFLGPLAAIIFLLLFGPCIFNFLVKFVSSRIEAVKLQIVLQMEPQMQSMTKIYRGPLDRPARLCSDVNDIEVTPPEEISTAQPLLHSNSVGSS

SEQ ID NO: 8425 - protein, 550 aa, synthetic construct
METDTLLLWVLLLWVPGSTGDAFEGSTRAPPPCCCTTSSSPYQEFLWRTRLPGNIDAPSYRSLSKGNSTFTAHTHMPRNCYNSATLCMHANTHYWTGKMINPSCPGGLGATVCWTYFTHTSMSDGGGIQGQAREKQVKEAISQLTRGHSTPSPYKGLVLSKLHETLRTHTRLVSLFNTTLTRLHEVSAQNPTNCWMCLPLHFRPYISIPVPEQWNNFSTEINTTSVLVGPLVSNLEITHTSNLTCVKFSNTIDTTSSQCIRWVTPPTRIVCLPSGIFFVCGTSAYHCLNGSSESMCFLSFLVPPMTIYTEQDLYNHVVPKPHNKRVPILPFVIRAGVLGRLGTGIGSITTSTQFYYKLSQEINGDMEQVTDSLVTLQDQLNSLAAVVLQNRRALDLLTAKRGGTCLFLGEERCYYVNQSRIVTEKVKEIRDRIQCRAEELQNTERWGLLSQWMPWTLPFLGPLAAIIFLLLFGPCIFNFLVKFVSSRIEAVKLQIVLQMEPQMQSMTKIYRGPLDRPARLCSDVNDIEVTPPEEISTAQPLLHSNSVGSS

SEQ ID NO: 8426 - protein, 570 aa, synthetic construct
MRFLWRIIALYNIVTVYAGFGDPRKARGLLRKQYGQPCDCRGGQISEPPSDRITQVTCSGKTAYLMPDQSWKCKSTPRDTSPNGPLLECPCSSFQSSVHSSCYTSYQQCKSGNKTYYTATLLKTQTGSTNDVQVLGTTNKLVQSSCNGQKGKPVCWSTTAPIHISDGGGPLDIARIKTVQKKLEKIHKALYPELQYHPLALPEIRDNFRLDAQTFDILNATYNLLQMSNTSLAHDCWLCLKMGPPIPLAIPNFLLSYVNYSNESLVNNPCPIISPLLIQPMTFSNSFCLFSPSYSSTKEIDLGYVVFDNCTSIIHATDPLCAVNGSVFVCGNNMAYTYLPTNWTGLCVLATLLPDIDIIPGDEPIPIPAIEHFIYRPKRAIQFIPLLAGLGITTAFTTGATGLGVSLTQYTKLSNQLISDVQTLSSTIQDLQDQVDSLAEVVLQNRRGLDLLTAEQGGICLALQEKCCFYANKSGIVRDKIKTLQEELEKRRKGLAANPLWTGLDGLLPYLLPFLGPLLTLLLFLTLGPIILNKLMAFVRQQIEAFQAKPIQVHYHRLEMTENGESYLPQ

SEQ ID NO: 8427 - protein, 573 aa, synthetic construct
METDTLLLWVLLLWVPGSTGDGFGDPRKARGLLRKQYGQPCDCRGGQISEPPSDRITQVTCSGKTAYLMPDQSWKCKSTPRDTSPNGPLLECPCSSFQSSVHSSCYTSYQQCKSGNKTYYTATLLKTQTGSTNDVQVLGTTNKLVQSSCNGQKGKPVCWSTTAPIHISDGGGPLDIARIKTVQKKLEKIHKALYPELQYHPLALPEIRDNFRLDAQTFDILNATYNLLQMSNTSLAHDCWLCLKMGPPIPLAIPNFLLSYVNYSNESLVNNPCPIISPLLIQPMTFSNSFCLFSPSYSSTKEIDLGYVVFDNCTSIIHATDPLCAVNGSVFVCGNNMAYTYLPTNWTGLCVLATLLPDIDIIPGDEPIPIPAIEHFIYRPKRAIQFIPLLAGLGITTAFTTGATGLGVSLTQYTKLSNQLISDVQTLSSTIQDLQDQVDSLAEVVLQNRRGLDLLTAEQGGICLALQEKCCFYANKSGIVRDKIKTLQEELEKRRKGLAANPLWTGLDGLLPYLLPFLGPLLTLLLFLTLGPIILNKLMAFVRQQIEAFQAKPIQVHYHRLEMTENGESYLPQ

SEQ ID NO: 8428 - protein, 573 aa, synthetic construct; identical to SEQ ID NO: 8427

SEQ ID NO: 8429 - protein, 565 aa, synthetic construct
MKLPTGMVILCSLIIVRAGFDDPRKAIALVQKQHGKPCECSGGQVSEAPPNSIQQVTCPGKTAYLMTNQKWKCRVTPKNLTPSGGELQNCPCNTFQDSMHSSCYTEYRQCRANNKTYYTATLLKIRSGSLNEVQILQNPNQLLQSPCRGSINQPVCWSATAPIHISDGGGPLDTKRVWTVQKRLEQIHKAMHPELQYHPLALPKVRDDLSLDARTFDILNTTFRLLQMSNFSLAQDCWLCLKLGTPTPLAIPTPSLTYSLADSLANASCQIIPPLLVQPMQFSNSSCLSSPFINDTEQIDLGAVTFTNCTSVANVSSPLCALNGSVFLCGNNMAYTYLPQNWTGLCVQASLLPDIDIIPGDEPVPIPAIDHYIHRPKRAVQFIPLLAGLGITAAFTTGATGLGVSVTQYTKLSHQLISDVQVLSGTIQDLQDQVDSLAEVALQNRRGLDLLTAEQGGICLALQEKCCFYANKSGIVRNKIRTLQEELQKRRESLASNPLWTGLQGFLPYLLPLLGPLLTLLLILTIGPCVFSRLMAFINDRLNVVHAMVLAQQYQALKAEEEAQD

SEQ ID NO: 8430 - protein, 568 aa, synthetic construct
METDTLLLWVLLLWVPGSTGDGFDDPRKAIALVQKQHGKPCECSGGQVSEAPPNSIQQVTCPGKTAYLMTNQKWKCRVTPKNLTPSGGELQNCPCNTFQDSMHSSCYTEYRQCRANNKTYYTATLLKIRSGSLNEVQILQNPNQLLQSPCRGSINQPVCWSATAPIHISDGGGPLDTKRVWTVQKRLEQIHKAMHPELQYHPLALPKVRDDLSLDARTFDILNTTFRLLQMSNFSLAQDCWLCLKLGTPTPLAIPTPSLTYSLADSLANASCQIIPPLLVQPMQFSNSSCLSSPFINDTEQIDLGAVTFTNCTSVANVSSPLCALNGSVFLCGNNMAYTYLPQNWTGLCVQASLLPDIDIIPGDEPVPIPAIDHYIHRPKRAVQFIPLLAGLGITAAFTTGATGLGVSVTQYTKLSHQLISDVQVLSGTIQDLQDQVDSLAEVALQNRRGLDLLTAEQGGICLALQEKCCFYANKSGIVRNKIRTLQEELQKRRESLASNPLWTGLQGFLPYLLPLLGPLLTLLLILTIGPCVFSRLMAFINDRLNVVHAMVLAQQYQALKAEEEAQD

SEQ ID NO: 8431 - protein, 565 aa, synthetic construct
MKLPTGMVILCSLIIVRAGFDDPRKAIALVQKQHGKPCECSGGQVSEAPPNSIQQVTCPGKTAYLMTNQKWKCRVTPKNLTPSGGELQNCPCNTFQDSMHSSCYTEYRQCRANNKTYYTATLLKIRSGSLNEVQILQNPNQLLQSPCRGSINQPVCWSATAPIHISDGGGPLDTKRVWTVQKRLEQIHKAMHPELQYHPLALPKVRDDLSLDARTFDILNTTFRLLQMSNFSLAQDCWLCLKLGTPTPLAIPTPSLTYSLADSLANASCQIIPPLLVQPMQFSNSSCLSSPFINDTEQIDLGAVTFTNCTSVANVSSPLCALNGSVFLCGNNMAYTYLPQNWTGLCVQASLLPDIDIIPGDEPVPIPAIDHYIHRPKRAVQFIPLLAGLGITAAFTTGATGLGVSVTQYTKLSHQLISDVQVLSGTIQDLQDQVDSLAEVVLQNRRGLDLLTAEQGGICLALQEKCCFYANKSGIVRNKIRTLQEELQKRRESLASNPLWTGLQGFLPYLLPLLGPLLTLLLILTIGPCVFSRLMAFINDRLNVVHAMVLAQQYQALKAEEEAQD

SEQ ID NO: 8432 - protein, 580 aa, synthetic construct
MSLLIEMAPKDIPFWRVLLIFQTARVYAGFGDPREAITMIHQQHGKPCDCAGGYVNAAPTVYLATVSCSSHTAYQPSDSLKWRCVSNPTLANGENIGNCPCKTFKESVHSSCYTAYQECFFGNKTYYTAILASNRAPTIGTSNVPTVLGNTHNLLSAGCTGNVGQPICWNPKAPVHISDGGGPQDKAREIAVQKRLEEIHKSLFPELRYHPLALPKARGKEKIDAQTFNLLTATYSLLNKSNPNLANECWLCLPSGNPIPLAIPSNDSFLGSNLSCPIIPPLLVQPLEFRDLINVSCFYSPFQNNSFDVDVGLVEFANCSTTLNISHSLCAPNSSVFVCGNNKAYTYLPTNWTGTCVLATLLPDIDIVPGDAPVPVPAIDHYLHRARRAVQFIPLLVGLGITAAVSTGTAGLGYSITQYTKLSRQLISDVQAISSTIQDLQDQVDSLAEVVLQNRRGLDLLTAEQGGICLALQEKCCFYANKSGIVRDKIKRLQEDLEKRRKEIIDNPFWTGLHGLLPYLLPLLGPLLCLLLLITFGPLIFNKIIAFVKQQIDAIQAKPIQVHYHRLEQEDNGGVYLRVS

SEQ ID NO: 8433 - protein, 571 aa, synthetic construct
MNFNYKPLWTMVLICQALQVYAGFGNPHEARKYIRQRYGKPCDCLGGYVTSLPNTYISAVSCSAYTAYLSSDSLKWRCVSTPRIFSGGDTTTCPCDTFETAMHSSCYTTYLECTSGGKTYYTAILTRSRTPTIGANSVPTVVGSTNNLISAGCTGTVGQPVCWNIHPPLHTSDGGGPQDKVREIRVYKKLEELQRSLYPEIHYHPLALPKARGKEKIDAQTFALLTATHNLLNNSNSSLADDCWLCLQSGDPVPLAIPSNNLNYTSNTPCTIIPPLKVQPLEFPSSSCIYSPPLNNTYDLDVGFNQFNNCSTIVNIFQSLCAPNSSVFICGNNRAYTYLPTNWTGRCVLATLLPDIDIIPGDEPVPIPAIDHFLGRNKRAIQFIPLLAGLGITTAVATGATGLGVSVTQYTKLSRQLISDMQAISSTIQDLQDQVDSLAEVVLQNRRGLDLLTAEQGGICLALQEKCCFYANKSGIVRDKIRRLQEDLEKRRKEITDNPFWTGFHGLLPYLMPFLGPLLCLLLLLSVGPLVFNKLMTFIKQQVEAIQAKPIQVHYHRLEQEDRGGSYSHPL

SEQ ID NO: 8434 - protein, 581 aa, synthetic construct
MNFEHKLIWSLMVISQILPIYAGFGDPREALTHIQNKHGKPCECKGGYVNRPPSSHVASISCGSHTAYQPTNNLKWQCVSTPKTTSGGHMGQCPSACSDKSYDSVHSTCYSSYQQCTIGNKTYFTATLTGERTATIGVSNVPTVIGSGQNLISAGCPKDELGKTACWSATPPVHVSDGGGPQDKVREILVQKKFEELHKNLFPELSYHPLALPKARGKEKIDAQTVDILTAVHNLLNLTRPDLAQDCWLCLQIGNPVPLALPSNYTYENLTSFNCSKNCSCPIVSPFLVQPFNFTESVCLYAPYQNNSYDIDVGLAAFINCSSTHNVSTPLCAPNGSVFACGNNQAYTYLPTNWTGRCVLVTLLPDIDIIPGSEPVPVPAIDHFIGRTKRAVQFIPLLVGLGITTAVSTGAAGLGHSITQYTKLSRQLISDVLAISSTIQDLQDQVDSLAEVVLQNRRGLDLLTAEQGGICLALQEKCCFYTNKSGVVRDKIKRLQDDLEKRRQQLIDNPFWTSFHGLLPYILPLLGPLLCLLLIISFGPLILNKLMAFIKHQIEAIQAKPIQVHYHRLEQEERGGSYLQI

SEQ ID NO: 8435 - protein, 586 aa, synthetic construct
MNFNYHFIWSLVILSQISQVQAGFGDPREALAEIQQKHGKPCDCAGGYVSSPPINSLTTVSCSTHTAYSVTNSLKWQCVSTPTTPSNTHIGSCPGECNTISYDSVHASCYNHYQQCNIGNKTYLTATITGDRTPAIGDGNVPTVLGTSHNLITAGCPNGKKGQVVCWNSRPSVHISDGGGPQDKARDIIVNKKFEELHRSLFPELSYHPLALPEARGKEKIDAHTLDLLATVHSLLNASQPSLAEDCWLCLQSGDPVPLALPYNDTLCSNFACLSNHSCPLTPPFLVQPFNFTDSNCLYAHYQNNSFDIDVGLASFTNCSSYYNVSTASKPSNSLCAPNSSVFVCGNNKAYTYLPTNWTGSCVLATLLPDIDIIPGSEPVPIPAIDHFLGKAKRAIQLIPLFVGLGITTAVSTGAAGLGVSITQYTKLSHQLISDVQAISSTIQDLQDQVDSLAEVVLQNRRGLDLLTAEQGGICLALQEKCCFYANKSGIVRDKIKNLQDDLERRRRQLIDNPFWTSFHGFLPYVMPLLGPLLCLLLVLSFGPIIFNKLMTFIKHQIESIQAKPIQVHYHRLEQEDSGGSYLTLT

SEQ ID NO: 8436 - protein, 576 aa, synthetic construct
MKLIHIAIWSLVIFFQVSLSRAGFGDPREALAHIQNKHGKPCDCGGGYTQTQPTTYVTSISCGSHTAYSQVGSLKWLCIKAPSTPSGQHVGHCPQDCNTQSYESMHSSCYTSYQQCTLGNKTYFTAAIIKNRSPSVGQSVLGSSHNLITAGCHDTGKTACWNTHPPVHVSDGGGPQDKVREIIVEKKLEEIQKSLFPELSYHPLALPETRGKEMIDPQTFEILTTVHSLLNATKPDLAQDCWLCLRSGTPVPLALPYNNISLLNFTCSSNYSYLVTSPFLVQPFNFSESDCLYAPYQNNSFDIDVGTAQFTNCTNTHNRSSSTPLCAYNGSVFVCGNNKAYTYLPTNWTGLCAVATLIPDIDIIPGDEPVPVPAIDYFISRPKRAVQFIPLLVGLGITTAVSTGAAGLGHSITQYTKLSHQLISDVQAISSTIQDLQDQVDSLAEVVLQNRRGLDLLTAEQGGICLALQEKCCFYTNKSGVVRDKIKRLQDDLEKRRQQLIESPFWTGLNGLLPYLLPLLGPLLCLLLVLTFGPLILNKLMAFIRQQIESIQAKPIQVHYHRLEQEDRCGSYLRIT

SEQ ID NO: 8437 - protein, 585 aa, synthetic construct
MSSKKILIWGLALFIHITQVLAGFGDPREALTLIHQKHGKPCDCAGGIVSSPPTAYVASVSCSTHTAYQVTTSLKWQCVNFPTRSNGASAGICACEVILPSVHATCYSSYQTCKSNGTTYNTAKLLSARNPTMGQSNVPSVLGNSHNLISSGCDKNNVGKQVCWSVTPPVHMSDGGGPQDQAREILVHKKLEELQKALFPELSYHPLALPKARGKEKIDAQTLDLLATVHSLLNESRPDLTDGCWLCLRSGTPIPLAIPTQNLSLANASDLSQFNRAPNDTQLITPPFLVQPFNFTFSPCLYASYQNNSYDIDVSLVRFTNCTFALNVSSPSTPLCAPNGSVFICGNNQAYTYLPHNWTGSCALATLLPDIDIVPGDQPVPVPTIDHLAGRSKRAVQFIPLLVGLGITTAVSTGTASLGYTVTQVTKLSRQLITDVQAISSTIQDLQDQVDSLAEVVLQNRRGLDLLTAEQGGICLALQEKCCFYANKSGIVRDKIKRLQDDLEKRRKQLIDNPFWTGFNGLLPYIVPLLGPLLCLLLVITIGPIIFNRLVAFIKTQIEAIQAKSIQVHYHRLEMEDRGEPYLSI

SEQ ID NO: 8438 - protein, 583 aa, synthetic construct
MKLCLFILLICSSCTYAGFGPPPNPQELIRLLYGNPCDCGGGTTTITPSSYTKTIDCSSKIAYLAYSQTYSGISEQQWTCVSKPTVIPSTQGSPGPCPSSCSSGVYTAIHSSCYTSVQSCTLNNKTYYTAILQRSSPVPSGSAQPEDTKKYAQASCLGTVGKDVCWHTIAPIHISDGGGPSDIQKQSQVAHRLEELAQCLNPLLDYHPLALPKPRDIALDPQTQNILKTTFSLLNATNPSLAQDCWLCVTSGTPLPTAIPTYNVSYIPLDDRTNCSFSPPFRVQPSGFNSSGCLQGPSQNNSYDVEVGFITFSNCHTITNISTPVCSPPGQVFVCGGNLAYTVLPTNWTGLCILASLLPDISIIPGEEPVPLPSFDLAVGRRRRALQAIPLLIGLGITTAMATGGAGVGVATHTYNKLSLQLINDVQTLSGTINDLQDQIDSLAEVVLQNRRGLDLLTAEQGGICLALQERCCFYANKSGIVRDKIKKLQEDLIKRRKELFENPLWTGLNGLLPYLLPILGPLLCLLLLITFGPWAFRHFTDLIKGQIDAILAKPIQIHYQRLAIEDGFGEDHYGSLPTGTTC

SEQ ID NO: 8439 - protein, 583 aa, synthetic construct
MKPVRLLILAALNAVLQLGDAGLQPPVSKSELYDTLYGKPCDCRGGIATNYAIPRIKFKTVDCGQRTAYLASDHSKLGGLRTPQWQCTNKPPIIPTIKGRPGTCPCTSFSNQMHSSCYESVQECTYNNKTYFTAILQRQWGGAVGGDWGPILPGGSHSKYAQASCSGTVAKAVCWSKEAPIHVSDGGGPQDKIKEAKTQKRLEQIMEQLYPKINYHPLALPKSRGVDLDTQTIDILDATHKALNISNPMLAADCWLCMTLGTPMPVALPVNITSYKHNNNCNYSLPFGVQPMGFSSPSCFKGRFQNNSYDIDVGFIAFANCSNYIEYNISMCPDRGTVFVCGDNLAYSALPQNWTGICVLATLLPDIDIISGDDPVPIPSFDYLAGRSKRAISFIPLLVGLGVSGALATGTVGIGMSLHTYTKLSNQLIDDVQALSSTIQDLQDQLDSLEEVVLQNRRGLDLLTAEQGGICLALQEKCCFYANKSGIVRDKIKQLQDDLVKRRKELFDNPLWSGLNGVLPYLLPLLGPLLGLLLLLSFGPMIFNKIKAFIKQQIEAIKVQQIQVHYHCLEQAEQGIPYFDTMA

SEQ ID NO: 8440 - protein, 18 aa, synthetic construct
MGFTTKIIFLYNLVLVYA

SEQ ID NO: 8441 - protein, 545 aa, synthetic construct
GFDDPRKAIELVQKRYGRPCDCSGGQVSEPPSDRVSQVTCSGKTAYLMPDQRWKCKSIPKDTSPSGPLQECPCNSYQSSVHSSCYTSYQQCRSGNKTYYTATLLKTQTGGTSDVQVLGSTNKLIQSPCNGIKGQSICWSTTAPIHVSDGGGPLDTTRIKSVQRKLEEIHKALYPELQYHPLAIPKVRDNLMVDAQTLNILNATYNLLLMSNTSLVDDCWLCLKLGPPTPLAIPNFLLSYVTRSSDNISCLIIPPLLVQPMQFSNSSCLFSPSYNSTEEIDLGHVAFSNCTSITNVTGPICAVNGSVFLCGNNMAYTYLPTNWTGLCVLATLLPDIDIIPGDEPVPIPAIDHFIYRPKRAIQFIPLLAGLGITAAFTTGATGLGVSVTQYTKLSNQLISDVQILSSTIQDLQDQVDSLAEVVLQNRRGLDLLTAEQGGICLALQEKCCFYVNKSGIVRDKIKTLQEELERRRKDLASNPLWTGLQGLLPYLLPFLGPLLTLLLLLTIGPCIFNRLTAFINDKLNIIHAMVLTQQYQVLRTDEEAQD

SEQ ID NO: 8442 - protein, 485 aa, synthetic construct
GFDDPRKAIELVQKRYGRPCDCSGGQVSEPPSDRVSQVTCSGKTAYLMPDQRWKCKSIPKDTSPSGPLQECPCNSYQSSVHSSCYTSYQQCRSGNKTYYTATLLKTQTGGTSDVQVLGSTNKLIQSPCNGIKGQSICWSTTAPIHVSDGGGPLDTTRIKSVQRKLEEIHKALYPELQYHPLAIPKVRDNLMVDAQTLNILNATYNLLLMSNTSLVDDCWLCLKLGPPTPLAIPNFLLSYVTRSSDNISCLIIPPLLVQPMQFSNSSCLFSPSYNSTEEIDLGHVAFSNCTSITNVTGPICAVNGSVFLCGNNMAYTYLPTNWTGLCVLATLLPDIDIIPGDEPVPIPAIDHFIYRPKRAIQFIPLLAGLGITAAFTTGATGLGVSVTQYTKLSNQLISDVQILSSTIQDLQDQVDSLAEVVLQNRRGLDLLTAEQGGICLALQEKCCFYVNKSGIVRDKIKTLQEELERRRKDLASNPLWTGLQG

SEQ ID NO: 8443 - protein, 21 aa, synthetic construct
LLPYLLPFLGPLLTLLLLLTI

SEQ ID NO: 8444 - protein, 39 aa, synthetic construct
GPCIFNRLTAFINDKLNIIHAMVLTQQYQVLRTDEEAQD

SEQ ID NO: 8445 - protein, 524 aa, synthetic construct
MGFTTKIIFLYNLVLVYAGFDDPRKAIELVQKRYGRPCDCSGGQVSEPPSDRVSQVTCSGKTAYLMPDQRWKCKSIPKDTSPSGPLQECPCNSYQSSVHSSCYTSYQQCRSGNKTYYTATLLKTQTGGTSDVQVLGSTNKLIQSPCNGIKGQSICWSTTAPIHVSDGGGPLDTTRIKSVQRKLEEIHKALYPELQYHPLAIPKVRDNLMVDAQTLNILNATYNLLLMSNTSLVDDCWLCLKLGPPTPLAIPNFLLSYVTRSSDNISCLIIPPLLVQPMQFSNSSCLFSPSYNSTEEIDLGHVAFSNCTSITNVTGPICAVNGSVFLCGNNMAYTYLPTNWTGLCVLATLLPDIDIIPGDEPVPIPAIDHFIYRPKRAIQFIPLLAGLGITAAFTTGATGLGVSVTQYTKLSNQLISDVQILSSTIQDLQDQVDSLAEVVLQNRRGLDLLTAEQGGICLALQEKCCFYVNKSGIVRDKIKTLQEELERRRKDLASNPLWTGLQGLLPYLLPFLGPLLTLLLLLTI

SEQ ID NO: 8446 - protein, 22 aa, synthetic construct
GPCIFNRLTAFINDKLNIIHAM

SEQ ID NO: 8447 - protein, 546 aa, synthetic construct; identical to SEQ ID NO: 8417

SEQ ID NO: 8448 - protein, 17 aa, synthetic construct
VLTQQYQVLRTDEEAQD

SEQ ID NO: 8449 - protein, 17 aa, synthetic construct
VLTQQYQVLRTDEEAQD

SEQ ID NO: 8450 - protein, 547 aa, synthetic construct
MGFTTKIIFLYNLVLVYAGFDDPRKAIELVQKRYGRPCDCSGGQVSEPPSDRVSQVTCSGKTAYLMPDQRWKCKSIPKDTSPSGPLQECPCNSYQSSVHSSCYTSYQQCRSGNKTYYTATLLKTQTGGTSDVQVLGSTNKLIQSPCNGIKGQSICWSTTAPIHVSDGGGPLDTTRIKSVQRKLEEIHKALYPELQYHPLAIPKVRDNLMVDAQTLNILNATYNLLLMSNTSLVDDCWLCLKLGPPTPLAIPNFLLSYVTRSSDNISCLIIPPLLVQPMQFSNSSCLFSPSYNSTEEIDLGHVAFSNCTSITNVTGPICAVNGSVFLCGNNMAYTYLPTNWTGLCVLATLLPDIDIIPGDEPVPIPAIDHFIYRPKRAIQFIPLLAGLGITAAFTTGATGLGVSVTQYTKLSNQLISDVQILSSTIQDLQDQVDSLAEVVLQNRRGLDLLTAEQGGICLALQEKCCFYVNKSGIVRDKIKTLQEELERRRKDLASNPLWTGLQGLLPYLLPFLGPLLTLLLLLTIGPCIFNRLTAFINDKLNIIHAMV

SEQ ID NO: 8451 - protein, 548 aa, synthetic construct
MGFTTKIIFLYNLVLVYAGFDDPRKAIELVQKRYGRPCDCSGGQVSEPPSDRVSQVTCSGKTAYLMPDQRWKCKSIPKDTSPSGPLQECPCNSYQSSVHSSCYTSYQQCRSGNKTYYTATLLKTQTGGTSDVQVLGSTNKLIQSPCNGIKGQSICWSTTAPIHVSDGGGPLDTTRIKSVQRKLEEIHKALYPELQYHPLAIPKVRDNLMVDAQTLNILNATYNLLLMSNTSLVDDCWLCLKLGPPTPLAIPNFLLSYVTRSSDNISCLIIPPLLVQPMQFSNSSCLFSPSYNSTEEIDLGHVAFSNCTSITNVTGPICAVNGSVFLCGNNMAYTYLPTNWTGLCVLATLLPDIDIIPGDEPVPIPAIDHFIYRPKRAIQFIPLLAGLGITAAFTTGATGLGVSVTQYTKLSNQLISDVQILSSTIQDLQDQVDSLAEVVLQNRRGLDLLTAEQGGICLALQEKCCFYVNKSGIVRDKIKTLQEELERRRKDLASNPLWTGLQGLLPYLLPFLGPLLTLLLLLTIGPCIFNRLTAFINDKLNIIHAMVL

SEQ ID NO: 8452 - protein, 549 aa, synthetic construct
MGFTTKIIFLYNLVLVYAGFDDPRKAIELVQKRYGRPCDCSGGQVSEPPSDRVSQVTCSGKTAYLMPDQRWKCKSIPKDTSPSGPLQECPCNSYQSSVHSSCYTSYQQCRSGNKTYYTATLLKTQTGGTSDVQVLGSTNKLIQSPCNGIKGQSICWSTTAPIHVSDGGGPLDTTRIKSVQRKLEEIHKALYPELQYHPLAIPKVRDNLMVDAQTLNILNATYNLLLMSNTSLVDDCWLCLKLGPPTPLAIPNFLLSYVTRSSDNISCLIIPPLLVQPMQFSNSSCLFSPSYNSTEEIDLGHVAFSNCTSITNVTGPICAVNGSVFLCGNNMAYTYLPTNWTGLCVLATLLPDIDIIPGDEPVPIPAIDHFIYRPKRAIQFIPLLAGLGITAAFTTGATGLGVSVTQYTKLSNQLISDVQILSSTIQDLQDQVDSLAEVVLQNRRGLDLLTAEQGGICLALQEKCCFYVNKSGIVRDKIKTLQEELERRRKDLASNPLWTGLQGLLPYLLPFLGPLLTLLLLLTIGPCIFNRLTAFINDKLNIIHAMVLT

SEQ ID NO: 8453 - protein, 550 aa, synthetic construct
MGFTTKIIFLYNLVLVYAGFDDPRKAIELVQKRYGRPCDCSGGQVSEPPSDRVSQVTCSGKTAYLMPDQRWKCKSIPKDTSPSGPLQECPCNSYQSSVHSSCYTSYQQCRSGNKTYYTATLLKTQTGGTSDVQVLGSTNKLIQSPCNGIKGQSICWSTTAPIHVSDGGGPLDTTRIKSVQRKLEEIHKALYPELQYHPLAIPKVRDNLMVDAQTLNILNATYNLLLMSNTSLVDDCWLCLKLGPPTPLAIPNFLLSYVTRSSDNISCLIIPPLLVQPMQFSNSSCLFSPSYNSTEEIDLGHVAFSNCTSITNVTGPICAVNGSVFLCGNNMAYTYLPTNWTGLCVLATLLPDIDIIPGDEPVPIPAIDHFIYRPKRAIQFIPLLAGLGITAAFTTGATGLGVSVTQYTKLSNQLISDVQILSSTIQDLQDQVDSLAEVVLQNRRGLDLLTAEQGGICLALQEKCCFYVNKSGIVRDKIKTLQEELERRRKDLASNPLWTGLQGLLPYLLPFLGPLLTLLLLLTIGPCIFNRLTAFINDKLNIIHAMVLTQ

SEQ ID NO: 8454 - protein, 551 aa, synthetic construct
MGFTTKIIFLYNLVLVYAGFDDPRKAIELVQKRYGRPCDCSGGQVSEPPSDRVSQVTCSGKTAYLMPDQRWKCKSIPKDTSPSGPLQECPCNSYQSSVHSSCYTSYQQCRSGNKTYYTATLLKTQTGGTSDVQVLGSTNKLIQSPCNGIKGQSICWSTTAPIHVSDGGGPLDTTRIKSVQRKLEEIHKALYPELQYHPLAIPKVRDNLMVDAQTLNILNATYNLLLMSNTSLVDDCWLCLKLGPPTPLAIPNFLLSYVTRSSDNISCLIIPPLLVQPMQFSNSSCLFSPSYNSTEEIDLGHVAFSNCTSITNVTGPICAVNGSVFLCGNNMAYTYLPTNWTGLCVLATLLPDIDIIPGDEPVPIPAIDHFIYRPKRAIQFIPLLAGLGITAAFTTGATGLGVSVTQYTKLSNQLISDVQILSSTIQDLQDQVDSLAEVVLQNRRGLDLLTAEQGGICLALQEKCCFYVNKSGIVRDKIKTLQEELERRRKDLASNPLWTGLQGLLPYLLPFLGPLLTLLLLLTIGPCIFNRLTAFINDKLNIIHAMVLTQQ

SEQ ID NO: 8455 - protein, 552 aa, synthetic construct
MGFTTKIIFLYNLVLVYAGFDDPRKAIELVQKRYGRPCDCSGGQVSEPPSDRVSQVTCSGKTAYLMPDQRWKCKSIPKDTSPSGPLQECPCNSYQSSVHSSCYTSYQQCRSGNKTYYTATLLKTQTGGTSDVQVLGSTNKLIQSPCNGIKGQSICWSTTAPIHVSDGGGPLDTTRIKSVQRKLEEIHKALYPELQYHPLAIPKVRDNLMVDAQTLNILNATYNLLLMSNTSLVDDCWLCLKLGPPTPLAIPNFLLSYVTRSSDNISCLIIPPLLVQPMQFSNSSCLFSPSYNSTEEIDLGHVAFSNCTSITNVTGPICAVNGSVFLCGNNMAYTYLPTNWTGLCVLATLLPDIDIIPGDEPVPIPAIDHFIYRPKRAIQFIPLLAGLGITAAFTTGATGLGVSVTQYTKLSNQLISDVQILSSTIQDLQDQVDSLAEVVLQNRRGLDLLTAEQGGICLALQEKCCFYVNKSGIVRDKIKTLQEELERRRKDLASNPLWTGLQGLLPYLLPFLGPLLTLLLLLTIGPCIFNRLTAFINDKLNIIHAMVLTQQY

SEQ ID NO: 8456 - protein, 553 aa, synthetic construct
MGFTTKIIFLYNLVLVYAGFDDPRKAIELVQKRYGRPCDCSGGQVSEPPSDRVSQVTCSGKTAYLMPDQRWKCKSIPKDTSPSGPLQECPCNSYQSSVHSSCYTSYQQCRSGNKTYYTATLLKTQTGGTSDVQVLGSTNKLIQSPCNGIKGQSICWSTTAPIHVSDGGGPLDTTRIKSVQRKLEEIHKALYPELQYHPLAIPKVRDNLMVDAQTLNILNATYNLLLMSNTSLVDDCWLCLKLGPPTPLAIPNFLLSYVTRSSDNISCLIIPPLLVQPMQFSNSSCLFSPSYNSTEEIDLGHVAFSNCTSITNVTGPICAVNGSVFLCGNNMAYTYLPTNWTGLCVLATLLPDIDIIPGDEPVPIPAIDHFIYRPKRAIQFIPLLAGLGITAAFTTGATGLGVSVTQYTKLSNQLISDVQILSSTIQDLQDQVDSLAEVVLQNRRGLDLLTAEQGGICLALQEKCCFYVNKSGIVRDKIKTLQEELERRRKDLASNPLWTGLQGLLPYLLPFLGPLLTLLLLLTIGPCIFNRLTAFINDKLNIIHAMVLTQQYQ

SEQ ID NO: 8457 - protein, 554 aa, synthetic construct
MGFTTKIIFLYNLVLVYAGFDDPRKAIELVQKRYGRPCDCSGGQVSEPPSDRVSQVTCSGKTAYLMPDQRWKCKSIPKDTSPSGPLQECPCNSYQSSVHSSCYTSYQQCRSGNKTYYTATLLKTQTGGTSDVQVLGSTNKLIQSPCNGIKGQSICWSTTAPIHVSDGGGPLDTTRIKSVQRKLEEIHKALYPELQYHPLAIPKVRDNLMVDAQTLNILNATYNLLLMSNTSLVDDCWLCLKLGPPTPLAIPNFLLSYVTRSSDNISCLIIPPLLVQPMQFSNSSCLFSPSYNSTEEIDLGHVAFSNCTSITNVTGPICAVNGSVFLCGNNMAYTYLPTNWTGLCVLATLLPDIDIIPGDEPVPIPAIDHFIYRPKRAIQFIPLLAGLGITAAFTTGATGLGVSVTQYTKLSNQLISDVQILSSTIQDLQDQVDSLAEVVLQNRRGLDLLTAEQGGICLALQEKCCFYVNKSGIVRDKIKTLQEELERRRKDLASNPLWTGLQGLLPYLLPFLGPLLTLLLLLTIGPCIFNRLTAFINDKLNIIHAMVLTQQYQV

SEQ ID NO: 8458 - protein, 555 aa, synthetic construct
MGFTTKIIFLYNLVLVYAGFDDPRKAIELVQKRYGRPCDCSGGQVSEPPSDRVSQVTCSGKTAYLMPDQRWKCKSIPKDTSPSGPLQECPCNSYQSSVHSSCYTSYQQCRSGNKTYYTATLLKTQTGGTSDVQVLGSTNKLIQSPCNGIKGQSICWSTTAPIHVSDGGGPLDTTRIKSVQRKLEEIHKALYPELQYHPLAIPKVRDNLMVDAQTLNILNATYNLLLMSNTSLVDDCWLCLKLGPPTPLAIPNFLLSYVTRSSDNISCLIIPPLLVQPMQFSNSSCLFSPSYNSTEEIDLGHVAFSNCTSITNVTGPICAVNGSVFLCGNNMAYTYLPTNWTGLCVLATLLPDIDIIPGDEPVPIPAIDHFIYRPKRAIQFIPLLAGLGITAAFTTGATGLGVSVTQYTKLSNQLISDVQILSSTIQDLQDQVDSLAEVVLQNRRGLDLLTAEQGGICLALQEKCCFYVNKSGIVRDKIKTLQEELERRRKDLASNPLWTGLQGLLPYLLPFLGPLLTLLLLLTIGPCIFNRLTAFINDKLNIIHAMVLTQQYQVL

SEQ ID NO: 8459 - protein, 556 aa, synthetic construct
MGFTTKIIFLYNLVLVYAGFDDPRKAIELVQKRYGRPCDCSGGQVSEPPSDRVSQVTCSGKTAYLMPDQRWKCKSIPKDTSPSGPLQECPCNSYQSSVHSSCYTSYQQCRSGNKTYYTATLLKTQTGGTSDVQVLGSTNKLIQSPCNGIKGQSICWSTTAPIHVSDGGGPLDTTRIKSVQRKLEEIHKALYPELQYHPLAIPKVRDNLMVDAQTLNILNATYNLLLMSNTSLVDDCWLCLKLGPPTPLAIPNFLLSYVTRSSDNISCLIIPPLLVQPMQFSNSSCLFSPSYNSTEEIDLGHVAFSNCTSITNVTGPICAVNGSVFLCGNNMAYTYLPTNWTGLCVLATLLPDIDIIPGDEPVPIPAIDHFIYRPKRAIQFIPLLAGLGITAAFTTGATGLGVSVTQYTKLSNQLISDVQILSSTIQDLQDQVDSLAEVVLQNRRGLDLLTAEQGGICLALQEKCCFYVNKSGIVRDKIKTLQEELERRRKDLASNPLWTGLQGLLPYLLPFLGPLLTLLLLLTIGPCIFNRLTAFINDKLNIIHAMVLTQQYQVLR

SEQ ID NO: 8460 - protein, 557 aa, synthetic construct
MGFTTKIIFLYNLVLVYAGFDDPRKAIELVQKRYGRPCDCSGGQVSEPPSDRVSQVTCSGKTAYLMPDQRWKCKSIPKDTSPSGPLQECPCNSYQSSVHSSCYTSYQQCRSGNKTYYTATLLKTQTGGTSDVQVLGSTNKLIQSPCNGIKGQSICWSTTAPIHVSDGGGPLDTTRIKSVQRKLEEIHKALYPELQYHPLAIPKVRDNLMVDAQTLNILNATYNLLLMSNTSLVDDCWLCLKLGPPTPLAIPNFLLSYVTRSSDNISCLIIPPLLVQPMQFSNSSCLFSPSYNSTEEIDLGHVAFSNCTSITNVTGPICAVNGSVFLCGNNMAYTYLPTNWTGLCVLATLLPDIDIIPGDEPVPIPAIDHFIYRPKRAIQFIPLLAGLGITAAFTTGATGLGVSVTQYTKLSNQLISDVQILSSTIQDLQDQVDSLAEVVLQNRRGLDLLTAEQGGICLALQEKCCFYVNKSGIVRDKIKTLQEELERRRKDLASNPLWTGLQGLLPYLLPFLGPLLTLLLLLTIGPCIFNRLTAFINDKLNIIHAMVLTQQYQVLRT

SEQ ID NO: 8461 - protein, 558 aa, synthetic construct
MGFTTKIIFLYNLVLVYAGFDDPRKAIELVQKRYGRPCDCSGGQVSEPPSDRVSQVTCSGKTAYLMPDQRWKCKSIPKDTSPSGPLQECPCNSYQSSVHSSCYTSYQQCRSGNKTYYTATLLKTQTGGTSDVQVLGSTNKLIQSPCNGIKGQSICWSTTAPIHVSDGGGPLDTTRIKSVQRKLEEIHKALYPELQYHPLAIPKVRDNLMVDAQTLNILNATYNLLLMSNTSLVDDCWLCLKLGPPTPLAIPNFLLSYVTRSSDNISCLIIPPLLVQPMQFSNSSCLFSPSYNSTEEIDLGHVAFSNCTSITNVTGPICAVNGSVFLCGNNMAYTYLPTNWTGLCVLATLLPDIDIIPGDEPVPIPAIDHFIYRPKRAIQFIPLLAGLGITAAFTTGATGLGVSVTQYTKLSNQLISDVQILSSTIQDLQDQVDSLAEVVLQNRRGLDLLTAEQGGICLALQEKCCFYVNKSGIVRDKIKTLQEELERRRKDLASNPLWTGLQGLLPYLLPFLGPLLTLLLLLTIGPCIFNRLTAFINDKLNIIHAMVLTQQYQVLRTD

SEQ ID NO: 8462 - protein, 559 aa, synthetic construct
MGFTTKIIFLYNLVLVYAGFDDPRKAIELVQKRYGRPCDCSGGQVSEPPSDRVSQVTCSGKTAYLMPDQRWKCKSIPKDTSPSGPLQECPCNSYQSSVHSSCYTSYQQCRSGNKTYYTATLLKTQTGGTSDVQVLGSTNKLIQSPCNGIKGQSICWSTTAPIHVSDGGGPLDTTRIKSVQRKLEEIHKALYPELQYHPLAIPKVRDNLMVDAQTLNILNATYNLLLMSNTSLVDDCWLCLKLGPPTPLAIPNFLLSYVTRSSDNISCLIIPPLLVQPMQFSNSSCLFSPSYNSTEEIDLGHVAFSNCTSITNVTGPICAVNGSVFLCGNNMAYTYLPTNWTGLCVLATLLPDIDIIPGDEPVPIPAIDHFIYRPKRAIQFIPLLAGLGITAAFTTGATGLGVSVTQYTKLSNQLISDVQILSSTIQDLQDQVDSLAEVVLQNRRGLDLLTAEQGGICLALQEKCCFYVNKSGIVRDKIKTLQEELERRRKDLASNPLWTGLQGLLPYLLPFLGPLLTLLLLLTIGPCIFNRLTAFINDKLNIIHAMVLTQQYQVLRTDE

SEQ ID NO: 8463 - protein, 560 aa, synthetic construct
MGFTTKIIFLYNLVLVYAGFDDPRKAIELVQKRYGRPCDCSGGQVSEPPSDRVSQVTCSGKTAYLMPDQRWKCKSIPKDTSPSGPLQECPCNSYQSSVHSSCYTSYQQCRSGNKTYYTATLLKTQTGGTSDVQVLGSTNKLIQSPCNGIKGQSICWSTTAPIHVSDGGGPLDTTRIKSVQRKLEEIHKALYPELQYHPLAIPKVRDNLMVDAQTLNILNATYNLLLMSNTSLVDDCWLCLKLGPPTPLAIPNFLLSYVTRSSDNISCLIIPPLLVQPMQFSNSSCLFSPSYNSTEEIDLGHVAFSNCTSITNVTGPICAVNGSVFLCGNNMAYTYLPTNWTGLCVLATLLPDIDIIPGDEPVPIPAIDHFIYRPKRAIQFIPLLAGLGITAAFTTGATGLGVSVTQYTKLSNQLISDVQILSSTIQDLQDQVDSLAEVVLQNRRGLDLLTAEQGGICLALQEKCCFYVNKSGIVRDKIKTLQEELERRRKDLASNPLWTGLQGLLPYLLPFLGPLLTLLLLLTIGPCIFNRLTAFINDKLNIIHAMVLTQQYQVLRTDEE

SEQ ID NO: 8464 - protein, 561 aa, synthetic construct
MGFTTKIIFLYNLVLVYAGFDDPRKAIELVQKRYGRPCDCSGGQVSEPPSDRVSQVTCSGKTAYLMPDQRWKCKSIPKDTSPSGPLQECPCNSYQSSVHSSCYTSYQQCRSGNKTYYTATLLKTQTGGTSDVQVLGSTNKLIQSPCNGIKGQSICWSTTAPIHVSDGGGPLDTTRIKSVQRKLEEIHKALYPELQYHPLAIPKVRDNLMVDAQTLNILNATYNLLLMSNTSLVDDCWLCLKLGPPTPLAIPNFLLSYVTRSSDNISCLIIPPLLVQPMQFSNSSCLFSPSYNSTEEIDLGHVAFSNCTSITNVTGPICAVNGSVFLCGNNMAYTYLPTNWTGLCVLATLLPDIDIIPGDEPVPIPAIDHFIYRPKRAIQFIPLLAGLGITAAFTTGATGLGVSVTQYTKLSNQLISDVQILSSTIQDLQDQVDSLAEVVLQNRRGLDLLTAEQGGICLALQEKCCFYVNKSGIVRDKIKTLQEELERRRKDLASNPLWTGLQGLLPYLLPFLGPLLTLLLLLTIGPCIFNRLTAFINDKLNIIHAMVLTQQYQVLRTDEEA

SEQ ID NO: 8465 - protein, 562 aa, synthetic construct
MGFTTKIIFLYNLVLVYAGFDDPRKAIELVQKRYGRPCDCSGGQVSEPPSDRVSQVTCSGKTAYLMPDQRWKCKSIPKDTSPSGPLQECPCNSYQSSVHSSCYTSYQQCRSGNKTYYTATLLKTQTGGTSDVQVLGSTNKLIQSPCNGIKGQSICWSTTAPIHVSDGGGPLDTTRIKSVQRKLEEIHKALYPELQYHPLAIPKVRDNLMVDAQTLNILNATYNLLLMSNTSLVDDCWLCLKLGPPTPLAIPNFLLSYVTRSSDNISCLIIPPLLVQPMQFSNSSCLFSPSYNSTEEIDLGHVAFSNCTSITNVTGPICAVNGSVFLCGNNMAYTYLPTNWTGLCVLATLLPDIDIIPGDEPVPIPAIDHFIYRPKRAIQFIPLLAGLGITAAFTTGATGLGVSVTQYTKLSNQLISDVQILSSTIQDLQDQVDSLAEVVLQNRRGLDLLTAEQGGICLALQEKCCFYVNKSGIVRDKIKTLQEELERRRKDLASNPLWTGLQGLLPYLLPFLGPLLTLLLLLTIGPCIFNRLTAFINDKLNIIHAMVLTQQYQVLRTDEEAQ

SEQ ID NO: 8466 - protein, 547 aa, synthetic construct
MGFTTKIIFLYNLVLVYAGFDDPRKAIELVQKRYGRPCDCSGGQVSEPPSDRVSQVTCSGKTAYLMPDQRWKCKSIPKDTSPSGPLQECPCNSYQSSVHSSCYTSYQQCRSGNKTYYTATLLKTQTGGTSDVQVLGSTNKLIQSPCNGIKGQSICWSTTAPIHVSDGGGPLDTTRIKSVQRKLEEIHKALYPELQYHPLAIPKVRDNLMVDAQTLNILNATYNLLLMSNTSLVDDCWLCLKLGPPTPLAIPNFLLSYVTRSSDNISCLIIPPLLVQPMQFSNSSCLFSPSYNSTEEIDLGHVAFSNCTSITNVTGPICAVNGSVFLCGNNMAYTYLPTNWTGLCVLATLLPDIDIIPGDEPVPIPAIDHFIYRPKRAIQFIPLLAGLGITAAFTTGATGLGVSVTQYTKLSNQLISDVQILSSTIQDLQDQVDSLAEVVLQNRRGLDLLTAEQGGICLALQEKCCFYVNKSGIVRDKIKTLQEELERRRKDLASNPLWTGLQGLLPYLLPFLGPLLTLLLLLTIGPCIFNRLTAFINDKLNIIHAMW

SEQ ID NO: 8467 - protein, 547 aa, synthetic construct
MGFTTKIIFLYNLVLVYAGFDDPRKAIELVQKRYGRPCDCSGGQVSEPPSDRVSQVTCSGKTAYLMPDQRWKCKSIPKDTSPSGPLQECPCNSYQSSVHSSCYTSYQQCRSGNKTYYTATLLKTQTGGTSDVQVLGSTNKLIQSPCNGIKGQSICWSTTAPIHVSDGGGPLDTTRIKSVQRKLEEIHKALYPELQYHPLAIPKVRDNLMVDAQTLNILNATYNLLLMSNTSLVDDCWLCLKLGPPTPLAIPNFLLSYVTRSSDNISCLIIPPLLVQPMQFSNSSCLFSPSYNSTEEIDLGHVAFSNCTSITNVTGPICAVNGSVFLCGNNMAYTYLPTNWTGLCVLATLLPDIDIIPGDEPVPIPAIDHFIYRPKRAIQFIPLLAGLGITAAFTTGATGLGVSVTQYTKLSNQLISDVQILSSTIQDLQDQVDSLAEVVLQNRRGLDLLTAEQGGICLALQEKCCFYVNKSGIVRDKIKTLQEELERRRKDLASNPLWTGLQGLLPYLLPFLGPLLTLLLLLTIGPCIFNRLTAFINDKLNIIHAMR

SEQ ID NO: 8468 - protein, 547 aa, synthetic construct
MGFTTKIIFLYNLVLVYAGFDDPRKAIELVQKRYGRPCDCSGGQVSEPPSDRVSQVTCSGKTAYLMPDQRWKCKSIPKDTSPSGPLQECPCNSYQSSVHSSCYTSYQQCRSGNKTYYTATLLKTQTGGTSDVQVLGSTNKLIQSPCNGIKGQSICWSTTAPIHVSDGGGPLDTTRIKSVQRKLEEIHKALYPELQYHPLAIPKVRDNLMVDAQTLNILNATYNLLLMSNTSLVDDCWLCLKLGPPTPLAIPNFLLSYVTRSSDNISCLIIPPLLVQPMQFSNSSCLFSPSYNSTEEIDLGHVAFSNCTSITNVTGPICAVNGSVFLCGNNMAYTYLPTNWTGLCVLATLLPDIDIIPGDEPVPIPAIDHFIYRPKRAIQFIPLLAGLGITAAFTTGATGLGVSVTQYTKLSNQLISDVQILSSTIQDLQDQVDSLAEVVLQNRRGLDLLTAEQGGICLALQEKCCFYVNKSGIVRDKIKTLQEELERRRKDLASNPLWTGLQGLLPYLLPFLGPLLTLLLLLTIGPCIFNRLTAFINDKLNIIHAMD

SEQ ID NO: 8469 - protein, 547 aa, synthetic construct
MGFTTKIIFLYNLVLVYAGFDDPRKAIELVQKRYGRPCDCSGGQVSEPPSDRVSQVTCSGKTAYLMPDQRWKCKSIPKDTSPSGPLQECPCNSYQSSVHSSCYTSYQQCRSGNKTYYTATLLKTQTGGTSDVQVLGSTNKLIQSPCNGIKGQSICWSTTAPIHVSDGGGPLDTTRIKSVQRKLEEIHKALYPELQYHPLAIPKVRDNLMVDAQTLNILNATYNLLLMSNTSLVDDCWLCLKLGPPTPLAIPNFLLSYVTRSSDNISCLIIPPLLVQPMQFSNSSCLFSPSYNSTEEIDLGHVAFSNCTSITNVTGPICAVNGSVFLCGNNMAYTYLPTNWTGLCVLATLLPDIDIIPGDEPVPIPAIDHFIYRPKRAIQFIPLLAGLGITAAFTTGATGLGVSVTQYTKLSNQLISDVQILSSTIQDLQDQVDSLAEVVLQNRRGLDLLTAEQGGICLALQEKCCFYVNKSGIVRDKIKTLQEELERRRKDLASNPLWTGLQGLLPYLLPFLGPLLTLLLLLTIGPCIFNRLTAFINDKLNIIHAMY

SEQ ID NO: 8470 - protein, 547 aa, synthetic construct
MGFTTKIIFLYNLVLVYAGFDDPRKAIELVQKRYGRPCDCSGGQVSEPPSDRVSQVTCSGKTAYLMPDQRWKCKSIPKDTSPSGPLQECPCNSYQSSVHSSCYTSYQQCRSGNKTYYTATLLKTQTGGTSDVQVLGSTNKLIQSPCNGIKGQSICWSTTAPIHVSDGGGPLDTTRIKSVQRKLEEIHKALYPELQYHPLAIPKVRDNLMVDAQTLNILNATYNLLLMSNTSLVDDCWLCLKLGPPTPLAIPNFLLSYVTRSSDNISCLIIPPLLVQPMQFSNSSCLFSPSYNSTEEIDLGHVAFSNCTSITNVTGPICAVNGSVFLCGNNMAYTYLPTNWTGLCVLATLLPDIDIIPGDEPVPIPAIDHFIYRPKRAIQFIPLLAGLGITAAFTTGATGLGVSVTQYTKLSNQLISDVQILSSTIQDLQDQVDSLAEVVLQNRRGLDLLTAEQGGICLALQEKCCFYVNKSGIVRDKIKTLQEELERRRKDLASNPLWTGLQGLLPYLLPFLGPLLTLLLLLTIGPCIFNRLTAFINDKLNIIHAMQ

SEQ ID NO: 8471 - protein, 547 aa, synthetic construct
MGFTTKIIFLYNLVLVYAGFDDPRKAIELVQKRYGRPCDCSGGQVSEPPSDRVSQVTCSGKTAYLMPDQRWKCKSIPKDTSPSGPLQECPCNSYQSSVHSSCYTSYQQCRSGNKTYYTATLLKTQTGGTSDVQVLGSTNKLIQSPCNGIKGQSICWSTTAPIHVSDGGGPLDTTRIKSVQRKLEEIHKALYPELQYHPLAIPKVRDNLMVDAQTLNILNATYNLLLMSNTSLVDDCWLCLKLGPPTPLAIPNFLLSYVTRSSDNISCLIIPPLLVQPMQFSNSSCLFSPSYNSTEEIDLGHVAFSNCTSITNVTGPICAVNGSVFLCGNNMAYTYLPTNWTGLCVLATLLPDIDIIPGDEPVPIPAIDHFIYRPKRAIQFIPLLAGLGITAAFTTGATGLGVSVTQYTKLSNQLISDVQILSSTIQDLQDQVDSLAEVVLQNRRGLDLLTAEQGGICLALQEKCCFYVNKSGIVRDKIKTLQEELERRRKDLASNPLWTGLQGLLPYLLPFLGPLLTLLLLLTIGPCIFNRLTAFINDKLNIIHAMH

SEQ ID NO: 8472 - protein, 548 aa, synthetic construct
MGFTTKIIFLYNLVLVYAGFDDPRKAIELVQKRYGRPCDCSGGQVSEPPSDRVSQVTCSGKTAYLMPDQRWKCKSIPKDTSPSGPLQECPCNSYQSSVHSSCYTSYQQCRSGNKTYYTATLLKTQTGGTSDVQVLGSTNKLIQSPCNGIKGQSICWSTTAPIHVSDGGGPLDTTRIKSVQRKLEEIHKALYPELQYHPLAIPKVRDNLMVDAQTLNILNATYNLLLMSNTSLVDDCWLCLKLGPPTPLAIPNFLLSYVTRSSDNISCLIIPPLLVQPMQFSNSSCLFSPSYNSTEEIDLGHVAFSNCTSITNVTGPICAVNGSVFLCGNNMAYTYLPTNWTGLCVLATLLPDIDIIPGDEPVPIPAIDHFIYRPKRAIQFIPLLAGLGITAAFTTGATGLGVSVTQYTKLSNQLISDVQILSSTIQDLQDQVDSLAEVVLQNRRGLDLLTAEQGGICLALQEKCCFYVNKSGIVRDKIKTLQEELERRRKDLASNPLWTGLQGLLPYLLPFLGPLLTLLLLLTIGPCIFNRLTAFINDKLNIIHAMGS

SEQ ID NO: 8473 - protein, 550 aa, synthetic construct
MGFTTKIIFLYNLVLVYAGFDDPRKAIELVQKRYGRPCDCSGGQVSEPPSDRVSQVTCSGKTAYLMPDQRWKCKSIPKDTSPSGPLQECPCNSYQSSVHSSCYTSYQQCRSGNKTYYTATLLKTQTGGTSDVQVLGSTNKLIQSPCNGIKGQSICWSTTAPIHVSDGGGPLDTTRIKSVQRKLEEIHKALYPELQYHPLAIPKVRDNLMVDAQTLNILNATYNLLLMSNTSLVDDCWLCLKLGPPTPLAIPNFLLSYVTRSSDNISCLIIPPLLVQPMQFSNSSCLFSPSYNSTEEIDLGHVAFSNCTSITNVTGPICAVNGSVFLCGNNMAYTYLPTNWTGLCVLATLLPDIDIIPGDEPVPIPAIDHFIYRPKRAIQFIPLLAGLGITAAFTTGATGLGVSVTQYTKLSNQLISDVQILSSTIQDLQDQVDSLAEVVLQNRRGLDLLTAEQGGICLALQEKCCFYVNKSGIVRDKIKTLQEELERRRKDLASNPLWTGLQGLLPYLLPFLGPLLTLLLLLTIGPCIFNRLTAFINDKLNIIHAMGSTS

SEQ ID NO: 8474 - protein, 556 aa, synthetic construct
MGFTTKIIFLYNLVLVYAGFDDPRKAIELVQKRYGRPCDCSGGQVSEPPSDRVSQVTCSGKTAYLMPDQRWKCKSIPKDTSPSGPLQECPCNSYQSSVHSSCYTSYQQCRSGNKTYYTATLLKTQTGGTSDVQVLGSTNKLIQSPCNGIKGQSICWSTTAPIHVSDGGGPLDTTRIKSVQRKLEEIHKALYPELQYHPLAIPKVRDNLMVDAQTLNILNATYNLLLMSNTSLVDDCWLCLKLGPPTPLAIPNFLLSYVTRSSDNISCLIIPPLLVQPMQFSNSSCLFSPSYNSTEEIDLGHVAFSNCTSITNVTGPICAVNGSVFLCGNNMAYTYLPTNWTGLCVLATLLPDIDIIPGDEPVPIPAIDHFIYRPKRAIQFIPLLAGLGITAAFTTGATGLGVSVTQYTKLSNQLISDVQILSSTIQDLQDQVDSLAEVVLQNRRGLDLLTAEQGGICLALQEKCCFYVNKSGIVRDKIKTLQEELERRRKDLASNPLWTGLQGLLPYLLPFLGPLLTLLLLLTIGPCIFNRLTAFINDKLNIIHAMGSTSPVWWNS

SEQ ID NO: 8475 - protein, 562 aa, synthetic construct
MGFTTKIIFLYNLVLVYAGFDDPRKAIELVQKRYGRPCDCSGGQVSEPPSDRVSQVTCSGKTAYLMPDQRWKCKSIPKDTSPSGPLQECPCNSYQSSVHSSCYTSYQQCRSGNKTYYTATLLKTQTGGTSDVQVLGSTNKLIQSPCNGIKGQSICWSTTAPIHVSDGGGPLDTTRIKSVQRKLEEIHKALYPELQYHPLAIPKVRDNLMVDAQTLNILNATYNLLLMSNTSLVDDCWLCLKLGPPTPLAIPNFLLSYVTRSSDNISCLIIPPLLVQPMQFSNSSCLFSPSYNSTEEIDLGHVAFSNCTSITNVTGPICAVNGSVFLCGNNMAYTYLPTNWTGLCVLATLLPDIDIIPGDEPVPIPAIDHFIYRPKRAIQFIPLLAGLGITAAFTTGATGLGVSVTQYTKLSNQLISDVQILSSTIQDLQDQVDSLAEVVLQNRRGLDLLTAEQGGICLALQEKCCFYVNKSGIVRDKIKTLQEELERRRKDLASNPLWTGLQGLLPYLLPFLGPLLTLLLLLTIGPCIFNRLTAFINDKLNIIHAMGSTSPVWWNSADIQHS

SEQ ID NO: 8476 - protein, 576 aa, synthetic construct
MGFTTKIIFLYNLVLVYAGFDDPRKAIELVQKRYGRPCDCSGGQVSEPPSDRVSQVTCSGKTAYLMPDQRWKCKSIPKDTSPSGPLQECPCNSYQSSVHSSCYTSYQQCRSGNKTYYTATLLKTQTGGTSDVQVLGSTNKLIQSPCNGIKGQSICWSTTAPIHVSDGGGPLDTTRIKSVQRKLEEIHKALYPELQYHPLAIPKVRDNLMVDAQTLNILNATYNLLLMSNTSLVDDCWLCLKLGPPTPLAIPNFLLSYVTRSSDNISCLIIPPLLVQPMQFSNSSCLFSPSYNSTEEIDLGHVAFSNCTSITNVTGPICAVNGSVFLCGNNMAYTYLPTNWTGLCVLATLLPDIDIIPGDEPVPIPAIDHFIYRPKRAIQFIPLLAGLGITAAFTTGATGLGVSVTQYTKLSNQLISDVQILSSTIQDLQDQVDSLAEVVLQNRRGLDLLTAEQGGICLALQEKCCFYVNKSGIVRDKIKTLQEELERRRKDLASNPLWTGLQGLLPYLLPFLGPLLTLLLLLTIGPCIFNRLTAFINDKLNIIHAMGSTSPVWWNSADIQHSGGRSSLEGPNKNSS

SEQ ID NO: 8477 - protein, 563 aa, synthetic construct; identical to SEQ ID NO: 8416

SEQ ID NO: 8478 - protein, 580 aa, synthetic construct
MGFTTKIIFLYNLVLVYAGFDDPRKAIELVQKRYGRPCDCSGGQVSEPPSDRVSQVTCSGKTAYLMPDQRWKCKSIPKDTSPSGPLQECPCNSYQSSVHSSCYTSYQQCRSGNKTYYTATLLKTQTGGTSDVQVLGSTNKLIQSPCNGIKGQSICWSTTAPIHVSDGGGPLDTTRIKSVQRKLEEIHKALYPELQYHPLAIPKVRDNLMVDAQTLNILNATYNLLLMSNTSLVDDCWLCLKLGPPTPLAIPNFLLSYVTRSSDNISCLIIPPLLVQPMQFSNSSCLFSPSYNSTEEIDLGHVAFSNCTSITNVTGPICAVNGSVFLCGNNMAYTYLPTNWTGLCVLATLLPDIDIIPGDEPVPIPAIDHFIYRPKRAIQFIPLLAGLGITAAFTTGATGLGVSVTQYTKLSNQLISDVQILSSTIQDLQDQVDSLAEVVLQNRRGLDLLTAEQGGICLALQEKCCFYVNKSGIVRDKIKTLQEELERRRKDLASNPLWTGLQGLLPYLLPFLGPLLTLLLLLTIGPCIFNRLTAFINDKLNIIHAMGSTSPVWWNSADIQHSGGRSSLEGPNKNSSQKRI

SEQ ID NO: 8479 - protein, 856 aa, synthetic construct
MGFTTKIIFLYNLVLVYAGFDDPRKAIELVQKRYGRPCDCSGGQVSEPPSDRVSQVTCSGKTAYLMPDQRWKCKSIPKDTSPSGPLQECPCNSYQSSVHSSCYTSYQQCRSGNKTYYTATLLKTQTGGTSDVQVLGSTNKLIQSPCNGIKGQSICWSTTAPIHVSDGGGPLDTTRIKSVQRKLEEIHKALYPELQYHPLAIPKVRDNLMVDAQTLNILNATYNLLLMSNTSLVDDCWLCLKLGPPTPLAIPNFLLSYVTRSSDNISCLIIPPLLVQPMQFSNSSCLFSPSYNSTEEIDLGHVAFSNCTSITNVTGPICAVNGSVFLCGNNMAYTYLPTNWTGLCVLATLLPDIDIIPGDEPVPIPAIDHFIYRPKRAIQFIPLLAGLGITAAFTTGATGLGVSVTQYTKLSNQLISDVQILSSTIQDLQDQVDSLAEVVLQNRRGLDLLTAEQGGICLALQEKCCFYVNKSGIVRDKIKTLQEELERRRKDLASNPLWTGLQGLLPYLLPFLGPLLTLLLLLTIGPCIFNRLTAFINDKLNIIHAMGSRAKRSGSGATNFSLLKQAGDVEENPGPTSMDWIWRILFLVGAATGAHSFEMKPTENNEDFNIVAVASNFATTDLDADRGKLPGKKLPLEVLKEMEANARKAGCTRGCLICLSHIKCTPKMKKFIPGRCHTYEGDKESAQGGIGEAIVDIPEIPGFKDLEPMEQFIAQVDLCVDCTTGCLKGLANVQCSDLLKKWLPQRCATFASKIQGQVDKIKGAGGDLEQKLISEEDLAKPTTTPAPRPPTPAPTIASQPLSLRPEACRPAAGGAVHTRGLDFACDIYIWAPLAGTCGVLLLSLVITLYCKRGRKK

SEQ ID NO: 8480 - protein, 546 aa, synthetic construct; identical to SEQ ID NO: 8417

SEQ ID NO: 8481 - protein, 546 aa, synthetic construct; identical to SEQ ID NO: 8417

SEQ ID NO: 8482 - protein, 546 aa, synthetic construct; identical to SEQ ID NO: 8417

SEQ ID NO: 8483 - protein, 546 aa, synthetic construct; identical to SEQ ID NO: 8417

SEQ ID NO: 8484 - protein, 546 aa, synthetic construct; identical to SEQ ID NO: 8417

SEQ ID NO: 8485 - protein, 563 aa, synthetic construct
MGFTTKIIFLYNLVLVYAGFDDPRKAIELVQKRYGRPCDCSGGQVSEPPSDRVSQVTCSGKTAYLMPDQRWKCKSIPKDTSPSGPLQECPCNSYQSSVHSSCYTSYQQCRSGNKTYYTATLLKTQTGGTSDVQVLGSTNKLIQSPCNGIKGQSICWSTTAPIHVSDGGGPLDTTRIKSVQRKLEEIHKALYPELQYHPLAIPKVRDNLMVDAQTLNILNATYNLLLMSNTSLVDDCWLCLKLGPPTPLAIPNFLLSYVTRSSDNISCLIIPPLLVQPMQFSNSSCLFSPSYNSTEEIDLGHVAFSNCTSITNVTGPICAVNGSVFLCGNNMAYTYLPTNWTGLCVLATLLPDIDIIPGDEPVPIPAIDHFIYRPKRAIQFIPLLAGLGITAAFTTGATGLGVSVTQYTKLSNQLISDVQILSSTIQDLQDQVDSLAEVVLQNRRGLDLLTAEQGGICLALQEKCCFYVNKSGIVRDKIKTLQEELERRRKDLASNPLWTGLQGLLPYLLPFLGPLLTLLLLLTIGPCIFNRLTAFINDKLNIIHAMVLTQQSQVARTDEEAQD

SEQ ID NO: 8486 - protein, 563 aa, synthetic construct; identical to SEQ ID NO: 8416

SEQ ID NO: 8487 - protein, 580 aa, synthetic construct; identical to SEQ ID NO: 8478

SEQ ID NO: 8488 - protein, 563 aa, synthetic construct; identical to SEQ ID NO: 8416

SEQ ID NO: 8489 - protein, 580 aa, synthetic construct; identical to SEQ ID NO: 8478

SEQ ID NO: 8490 - protein, 563 aa, synthetic construct
MGFTTKIIFLYNLVLVYAGFDDPRKAIELVQKRYGRPCDCSGGQVSEPPSDRVSQVTCSGKTAYLMPDQRWKCKSIPKDTSPSGPLQECPCNSYQSSVHSSCYTSYQQCRSGNKTYYTATLLKTQTGGTSDVQVLGSTNKLIQSPCNGIKGQSICWSTTAPIHVSDGGGPLDTTRIKSVQRKLEEIHKALYPELQYHPLAIPKVRDNLMVDAQTLNILNATYNLLLMSNTSLVDDCWLCLKLGPPTPLAIPNFLLSYVTRSSDNISCLIIPPLLVQPMQFSNSSCLFSPSYNSTEEIDLGHVAFSNCTSITNVTGPICAVNGSVFLCGNNMAYTYLPTNWTGLCVLATLLPDIDIIPGDEPVPIPAIDHFIYRPKRAIQFIPLLAGLGITAAFTTGATGLGVSVTQYTKLSNQLISDVQILSSTIQDLQDQVDSLAEVVLQNRRGLDLLTAEQGGICLALQEKCCFYVNKSGIVRDKLKTLQEELERRRKDLASNPLWTGLQGLLPYLLPFLGPLLTLLLLLTIGPCIFNRLTAFINDKLNIIHAMVLTQQYQVLRTDEEAQD

SEQ ID NO: 8491 - protein, 545 aa, synthetic construct
MGFTTKIIFLYNLVLVYAGFDDPRKAIELVQKRYGRPCDCSGGQVSEPPSDRVSQVTCSGKTAYLMPDQRWKCKSIPKDTSPSGPLQECPCNSYQSSVHSSCYTSYQQCRSGNKTYYTATLLKTQTGGTSDVQVLGSTNKLIQSPCNGIKGQSICWSTTAPIHVSDGGGPLDTTRIKSVQRKLEEIHKALYPELQYHPLAIPKVRDNLMVDAQTLNILNATYNLLLMSNTSLVDDCWLCLKLGPPTPLAIPNFLLSYVTRSSDNISCLIIPPLLVQPMQFSNSSCLFSPSYNSTEEIDLGHVAFSNCTSITNVTGPICAVNGSVFLCGNNMAYTYLPTNWTGLCVLATLLPDIDIIPGDEPVPIPAIDHFIYRPKRAIQFIPLLAGLGITAAFTTGATGLGVSVTQYTKLSQELNGDMERVADSLVTLQDQLNSLAAVVLQNRRALDLLTAERGGTCLFLGEECCYYVNQSGIVTEKVKEIRDRIQRRAEELRNTGPWGLLSQWMPWILPFLGPLAAIILLLLFGPCIFNLLVNFVSSRIEAVKL

SEQ ID NO: 8492 - protein, 552 aa, synthetic construct
MGFTTKIIFLYNLVLVYAGFDDPRKAIELVQKRYGRPCDCSGGQVSEPPSDRVSQVTCSGKTAYLMPDQRWKCKSIPKDTSPSGPLQECPCNSYQSSVHSSCYTSYQQCRSGNKTYYTATLLKTQTGGTSDVQVLGSTNKLIQSPCNGIKGQSICWSTTAPIHVSDGGGPLDTTRIKSVQRKLEEIHKALYPELQYHPLAIPKVRDNLMVDAQTLNILNATYNLLLMSNTSLVDDCWLCLKLGPPTPLAIPNFLLSYVTRSSDNISCLIIPPLLVQPMQFSNSSCLFSPSYNSTEEIDLGHVAFSNCTSITNVTGPICAVNGSVFLCGNNMAYTYLPTNWTGLCVLATLLPDIDIIPGDEPVPIPAIDHFIYRPKRAIQFIPLLAGLGITAAFTTGATGLGVSVTQYTKLSNQLISDVQILSSTIQDLQDQVDSLAEVVLQNRRGLDLLTAEQGGICLALQEKCCFYVNKSGIVRDKLKTLQEELERRRKDLASNPLWTGLQGLLPYLLPFLGPLLTLLLLLTIGPCIFNRLTAFINDKLNIIHAMVLTQQY

SEQ ID NO: 8493 - protein, 562 aa, synthetic construct; identical to SEQ ID NO: 8418

SEQ ID NO: 8494 - protein, 30 aa, synthetic construct
VQFVKDRISVVQALVLTQQYHQLKPLEYEP

SEQ ID NO: 8495 - protein, 547 aa, synthetic construct
MGFTTKIIFLYNLVLVYAGFDDPRKAIELVQKRYGRPCDCSGGQVSEPPSDRVSQVTCSGKTAYLMPDQRWKCKSIPKDTSPSGPLQECPCNSYQSSVHSSCYTSYQQCRSGNKTYYTATLLKTQTGGTSDVQVLGSTNKLIQSPCNGIKGQSICWSTTAPIHVSDGGGPLDTTRIKSVQRKLEEIHKALYPELQYHPLAIPKVRDNLMVDAQTLNILNATYNLLLMSNTSLVDDCWLCLKLGPPTPLAIPNFLLSYVTRSSDNISCLIIPPLLVQPMQFSNSSCLFSPSYNSTEEIDLGHVAFSNCTSITNVTGPICAVNGSVFLCGNNMAYTYLPTNWTGLCVLATLLPDIDIIPGDEPVPIPAIDHFIYRPKRAIQFIPLLAGLGITAAFTTGATGLGVSVTQYTKLSNQLISDVQILSSTIQDLQDQVDSLAEVVLQNRRGLDLLTAEQGGICLALQEKCCFYVNKSGIVRDKIKTLQEELERRRKDLASNPLWTGLQGLLPYLLPFLGPLLTLLLLLTIGPCIFNRLTAFINDKLNIIHAMP

SEQ ID NO: 8496 - protein, 579 aa, synthetic construct
MGFTTKIIFLYNLVLVYAGFDDPRKAIELVQKRYGRPCDCSGGQVSEPPSDRVSQVTCSGKTAYLMPDQRWKCKSIPKDTSPSGPLQECPCNSYQSSVHSSCYTSYQQCRSGNKTYYTATLLKTQTGGTSDVQVLGSTNKLIQSPCNGIKGQSICWSTTAPIHVSDGGGPLDTTRIKSVQRKLEEIHKALYPELQYHPLAIPKVRDNLMVDAQTLNILNATYNLLLMSNTSLVDDCWLCLKLGPPTPLAIPNFLLSYVTRSSDNISCLIIPPLLVQPMQFSNSSCLFSPSYNSTEEIDLGHVAFSNCTSITNVTGPICAVNGSVFLCGNNMAYTYLPTNWTGLCVLATLLPDIDIIPGDEPVPIPAIDHFIYRPKRAIQFIPLLAGLGITAAFTTGATGLGVSVTQYTKLSNQLISDVQILSSTIQDLQDQVDSLAEVVLQNRRGLDLLTAEQGGICLALQEKCCFYVNKSGIVRDKIKTLQEELERRRKDLASNPLWTGLQGLLPYLLPFLGPLLTLLLLLTIGPCIFNRLTAFINDKLNIIHAGSTSPVWWNSADIQHSGGRSSLEGPNKNSSQKRI

SEQ ID NO: 8497 - protein, 578 aa, synthetic construct
MGFTTKIIFLYNLVLVYAGFDDPRKAIELVQKRYGRPCDCSGGQVSEPPSDRVSQVTCSGKTAYLMPDQRWKCKSIPKDTSPSGPLQECPCNSYQSSVHSSCYTSYQQCRSGNKTYYTATLLKTQTGGTSDVQVLGSTNKLIQSPCNGIKGQSICWSTTAPIHVSDGGGPLDTTRIKSVQRKLEEIHKALYPELQYHPLAIPKVRDNLMVDAQTLNILNATYNLLLMSNTSLVDDCWLCLKLGPPTPLAIPNFLLSYVTRSSDNISCLIIPPLLVQPMQFSNSSCLFSPSYNSTEEIDLGHVAFSNCTSITNVTGPICAVNGSVFLCGNNMAYTYLPTNWTGLCVLATLLPDIDIIPGDEPVPIPAIDHFIYRPKRAIQFIPLLAGLGITAAFTTGATGLGVSVTQYTKLSNQLISDVQILSSTIQDLQDQVDSLAEVVLQNRRGLDLLTAEQGGICLALQEKCCFYVNKSGIVRDKIKTLQEELERRRKDLASNPLWTGLQGLLPYLLPFLGPLLTLLLLLTIGPCIFNRLTAFINDKLNIIHGSTSPVWWNSADIQHSGGRSSLEGPNKNSSQKRI

SEQ ID NO: 8498 - protein, 577 aa, synthetic construct
MGFTTKIIFLYNLVLVYAGFDDPRKAIELVQKRYGRPCDCSGGQVSEPPSDRVSQVTCSGKTAYLMPDQRWKCKSIPKDTSPSGPLQECPCNSYQSSVHSSCYTSYQQCRSGNKTYYTATLLKTQTGGTSDVQVLGSTNKLIQSPCNGIKGQSICWSTTAPIHVSDGGGPLDTTRIKSVQRKLEEIHKALYPELQYHPLAIPKVRDNLMVDAQTLNILNATYNLLLMSNTSLVDDCWLCLKLGPPTPLAIPNFLLSYVTRSSDNISCLIIPPLLVQPMQFSNSSCLFSPSYNSTEEIDLGHVAFSNCTSITNVTGPICAVNGSVFLCGNNMAYTYLPTNWTGLCVLATLLPDIDIIPGDEPVPIPAIDHFIYRPKRAIQFIPLLAGLGITAAFTTGATGLGVSVTQYTKLSNQLISDVQILSSTIQDLQDQVDSLAEVVLQNRRGLDLLTAEQGGICLALQEKCCFYVNKSGIVRDKIKTLQEELERRRKDLASNPLWTGLQGLLPYLLPFLGPLLTLLLLLTIGPCIFNRLTAFINDKLNIIGSTSPVWWNSADIQHSGGRSSLEGPNKNSSQKRI

SEQ ID NO: 8499 - protein, 576 aa, synthetic construct
MGFTTKIIFLYNLVLVYAGFDDPRKAIELVQKRYGRPCDCSGGQVSEPPSDRVSQVTCSGKTAYLMPDQRWKCKSIPKDTSPSGPLQECPCNSYQSSVHSSCYTSYQQCRSGNKTYYTATLLKTQTGGTSDVQVLGSTNKLIQSPCNGIKGQSICWSTTAPIHVSDGGGPLDTTRIKSVQRKLEEIHKALYPELQYHPLAIPKVRDNLMVDAQTLNILNATYNLLLMSNTSLVDDCWLCLKLGPPTPLAIPNFLLSYVTRSSDNISCLIIPPLLVQPMQFSNSSCLFSPSYNSTEEIDLGHVAFSNCTSITNVTGPICAVNGSVFLCGNNMAYTYLPTNWTGLCVLATLLPDIDIIPGDEPVPIPAIDHFIYRPKRAIQFIPLLAGLGITAAFTTGATGLGVSVTQYTKLSNQLISDVQILSSTIQDLQDQVDSLAEVVLQNRRGLDLLTAEQGGICLALQEKCCFYVNKSGIVRDKIKTLQEELERRRKDLASNPLWTGLQGLLPYLLPFLGPLLTLLLLLTIGPCIFNRLTAFINDKLNIGSTSPVWWNSADIQHSGGRSSLEGPNKNSSQKRI

SEQ ID NO: 8500 - protein, 575 aa, synthetic construct
MGFTTKIIFLYNLVLVYAGFDDPRKAIELVQKRYGRPCDCSGGQVSEPPSDRVSQVTCSGKTAYLMPDQRWKCKSIPKDTSPSGPLQECPCNSYQSSVHSSCYTSYQQCRSGNKTYYTATLLKTQTGGTSDVQVLGSTNKLIQSPCNGIKGQSICWSTTAPIHVSDGGGPLDTTRIKSVQRKLEEIHKALYPELQYHPLAIPKVRDNLMVDAQTLNILNATYNLLLMSNTSLVDDCWLCLKLGPPTPLAIPNFLLSYVTRSSDNISCLIIPPLLVQPMQFSNSSCLFSPSYNSTEEIDLGHVAFSNCTSITNVTGPICAVNGSVFLCGNNMAYTYLPTNWTGLCVLATLLPDIDIIPGDEPVPIPAIDHFIYRPKRAIQFIPLLAGLGITAAFTTGATGLGVSVTQYTKLSNQLISDVQILSSTIQDLQDQVDSLAEVVLQNRRGLDLLTAEQGGICLALQEKCCFYVNKSGIVRDKIKTLQEELERRRKDLASNPLWTGLQGLLPYLLPFLGPLLTLLLLLTIGPCIFNRLTAFINDKLNGSTSPVWWNSADIQHSGGRSSLEGPNKNSSQKRI

SEQ ID NO: 8501 - protein, 574 aa, synthetic construct
MGFTTKIIFLYNLVLVYAGFDDPRKAIELVQKRYGRPCDCSGGQVSEPPSDRVSQVTCSGKTAYLMPDQRWKCKSIPKDTSPSGPLQECPCNSYQSSVHSSCYTSYQQCRSGNKTYYTATLLKTQTGGTSDVQVLGSTNKLIQSPCNGIKGQSICWSTTAPIHVSDGGGPLDTTRIKSVQRKLEEIHKALYPELQYHPLAIPKVRDNLMVDAQTLNILNATYNLLLMSNTSLVDDCWLCLKLGPPTPLAIPNFLLSYVTRSSDNISCLIIPPLLVQPMQFSNSSCLFSPSYNSTEEIDLGHVAFSNCTSITNVTGPICAVNGSVFLCGNNMAYTYLPTNWTGLCVLATLLPDIDIIPGDEPVPIPAIDHFIYRPKRAIQFIPLLAGLGITAAFTTGATGLGVSVTQYTKLSNQLISDVQILSSTIQDLQDQVDSLAEVVLQNRRGLDLLTAEQGGICLALQEKCCFYVNKSGIVRDKIKTLQEELERRRKDLASNPLWTGLQGLLPYLLPFLGPLLTLLLLLTIGPCIFNRLTAFINDKLGSTSPVWWNSADIQHSGGRSSLEGPNKNSSQKRI

SEQ ID NO: 8502 - protein, 573 aa, synthetic construct
MGFTTKIIFLYNLVLVYAGFDDPRKAIELVQKRYGRPCDCSGGQVSEPPSDRVSQVTCSGKTAYLMPDQRWKCKSIPKDTSPSGPLQECPCNSYQSSVHSSCYTSYQQCRSGNKTYYTATLLKTQTGGTSDVQVLGSTNKLIQSPCNGIKGQSICWSTTAPIHVSDGGGPLDTTRIKSVQRKLEEIHKALYPELQYHPLAIPKVRDNLMVDAQTLNILNATYNLLLMSNTSLVDDCWLCLKLGPPTPLAIPNFLLSYVTRSSDNISCLIIPPLLVQPMQFSNSSCLFSPSYNSTEEIDLGHVAFSNCTSITNVTGPICAVNGSVFLCGNNMAYTYLPTNWTGLCVLATLLPDIDIIPGDEPVPIPAIDHFIYRPKRAIQFIPLLAGLGITAAFTTGATGLGVSVTQYTKLSNQLISDVQILSSTIQDLQDQVDSLAEVVLQNRRGLDLLTAEQGGICLALQEKCCFYVNKSGIVRDKIKTLQEELERRRKDLASNPLWTGLQGLLPYLLPFLGPLLTLLLLLTIGPCIFNRLTAFINDKGSTSPVWWNSADIQHSGGRSSLEGPNKNSSQKRI

SEQ ID NO: 8503 - protein, 538 aa, Homo sapiens; identical to SEQ ID NO: 8421

SEQ ID NO: 8504 - protein, 20 aa, synthetic construct
MALPYHIFLFTVLLPSFTLT

SEQ ID NO: 8505 - protein, 423 aa, synthetic construct
APPPCRCMTSSSPYQEFLWRMQRPGNIDAPSYRSLSKGTPTFTAHTHMPRNCYHSATLCMHANTHYWTGKMINPSCPGGLGVTVCWTYFTQTGMSDGGGVQDQAREKHVKEVISQLTRVHGTSSPYKGLDLSKLHETLRTHTRLVSLFNTTLTGLHEVSAQNPTNCWICLPLNFRPYVSIPVPEQWNNFSTEINTTSVLVGPLVSNLEITHTSNLTCVKFSNTTYTTNSQCIRWVTPPTQIVCLPSGIFFVCGTSAYRCLNGSSESMCFLSFLVPPMTIYTEQDLYSYVISKPRNKRVPILPFVIGAGVLGALGTGIGGITTSTQFYYKLSQELNGDMERVADSLVTLQDQLNSLAAVVLQNRRALDLLTAERGGTCLFLGEECCYYVNQSGIVTEKVKEIRDRIQRRAEELRNTGPWGLLSQ

SEQ ID NO: 8506 - protein, 21 aa, synthetic construct
WMPWILPFLGPLAAIILLLLF

SEQ ID NO: 8507 - protein, 74 aa, synthetic construct
GPCIFNLLVNFVSSRIEAVKLQMEPKMQSKTKIYRRPLDRPASPRSDVNDIKGTPPEEISAAQPLLRPNSAGSS

SEQ ID NO: 8508 - protein, 464 aa, synthetic construct
MALPYHIFLFTVLLPSFTLTAPPPCRCMTSSSPYQEFLWRMQRPGNIDAPSYRSLSKGTPTFTAHTHMPRNCYHSATLCMHANTHYWTGKMINPSCPGGLGVTVCWTYFTQTGMSDGGGVQDQAREKHVKEVISQLTRVHGTSSPYKGLDLSKLHETLRTHTRLVSLFNTTLTGLHEVSAQNPTNCWICLPLNFRPYVSIPVPEQWNNFSTEINTTSVLVGPLVSNLEITHTSNLTCVKFSNTTYTTNSQCIRWVTPPTQIVCLPSGIFFVCGTSAYRCLNGSSESMCFLSFLVPPMTIYTEQDLYSYVISKPRNKRVPILPFVIGAGVLGALGTGIGGITTSTQFYYKLSQELNGDMERVADSLVTLQDQLNSLAAVVLQNRRALDLLTAERGGTCLFLGEECCYYVNQSGIVTEKVKEIRDRIQRRAEELRNTGPWGLLSQWMPWILPFLGPLAAIILLLLF

SEQ ID NO: 8509 - protein, 539 aa, synthetic construct; identical to SEQ ID NO: 8423

SEQ ID NO: 8510 - protein, 21 aa, synthetic construct
METDTLLLWVLLLWVPGSTGD

SEQ ID NO: 8511 - protein, 423 aa, synthetic construct; identical to SEQ ID NO: 8505

SEQ ID NO: 8512 - protein, 21 aa, synthetic construct
WMPWILPFLGPLAAIILLLLF

SEQ ID NO: 8513 - protein, 74 aa, synthetic construct; identical to SEQ ID NO: 8507

SEQ ID NO: 8514 - protein, 489 aa, synthetic construct
MALPYHIFLFTVLLPSFTLTAPPPCRCMTSSSPYQEFLWRMQRPGNIDAPSYRSLSKGTPTFTAHTHMPRNCYHSATLCMHANTHYWTGKMINPSCPGGLGVTVCWTYFTQTGMSDGGGVQDQAREKHVKEVISQLTRVHGTSSPYKGLDLSKLHETLRTHTRLVSLFNTTLTGLHEVSAQNPTNCWICLPLNFRPYVSIPVPEQWNNFSTEINTTSVLVGPLVSNLEITHTSNLTCVKFSNTTYTTNSQCIRWVTPPTQIVCLPSGIFFVCGTSAYRCLNGSSESMCFLSFLVPPMTIYTEQDLYSYVISKPRNKRVPILPFVIGAGVLGALGTGIGGITTSTQFYYKLSQELNGDMERVADSLVTLQDQLNSLAAVVLQNRRALDLLTAERGGTCLFLGEECCYYVNQSGIVTEKVKEIRDRIQRRAEELRNTGPWGLLSQWMPWILPFLGPLAAIILLLLFGPCIFNLLVNFVSSRIEAVKLQMEP

SEQ ID NO: 8515 - protein, 487 aa, synthetic construct
MALPYHIFLFTVLLPSFTLTAPPPCRCMTSSSPYQEFLWRMQRPGNIDAPSYRSLSKGTPTFTAHTHMPRNCYHSATLCMHANTHYWTGKMINPSCPGGLGVTVCWTYFTQTGMSDGGGVQDQAREKHVKEVISQLTRVHGTSSPYKGLDLSKLHETLRTHTRLVSLFNTTLTGLHEVSAQNPTNCWICLPLNFRPYVSIPVPEQWNNFSTEINTTSVLVGPLVSNLEITHTSNLTCVKFSNTTYTTNSQCIRWVTPPTQIVCLPSGIFFVCGTSAYRCLNGSSESMCFLSFLVPPMTIYTEQDLYSYVISKPRNKRVPILPFVIGAGVLGALGTGIGGITTSTQFYYKLSQELNGDMERVADSLVTLQDQLNSLAAVVLQNRRALDLLTAERGGTCLFLGEECCYYVNQSGIVTEKVKEIRDRIQRRAEELRNTGPWGLLSQWMPWILPFLGPLAAIILLLLFGPCIFNLLVNFVSSRIEAVKLQM

SEQ ID NO: 8516 - protein, 488 aa, synthetic construct
MALPYHIFLFTVLLPSFTLTAPPPCRCMTSSSPYQEFLWRMQRPGNIDAPSYRSLSKGTPTFTAHTHMPRNCYHSATLCMHANTHYWTGKMINPSCPGGLGVTVCWTYFTQTGMSDGGGVQDQAREKHVKEVISQLTRVHGTSSPYKGLDLSKLHETLRTHTRLVSLFNTTLTGLHEVSAQNPTNCWICLPLNFRPYVSIPVPEQWNNFSTEINTTSVLVGPLVSNLEITHTSNLTCVKFSNTTYTTNSQCIRWVTPPTQIVCLPSGIFFVCGTSAYRCLNGSSESMCFLSFLVPPMTIYTEQDLYSYVISKPRNKRVPILPFVIGAGVLGALGTGIGGITTSTQFYYKLSQELNGDMERVADSLVTLQDQLNSLAAVVLQNRRALDLLTAERGGTCLFLGEECCYYVNQSGIVTEKVKEIRDRIQRRAEELRNTGPWGLLSQWMPWILPFLGPLAAIILLLLFGPCIFNLLVNFVSSRIEAVKLQME

SEQ ID NO: 8517 - protein, 490 aa, synthetic construct
MALPYHIFLFTVLLPSFTLTAPPPCRCMTSSSPYQEFLWRMQRPGNIDAPSYRSLSKGTPTFTAHTHMPRNCYHSATLCMHANTHYWTGKMINPSCPGGLGVTVCWTYFTQTGMSDGGGVQDQAREKHVKEVISQLTRVHGTSSPYKGLDLSKLHETLRTHTRLVSLFNTTLTGLHEVSAQNPTNCWICLPLNFRPYVSIPVPEQWNNFSTEINTTSVLVGPLVSNLEITHTSNLTCVKFSNTTYTTNSQCIRWVTPPTQIVCLPSGIFFVCGTSAYRCLNGSSESMCFLSFLVPPMTIYTEQDLYSYVISKPRNKRVPILPFVIGAGVLGALGTGIGGITTSTQFYYKLSQELNGDMERVADSLVTLQDQLNSLAAVVLQNRRALDLLTAERGGTCLFLGEECCYYVNQSGIVTEKVKEIRDRIQRRAEELRNTGPWGLLSQWMPWILPFLGPLAAIILLLLFGPCIFNLLVNFVSSRIEAVKLQMEPK

SEQ ID NO: 8518 - protein, 486 aa, synthetic construct
MALPYHIFLFTVLLPSFTLTAPPPCRCMTSSSPYQEFLWRMQRPGNIDAPSYRSLSKGTPTFTAHTHMPRNCYHSATLCMHANTHYWTGKMINPSCPGGLGVTVCWTYFTQTGMSDGGGVQDQAREKHVKEVISQLTRVHGTSSPYKGLDLSKLHETLRTHTRLVSLFNTTLTGLHEVSAQNPTNCWICLPLNFRPYVSIPVPEQWNNFSTEINTTSVLVGPLVSNLEITHTSNLTCVKFSNTTYTTNSQCIRWVTPPTQIVCLPSGIFFVCGTSAYRCLNGSSESMCFLSFLVPPMTIYTEQDLYSYVISKPRNKRVPILPFVIGAGVLGALGTGIGGITTSTQFYYKLSQELNGDMERVADSLVTLQDQLNSLAAVVLQNRRALDLLTAERGGTCLFLGEECCYYVNQSGIVTEKVKEIRDRIQRRAEELRNTGPWGLLSQWMPWILPFLGPLAAIILLLLFGPCIFNLLVNFVSSRIEAVKLQ

SEQ ID NO: 8519 - protein, 485 aa, synthetic construct
MALPYHIFLFTVLLPSFTLTAPPPCRCMTSSSPYQEFLWRMQRPGNIDAPSYRSLSKGTPTFTAHTHMPRNCYHSATLCMHANTHYWTGKMINPSCPGGLGVTVCWTYFTQTGMSDGGGVQDQAREKHVKEVISQLTRVHGTSSPYKGLDLSKLHETLRTHTRLVSLFNTTLTGLHEVSAQNPTNCWICLPLNFRPYVSIPVPEQWNNFSTEINTTSVLVGPLVSNLEITHTSNLTCVKFSNTTYTTNSQCIRWVTPPTQIVCLPSGIFFVCGTSAYRCLNGSSESMCFLSFLVPPMTIYTEQDLYSYVISKPRNKRVPILPFVIGAGVLGALGTGIGGITTSTQFYYKLSQELNGDMERVADSLVTLQDQLNSLAAVVLQNRRALDLLTAERGGTCLFLGEECCYYVNQSGIVTEKVKEIRDRIQRRAEELRNTGPWGLLSQWMPWILPFLGPLAAIILLLLFGPCIFNLLVNFVSSRIEAVKL

SEQ ID NO: 8520 - protein, 519 aa, synthetic construct
MALPYHIFLFTVLLPSFTLTAPPPCRCMTSSSPYQEFLWRMQRPGNIDAPSYRSLSKGTPTFTAHTHMPRNCYHSATLCMHANTHYWTGKMINPSCPGGLGVTVCWTYFTQTGMSDGGGVQDQAREKHVKEVISQLTRVHGTSSPYKGLDLSKLHETLRTHTRLVSLFNTTLTGLHEVSAQNPTNCWICLPLNFRPYVSIPVPEQWNNFSTEINTTSVLVGPLVSNLEITHTSNLTCVKFSNTTYTTNSQCIRWVTPPTQIVCLPSGIFFVCGTSAYRCLNGSSESMCFLSFLVPPMTIYTEQDLYSYVISKPRNKRVPILPFVIGAGVLGALGTGIGGITTSTQFYYKLSQELNGDMERVADSLVTLQDQLNSLAAVVLQNRRALDLLTAERGGTCLFLGEECCYYVNQSGIVTEKVKEIRDRIQRRAEELRNTGPWGLLSQWMPWILPFLGPLAAIILLLLFGPCIFNLLVNFVSSRIEAVKLGSTSPVWWNSADIQHSGGRSSLEGPNKNSSQKRI

SEQ ID NO: 8521 - protein, 520 aa, synthetic construct
METDTLLLWVLLLWVPGSTGDAPPPCRCMTSSSPYQEFLWRMQRPGNIDAPSYRSLSKGTPTFTAHTHMPRNCYHSATLCMHANTHYWTGKMINPSCPGGLGVTVCWTYFTQTGMSDGGGVQDQAREKHVKEVISQLTRVHGTSSPYKGLDLSKLHETLRTHTRLVSLFNTTLTGLHEVSAQNPTNCWICLPLNFRPYVSIPVPEQWNNFSTEINTTSVLVGPLVSNLEITHTSNLTCVKFSNTTYTTNSQCIRWVTPPTQIVCLPSGIFFVCGTSAYRCLNGSSESMCFLSFLVPPMTIYTEQDLYSYVISKPRNKRVPILPFVIGAGVLGALGTGIGGITTSTQFYYKLSQELNGDMERVADSLVTLQDQLNSLAAVVLQNRRALDLLTAERGGTCLFLGEECCYYVNQSGIVTEKVKEIRDRIQRRAEELRNTGPWGLLSQWMPWILPFLGPLAAIILLLLFGPCIFNLLVNFVSSRIEAVKLGSTSPVWWNSADIQHSGGRSSLEGPNKNSSQKRI

SEQ ID NO: 8522 - protein, 481 aa, synthetic construct
METDTLLLWVLLLWVPGSTGDAPPPCRCMTSSSPYQEFLWRMQRPGNIDAPSYRSLSKGTPTFTAHTHMPRNCYHSATLCMHANTHYWTGKMINPSCPGGLGVTVCWTYFTQTGMSDGGGVQDQAREKHVKEVISQLTRVHGTSSPYKGLDLSKLHETLRTHTRLVSLFNTTLTGLHEVSAQNPTNCWICLPLNFRPYVSIPVPEQWNNFSTEINTTSVLVGPLVSNLEITHTSNLTCVKFSNTTYTTNSQCIRWVTPPTQIVCLPSGIFFVCGTSAYRCLNGSSESMCFLSFLVPPMTIYTEQDLYSYVISKPRNKRVPILPFVIGAGVLGALGTGIGGITTSTQFYYKLSQELNGDMERVADSLVTLQDQLNSLAAVVLQNRRALDLLTAERGGTCLFLGEECCYYVNQSGIVTEKVKEIRDRIQRRAEELRNTGPWGLLSQWMPWILPFLGPLAAIILLLLFGPCIFNLLVNFVSSRI

SEQ ID NO: 8523 - protein, 484 aa, synthetic construct
METDTLLLWVLLLWVPGSTGDAPPPCRCMTSSSPYQEFLWRMQRPGNIDAPSYRSLSKGTPTFTAHTHMPRNCYHSATLCMHANTHYWTGKMINPSCPGGLGVTVCWTYFTQTGMSDGGGVQDQAREKHVKEVISQLTRVHGTSSPYKGLDLSKLHETLRTHTRLVSLFNTTLTGLHEVSAQNPTNCWICLPLNFRPYVSIPVPEQWNNFSTEINTTSVLVGPLVSNLEITHTSNLTCVKFSNTTYTTNSQCIRWVTPPTQIVCLPSGIFFVCGTSAYRCLNGSSESMCFLSFLVPPMTIYTEQDLYSYVISKPRNKRVPILPFVIGAGVLGALGTGIGGITTSTQFYYKLSQELNGDMERVADSLVTLQDQLNSLAAVVLQNRRALDLLTAERGGTCLFLGEECCYYVNQSGIVTEKVKEIRDRIQRRAEELRNTGPWGLLSQWMPWILPFLGPLAAIILLLLFGPCIFNLLVNFVSSRIEAV

SEQ ID NO: 8524 - protein, 484 aa, synthetic construct; identical to SEQ ID NO: 8523

SEQ ID NO: 8525 - protein, 485 aa, synthetic construct
METDTLLLWVLLLWVPGSTGDAPPPCRCMTSSSPYQEFLWRMQRPGNIDAPSYRSLSKGTPTFTAHTHMPRNCYHSATLCMHANTHYWTGKMINPSCPGGLGVTVCWTYFTQTGMSDGGGVQDQAREKHVKEVISQLTRVHGTSSPYKGLDLSKLHETLRTHTRLVSLFNTTLTGLHEVSAQNPTNCWICLPLNFRPYVSIPVPEQWNNFSTEINTTSVLVGPLVSNLEITHTSNLTCVKFSNTTYTTNSQCIRWVTPPTQIVCLPSGIFFVCGTSAYRCLNGSSESMCFLSFLVPPMTIYTEQDLYSYVISKPRNKRVPILPFVIGAGVLGALGTGIGGITTSTQFYYKLSQELNGDMERVADSLVTLQDQLNSLAAVVLQNRRALDLLTAERGGTCLFLGEECCYYVNQSGIVTEKVKEIRDRIQRRAEELRNTGPWGLLSQWMPWILPFLGPLAAIILLLLFGPCIFNLLVNFVSSRIEAVK

SEQ ID NO: 8526 - protein, 486 aa, synthetic construct
METDTLLLWVLLLWVPGSTGDAPPPCRCMTSSSPYQEFLWRMQRPGNIDAPSYRSLSKGTPTFTAHTHMPRNCYHSATLCMHANTHYWTGKMINPSCPGGLGVTVCWTYFTQTGMSDGGGVQDQAREKHVKEVISQLTRVHGTSSPYKGLDLSKLHETLRTHTRLVSLFNTTLTGLHEVSAQNPTNCWICLPLNFRPYVSIPVPEQWNNFSTEINTTSVLVGPLVSNLEITHTSNLTCVKFSNTTYTTNSQCIRWVTPPTQIVCLPSGIFFVCGTSAYRCLNGSSESMCFLSFLVPPMTIYTEQDLYSYVISKPRNKRVPILPFVIGAGVLGALGTGIGGITTSTQFYYKLSQELNGDMERVADSLVTLQDQLNSLAAVVLQNRRALDLLTAERGGTCLFLGEECCYYVNQSGIVTEKVKEIRDRIQRRAEELRNTGPWGLLSQWMPWILPFLGPLAAIILLLLFGPCIFNLLVNFVSSRIEAVKL

SEQ ID NO: 8527 - protein, 487 aa, synthetic construct
METDTLLLWVLLLWVPGSTGDAPPPCRCMTSSSPYQEFLWRMQRPGNIDAPSYRSLSKGTPTFTAHTHMPRNCYHSATLCMHANTHYWTGKMINPSCPGGLGVTVCWTYFTQTGMSDGGGVQDQAREKHVKEVISQLTRVHGTSSPYKGLDLSKLHETLRTHTRLVSLFNTTLTGLHEVSAQNPTNCWICLPLNFRPYVSIPVPEQWNNFSTEINTTSVLVGPLVSNLEITHTSNLTCVKFSNTTYTTNSQCIRWVTPPTQIVCLPSGIFFVCGTSAYRCLNGSSESMCFLSFLVPPMTIYTEQDLYSYVISKPRNKRVPILPFVIGAGVLGALGTGIGGITTSTQFYYKLSQELNGDMERVADSLVTLQDQLNSLAAVVLQNRRALDLLTAERGGTCLFLGEECCYYVNQSGIVTEKVKEIRDRIQRRAEELRNTGPWGLLSQWMPWILPFLGPLAAIILLLLFGPCIFNLLVNFVSSRIEAVKLQ

SEQ ID NO: 8528 - protein, 488 aa, synthetic construct
METDTLLLWVLLLWVPGSTGDAPPPCRCMTSSSPYQEFLWRMQRPGNIDAPSYRSLSKGTPTFTAHTHMPRNCYHSATLCMHANTHYWTGKMINPSCPGGLGVTVCWTYFTQTGMSDGGGVQDQAREKHVKEVISQLTRVHGTSSPYKGLDLSKLHETLRTHTRLVSLFNTTLTGLHEVSAQNPTNCWICLPLNFRPYVSIPVPEQWNNFSTEINTTSVLVGPLVSNLEITHTSNLTCVKFSNTTYTTNSQCIRWVTPPTQIVCLPSGIFFVCGTSAYRCLNGSSESMCFLSFLVPPMTIYTEQDLYSYVISKPRNKRVPILPFVIGAGVLGALGTGIGGITTSTQFYYKLSQELNGDMERVADSLVTLQDQLNSLAAVVLQNRRALDLLTAERGGTCLFLGEECCYYVNQSGIVTEKVKEIRDRIQRRAEELRNTGPWGLLSQWMPWILPFLGPLAAIILLLLFGPCIFNLLVNFVSSRIEAVKLQM

SEQ ID NO: 8529 - protein, 505 aa, synthetic construct
METDTLLLWVLLLWVPGSTGDAPPPCRCMTSSSPYQEFLWRMQRPGNIDAPSYRSLSKGTPTFTAHTHMPRNCYHSATLCMHANTHYWTGKMINPSCPGGLGVTVCWTYFTQTGMSDGGGVQDQAREKHVKEVISQLTRVHGTSSPYKGLDLSKLHETLRTHTRLVSLFNTTLTGLHEVSAQNPTNCWICLPLNFRPYVSIPVPEQWNNFSTEINTTSVLVGPLVSNLEITHTSNLTCVKFSNTTYTTNSQCIRWVTPPTQIVCLPSGIFFVCGTSAYRCLNGSSESMCFLSFLVPPMTIYTEQDLYSYVISKPRNKRVPILPFVIGAGVLGALGTGIGGITTSTQFYYKLSQELNGDMERVADSLVTLQDQLNSLAAVVLQNRRALDLLTAERGGTCLFLGEECCYYVNQSGIVTEKVKEIRDRIQRRAEELRNTGPWGLLSQWMPWILPFLGPLAAIILLLLFGPCIFNLLVNFVSSRIEAVKLQMEPKMQSKTKIYRRPLDR

SEQ ID NO: 8530 - protein, 516 aa, synthetic construct
METDTLLLWVLLLWVPGSTGDAPPPCRCMTSSSPYQEFLWRMQRPGNIDAPSYRSLSKGTPTFTAHTHMPRNCYHSATLCMHANTHYWTGKMINPSCPGGLGVTVCWTYFTQTGMSDGGGVQDQAREKHVKEVISQLTRVHGTSSPYKGLDLSKLHETLRTHTRLVSLFNTTLTGLHEVSAQNPTNCWICLPLNFRPYVSIPVPEQWNNFSTEINTTSVLVGPLVSNLEITHTSNLTCVKFSNTTYTTNSQCIRWVTPPTQIVCLPSGIFFVCGTSAYRCLNGSSESMCFLSFLVPPMTIYTEQDLYSYVISKPRNKRVPILPFVIGAGVLGALGTGIGGITTSTQFYYKLSQELNGDMERVADSLVTLQDQLNSLAAVVLQNRRALDLLTAERGGTCLFLGEECCYYVNQSGIVTEKVKEIRDRIQRRAEELRNTGPWGLLSQWMPWILPFLGPLAAIILLLLFGPCIFNLLVNFVSSRIEAVKLQMEPKMQSKTKIYRRPLDRPASPRSDVNDI

SEQ ID NO: 8531 - protein, 498 aa, synthetic construct
METDTLLLWVLLLWVPGSTGDAPPPCRCMTSSSPYQEFLWRMQRPGNIDAPSYRSLSKGTPTFTAHTHMPRNCYHSATLCMHANTHYWTGKMINPSCPGGLGVTVCWTYFTQTGMSDGGGVQDQAREKHVKEVISQLTRVHGTSSPYKGLDLSKLHETLRTHTRLVSLFNTTLTGLHEVSAQNPTNCWICLPLNFRPYVSIPVPEQWNNFSTEINTTSVLVGPLVSNLEITHTSNLTCVKFSNTTYTTNSQCIRWVTPPTQIVCLPSGIFFVCGTSAYRCLNGSSESMCFLSFLVPPMTIYTEQDLYSYVISKPRNKRVPILPFVIGAGVLGALGTGIGGITTSTQFYYKLSQELNGDMERVADSLVTLQDQLNSLAAVVLQNRRALDLLTAERGGTCLFLGEECCYYVNQSGIVTEKVKEIRDRIQRRAEELRNTGPWGLLSQWMPWILPFLGPLAAIILLLLFGPCIFNLLVNFVSSRIEAVKLQMEPKMQSKTKI

SEQ ID NO: 8532 - protein, 493 aa, synthetic construct
METDTLLLWVLLLWVPGSTGDAPPPCRCMTSSSPYQEFLWRMQRPGNIDAPSYRSLSKGTPTFTAHTHMPRNCYHSATLCMHANTHYWTGKMINPSCPGGLGVTVCWTYFTQTGMSDGGGVQDQAREKHVKEVISQLTRVHGTSSPYKGLDLSKLHETLRTHTRLVSLFNTTLTGLHEVSAQNPTNCWICLPLNFRPYVSIPVPEQWNNFSTEINTTSVLVGPLVSNLEITHTSNLTCVKFSNTTYTTNSQCIRWVTPPTQIVCLPSGIFFVCGTSAYRCLNGSSESMCFLSFLVPPMTIYTEQDLYSYVISKPRNKRVPILPFVIGAGVLGALGTGIGGITTSTQFYYKLSQELNGDMERVADSLVTLQDQLNSLAAVVLQNRRALDLLTAERGGTCLFLGEECCYYVNQSGIVTEKLKTLQEELERRRKDLASNPLWTGLQGLLPYLLPFLGPLLTLLLLLTIGPCIFNRLTAFINDKLNIIHAMVLTQQY

SEQ ID NO: 8533 - protein, 492 aa, synthetic construct
METDTLLLWVLLLWVPGSTGDAPPPCRCMTSSSPYQEFLWRMQRPGNIDAPSYRSLSKGTPTFTAHTHMPRNCYHSATLCMHANTHYWTGKMINPSCPGGLGVTVCWTYFTQTGMSDGGGVQDQAREKHVKEVISQLTRVHGTSSPYKGLDLSKLHETLRTHTRLVSLFNTTLTGLHEVSAQNPTNCWICLPLNFRPYVSIPVPEQWNNFSTEINTTSVLVGPLVSNLEITHTSNLTCVKFSNTTYTTNSQCIRWVTPPTQIVCLPSGIFFVCGTSAYRCLNGSSESMCFLSFLVPPMTIYTEQDLYSYVISKPRNKRVPILPFVIGAGVLGALGTGIGGITTSTQFYYKLSQELNGDMERVADSLVTLQDQLNSLAAVVLQNRRALDLLTAERGGTCLFLGEECCYYVNQSGIVTEKLKEIRDRIQRRAEELRNTGPWGLLQGLLPYLLPFLGPLLTLLLLLTIGPCIFNRLTAFINDKLNIIHAMVLTQQ

SEQ ID NO: 8534 - protein, 494 aa, synthetic construct
METDTLLLWVLLLWVPGSTGDAPPPCRCMTSSSPYQEFLWRMQRPGNIDAPSYRSLSKGTPTFTAHTHMPRNCYHSATLCMHANTHYWTGKMINPSCPGGLGVTVCWTYFTQTGMSDGGGVQDQAREKHVKEVISQLTRVHGTSSPYKGLDLSKLHETLRTHTRLVSLFNTTLTGLHEVSAQNPTNCWICLPLNFRPYVSIPVPEQWNNFSTEINTTSVLVGPLVSNLEITHTSNLTCVKFSNTTYTTNSQCIRWVTPPTQIVCLPSGIFFVCGTSAYRCLNGSSESMCFLSFLVPPMTIYTEQDLYSYVISKPRNKRVPILPFVIGAGVLGALGTGIGGITTSTQFYYKLSQELNGDMERVADSLVTLQDQLNSLAAVVLQNRRALDLLTAERGGTCLFLGEECCYYVNQSGIVTEKLKEIRDRIQRRAEELRNTGPWGLLQGLLPYLLPFLGPLLTLLLLLTIGPCIFNRLTAFINDKLNIIHAMVLTQQYQ

SEQ ID NO: 8535 - protein, 496 aa, synthetic construct
METDTLLLWVLLLWVPGSTGDAPPPCRCMTSSSPYQEFLWRMQRPGNIDAPSYRSLSKGTPTFTAHTHMPRNCYHSATLCMHANTHYWTGKMINPSCPGGLGVTVCWTYFTQTGMSDGGGVQDQAREKHVKEVISQLTRVHGTSSPYKGLDLSKLHETLRTHTRLVSLFNTTLTGLHEVSAQNPTNCWICLPLNFRPYVSIPVPEQWNNFSTEINTTSVLVGPLVSNLEITHTSNLTCVKFSNTTYTTNSQCIRWVTPPTQIVCLPSGIFFVCGTSAYRCLNGSSESMCFLSFLVPPMTIYTEQDLYSYVISKPRNKRVPILPFVIGAGVLGALGTGIGGITTSTQFYYKLSQELNGDMERVADSLVTLQDQLNSLAAVVLQNRRALDLLTAERGGTCLFLGEECCYYVNQSGIVTEKLKEIRDRIQRRRKDLASNPLWTGLQGLLPYLLPFLGPLLTLLLLLTIGPCIFNRLTAFINDKLNIIHAMVLTQQYQVL

SEQ ID NO: 8536 - protein, 494 aa, synthetic construct
METDTLLLWVLLLWVPGSTGDAPPPCRCMTSSSPYQEFLWRMQRPGNIDAPSYRSLSKGTPTFTAHTHMPRNCYHSATLCMHANTHYWTGKMINPSCPGGLGVTVCWTYFTQTGMSDGGGVQDQAREKHVKEVISQLTRVHGTSSPYKGLDLSKLHETLRTHTRLVSLFNTTLTGLHEVSAQNPTNCWICLPLNFRPYVSIPVPEQWNNFSTEINTTSVLVGPLVSNLEITHTSNLTCVKFSNTTYTTNSQCIRWVTPPTQIVCLPSGIFFVCGTSAYRCLNGSSESMCFLSFLVPPMTIYTEQDLYSYVISKPRNKRVPILPFVIGAGVLGALGTGIGGITTSTQFYYKLSQELNGDMERVADSLVTLQDQLNSLAAVVLQNRRALDLLTAERGGTCLFLGEECCYYVNQSGIVTEKLKEIRDRIQRRAEELRNTGPWGLLSQWMPWILPFLGPLAAIILLLLFGPCIFNRLTAFINDKLNIIHAMVLTQQYQ

SEQ ID NO: 8537 - protein, 504 aa, synthetic construct
METDTLLLWVLLLWVPGSTGDAPPPCRCMTSSSPYQEFLWRMQRPGNIDAPSYRSLSKGTPTFTAHTHMPRNCYHSATLCMHANTHYWTGKMINPSCPGGLGVTVCWTYFTQTGMSDGGGVQDQAREKHVKEVISQLTRVHGTSSPYKGLDLSKLHETLRTHTRLVSLFNTTLTGLHEVSAQNPTNCWICLPLNFRPYVSIPVPEQWNNFSTEINTTSVLVGPLVSNLEITHTSNLTCVKFSNTTYTTNSQCIRWVTPPTQIVCLPSGIFFVCGTSAYRCLNGSSESMCFLSFLVPPMTIYTEQDLYSYVISKPRNKRVPILPFVIGAGVLGALGTGIGGITTSTQFYYKLSQELNGDMERVADSLVTLQDQLNSLAAVVLQNRRALDLLTAERGGTCLFLGEECCYYVNQSGIVTEKLKTLQEELERRRKDLASNPLWTGLQGLLPYLLPFLGPLLTLLLLLTIGPCIFNRLTAFINDKLNIIHAMVLTQQYQVLRTDEEAQD

SEQ ID NO: 8538 - protein, 589 aa, synthetic construct
METDTLLLWVLLLWVPGSTGDAPPPCRCMTSSSPYQEFLWRMQRPGNIDAPSYRSLSKGTPTFTAHTHMPRNCYHSATLCMHANTHYWTGKMINPSCPGGLGVTVCWTYFTQTGMSDGGGVQDQAREKHVKEVISQLTRVHGTSSPYKGLDLSKLHETLRTHTRLVSLFNTTLTGLHEVSAQNPTNCWICLPLNFRPYVSIPVPEQWNNFSTEINTTSVLVGPLVSNLEITHTSNLTCVKFSNTTYTTNSQCIRWVTPPTQIVCLPSGIFFVCGTSAYRCLNGSSESMCFLSFLVPPMTIYTEQDLYSYVISKPRNKRVPILPFVIGAGVLGALGTGIGGITTSTQFYYKLSQELNGDMERVADSLVTLQDQLNSLAAVVLQNRRALDLLTAERGGTCLFLGEECCYYVNQSGIVTEKLSNQLISDVQILSSTIQDLQDQVDSLAEVVLQNRRGLDLLTAEQGGICLALQEKCCFYVNKSGIVRDKIKTLQEELERRRKDLASNPLWTGLQGLLPYLLPFLGPLLTLLLLLTIGPCIFNRLTAFINDKLNIIHAMGSTSPVWWNSADIQHSGGRSSLEGPNKNSSQKRI

SEQ ID NO: 8539 - protein, 525 aa, synthetic construct
METDTLLLWVLLLWVPGSTGDAPPPCRCMTSSSPYQEFLWRMQRPGNIDAPSYRSLSKGTPTFTAHTHMPRNCYHSATLCMHANTHYWTGKMINPSCPGGLGVTVCWTYFTQTGMSDGGGVQDQAREKHVKEVISQLTRVHGTSSPYKGLDLSKLHETLRTHTRLVSLFNTTLTGLHEVSAQNPTNCWICLPLNFRPYVSIPVPEQWNNFSTEINTTSVLVGPLVSNLEITHTSNLTCVKFSNTTYTTNSQCIRWVTPPTQIVCLPSGIFFVCGTSAYRCLNGSSESMCFLSFLVPPMTIYTEQDLYSYVISKPRNKRVPILPFVIGAGVLGALGTGIGGITTSTQFYYKLSQELNGDMERVADSLVTLQDQLNSLAAVVLQNRRALDLLTAERGGTCLFLGEECCYYVNQSGIVTEKVKEIRDRIQRRAEELRNTGPWGLLSQWMPWILPFLGPLAAIILLLLFGPCIFNLLVNFVSSRIEAVKLQMEPKMQSKTKIYRRPLDRPASPRSDVNDIKGTPPEEIS

SEQ ID NO: 8540 - protein, 479 aa, synthetic construct
METDTLLLWVLLLWVPGSTGDAPPPCRCMTSSSPYQEFLWRMQRPGNIDAPSYRSLSKGTPTFTAHTHMPRNCYHSATLCMHANTHYWTGKMINPSCPGGLGVTVCWTYFTQTGMSDGGGVQDQAREKHVKEVISQLTRVHGTSSPYKGLDLSKLHETLRTHTRLVSLFNTTLTGLHEVSAQNPTNCWICLPLNFRPYVSIPVPEQWNNFSTEINTTSVLVGPLVSNLEITHTSNLTCVKFSNTTYTTNSQCIRWVTPPTQIVCLPSGIFFVCGTSAYRCLNGSSESMCFLSFLVPPMTIYTEQDLYSYVISKPRNKRVPILPFVIGAGVLGALGTGIGGITTSTQFYYKLSQELNGDMERVADSLVTLQDQLNSLAAVVLQNRRALDLLTAERGGTCLFLGEECCYYVNQSGIVTEKVKEIRDRIQRRAEELRNTGPWGLLSQWMPWILPFLGPLAAIILLLLFGPCIFNLLVNFVSS

SEQ ID NO: 8541 - protein, 478 aa, synthetic construct
METDTLLLWVLLLWVPGSTGDAPPPCRCMTSSSPYQEFLWRMQRPGNIDAPSYRSLSKGTPTFTAHTHMPRNCYHSATLCMHANTHYWTGKMINPSCPGGLGVTVCWTYFTQTGMSDGGGVQDQAREKHVKEVISQLTRVHGTSSPYKGLDLSKLHETLRTHTRLVSLFNTTLTGLHEVSAQNPTNCWICLPLNFRPYVSIPVPEQWNNFSTEINTTSVLVGPLVSNLEITHTSNLTCVKFSNTTYTTNSQCIRWVTPPTQIVCLPSGIFFVCGTSAYRCLNGSSESMCFLSFLVPPMTIYTEQDLYSYVISKPRNKRVPILPFVIGAGVLGALGTGIGGITTSTQFYYKLSQELNGDMERVADSLVTLQDQLNSLAAVVLQNRRALDLLTAERGGTCLFLGEECCYYVNQSGIVTEKVKEIRDRIQRRAEELRNTGPWGLLSQWMPWILPFLGPLAAIILLLLFGPCIFNLLVNFVS

SEQ ID NO: 8542 - protein, 526 aa, synthetic construct
METDTLLLWVLLLWVPGSTGDAPPPCRCMTSSSPYQEFLWRMQRPGNIDAPSYRSLSKGTPTFTAHTHMPRNCYHSATLCMHANTHYWTGKMINPSCPGGLGVTVCWTYFTQTGMSDGGGVQDQAREKHVKEVISQLTRVHGTSSPYKGLDLSKLHETLRTHTRLVSLFNTTLTGLHEVSAQNPTNCWICLPLNFRPYVSIPVPEQWNNFSTEINTTSVLVGPLVSNLEITHTSNLTCVKFSNTTYTTNSQCIRWVTPPTQIVCLPSGIFFVCGTSAYRCLNGSSESMCFLSFLVPPMTIYTEQDLYSYVISKPRNKRVPILPFVIGAGVLGALGTGIGGITTSTQFYYKLSQELNGDMERVADSLVTLQDQLNSLAAVVLQNRRALDLLTAERGGTCLFLGEECCYYVNQSGIVTEKVKEIRDRIQRRAEELRNTGPWGLLSQWMPWILPFLGPLAAIILLLLFGPCIFNLLVNFVSSRIEAVKLQMEPKMQSKTKIYRRPLDRPASPRSDVNDIKGTPPEEISA

SEQ ID NO: 8543 - protein, 529 aa, synthetic construct
METDTLLLWVLLLWVPGSTGDAPPPCRCMTSSSPYQEFLWRMQRPGNIDAPSYRSLSKGTPTFTAHTHMPRNCYHSATLCMHANTHYWTGKMINPSCPGGLGVTVCWTYFTQTGMSDGGGVQDQAREKHVKEVISQLTRVHGTSSPYKGLDLSKLHETLRTHTRLVSLFNTTLTGLHEVSAQNPTNCWICLPLNFRPYVSIPVPEQWNNFSTEINTTSVLVGPLVSNLEITHTSNLTCVKFSNTTYTTNSQCIRWVTPPTQIVCLPSGIFFVCGTSAYRCLNGSSESMCFLSFLVPPMTIYTEQDLYSYVISKPRNKRVPILPFVIGAGVLGALGTGIGGITTSTQFYYKLSQELNGDMERVADSLVTLQDQLNSLAAVVLQNRRALDLLTAERGGTCLFLGEECCYYVNQSGIVTEKVKEIRDRIQRRAEELRNTGPWGLLSQWMPWILPFLGPLAAIILLLLFGPCIFNLLVNFVSSRIEAVKLQMEPKMQSKTKIYRRPLDRPASPRSDVNDIKGTPPEEISAAQP

SEQ ID NO: 8544 - protein, 532 aa, synthetic construct
METDTLLLWVLLLWVPGSTGDAPPPCRCMTSSSPYQEFLWRMQRPGNIDAPSYRSLSKGTPTFTAHTHMPRNCYHSATLCMHANTHYWTGKMINPSCPGGLGVTVCWTYFTQTGMSDGGGVQDQAREKHVKEVISQLTRVHGTSSPYKGLDLSKLHETLRTHTRLVSLFNTTLTGLHEVSAQNPTNCWICLPLNFRPYVSIPVPEQWNNFSTEINTTSVLVGPLVSNLEITHTSNLTCVKFSNTTYTTNSQCIRWVTPPTQIVCLPSGIFFVCGTSAYRCLNGSSESMCFLSFLVPPMTIYTEQDLYSYVISKPRNKRVPILPFVIGAGVLGALGTGIGGITTSTQFYYKLSQELNGDMERVADSLVTLQDQLNSLAAVVLQNRRALDLLTAERGGTCLFLGEECCYYVNQSGIVTEKVKEIRDRIQRRAEELRNTGPWGLLSQWMPWILPFLGPLAAIILLLLFGPCIFNLLVNFVSSRIEAVKLQMEPKMQSKTKIYRRPLDRPASPRSDVNDIKGTPPEEISAAQPLLR

SEQ ID NO: 8545 - protein, 501 aa, synthetic construct
METDTLLLWVLLLWVPGSTGDAPPPCRCMTSSSPYQEFLWRMQRPGNIDAPSYRSLSKGTPTFTAHTHMPRNCYHSATLCMHANTHYWTGKMINPSCPGGLGVTVCWTYFTQTGMSDGGGVQDQAREKHVKEVISQLTRVHGTSSPYKGLDLSKLHETLRTHTRLVSLFNTTLTGLHEVSAQNPTNCWICLPLNFRPYVSIPVPEQWNNFSTEINTTSVLVGPLVSNLEITHTSNLTCVKFSNTTYTTNSQCIRWVTPPTQIVCLPSGIFFVCGTSAYRCLNGSSESMCFLSFLVPPMTIYTEQDLYSYVISKPRNKRVPILPFVIGAGVLGALGTGIGGITTSTQFYYKLSQELNGDMERVADSLVTLQDQLNSLAAVVLQNRRALDLLTAERGGTCLFLGEECCYYVNQSGIVTEKLKEIRDRIQRRRKDLASNPLWTGLQGLLPYLLPFLGPLLTLLLLLTIGPCIFNRLTAFINDKLNIIHAMVLTQQYQVLRTDEE

SEQ ID NO: 8546 - protein, 500 aa, synthetic construct
METDTLLLWVLLLWVPGSTGDAPPPCRCMTSSSPYQEFLWRMQRPGNIDAPSYRSLSKGTPTFTAHTHMPRNCYHSATLCMHANTHYWTGKMINPSCPGGLGVTVCWTYFTQTGMSDGGGVQDQAREKHVKEVISQLTRVHGTSSPYKGLDLSKLHETLRTHTRLVSLFNTTLTGLHEVSAQNPTNCWICLPLNFRPYVSIPVPEQWNNFSTEINTTSVLVGPLVSNLEITHTSNLTCVKFSNTTYTTNSQCIRWVTPPTQIVCLPSGIFFVCGTSAYRCLNGSSESMCFLSFLVPPMTIYTEQDLYSYVISKPRNKRVPILPFVIGAGVLGALGTGIGGITTSTQFYYKLSQELNGDMERVADSLVTLQDQLNSLAAVVLQNRRALDLLTAERGGTCLFLGEECCYYVNQSGIVTEKLKEIRDRIQRRRKDLASNPLWTGLQGLLPYLLPFLGPLLTLLLLLTIGPCIFNRLTAFINDKLNIIHAMVLTQQYQVLRTDE

SEQ ID NO: 8547 - protein, 499 aa, synthetic construct
METDTLLLWVLLLWVPGSTGDAPPPCRCMTSSSPYQEFLWRMQRPGNIDAPSYRSLSKGTPTFTAHTHMPRNCYHSATLCMHANTHYWTGKMINPSCPGGLGVTVCWTYFTQTGMSDGGGVQDQAREKHVKEVISQLTRVHGTSSPYKGLDLSKLHETLRTHTRLVSLFNTTLTGLHEVSAQNPTNCWICLPLNFRPYVSIPVPEQWNNFSTEINTTSVLVGPLVSNLEITHTSNLTCVKFSNTTYTTNSQCIRWVTPPTQIVCLPSGIFFVCGTSAYRCLNGSSESMCFLSFLVPPMTIYTEQDLYSYVISKPRNKRVPILPFVIGAGVLGALGTGIGGITTSTQFYYKLSQELNGDMERVADSLVTLQDQLNSLAAVVLQNRRALDLLTAERGGTCLFLGEECCYYVNQSGIVTEKLKEIRDRIQRRRKDLASNPLWTGLQGLLPYLLPFLGPLLTLLLLLTIGPCIFNRLTAFINDKLNIIHAMVLTQQYQVLRTD

SEQ ID NO: 8548 - protein, 498 aa, synthetic construct
METDTLLLWVLLLWVPGSTGDAPPPCRCMTSSSPYQEFLWRMQRPGNIDAPSYRSLSKGTPTFTAHTHMPRNCYHSATLCMHANTHYWTGKMINPSCPGGLGVTVCWTYFTQTGMSDGGGVQDQAREKHVKEVISQLTRVHGTSSPYKGLDLSKLHETLRTHTRLVSLFNTTLTGLHEVSAQNPTNCWICLPLNFRPYVSIPVPEQWNNFSTEINTTSVLVGPLVSNLEITHTSNLTCVKFSNTTYTTNSQCIRWVTPPTQIVCLPSGIFFVCGTSAYRCLNGSSESMCFLSFLVPPMTIYTEQDLYSYVISKPRNKRVPILPFVIGAGVLGALGTGIGGITTSTQFYYKLSQELNGDMERVADSLVTLQDQLNSLAAVVLQNRRALDLLTAERGGTCLFLGEECCYYVNQSGIVTEKLKEIRDRIQRRRKDLASNPLWTGLQGLLPYLLPFLGPLLTLLLLLTIGPCIFNRLTAFINDKLNIIHAMVLTQQYQVLRT

SEQ ID NO: 8549 - protein, 497 aa, synthetic construct
METDTLLLWVLLLWVPGSTGDAPPPCRCMTSSSPYQEFLWRMQRPGNIDAPSYRSLSKGTPTFTAHTHMPRNCYHSATLCMHANTHYWTGKMINPSCPGGLGVTVCWTYFTQTGMSDGGGVQDQAREKHVKEVISQLTRVHGTSSPYKGLDLSKLHETLRTHTRLVSLFNTTLTGLHEVSAQNPTNCWICLPLNFRPYVSIPVPEQWNNFSTEINTTSVLVGPLVSNLEITHTSNLTCVKFSNTTYTTNSQCIRWVTPPTQIVCLPSGIFFVCGTSAYRCLNGSSESMCFLSFLVPPMTIYTEQDLYSYVISKPRNKRVPILPFVIGAGVLGALGTGIGGITTSTQFYYKLSQELNGDMERVADSLVTLQDQLNSLAAVVLQNRRALDLLTAERGGTCLFLGEECCYYVNQSGIVTEKLKEIRDRIQRRRKDLASNPLWTGLQGLLPYLLPFLGPLLTLLLLLTIGPCIFNRLTAFINDKLNIIHAMVLTQQYQVLR

SEQ ID NO: 8550 - protein, 496 aa, synthetic construct; identical to SEQ ID NO: 8535

SEQ ID NO: 8551 - protein, 495 aa, synthetic construct
METDTLLLWVLLLWVPGSTGDAPPPCRCMTSSSPYQEFLWRMQRPGNIDAPSYRSLSKGTPTFTAHTHMPRNCYHSATLCMHANTHYWTGKMINPSCPGGLGVTVCWTYFTQTGMSDGGGVQDQAREKHVKEVISQLTRVHGTSSPYKGLDLSKLHETLRTHTRLVSLFNTTLTGLHEVSAQNPTNCWICLPLNFRPYVSIPVPEQWNNFSTEINTTSVLVGPLVSNLEITHTSNLTCVKFSNTTYTTNSQCIRWVTPPTQIVCLPSGIFFVCGTSAYRCLNGSSESMCFLSFLVPPMTIYTEQDLYSYVISKPRNKRVPILPFVIGAGVLGALGTGIGGITTSTQFYYKLSQELNGDMERVADSLVTLQDQLNSLAAVVLQNRRALDLLTAERGGTCLFLGEECCYYVNQSGIVTEKLKEIRDRIQRRRKDLASNPLWTGLQGLLPYLLPFLGPLLTLLLLLTIGPCIFNRLTAFINDKLNIIHAMVLTQQYQV

SEQ ID NO: 8552 - protein, 494 aa, synthetic construct
METDTLLLWVLLLWVPGSTGDAPPPCRCMTSSSPYQEFLWRMQRPGNIDAPSYRSLSKGTPTFTAHTHMPRNCYHSATLCMHANTHYWTGKMINPSCPGGLGVTVCWTYFTQTGMSDGGGVQDQAREKHVKEVISQLTRVHGTSSPYKGLDLSKLHETLRTHTRLVSLFNTTLTGLHEVSAQNPTNCWICLPLNFRPYVSIPVPEQWNNFSTEINTTSVLVGPLVSNLEITHTSNLTCVKFSNTTYTTNSQCIRWVTPPTQIVCLPSGIFFVCGTSAYRCLNGSSESMCFLSFLVPPMTIYTEQDLYSYVISKPRNKRVPILPFVIGAGVLGALGTGIGGITTSTQFYYKLSQELNGDMERVADSLVTLQDQLNSLAAVVLQNRRALDLLTAERGGTCLFLGEECCYYVNQSGIVTEKLKEIRDRIQRRRKDLASNPLWTGLQGLLPYLLPFLGPLLTLLLLLTIGPCIFNRLTAFINDKLNIIHAMVLTQQYQ

SEQ ID NO: 8553 - protein, 493 aa, synthetic construct
METDTLLLWVLLLWVPGSTGDAPPPCRCMTSSSPYQEFLWRMQRPGNIDAPSYRSLSKGTPTFTAHTHMPRNCYHSATLCMHANTHYWTGKMINPSCPGGLGVTVCWTYFTQTGMSDGGGVQDQAREKHVKEVISQLTRVHGTSSPYKGLDLSKLHETLRTHTRLVSLFNTTLTGLHEVSAQNPTNCWICLPLNFRPYVSIPVPEQWNNFSTEINTTSVLVGPLVSNLEITHTSNLTCVKFSNTTYTTNSQCIRWVTPPTQIVCLPSGIFFVCGTSAYRCLNGSSESMCFLSFLVPPMTIYTEQDLYSYVISKPRNKRVPILPFVIGAGVLGALGTGIGGITTSTQFYYKLSQELNGDMERVADSLVTLQDQLNSLAAVVLQNRRALDLLTAERGGTCLFLGEECCYYVNQSGIVTEKLKEIRDRIQRRRKDLASNPLWTGLQGLLPYLLPFLGPLLTLLLLLTIGPCIFNRLTAFINDKLNIIHAMVLTQQY

SEQ ID NO: 8554 - protein, 492 aa, synthetic construct
METDTLLLWVLLLWVPGSTGDAPPPCRCMTSSSPYQEFLWRMQRPGNIDAPSYRSLSKGTPTFTAHTHMPRNCYHSATLCMHANTHYWTGKMINPSCPGGLGVTVCWTYFTQTGMSDGGGVQDQAREKHVKEVISQLTRVHGTSSPYKGLDLSKLHETLRTHTRLVSLFNTTLTGLHEVSAQNPTNCWICLPLNFRPYVSIPVPEQWNNFSTEINTTSVLVGPLVSNLEITHTSNLTCVKFSNTTYTTNSQCIRWVTPPTQIVCLPSGIFFVCGTSAYRCLNGSSESMCFLSFLVPPMTIYTEQDLYSYVISKPRNKRVPILPFVIGAGVLGALGTGIGGITTSTQFYYKLSQELNGDMERVADSLVTLQDQLNSLAAVVLQNRRALDLLTAERGGTCLFLGEECCYYVNQSGIVTEKLKEIRDRIQRRRKDLASNPLWTGLQGLLPYLLPFLGPLLTLLLLLTIGPCIFNRLTAFINDKLNIIHAMVLTQQ

SEQ ID NO: 8555 - protein, 491 aa, synthetic construct
METDTLLLWVLLLWVPGSTGDAPPPCRCMTSSSPYQEFLWRMQRPGNIDAPSYRSLSKGTPTFTAHTHMPRNCYHSATLCMHANTHYWTGKMINPSCPGGLGVTVCWTYFTQTGMSDGGGVQDQAREKHVKEVISQLTRVHGTSSPYKGLDLSKLHETLRTHTRLVSLFNTTLTGLHEVSAQNPTNCWICLPLNFRPYVSIPVPEQWNNFSTEINTTSVLVGPLVSNLEITHTSNLTCVKFSNTTYTTNSQCIRWVTPPTQIVCLPSGIFFVCGTSAYRCLNGSSESMCFLSFLVPPMTIYTEQDLYSYVISKPRNKRVPILPFVIGAGVLGALGTGIGGITTSTQFYYKLSQELNGDMERVADSLVTLQDQLNSLAAVVLQNRRALDLLTAERGGTCLFLGEECCYYVNQSGIVTEKLKEIRDRIQRRRKDLASNPLWTGLQGLLPYLLPFLGPLLTLLLLLTIGPCIFNRLTAFINDKLNIIHAMVLTQ

SEQ ID NO: 8556 - protein, 490 aa, synthetic construct
METDTLLLWVLLLWVPGSTGDAPPPCRCMTSSSPYQEFLWRMQRPGNIDAPSYRSLSKGTPTFTAHTHMPRNCYHSATLCMHANTHYWTGKMINPSCPGGLGVTVCWTYFTQTGMSDGGGVQDQAREKHVKEVISQLTRVHGTSSPYKGLDLSKLHETLRTHTRLVSLFNTTLTGLHEVSAQNPTNCWICLPLNFRPYVSIPVPEQWNNFSTEINTTSVLVGPLVSNLEITHTSNLTCVKFSNTTYTTNSQCIRWVTPPTQIVCLPSGIFFVCGTSAYRCLNGSSESMCFLSFLVPPMTIYTEQDLYSYVISKPRNKRVPILPFVIGAGVLGALGTGIGGITTSTQFYYKLSQELNGDMERVADSLVTLQDQLNSLAAVVLQNRRALDLLTAERGGTCLFLGEECCYYVNQSGIVTEKLKEIRDRIQRRRKDLASNPLWTGLQGLLPYLLPFLGPLLTLLLLLTIGPCIFNRLTAFINDKLNIIHAMVLT

SEQ ID NO: 8557 - protein, 501 aa, synthetic construct
METDTLLLWVLLLWVPGSTGDAPPPCRCMTSSSPYQEFLWRMQRPGNIDAPSYRSLSKGTPTFTAHTHMPRNCYHSATLCMHANTHYWTGKMINPSCPGGLGVTVCWTYFTQTGMSDGGGVQDQAREKHVKEVISQLTRVHGTSSPYKGLDLSKLHETLRTHTRLVSLFNTTLTGLHEVSAQNPTNCWICLPLNFRPYVSIPVPEQWNNFSTEINTTSVLVGPLVSNLEITHTSNLTCVKFSNTTYTTNSQCIRWVTPPTQIVCLPSGIFFVCGTSAYRCLNGSSESMCFLSFLVPPMTIYTEQDLYSYVISKPRNKRVPILPFVIGAGVLGALGTGIGGITTSTQFYYKLSQELNGDMERVADSLVTLQDQLNSLAAVVLQNRRALDLLTAERGGTCLFLGEECCYYVNQSGIVTEKLKEIRDRIQRRAEELRNTGPWGLLQGLLPYLLPFLGPLLTLLLLLTIGPCIFNRLTAFINDKLNIIHAMVLTQQYQVLRTDEE

SEQ ID NO: 8558 - protein, 500 aa, synthetic construct
METDTLLLWVLLLWVPGSTGDAPPPCRCMTSSSPYQEFLWRMQRPGNIDAPSYRSLSKGTPTFTAHTHMPRNCYHSATLCMHANTHYWTGKMINPSCPGGLGVTVCWTYFTQTGMSDGGGVQDQAREKHVKEVISQLTRVHGTSSPYKGLDLSKLHETLRTHTRLVSLFNTTLTGLHEVSAQNPTNCWICLPLNFRPYVSIPVPEQWNNFSTEINTTSVLVGPLVSNLEITHTSNLTCVKFSNTTYTTNSQCIRWVTPPTQIVCLPSGIFFVCGTSAYRCLNGSSESMCFLSFLVPPMTIYTEQDLYSYVISKPRNKRVPILPFVIGAGVLGALGTGIGGITTSTQFYYKLSQELNGDMERVADSLVTLQDQLNSLAAVVLQNRRALDLLTAERGGTCLFLGEECCYYVNQSGIVTEKLKEIRDRIQRRAEELRNTGPWGLLQGLLPYLLPFLGPLLTLLLLLTIGPCIFNRLTAFINDKLNIIHAMVLTQQYQVLRTDE

SEQ ID NO: 8559 - protein, 499 aa, synthetic construct
METDTLLLWVLLLWVPGSTGDAPPPCRCMTSSSPYQEFLWRMQRPGNIDAPSYRSLSKGTPTFTAHTHMPRNCYHSATLCMHANTHYWTGKMINPSCPGGLGVTVCWTYFTQTGMSDGGGVQDQAREKHVKEVISQLTRVHGTSSPYKGLDLSKLHETLRTHTRLVSLFNTTLTGLHEVSAQNPTNCWICLPLNFRPYVSIPVPEQWNNFSTEINTTSVLVGPLVSNLEITHTSNLTCVKFSNTTYTTNSQCIRWVTPPTQIVCLPSGIFFVCGTSAYRCLNGSSESMCFLSFLVPPMTIYTEQDLYSYVISKPRNKRVPILPFVIGAGVLGALGTGIGGITTSTQFYYKLSQELNGDMERVADSLVTLQDQLNSLAAVVLQNRRALDLLTAERGGTCLFLGEECCYYVNQSGIVTEKLKEIRDRIQRRAEELRNTGPWGLLQGLLPYLLPFLGPLLTLLLLLTIGPCIFNRLTAFINDKLNIIHAMVLTQQYQVLRTD

SEQ ID NO: 8560 - protein, 498 aa, synthetic construct
METDTLLLWVLLLWVPGSTGDAPPPCRCMTSSSPYQEFLWRMQRPGNIDAPSYRSLSKGTPTFTAHTHMPRNCYHSATLCMHANTHYWTGKMINPSCPGGLGVTVCWTYFTQTGMSDGGGVQDQAREKHVKEVISQLTRVHGTSSPYKGLDLSKLHETLRTHTRLVSLFNTTLTGLHEVSAQNPTNCWICLPLNFRPYVSIPVPEQWNNFSTEINTTSVLVGPLVSNLEITHTSNLTCVKFSNTTYTTNSQCIRWVTPPTQIVCLPSGIFFVCGTSAYRCLNGSSESMCFLSFLVPPMTIYTEQDLYSYVISKPRNKRVPILPFVIGAGVLGALGTGIGGITTSTQFYYKLSQELNGDMERVADSLVTLQDQLNSLAAVVLQNRRALDLLTAERGGTCLFLGEECCYYVNQSGIVTEKLKEIRDRIQRRAEELRNTGPWGLLQGLLPYLLPFLGPLLTLLLLLTIGPCIFNRLTAFINDKLNIIHAMVLTQQYQVLRT

SEQ ID NO: 8561 - protein, 498 aa, synthetic construct; identical to SEQ ID NO: 8560

SEQ ID NO: 8562 - protein, 496 aa, synthetic construct
METDTLLLWVLLLWVPGSTGDAPPPCRCMTSSSPYQEFLWRMQRPGNIDAPSYRSLSKGTPTFTAHTHMPRNCYHSATLCMHANTHYWTGKMINPSCPGGLGVTVCWTYFTQTGMSDGGGVQDQAREKHVKEVISQLTRVHGTSSPYKGLDLSKLHETLRTHTRLVSLFNTTLTGLHEVSAQNPTNCWICLPLNFRPYVSIPVPEQWNNFSTEINTTSVLVGPLVSNLEITHTSNLTCVKFSNTTYTTNSQCIRWVTPPTQIVCLPSGIFFVCGTSAYRCLNGSSESMCFLSFLVPPMTIYTEQDLYSYVISKPRNKRVPILPFVIGAGVLGALGTGIGGITTSTQFYYKLSQELNGDMERVADSLVTLQDQLNSLAAVVLQNRRALDLLTAERGGTCLFLGEECCYYVNQSGIVTEKLKEIRDRIQRRAEELRNTGPWGLLQGLLPYLLPFLGPLLTLLLLLTIGPCIFNRLTAFINDKLNIIHAMVLTQQYQVL

SEQ ID NO: 8563 - protein, 495 aa, synthetic construct
METDTLLLWVLLLWVPGSTGDAPPPCRCMTSSSPYQEFLWRMQRPGNIDAPSYRSLSKGTPTFTAHTHMPRNCYHSATLCMHANTHYWTGKMINPSCPGGLGVTVCWTYFTQTGMSDGGGVQDQAREKHVKEVISQLTRVHGTSSPYKGLDLSKLHETLRTHTRLVSLFNTTLTGLHEVSAQNPTNCWICLPLNFRPYVSIPVPEQWNNFSTEINTTSVLVGPLVSNLEITHTSNLTCVKFSNTTYTTNSQCIRWVTPPTQIVCLPSGIFFVCGTSAYRCLNGSSESMCFLSFLVPPMTIYTEQDLYSYVISKPRNKRVPILPFVIGAGVLGALGTGIGGITTSTQFYYKLSQELNGDMERVADSLVTLQDQLNSLAAVVLQNRRALDLLTAERGGTCLFLGEECCYYVNQSGIVTEKLKEIRDRIQRRAEELRNTGPWGLLQGLLPYLLPFLGPLLTLLLLLTIGPCIFNRLTAFINDKLNIIHAMVLTQQYQV

SEQ ID NO: 8564 - protein, 494 aa, synthetic construct; identical to SEQ ID NO: 8534

SEQ ID NO: 8565 - protein, 493 aa, synthetic construct
METDTLLLWVLLLWVPGSTGDAPPPCRCMTSSSPYQEFLWRMQRPGNIDAPSYRSLSKGTPTFTAHTHMPRNCYHSATLCMHANTHYWTGKMINPSCPGGLGVTVCWTYFTQTGMSDGGGVQDQAREKHVKEVISQLTRVHGTSSPYKGLDLSKLHETLRTHTRLVSLFNTTLTGLHEVSAQNPTNCWICLPLNFRPYVSIPVPEQWNNFSTEINTTSVLVGPLVSNLEITHTSNLTCVKFSNTTYTTNSQCIRWVTPPTQIVCLPSGIFFVCGTSAYRCLNGSSESMCFLSFLVPPMTIYTEQDLYSYVISKPRNKRVPILPFVIGAGVLGALGTGIGGITTSTQFYYKLSQELNGDMERVADSLVTLQDQLNSLAAVVLQNRRALDLLTAERGGTCLFLGEECCYYVNQSGIVTEKLKEIRDRIQRRAEELRNTGPWGLLQGLLPYLLPFLGPLLTLLLLLTIGPCIFNRLTAFINDKLNIIHAMVLTQQY

SEQ ID NO: 8566 - protein, 492 aa, synthetic construct; identical to SEQ ID NO: 8533

SEQ ID NO: 8567 - protein, 491 aa, synthetic construct
METDTLLLWVLLLWVPGSTGDAPPPCRCMTSSSPYQEFLWRMQRPGNIDAPSYRSLSKGTPTFTAHTHMPRNCYHSATLCMHANTHYWTGKMINPSCPGGLGVTVCWTYFTQTGMSDGGGVQDQAREKHVKEVISQLTRVHGTSSPYKGLDLSKLHETLRTHTRLVSLFNTTLTGLHEVSAQNPTNCWICLPLNFRPYVSIPVPEQWNNFSTEINTTSVLVGPLVSNLEITHTSNLTCVKFSNTTYTTNSQCIRWVTPPTQIVCLPSGIFFVCGTSAYRCLNGSSESMCFLSFLVPPMTIYTEQDLYSYVISKPRNKRVPILPFVIGAGVLGALGTGIGGITTSTQFYYKLSQELNGDMERVADSLVTLQDQLNSLAAVVLQNRRALDLLTAERGGTCLFLGEECCYYVNQSGIVTEKLKEIRDRIQRRAEELRNTGPWGLLQGLLPYLLPFLGPLLTLLLLLTIGPCIFNRLTAFINDKLNIIHAMVLTQ

SEQ ID NO: 8568 - protein, 490 aa, synthetic construct
METDTLLLWVLLLWVPGSTGDAPPPCRCMTSSSPYQEFLWRMQRPGNIDAPSYRSLSKGTPTFTAHTHMPRNCYHSATLCMHANTHYWTGKMINPSCPGGLGVTVCWTYFTQTGMSDGGGVQDQAREKHVKEVISQLTRVHGTSSPYKGLDLSKLHETLRTHTRLVSLFNTTLTGLHEVSAQNPTNCWICLPLNFRPYVSIPVPEQWNNFSTEINTTSVLVGPLVSNLEITHTSNLTCVKFSNTTYTTNSQCIRWVTPPTQIVCLPSGIFFVCGTSAYRCLNGSSESMCFLSFLVPPMTIYTEQDLYSYVISKPRNKRVPILPFVIGAGVLGALGTGIGGITTSTQFYYKLSQELNGDMERVADSLVTLQDQLNSLAAVVLQNRRALDLLTAERGGTCLFLGEECCYYVNQSGIVTEKLKEIRDRIQRRAEELRNTGPWGLLQGLLPYLLPFLGPLLTLLLLLTIGPCIFNRLTAFINDKLNIIHAMVLT

SEQ ID NO: 8569 - protein, 501 aa, synthetic construct
METDTLLLWVLLLWVPGSTGDAPPPCRCMTSSSPYQEFLWRMQRPGNIDAPSYRSLSKGTPTFTAHTHMPRNCYHSATLCMHANTHYWTGKMINPSCPGGLGVTVCWTYFTQTGMSDGGGVQDQAREKHVKEVISQLTRVHGTSSPYKGLDLSKLHETLRTHTRLVSLFNTTLTGLHEVSAQNPTNCWICLPLNFRPYVSIPVPEQWNNFSTEINTTSVLVGPLVSNLEITHTSNLTCVKFSNTTYTTNSQCIRWVTPPTQIVCLPSGIFFVCGTSAYRCLNGSSESMCFLSFLVPPMTIYTEQDLYSYVISKPRNKRVPILPFVIGAGVLGALGTGIGGITTSTQFYYKLSQELNGDMERVADSLVTLQDQLNSLAAVVLQNRRALDLLTAERGGTCLFLGEECCYYVNQSGIVTEKLKEIRDRIQRRAEELRNTGPWGLLSQWMPWILPFLGPLAAIILLLLFGPCIFNRLTAFINDKLNIIHAMVLTQQYQVLRTDEE

SEQ ID NO: 8570 - protein, 500 aa, synthetic construct
METDTLLLWVLLLWVPGSTGDAPPPCRCMTSSSPYQEFLWRMQRPGNIDAPSYRSLSKGTPTFTAHTHMPRNCYHSATLCMHANTHYWTGKMINPSCPGGLGVTVCWTYFTQTGMSDGGGVQDQAREKHVKEVISQLTRVHGTSSPYKGLDLSKLHETLRTHTRLVSLFNTTLTGLHEVSAQNPTNCWICLPLNFRPYVSIPVPEQWNNFSTEINTTSVLVGPLVSNLEITHTSNLTCVKFSNTTYTTNSQCIRWVTPPTQIVCLPSGIFFVCGTSAYRCLNGSSESMCFLSFLVPPMTIYTEQDLYSYVISKPRNKRVPILPFVIGAGVLGALGTGIGGITTSTQFYYKLSQELNGDMERVADSLVTLQDQLNSLAAVVLQNRRALDLLTAERGGTCLFLGEECCYYVNQSGIVTEKLKEIRDRIQRRAEELRNTGPWGLLSQWMPWILPFLGPLAAIILLLLFGPCIFNRLTAFINDKLNIIHAMVLTQQYQVLRTDE

SEQ ID NO: 8571 - protein, 499 aa, synthetic construct
METDTLLLWVLLLWVPGSTGDAPPPCRCMTSSSPYQEFLWRMQRPGNIDAPSYRSLSKGTPTFTAHTHMPRNCYHSATLCMHANTHYWTGKMINPSCPGGLGVTVCWTYFTQTGMSDGGGVQDQAREKHVKEVISQLTRVHGTSSPYKGLDLSKLHETLRTHTRLVSLFNTTLTGLHEVSAQNPTNCWICLPLNFRPYVSIPVPEQWNNFSTEINTTSVLVGPLVSNLEITHTSNLTCVKFSNTTYTTNSQCIRWVTPPTQIVCLPSGIFFVCGTSAYRCLNGSSESMCFLSFLVPPMTIYTEQDLYSYVISKPRNKRVPILPFVIGAGVLGALGTGIGGITTSTQFYYKLSQELNGDMERVADSLVTLQDQLNSLAAVVLQNRRALDLLTAERGGTCLFLGEECCYYVNQSGIVTEKLKEIRDRIQRRAEELRNTGPWGLLSQWMPWILPFLGPLAAIILLLLFGPCIFNRLTAFINDKLNIIHAMVLTQQYQVLRTD

SEQ ID NO: 8572 - protein, 498 aa, synthetic construct
METDTLLLWVLLLWVPGSTGDAPPPCRCMTSSSPYQEFLWRMQRPGNIDAPSYRSLSKGTPTFTAHTHMPRNCYHSATLCMHANTHYWTGKMINPSCPGGLGVTVCWTYFTQTGMSDGGGVQDQAREKHVKEVISQLTRVHGTSSPYKGLDLSKLHETLRTHTRLVSLFNTTLTGLHEVSAQNPTNCWICLPLNFRPYVSIPVPEQWNNFSTEINTTSVLVGPLVSNLEITHTSNLTCVKFSNTTYTTNSQCIRWVTPPTQIVCLPSGIFFVCGTSAYRCLNGSSESMCFLSFLVPPMTIYTEQDLYSYVISKPRNKRVPILPFVIGAGVLGALGTGIGGITTSTQFYYKLSQELNGDMERVADSLVTLQDQLNSLAAVVLQNRRALDLLTAERGGTCLFLGEECCYYVNQSGIVTEKLKEIRDRIQRRAEELRNTGPWGLLSQWMPWILPFLGPLAAIILLLLFGPCIFNRLTAFINDKLNIIHAMVLTQQYQVLRT

SEQ ID NO: 8573 - protein, 497 aa, synthetic construct
METDTLLLWVLLLWVPGSTGDAPPPCRCMTSSSPYQEFLWRMQRPGNIDAPSYRSLSKGTPTFTAHTHMPRNCYHSATLCMHANTHYWTGKMINPSCPGGLGVTVCWTYFTQTGMSDGGGVQDQAREKHVKEVISQLTRVHGTSSPYKGLDLSKLHETLRTHTRLVSLFNTTLTGLHEVSAQNPTNCWICLPLNFRPYVSIPVPEQWNNFSTEINTTSVLVGPLVSNLEITHTSNLTCVKFSNTTYTTNSQCIRWVTPPTQIVCLPSGIFFVCGTSAYRCLNGSSESMCFLSFLVPPMTIYTEQDLYSYVISKPRNKRVPILPFVIGAGVLGALGTGIGGITTSTQFYYKLSQELNGDMERVADSLVTLQDQLNSLAAVVLQNRRALDLLTAERGGTCLFLGEECCYYVNQSGIVTEKLKEIRDRIQRRAEELRNTGPWGLLSQWMPWILPFLGPLAAIILLLLFGPCIFNRLTAFINDKLNIIHAMVLTQQYQVLR

SEQ ID NO: 8574 - protein, 496 aa, synthetic construct
METDTLLLWVLLLWVPGSTGDAPPPCRCMTSSSPYQEFLWRMQRPGNIDAPSYRSLSKGTPTFTAHTHMPRNCYHSATLCMHANTHYWTGKMINPSCPGGLGVTVCWTYFTQTGMSDGGGVQDQAREKHVKEVISQLTRVHGTSSPYKGLDLSKLHETLRTHTRLVSLFNTTLTGLHEVSAQNPTNCWICLPLNFRPYVSIPVPEQWNNFSTEINTTSVLVGPLVSNLEITHTSNLTCVKFSNTTYTTNSQCIRWVTPPTQIVCLPSGIFFVCGTSAYRCLNGSSESMCFLSFLVPPMTIYTEQDLYSYVISKPRNKRVPILPFVIGAGVLGALGTGIGGITTSTQFYYKLSQELNGDMERVADSLVTLQDQLNSLAAVVLQNRRALDLLTAERGGTCLFLGEECCYYVNQSGIVTEKLKEIRDRIQRRAEELRNTGPWGLLSQWMPWILPFLGPLAAIILLLLFGPCIFNRLTAFINDKLNIIHAMVLTQQYQVL

SEQ ID NO: 8575 - protein, 495 aa, synthetic construct
METDTLLLWVLLLWVPGSTGDAPPPCRCMTSSSPYQEFLWRMQRPGNIDAPSYRSLSKGTPTFTAHTHMPRNCYHSATLCMHANTHYWTGKMINPSCPGGLGVTVCWTYFTQTGMSDGGGVQDQAREKHVKEVISQLTRVHGTSSPYKGLDLSKLHETLRTHTRLVSLFNTTLTGLHEVSAQNPTNCWICLPLNFRPYVSIPVPEQWNNFSTEINTTSVLVGPLVSNLEITHTSNLTCVKFSNTTYTTNSQCIRWVTPPTQIVCLPSGIFFVCGTSAYRCLNGSSESMCFLSFLVPPMTIYTEQDLYSYVISKPRNKRVPILPFVIGAGVLGALGTGIGGITTSTQFYYKLSQELNGDMERVADSLVTLQDQLNSLAAVVLQNRRALDLLTAERGGTCLFLGEECCYYVNQSGIVTEKLKEIRDRIQRRAEELRNTGPWGLLSQWMPWILPFLGPLAAIILLLLFGPCIFNRLTAFINDKLNIIHAMVLTQQYQV

SEQ ID NO: 8576 - protein, 494 aa, synthetic construct; identical to SEQ ID NO: 8536

SEQ ID NO: 8577 - protein, 493 aa, synthetic construct
METDTLLLWVLLLWVPGSTGDAPPPCRCMTSSSPYQEFLWRMQRPGNIDAPSYRSLSKGTPTFTAHTHMPRNCYHSATLCMHANTHYWTGKMINPSCPGGLGVTVCWTYFTQTGMSDGGGVQDQAREKHVKEVISQLTRVHGTSSPYKGLDLSKLHETLRTHTRLVSLFNTTLTGLHEVSAQNPTNCWICLPLNFRPYVSIPVPEQWNNFSTEINTTSVLVGPLVSNLEITHTSNLTCVKFSNTTYTTNSQCIRWVTPPTQIVCLPSGIFFVCGTSAYRCLNGSSESMCFLSFLVPPMTIYTEQDLYSYVISKPRNKRVPILPFVIGAGVLGALGTGIGGITTSTQFYYKLSQELNGDMERVADSLVTLQDQLNSLAAVVLQNRRALDLLTAERGGTCLFLGEECCYYVNQSGIVTEKLKEIRDRIQRRAEELRNTGPWGLLSQWMPWILPFLGPLAAIILLLLFGPCIFNRLTAFINDKLNIIHAMVLTQQY

SEQ ID NO: 8578 - protein, 492 aa, synthetic construct
METDTLLLWVLLLWVPGSTGDAPPPCRCMTSSSPYQEFLWRMQRPGNIDAPSYRSLSKGTPTFTAHTHMPRNCYHSATLCMHANTHYWTGKMINPSCPGGLGVTVCWTYFTQTGMSDGGGVQDQAREKHVKEVISQLTRVHGTSSPYKGLDLSKLHETLRTHTRLVSLFNTTLTGLHEVSAQNPTNCWICLPLNFRPYVSIPVPEQWNNFSTEINTTSVLVGPLVSNLEITHTSNLTCVKFSNTTYTTNSQCIRWVTPPTQIVCLPSGIFFVCGTSAYRCLNGSSESMCFLSFLVPPMTIYTEQDLYSYVISKPRNKRVPILPFVIGAGVLGALGTGIGGITTSTQFYYKLSQELNGDMERVADSLVTLQDQLNSLAAVVLQNRRALDLLTAERGGTCLFLGEECCYYVNQSGIVTEKLKEIRDRIQRRAEELRNTGPWGLLSQWMPWILPFLGPLAAIILLLLFGPCIFNRLTAFINDKLNIIHAMVLTQQ

SEQ ID NO: 8579 - protein, 491 aa, synthetic construct
METDTLLLWVLLLWVPGSTGDAPPPCRCMTSSSPYQEFLWRMQRPGNIDAPSYRSLSKGTPTFTAHTHMPRNCYHSATLCMHANTHYWTGKMINPSCPGGLGVTVCWTYFTQTGMSDGGGVQDQAREKHVKEVISQLTRVHGTSSPYKGLDLSKLHETLRTHTRLVSLFNTTLTGLHEVSAQNPTNCWICLPLNFRPYVSIPVPEQWNNFSTEINTTSVLVGPLVSNLEITHTSNLTCVKFSNTTYTTNSQCIRWVTPPTQIVCLPSGIFFVCGTSAYRCLNGSSESMCFLSFLVPPMTIYTEQDLYSYVISKPRNKRVPILPFVIGAGVLGALGTGIGGITTSTQFYYKLSQELNGDMERVADSLVTLQDQLNSLAAVVLQNRRALDLLTAERGGTCLFLGEECCYYVNQSGIVTEKLKEIRDRIQRRAEELRNTGPWGLLSQWMPWILPFLGPLAAIILLLLFGPCIFNRLTAFINDKLNIIHAMVLTQ

SEQ ID NO: 8580 - protein, 490 aa, synthetic construct
METDTLLLWVLLLWVPGSTGDAPPPCRCMTSSSPYQEFLWRMQRPGNIDAPSYRSLSKGTPTFTAHTHMPRNCYHSATLCMHANTHYWTGKMINPSCPGGLGVTVCWTYFTQTGMSDGGGVQDQAREKHVKEVISQLTRVHGTSSPYKGLDLSKLHETLRTHTRLVSLFNTTLTGLHEVSAQNPTNCWICLPLNFRPYVSIPVPEQWNNFSTEINTTSVLVGPLVSNLEITHTSNLTCVKFSNTTYTTNSQCIRWVTPPTQIVCLPSGIFFVCGTSAYRCLNGSSESMCFLSFLVPPMTIYTEQDLYSYVISKPRNKRVPILPFVIGAGVLGALGTGIGGITTSTQFYYKLSQELNGDMERVADSLVTLQDQLNSLAAVVLQNRRALDLLTAERGGTCLFLGEECCYYVNQSGIVTEKLKEIRDRIQRRAEELRNTGPWGLLSQWMPWILPFLGPLAAIILLLLFGPCIFNRLTAFINDKLNIIHAMVLT

SEQ ID NO: 8581 - protein, 525 aa, synthetic construct
METDTLLLWVLLLWVPGSTGDAPPPCRCMTSSSPYQEFLWRMQRPGNIDAPSYRSLSKGTPTFTAHTHMPRNCYHSATLCMHANTHYWTGKMINPSCPGGLGVTVCWTYFTQTGMSDGGGVQDQAREKHVKEVISQLTRVHGTSSPYKGLDLSKLHETLRTHTRLVSLFNTTLTGLHEVSAQNPTNCWICLPLNFRPYVSIPVPEQWNNFSTEINTTSVLVGPLVSNLEITHTSNLTCVKFSNTTYTTNSQCIRWVTPPTQIVCLPSGIFFVCGTSAYRCLNGSSESMCFLSFLVPPMTIYTEQDLYSYVISKPRNKRVPILPFVIGAGVLGALGTGIGGITTSTQFYYKLSQELNGDMERVADSLVTLQDQLNSLAAVVLQNRRALDLLTAERGGTCLFLGEECCYYVNQSGIVTEKVKEIRDRIQRRAEELRNTGPWGLLSHWMPWILPFLGPLAAIILLLLFGPCIFNLLVNFVSSRIEAVKLQMEPKMQSKTKIYRRPLDRPASPRSDVNDIKGTPPEEIS

SEQ ID NO: 8582 - protein, 588 aa, synthetic construct
MALPYHIFLFTVLLPSFTLTAPPPCRCMTSSSPYQEFLWRMQRPGNIDAPSYRSLSKGTPTFTAHTHMPRNCYHSATLCMHANTHYWTGKMINPSCPGGLGVTVCWTYFTQTGMSDGGGVQDQAREKHVKEVISQLTRVHGTSSPYKGLDLSKLHETLRTHTRLVSLFNTTLTGLHEVSAQNPTNCWICLPLNFRPYVSIPVPEQWNNFSTEINTTSVLVGPLVSNLEITHTSNLTCVKFSNTTYTTNSQCIRWVTPPTQIVCLPSGIFFVCGTSAYRCLNGSSESMCFLSFLVPPMTIYTEQDLYSYVISKPRNKRVPILPFVIGAGVLGALGTGIGGITTSTQFYYKLSQELNGDMERVADSLVTLQDQLNSLAAVVLQNRRALDLLTAERGGTCLFLGEECCYYVNQSGIVTEKLSNQLISDVQILSSTIQDLQDQVDSLAEVVLQNRRGLDLLTAEQGGICLALQEKCCFYVNKSGIVRDKIKTLQEELERRRKDLASNPLWTGLQGLLPYLLPFLGPLLTLLLLLTIGPCIFNRLTAFINDKLNIIHAMGSTSPVWWNSADIQHSGGRSSLEGPNKNSSQKRI

SEQ ID NO: 8583 - protein, 493 aa, synthetic construct
MALPYHIFLFTVLLPSFTLTAPPPCRCMTSSSPYQEFLWRMQRPGNIDAPSYRSLSKGTPTFTAHTHMPRNCYHSATLCMHANTHYWTGKMINPSCPGGLGVTVCWTYFTQTGMSDGGGVQDQAREKHVKEVISQLTRVHGTSSPYKGLDLSKLHETLRTHTRLVSLFNTTLTGLHEVSAQNPTNCWICLPLNFRPYVSIPVPEQWNNFSTEINTTSVLVGPLVSNLEITHTSNLTCVKFSNTTYTTNSQCIRWVTPPTQIVCLPSGIFFVCGTSAYRCLNGSSESMCFLSFLVPPMTIYTEQDLYSYVISKPRNKRVPILPFVIGAGVLGALGTGIGGITTSTQFYYKLSQELNGDMERVADSLVTLQDQLNSLAAVVLQNRRALDLLTAERGGTCLFLGEECCYYVNQSGIVTEKLKEIRDRIQRRAEELRNTGPWGLLSQWMPWILPFLGPLAAIILLLLFGPCIFNRLTAFINDKLNIIHAMVLTQQYQ

SEQ ID NO: 8584 - protein, 495 aa, synthetic construct
MALPYHIFLFTVLLPSFTLTAPPPCRCMTSSSPYQEFLWRMQRPGNIDAPSYRSLSKGTPTFTAHTHMPRNCYHSATLCMHANTHYWTGKMINPSCPGGLGVTVCWTYFTQTGMSDGGGVQDQAREKHVKEVISQLTRVHGTSSPYKGLDLSKLHETLRTHTRLVSLFNTTLTGLHEVSAQNPTNCWICLPLNFRPYVSIPVPEQWNNFSTEINTTSVLVGPLVSNLEITHTSNLTCVKFSNTTYTTNSQCIRWVTPPTQIVCLPSGIFFVCGTSAYRCLNGSSESMCFLSFLVPPMTIYTEQDLYSYVISKPRNKRVPILPFVIGAGVLGALGTGIGGITTSTQFYYKLSQELNGDMERVADSLVTLQDQLNSLAAVVLQNRRALDLLTAERGGTCLFLGEECCYYVNQSGIVTEKLKEIRDRIQRRRKDLASNPLWTGLQGLLPYLLPFLGPLLTLLLLLTIGPCIFNRLTAFINDKLNIIHAMVLTQQYQVL

SEQ ID NO: 8585 - protein, 493 aa, synthetic construct
MALPYHIFLFTVLLPSFTLTAPPPCRCMTSSSPYQEFLWRMQRPGNIDAPSYRSLSKGTPTFTAHTHMPRNCYHSATLCMHANTHYWTGKMINPSCPGGLGVTVCWTYFTQTGMSDGGGVQDQAREKHVKEVISQLTRVHGTSSPYKGLDLSKLHETLRTHTRLVSLFNTTLTGLHEVSAQNPTNCWICLPLNFRPYVSIPVPEQWNNFSTEINTTSVLVGPLVSNLEITHTSNLTCVKFSNTTYTTNSQCIRWVTPPTQIVCLPSGIFFVCGTSAYRCLNGSSESMCFLSFLVPPMTIYTEQDLYSYVISKPRNKRVPILPFVIGAGVLGALGTGIGGITTSTQFYYKLSQELNGDMERVADSLVTLQDQLNSLAAVVLQNRRALDLLTAERGGTCLFLGEECCYYVNQSGIVTEKLKEIRDRIQRRAEELRNTGPWGLLQGLLPYLLPFLGPLLTLLLLLTIGPCIFNRLTAFINDKLNIIHAMVLTQQYQ

SEQ ID NO: 8586 - protein, 491 aa, synthetic construct
MALPYHIFLFTVLLPSFTLTAPPPCRCMTSSSPYQEFLWRMQRPGNIDAPSYRSLSKGTPTFTAHTHMPRNCYHSATLCMHANTHYWTGKMINPSCPGGLGVTVCWTYFTQTGMSDGGGVQDQAREKHVKEVISQLTRVHGTSSPYKGLDLSKLHETLRTHTRLVSLFNTTLTGLHEVSAQNPTNCWICLPLNFRPYVSIPVPEQWNNFSTEINTTSVLVGPLVSNLEITHTSNLTCVKFSNTTYTTNSQCIRWVTPPTQIVCLPSGIFFVCGTSAYRCLNGSSESMCFLSFLVPPMTIYTEQDLYSYVISKPRNKRVPILPFVIGAGVLGALGTGIGGITTSTQFYYKLSQELNGDMERVADSLVTLQDQLNSLAAVVLQNRRALDLLTAERGGTCLFLGEECCYYVNQSGIVTEKLKEIRDRIQRRAEELRNTGPWGLLQGLLPYLLPFLGPLLTLLLLLTIGPCIFNRLTAFINDKLNIIHAMVLTQQ

SEQ ID NO: 8587 - protein, 490 aa, synthetic construct
MALPYHIFLFTVLLPSFTLTAPPPCRCMTSSSPYQEFLWRMQRPGNIDAPSYRSLSKGTPTFTAHTHMPRNCYHSATLCMHANTHYWTGKMINPSCPGGLGVTVCWTYFTQTGMSDGGGVQDQAREKHVKEVISQLTRVHGTSSPYKGLDLSKLHETLRTHTRLVSLFNTTLTGLHEVSAQNPTNCWICLPLNFRPYVSIPVPEQWNNFSTEINTTSVLVGPLVSNLEITHTSNLTCVKFSNTTYTTNSQCIRWVTPPTQIVCLPSGIFFVCGTSAYRCLNGSSESMCFLSFLVPPMTIYTEQDLYSYVISKPRNKRVPILPFVIGAGVLGALGTGIGGITTSTQFYYKLSQELNGDMERVADSLVTLQDQLNSLAAVVLQNRRALDLLTAERGGTCLFLGEECCYYVNQSGIVTEKLKEIRDRIQRRAEELRNTGPWGLLQGLLPYLLPFLGPLLTLLLLLTIGPCIFNRLTAFINDKLNIIHAMVLTQ

SEQ ID NO: 8588 - protein, 493 aa, synthetic construct
MALPYHIFLFTVLLPSFTLTAPPPCRCMTSSSPYQEFLWRMQRPGNIDAPSYRSLSKGTPTFTAHTHMPRNCYHSATLCMHANTHYWTGKMINPSCPGGLGVTVCWTYFTQTGMSDGGGVQDQAREKHVKEVISQLTRVHGTSSPYKGLDLSKLHETLRTHTRLVSLFNTTLTGLHEVSAQNPTNCWICLPLNFRPYVSIPVPEQWNNFSTEINTTSVLVGPLVSNLEITHTSNLTCVKFSNTTYTTNSQCIRWVTPPTQIVCLPSGIFFVCGTSAYRCLNGSSESMCFLSFLVPPMTIYTEQDLYSYVISKPRNKRVPILPFVIGAGVLGALGTGIGGITTSTQFYYKLSQELNGDMERVADSLVTLQDQLNSLAAVVLQNRRALDLLTAERGGTCLFLGEECCYYVNQSGIVTEKLKEIRDRIQRRRKDLASNPLWTGLQGLLPYLLPFLGPLLTLLLLLTIGPCIFNRLTAFINDKLNIIHAMVLTQQYQ

SEQ ID NO: 8589 - protein, 589 aa, synthetic construct; identical to SEQ ID NO: 8538

SEQ ID NO: 8590 - protein, 494 aa, synthetic construct; identical to SEQ ID NO: 8536

SEQ ID NO: 8591 - protein, 496 aa, synthetic construct; identical to SEQ ID NO: 8535

SEQ ID NO: 8592 - protein, 494 aa, synthetic construct; identical to SEQ ID NO: 8534

SEQ ID NO: 8593 - protein, 492 aa, synthetic construct; identical to SEQ ID NO: 8533

SEQ ID NO: 8594 - protein, 491 aa, synthetic construct; identical to SEQ ID NO: 8567

SEQ ID NO: 8595 - protein, 8 aa, synthetic construct
GGGGGGGG

SEQ ID NO: 8596 - protein, 8 aa, synthetic construct
GGGGGGGG

SEQ ID NO: 8597 - protein, 8 aa, synthetic construct
GGGGGGGG

SEQ ID NO: 8598 - protein, 8 aa, synthetic construct
GGGGGGGG

SEQ ID NO: 8599 - protein, 8 aa, synthetic construct
GGGGGGGG

SEQ ID NO: 8600 - protein, 8 aa, synthetic construct
GGGGGGGG

SEQ ID NO: 8601 - protein, 8 aa, synthetic construct
GGGGGGGG

SEQ ID NO: 8602 - protein, 8 aa, synthetic construct
GGGGGGGG

SEQ ID NO: 8603 - protein, 8 aa, synthetic construct
GGGGGGGG

SEQ ID NO: 8604 - protein, 8 aa, synthetic construct
GGGGGGGG

SEQ ID NO: 8605 - protein, 538 aa, synthetic construct; identical to SEQ ID NO: 8422

SEQ ID NO: 8606 - protein, 520 aa, synthetic construct
MGLLLLVLILTPSLAAYRHPDFPLLEKAQQLLQSTGSPYSTNCWLCTSSSTETPGTAYPASPREWTSIEAELHISYRWDPNLKGLMRPANSLLSTVKQDFPDIRQKPPIFGPIFTNINLMGIAPICVMAKRKNGTNVGTLPSTVCNVTFTVDSNQQTYQTYTHNQFRHQPRFPKPPNITFPQGTLLDKSSRFCQGRPSSCSTRNFWFRPADYNQCLQISNLSSTAEWVLLDQTRNSLFWENKTKGANQSQTPCVQVLAGMTIATSYLGISAVSEFFGTSLTPLFHFHISTCLKTQGAFYICGQSIHQCLPSNWTGTCTIGYVTPDIFIAPGNLSLPIPIYGNSPLPRVRRAIHFIPLLAGLGILAGTGTGIAGITKASLTYSQLSKEIANNIDTMAKALTTMQEQIDSLAAVVLQNRRGLDMLTAAQGGICLALDEKCCFWVNQSGKVQDNIRQLLNQASSLRERATQGWLNWEGTWKWFSWVLPLTGPLVSLLLLLLFGPCLLNLITQFVSSRLQAIKL

SEQ ID NO: 8607 - protein, 525 aa, synthetic construct
MGLLLLVLILTPSLAAYRHPDFPLLEKAQQLLQSTGSPYSTNCWLCTSSSTETPGTAYPASPREWTSIEAELHISYRWDPNLKGLMRPANSLLSTVKQDFPDIRQKPPIFGPIFTNINLMGIAPICVMAKRKNGTNVGTLPSTVCNVTFTVDSNQQTYQTYTHNQFRHQPRFPKPPNITFPQGTLLDKSSRFCQGRPSSCSTRNFWFRPADYNQCLQISNLSSTAEWVLLDQTRNSLFWENKTKGANQSQTPCVQVLAGMTIATSYLGISAVSEFFGTSLTPLFHFHISTCLKTQGAFYICGQSIHQCLPSNWTGTCTIGYVTPDIFIAPGNLSLPIPIYGNSPLPRVRRAIHFIPLLAGLGILAGTGTGIAGITKASLTYSQLSKEIANNIDTMAKALTTMQEQIDSLAAVVLQNRRGLDMLTAAQGGICLALDEKCCFWVNQSGKVQDNIRQLLNQASSLRERATQGWLNWEGTWKWFSWVLPLTGPLVSLLLLLLFGPCLLNLITQFVSSRLQAIKLQTNLS

SEQ ID NO: 8608 - protein, 533 aa, synthetic construct
MGLLLLVLILTPSLAAYRHPDFPLLEKAQQLLQSTGSPYSTNCWLCTSSSTETPGTAYPASPREWTSIEAELHISYRWDPNLKGLMRPANSLLSTVKQDFPDIRQKPPIFGPIFTNINLMGIAPICVMAKRKNGTNVGTLPSTVCNVTFTVDSNQQTYQTYTHNQFRHQPRFPKPPNITFPQGTLLDKSSRFCQGRPSSCSTRNFWFRPADYNQCLQISNLSSTAEWVLLDQTRNSLFWENKTKGANQSQTPCVQVLAGMTIATSYLGISAVSEFFGTSLTPLFHFHISTCLKTQGAFYICGQSIHQCLPSNWTGTCTIGYVTPDIFIAPGNLSLPIPIYGNSPLPRVRRAIHFIPLLAGLGILAGTGTGIAGITKASLTYSQLSKEIANNIDTMAKALTTMQEQIDSLAAVVLQNRRGLDMLTAAQGGICLALDEKCCFWVNQSGKVQDNIRQLLNQASSLRERATQGWLNWEGTWKWFSWVLPLTGPLVSLLLLLLFGPCLLNLITQFVSSRLQAIKLQTNLSAGRHPRNI

SEQ ID NO: 8609 - protein, 538 aa, synthetic construct; identical to SEQ ID NO: 8422

SEQ ID NO: 8610 - protein, 554 aa, synthetic construct
MGLLLLVLILTPSLAAYRHPDFPLLEKAQQLLQSTGSPYSTNCWLCTSSSTETPGTAYPASPREWTSIEAELHISYRWDPNLKGLMRPANSLLSTVKQDFPDIRQKPPIFGPIFTNINLMGIAPICVMAKRKNGTNVGTLPSTVCNVTFTVDSNQQTYQTYTHNQFRHQPRFPKPPNITFPQGTLLDKSSRFCQGRPSSCSTRNFWFRPADYNQCLQISNLSSTAEWVLLDQTRNSLFWENKTKGANQSQTPCVQVLAGMTIATSYLGISAVSEFFGTSLTPLFHFHISTCLKTQGAFYICGQSIHQCLPSNWTGTCTIGYVTPDIFIAPGNLSLPIPIYGNSPLPRVRRAIHFIPLLAGLGILAGTGTGIAGITKASLTYSQLSKEIANNIDTMAKALTTMQEQIDSLAAVVLQNRRGLDMLTAAQGGICLALDEKCCFWVNQSGKVQDNIRQLLNQASSLRERATQGWLNWEGTWKWFSWVLPLTGPLVSLLLLLLFGPCLLNLITQFVSSRLQAIKLGSTSPVWWNSADIQHSGGRSSLEGPNKNSSQKRI

SEQ ID NO: 8611 - protein, 555 aa, synthetic construct
MGLLLLVLILTPSLAAYRHPDFPLLEKAQQLLQSTGSPYSTNCWLCTSSSTETPGTAYPASPREWTSIEAELHISYRWDPNLKGLMRPANSLLSTVKQDFPDIRQKPPIFGPIFTNINLMGIAPICVMAKRKNGTNVGTLPSTVCNVTFTVDSNQQTYQTYTHNQFRHQPRFPKPPNITFPQGTLLDKSSRFCQGRPSSCSTRNFWFRPADYNQCLQISNLSSTAEWVLLDQTRNSLFWENKTKGANQSQTPCVQVLAGMTIATSYLGISAVSEFFGTSLTPLFHFHISTCLKTQGAFYICGQSIHQCLPSNWTGTCTIGYVTPDIFIAPGNLSLPIPIYGNSPLPRVRRAIHFIPLLAGLGILAGTGTGIAGITKASLTYSQLSKEIANNIDTMAKALTTMQEQIDSLAAVVLQNRRGLDMLTAAQGGICLALDEKCCFWVNQSGKVQDNIRQLLNQASSLRERATQGWLNWEGTWKWFSWVLPLTGPLVSLLLLLLFGPCLLNLITQFVSSKLNIIHAMGSTSPVWWNSADIQHSGGRSSLEGPNKNSSQKRI

SEQ ID NO: 8612 - protein, 538 aa, synthetic construct
MGLLLLVLILTPSLAAYRHPDFPLLEKAQQLLQSTGSPYSTNCWLCTSSSTETPGTAYPASPREWTSIEAELHISYRWDPNLKGLMRPANSLLSTVKQDFPDIRQKPPIFGPIFTNINLMGIAPICVMAKRKNGTNVGTLPSTVCNVTFTVDSNQQTYQTYTHNQFRHQPRFPKPPNITFPQGTLLDKSSRFCQGRPSSCSTRNFWFRPADYNQCLQISNLSSTAEWVLLDQTRNSLFWENKTKGANQSQTPCVQVLAGMTIATSYLGISAVSEFFGTSLTPLFHFHISTCLKTQGAFYICGQSIHQCLPSNWTGTCTIGYVTPDIFIAPGNLSLPIPIYGNSPLPRVRRAIHFIPLLAGLGILAGTGTGIAGITKASLTYSQLSKEIANNIDTMAKALTTMQEQIDSLAAVVLQNRRGLDMLTAAQGGICLALDEKCCFWVNQSGKVQDNIRQLLNQASSLRERATQGWLNWEGTWKWFSWVLPLTGPLVSLLLLLLFGPCIFNRLTAFINDKLNIIHAMVLTQQYQVLRTDEEAQD

SEQ ID NO: 8613 - protein, 530 aa, synthetic construct
MGLLLLVLILTPSLAAYRHPDFPLLEKAQQLLQSTGSPYSTNCWLCTSSSTETPGTAYPASPREWTSIEAELHISYRWDPNLKGLMRPANSLLSTVKQDFPDIRQKPPIFGPIFTNINLMGIAPICVMAKRKNGTNVGTLPSTVCNVTFTVDSNQQTYQTYTHNQFRHQPRFPKPPNITFPQGTLLDKSSRFCQGRPSSCSTRNFWFRPADYNQCLQISNLSSTAEWVLLDQTRNSLFWENKTKGANQSQTPCVQVLAGMTIATSYLGISAVSEFFGTSLTPLFHFHISTCLKTQGAFYICGQSIHQCLPSNWTGTCTIGYVTPDIFIAPGNLSLPIPIYGNSPLPRVRRAIHFIPLLAGLGILAGTGTGIAGITKASLTYSQLSKEIANNIDTMAKALTTMQEQIDSLAAVVLQNRRGLDMLTAAQGGICLALDEKCCFWVNQSGKVQDNIRQLLNQASSLRERATQGWLNWEGTWKWFSWVLPLTGPLVSLLLLLLFGPCIFNRLTAFINDKLNIIHAMVLTQQYQVL

SEQ ID NO: 8614 - protein, 529 aa, synthetic construct
MGLLLLVLILTPSLAAYRHPDFPLLEKAQQLLQSTGSPYSTNCWLCTSSSTETPGTAYPASPREWTSIEAELHISYRWDPNLKGLMRPANSLLSTVKQDFPDIRQKPPIFGPIFTNINLMGIAPICVMAKRKNGTNVGTLPSTVCNVTFTVDSNQQTYQTYTHNQFRHQPRFPKPPNITFPQGTLLDKSSRFCQGRPSSCSTRNFWFRPADYNQCLQISNLSSTAEWVLLDQTRNSLFWENKTKGANQSQTPCVQVLAGMTIATSYLGISAVSEFFGTSLTPLFHFHISTCLKTQGAFYICGQSIHQCLPSNWTGTCTIGYVTPDIFIAPGNLSLPIPIYGNSPLPRVRRAIHFIPLLAGLGILAGTGTGIAGITKASLTYSQLSKEIANNIDTMAKALTTMQEQIDSLAAVVLQNRRGLDMLTAAQGGICLALDEKCCFWVNQSGKVQDNIRQLLNQASSLRERATQGWLNWEGTWKWFSWVLPLTGPLVSLLLLLLFGPCIFNRLTAFINDKLNIIHAMVLTQQYQV

SEQ ID NO: 8615 - protein, 528 aa, synthetic construct
MGLLLLVLILTPSLAAYRHPDFPLLEKAQQLLQSTGSPYSTNCWLCTSSSTETPGTAYPASPREWTSIEAELHISYRWDPNLKGLMRPANSLLSTVKQDFPDIRQKPPIFGPIFTNINLMGIAPICVMAKRKNGTNVGTLPSTVCNVTFTVDSNQQTYQTYTHNQFRHQPRFPKPPNITFPQGTLLDKSSRFCQGRPSSCSTRNFWFRPADYNQCLQISNLSSTAEWVLLDQTRNSLFWENKTKGANQSQTPCVQVLAGMTIATSYLGISAVSEFFGTSLTPLFHFHISTCLKTQGAFYICGQSIHQCLPSNWTGTCTIGYVTPDIFIAPGNLSLPIPIYGNSPLPRVRRAIHFIPLLAGLGILAGTGTGIAGITKASLTYSQLSKEIANNIDTMAKALTTMQEQIDSLAAVVLQNRRGLDMLTAAQGGICLALDEKCCFWVNQSGKVQDNIRQLLNQASSLRERATQGWLNWEGTWKWFSWVLPLTGPLVSLLLLLLFGPCIFNRLTAFINDKLNIIHAMVLTQQYQ

SEQ ID NO: 8616 - protein, 527 aa, synthetic construct
MGLLLLVLILTPSLAAYRHPDFPLLEKAQQLLQSTGSPYSTNCWLCTSSSTETPGTAYPASPREWTSIEAELHISYRWDPNLKGLMRPANSLLSTVKQDFPDIRQKPPIFGPIFTNINLMGIAPICVMAKRKNGTNVGTLPSTVCNVTFTVDSNQQTYQTYTHNQFRHQPRFPKPPNITFPQGTLLDKSSRFCQGRPSSCSTRNFWFRPADYNQCLQISNLSSTAEWVLLDQTRNSLFWENKTKGANQSQTPCVQVLAGMTIATSYLGISAVSEFFGTSLTPLFHFHISTCLKTQGAFYICGQSIHQCLPSNWTGTCTIGYVTPDIFIAPGNLSLPIPIYGNSPLPRVRRAIHFIPLLAGLGILAGTGTGIAGITKASLTYSQLSKEIANNIDTMAKALTTMQEQIDSLAAVVLQNRRGLDMLTAAQGGICLALDEKCCFWVNQSGKVQDNIRQLLNQASSLRERATQGWLNWEGTWKWFSWVLPLTGPLVSLLLLLLFGPCIFNRLTAFINDKLNIIHAMVLTQQY

SEQ ID NO: 8617 - protein, 526 aa, synthetic construct
MGLLLLVLILTPSLAAYRHPDFPLLEKAQQLLQSTGSPYSTNCWLCTSSSTETPGTAYPASPREWTSIEAELHISYRWDPNLKGLMRPANSLLSTVKQDFPDIRQKPPIFGPIFTNINLMGIAPICVMAKRKNGTNVGTLPSTVCNVTFTVDSNQQTYQTYTHNQFRHQPRFPKPPNITFPQGTLLDKSSRFCQGRPSSCSTRNFWFRPADYNQCLQISNLSSTAEWVLLDQTRNSLFWENKTKGANQSQTPCVQVLAGMTIATSYLGISAVSEFFGTSLTPLFHFHISTCLKTQGAFYICGQSIHQCLPSNWTGTCTIGYVTPDIFIAPGNLSLPIPIYGNSPLPRVRRAIHFIPLLAGLGILAGTGTGIAGITKASLTYSQLSKEIANNIDTMAKALTTMQEQIDSLAAVVLQNRRGLDMLTAAQGGICLALDEKCCFWVNQSGKVQDNIRQLLNQASSLRERATQGWLNWEGTWKWFSWVLPLTGPLVSLLLLLLFGPCIFNRLTAFINDKLNIIHAMVLTQQ

SEQ ID NO: 8618 - protein, 525 aa, synthetic construct
MGLLLLVLILTPSLAAYRHPDFPLLEKAQQLLQSTGSPYSTNCWLCTSSSTETPGTAYPASPREWTSIEAELHISYRWDPNLKGLMRPANSLLSTVKQDFPDIRQKPPIFGPIFTNINLMGIAPICVMAKRKNGTNVGTLPSTVCNVTFTVDSNQQTYQTYTHNQFRHQPRFPKPPNITFPQGTLLDKSSRFCQGRPSSCSTRNFWFRPADYNQCLQISNLSSTAEWVLLDQTRNSLFWENKTKGANQSQTPCVQVLAGMTIATSYLGISAVSEFFGTSLTPLFHFHISTCLKTQGAFYICGQSIHQCLPSNWTGTCTIGYVTPDIFIAPGNLSLPIPIYGNSPLPRVRRAIHFIPLLAGLGILAGTGTGIAGITKASLTYSQLSKEIANNIDTMAKALTTMQEQIDSLAAVVLQNRRGLDMLTAAQGGICLALDEKCCFWVNQSGKVQDNIRQLLNQASSLRERATQGWLNWEGTWKWFSWVLPLTGPLVSLLLLLLFGPCIFNRLTAFINDKLNIIHAMVLTQ

SEQ ID NO: 8619 - protein, 524 aa, synthetic construct
MGLLLLVLILTPSLAAYRHPDFPLLEKAQQLLQSTGSPYSTNCWLCTSSSTETPGTAYPASPREWTSIEAELHISYRWDPNLKGLMRPANSLLSTVKQDFPDIRQKPPIFGPIFTNINLMGIAPICVMAKRKNGTNVGTLPSTVCNVTFTVDSNQQTYQTYTHNQFRHQPRFPKPPNITFPQGTLLDKSSRFCQGRPSSCSTRNFWFRPADYNQCLQISNLSSTAEWVLLDQTRNSLFWENKTKGANQSQTPCVQVLAGMTIATSYLGISAVSEFFGTSLTPLFHFHISTCLKTQGAFYICGQSIHQCLPSNWTGTCTIGYVTPDIFIAPGNLSLPIPIYGNSPLPRVRRAIHFIPLLAGLGILAGTGTGIAGITKASLTYSQLSKEIANNIDTMAKALTTMQEQIDSLAAVVLQNRRGLDMLTAAQGGICLALDEKCCFWVNQSGKVQDNIRQLLNQASSLRERATQGWLNWEGTWKWFSWVLPLTGPLVSLLLLLLFGPCIFNRLTAFINDKLNIIHAMVLT

SEQ ID NO: 8620 - protein, 573 aa, synthetic construct
MGLLLLVLILTPSLAAYRHPDFPLLEKAQQLLQSTGSPYSTNCWLCTSSSTETPGTAYPASPREWTSIEAELHISYRWDPNLKGLMRPANSLLSTVKQDFPDIRQKPPIFGPIFTNINLMGIAPICVMAKRKNGTNVGTLPSTVCNVTFTVDSNQQTYQTYTHNQFRHQPRFPKPPNITFPQGTLLDKSSRFCQGRPSSCSTRNFWFRPADYNQCLQISNLSSTAEWVLLDQTRNSLFWENKTKGANQSQTPCVQVLAGMTIATSYLGISAVSEFFGTSLTPLFHFHISTCLKTQGAFYICGQSIHQCLPSNWTGTCTIGYVTPDIFIAPGNLSLPIPIYGNSPLPRVRRAIHFIPLLAGLGILAGTGTGIAGITKASLTYSQLSKEIANNIDTMAKALTTMQEQIDSLAAVVLQNRRGLDMLTAAQGGICLALDEKCCFWVNQSGKVQDNIRQLLNQASSLRERATQGWLNWEGTWKWFSWVLPLTGPLVSLLLLLLFGPCIFNLLVNFVSSRIEAVKLQMEPKMQSKTKIYRRPLDRPASPRSDVNDIKGTPPEEISAAQPLLRPNSAGSS

SEQ ID NO: 8621 - protein, 550 aa, synthetic construct
MGLLLLVLILTPSLAAYRHPDFPLLEKAQQLLQSTGSPYSTNCWLCTSSSTETPGTAYPASPREWTSIEAELHISYRWDPNLKGLMRPANSLLSTVKQDFPDIRQKPPIFGPIFTNINLMGIAPICVMAKRKNGTNVGTLPSTVCNVTFTVDSNQQTYQTYTHNQFRHQPRFPKPPNITFPQGTLLDKSSRFCQGRPSSCSTRNFWFRPADYNQCLQISNLSSTAEWVLLDQTRNSLFWENKTKGANQSQTPCVQVLAGMTIATSYLGISAVSEFFGTSLTPLFHFHISTCLKTQGAFYICGQSIHQCLPSNWTGTCTIGYVTPDIFIAPGNLSLPIPIYGNSPLPRVRRAIHFIPLLAGLGILAGTGTGIAGITKASLTYSQLSKEIANNIDTMAKALTTMQEQIDSLAAVVLQNRRGLDMLTAAQGGICLALDEKCCFWVNQSGKVQDNIRQLLNQASSLRERATQGWLNWEGTWKWFSWVLPLTGPLVSLLLLLLFGPCIFNLLVNFVSSRIEAVKLQMEPKMQSKTKIYRRPLDRPASPRSDVNDI

SEQ ID NO: 8622 - protein, 559 aa, synthetic construct
MGLLLLVLILTPSLAAYRHPDFPLLEKAQQLLQSTGSPYSTNCWLCTSSSTETPGTAYPASPREWTSIEAELHISYRWDPNLKGLMRPANSLLSTVKQDFPDIRQKPPIFGPIFTNINLMGIAPICVMAKRKNGTNVGTLPSTVCNVTFTVDSNQQTYQTYTHNQFRHQPRFPKPPNITFPQGTLLDKSSRFCQGRPSSCSTRNFWFRPADYNQCLQISNLSSTAEWVLLDQTRNSLFWENKTKGANQSQTPCVQVLAGMTIATSYLGISAVSEFFGTSLTPLFHFHISTCLKTQGAFYICGQSIHQCLPSNWTGTCTIGYVTPDIFIAPGNLSLPIPIYGNSPLPRVRRAIHFIPLLAGLGILAGTGTGIAGITKASLTYSQLSKEIANNIDTMAKALTTMQEQIDSLAAVVLQNRRGLDMLTAAQGGICLALDEKCCFWVNQSGKVQDNIRQLLNQASSLRERATQGWLNWEGTWKWFSWVLPLTGPLVSLLLLLLFGPCIFNLLVNFVSSRIEAVKLQMEPKMQSKTKIYRRPLDRPASPRSDVNDIKGTPPEEIS

SEQ ID NO: 8623 - protein, 8 aa, synthetic construct
GGGGGGGG

SEQ ID NO: 8624 - protein, 8 aa, synthetic construct
GGGGGGGG

SEQ ID NO: 8625 - protein, 8 aa, synthetic construct
GGGGGGGG

SEQ ID NO: 8626 - protein, 8 aa, synthetic construct
GGGGGGGG

SEQ ID NO: 8627 - protein, 8 aa, synthetic construct
GGGGGGGG

SEQ ID NO: 8628 - protein, 8 aa, synthetic construct
GGGGGGGG

SEQ ID NO: 8629 - protein, 8 aa, synthetic construct
GGGGGGGG

SEQ ID NO: 8630 - protein, 8 aa, synthetic construct
GGGGGGGG

SEQ ID NO: 8631 - protein, 556 aa, synthetic construct
METDTLLLWVLLLWVPGSTGDGFDDPRKAIALVQKQHGKPCECSGGQVSEAPPNSIQQVTCPGKTAYLMTNQKWKCRVTPKNLTPSGGELQNCPCNTFQDSMHSSCYTEYRQCRANNKTYYTATLLKIRSGSLNEVQILQNPNQLLQSPCRGSINQPVCWSATAPIHISDGGGPLDTKRVWTVQKRLEQIHKAMHPELQYHPLALPKVRDDLSLDARTFDILNTTFRLLQMSNFSLAQDCWLCLKLGTPTPLAIPTPSLTYSLADSLANASCQIIPPLLVQPMQFSNSSCLSSPFINDTEQIDLGAVTFTNCTSVANVSSPLCALNGSVFLCGNNMAYTYLPQNWTGLCVQASLLPDIDIIPGDEPVPIPAIDHYIHRPKRAVQFIPLLAGLGITAAFTTGATGLGVSVTQYTKLSHQLISDVQVLSGTIQDLQDQVDSLAEVALQNRRGLDLLTAEQGGICLALQEKCCFYANKSGIVRNKIRTLQEELQKRRESLASNPLWTGLQGFLPYLLPLLGPLLTLLLILTIGPCVFSRLMAFINDRLNVVHAMVLAQQ

SEQ ID NO: 8632 - protein, 558 aa, synthetic construct
METDTLLLWVLLLWVPGSTGDGFDDPRKAIALVQKQHGKPCECSGGQVSEAPPNSIQQVTCPGKTAYLMTNQKWKCRVTPKNLTPSGGELQNCPCNTFQDSMHSSCYTEYRQCRANNKTYYTATLLKIRSGSLNEVQILQNPNQLLQSPCRGSINQPVCWSATAPIHISDGGGPLDTKRVWTVQKRLEQIHKAMHPELQYHPLALPKVRDDLSLDARTFDILNTTFRLLQMSNFSLAQDCWLCLKLGTPTPLAIPTPSLTYSLADSLANASCQIIPPLLVQPMQFSNSSCLSSPFINDTEQIDLGAVTFTNCTSVANVSSPLCALNGSVFLCGNNMAYTYLPQNWTGLCVQASLLPDIDIIPGDEPVPIPAIDHYIHRPKRAVQFIPLLAGLGITAAFTTGATGLGVSVTQYTKLSHQLISDVQVLSGTIQDLQDQVDSLAEVALQNRRGLDLLTAEQGGICLALQEKCCFYANKSGIVRNKIRTLQEELQKRRESLASNPLWTGLQGFLPYLLPLLGPLLTLLLILTIGPCVFSRLMAFINDRLNVVHAMVLAQQYQ

SEQ ID NO: 8633 - protein, 551 aa, synthetic construct
METDTLLLWVLLLWVPGSTGDGFDDPRKAIALVQKQHGKPCECSGGQVSEAPPNSIQQVTCPGKTAYLMTNQKWKCRVTPKNLTPSGGELQNCPCNTFQDSMHSSCYTEYRQCRANNKTYYTATLLKIRSGSLNEVQILQNPNQLLQSPCRGSINQPVCWSATAPIHISDGGGPLDTKRVWTVQKRLEQIHKAMHPELQYHPLALPKVRDDLSLDARTFDILNTTFRLLQMSNFSLAQDCWLCLKLGTPTPLAIPTPSLTYSLADSLANASCQIIPPLLVQPMQFSNSSCLSSPFINDTEQIDLGAVTFTNCTSVANVSSPLCALNGSVFLCGNNMAYTYLPQNWTGLCVQASLLPDIDIIPGDEPVPIPAIDHYIHRPKRAVQFIPLLAGLGITAAFTTGATGLGVSVTQYTKLSHQLISDVQVLSGTIQDLQDQVDSLAEVALQNRRGLDLLTAEQGGICLALQEKCCFYANKSGIVRNKIRTLQEELQKRRESLASNPLWTGLQGFLPYLLPLLGPLLTLLLILTIGPCVFSRLMAFINDRLNVVHAM

SEQ ID NO: 8634 - protein, 498 aa, synthetic construct
METDTLLLWVLLLWVPGSTGDAFEGSTRAPPPCCCTTSSSPYQEFLWRTRLPGNIDAPSYRSLSKGNSTFTAHTHMPRNCYNSATLCMHANTHYWTGKMINPSCPGGLGATVCWTYFTHTSMSDGGGIQGQAREKQVKEAISQLTRGHSTPSPYKGLVLSKLHETLRTHTRLVSLFNTTLTRLHEVSAQNPTNCWMCLPLHFRPYISIPVPEQWNNFSTEINTTSVLVGPLVSNLEITHTSNLTCVKFSNTIDTTSSQCIRWVTPPTRIVCLPSGIFFVCGTSAYHCLNGSSESMCFLSFLVPPMTIYTEQDLYNHVVPKPHNKRVPILPFVIRAGVLGRLGTGIGSITTSTQFYYKLSQEINGDMEQVTDSLVTLQDQLNSLAAVVLQNRRALDLLTAKRGGTCLFLGEERCYYVNQSRIVTEKVKEIRDRIQCRAEELQNTERWGLLSQWMPWTLPFLGPLAAIIFLLLFGPCIFNFLVKFVSSRIEAVKLQIVLQ

SEQ ID NO: 8635 - protein, 504 aa, synthetic construct
METDTLLLWVLLLWVPGSTGDAFEGSTRAPPPCCCTTSSSPYQEFLWRTRLPGNIDAPSYRSLSKGNSTFTAHTHMPRNCYNSATLCMHANTHYWTGKMINPSCPGGLGATVCWTYFTHTSMSDGGGIQGQAREKQVKEAISQLTRGHSTPSPYKGLVLSKLHETLRTHTRLVSLFNTTLTRLHEVSAQNPTNCWMCLPLHFRPYISIPVPEQWNNFSTEINTTSVLVGPLVSNLEITHTSNLTCVKFSNTIDTTSSQCIRWVTPPTRIVCLPSGIFFVCGTSAYHCLNGSSESMCFLSFLVPPMTIYTEQDLYNHVVPKPHNKRVPILPFVIRAGVLGRLGTGIGSITTSTQFYYKLSQEINGDMEQVTDSLVTLQDQLNSLAAVVLQNRRALDLLTAKRGGTCLFLGEERCYYVNQSRIVTEKVKEIRDRIQCRAEELQNTERWGLLSQWMPWTLPFLGPLAAIIFLLLFGPCIFNFLVKFVSSRIEAVKLQIVLQMEPQMQ

SEQ ID NO: 8636 - protein, 522 aa, synthetic construct
METDTLLLWVLLLWVPGSTGDAFEGSTRAPPPCCCTTSSSPYQEFLWRTRLPGNIDAPSYRSLSKGNSTFTAHTHMPRNCYNSATLCMHANTHYWTGKMINPSCPGGLGATVCWTYFTHTSMSDGGGIQGQAREKQVKEAISQLTRGHSTPSPYKGLVLSKLHETLRTHTRLVSLFNTTLTRLHEVSAQNPTNCWMCLPLHFRPYISIPVPEQWNNFSTEINTTSVLVGPLVSNLEITHTSNLTCVKFSNTIDTTSSQCIRWVTPPTRIVCLPSGIFFVCGTSAYHCLNGSSESMCFLSFLVPPMTIYTEQDLYNHVVPKPHNKRVPILPFVIRAGVLGRLGTGIGSITTSTQFYYKLSQEINGDMEQVTDSLVTLQDQLNSLAAVVLQNRRALDLLTAKRGGTCLFLGEERCYYVNQSRIVTEKVKEIRDRIQCRAEELQNTERWGLLSQWMPWTLPFLGPLAAIIFLLLFGPCIFNFLVKFVSSRIEAVKLQIVLQMEPQMQSMTKIYRGPLDRPARLCS

SEQ ID NO: 8637 - protein, 530 aa, synthetic construct
METDTLLLWVLLLWVPGSTGDAFEGSTRAPPPCCCTTSSSPYQEFLWRTRLPGNIDAPSYRSLSKGNSTFTAHTHMPRNCYNSATLCMHANTHYWTGKMINPSCPGGLGATVCWTYFTHTSMSDGGGIQGQAREKQVKEAISQLTRGHSTPSPYKGLVLSKLHETLRTHTRLVSLFNTTLTRLHEVSAQNPTNCWMCLPLHFRPYISIPVPEQWNNFSTEINTTSVLVGPLVSNLEITHTSNLTCVKFSNTIDTTSSQCIRWVTPPTRIVCLPSGIFFVCGTSAYHCLNGSSESMCFLSFLVPPMTIYTEQDLYNHVVPKPHNKRVPILPFVIRAGVLGRLGTGIGSITTSTQFYYKLSQEINGDMEQVTDSLVTLQDQLNSLAAVVLQNRRALDLLTAKRGGTCLFLGEERCYYVNQSRIVTEKVKEIRDRIQCRAEELQNTERWGLLSQWMPWTLPFLGPLAAIIFLLLFGPCIFNFLVKFVSSRIEAVKLQIVLQMEPQMQSMTKIYRGPLDRPARLCSDVNDIEVT

SEQ ID NO: 8638 - protein, 542 aa, synthetic construct
METDTLLLWVLLLWVPGSTGDAFEGSTRAPPPCCCTTSSSPYQEFLWRTRLPGNIDAPSYRSLSKGNSTFTAHTHMPRNCYNSATLCMHANTHYWTGKMINPSCPGGLGATVCWTYFTHTSMSDGGGIQGQAREKQVKEAISQLTRGHSTPSPYKGLVLSKLHETLRTHTRLVSLFNTTLTRLHEVSAQNPTNCWMCLPLHFRPYISIPVPEQWNNFSTEINTTSVLVGPLVSNLEITHTSNLTCVKFSNTIDTTSSQCIRWVTPPTRIVCLPSGIFFVCGTSAYHCLNGSSESMCFLSFLVPPMTIYTEQDLYNHVVPKPHNKRVPILPFVIRAGVLGRLGTGIGSITTSTQFYYKLSQEINGDMEQVTDSLVTLQDQLNSLAAVVLQNRRALDLLTAKRGGTCLFLGEERCYYVNQSRIVTEKVKEIRDRIQCRAEELQNTERWGLLSQWMPWTLPFLGPLAAIIFLLLFGPCIFNFLVKFVSSRIEAVKLQIVLQMEPQMQSMTKIYRGPLDRPARLCSDVNDIEVTPPEEISTAQPLL

SEQ ID NO: 8639 - protein, 658 aa, synthetic construct
MGQELSQHQIYVGQLKEALKIRGVKVKGNDLFKFFDFVKDTCPWFPQEGTIDIKRWRRVGDCLQDYYNTFGPEKIPVTAFSYWNLIRDLIDKKEADPQVMAAVAQTEHILKVSSRSNLTKPPQDTEEDLISLESDHEEIKSPSVTDKEMPHENKPKKYPILQMLQKEEEINKPNQSDINWDDLEEEAAKYHNPDLPPLTSYPPPYNKTHNEASAPIVMAAIDPKEELKQKIAQLEEQIKLEELHQSLIIRLQKLKTGNEKIPNSDAMEGSLRPPQRPGQHVPKGGLVASRHREDSSPKDVFPVTETIDERGQAWRHHTGFDFTIIKELKTAASQYGATAPYTLAIVESVAENWLTPTDWNTLVRAVLSGGDHLIWKSEFFENCRDTAKRNQQAGNGWDFDMLTGLGNYADTQAQMQYDPGLFSQIQAAATKAWRKLPVKGDPGASLTAVKQGPDEPFSDFVHRLMTTAGRIFGNAETGVDYVKQLAYENANPACQAAIRPYRKKTDLTGYIRLCSDIGPSYQQGLAMAAAFSGQTVRDFLINKGRDKGGCFRCGKRGHFAKDCHENQNKNPEAKIPGLCPRCKRGRHWANECKSKTDSQGNPLSPRQGNGMRGQPQAPKQAYGAVSFVPASNSNPFQNLVEQPQEVQGWTSVPPPTQY

SEQ ID NO: 8640 - protein, 570 aa, synthetic construct
MRFLWRIIALYNIVTVYAGFGDPRKARGLLRKQYGQPCDCRGGQISEPPSDRITQVTCSGKTAYLMPDQSWKCKSTPRDTSPNGPLLECPCSSFQSSVHSSCYTSYQQCKSGNKTYYTATLLKTQTGSTNDVQVLGTTNKLVQSSCNGQKGKPVCWSTTAPIHISDGGGPLDIARIKTVQKKLEKIHKALYPELQYHPLALPEIRDNFRLDAQTFDILNATYNLLQMSNTSLAHDCWLCLKMGPPIPLAIPNFLLSYVNYSNESLVNNPCPIISPLLIQPMTFSNSFCLFSPSYSSTKEIDLGYVVFDNCTSIIHATDPLCAVNGSVFVCGNNMAYTYLPTNWTGLCVLATLLPDIDIIPGDEPIPIPAIEHFIYRPKRAIQFIPLLAGLGITTAFTTGATGLGVSLTQYTKLSNQLISDVQTLSSTIQDLQDQVDSLAEVVLQNRRGLDLLTAEQGGICLALQEKCCFYANKSGIVRDKIKTLQEELEKRRKGLAANPLWTGLDGLLPYLLPFLGPLLTLLLFLTLGPIILNKLMAFVRKQIEAFQAKPIQVHYHHLEMTENGESYLPQ

SEQ ID NO: 8641 - protein, 558 aa, synthetic construct
MRFLWRIIALYNIVTVYAGFGDPRKARGLLRKQYGQPCDCRGGQISEPPSDRITQVTCSGKTAYLMPDQSWKCKSTPRDTSPNGPLLECPCSSFQSSVHSSCYTSYQQCKSGNKTYYTATLLKTQTGSTNDVQVLGTTNKLVQSSCNGQKGKPVCWSTTAPIHISDGGGPLDIARIKTVQKKLEKIHKALYPELQYHPLALPEIRDNFRLDAQTFDILNATYNLLQMSNTSLAHDCWLCLKMGPPIPLAIPNFLLSYVNYSNESLVNNPCPIISPLLIQPMTFSNSFCLFSPSYSSTKEIDLGYVVFDNCTSIIHATDPLCAVNGSVFVCGNNMAYTYLPTNWTGLCVLATLLPDIDIIPGDEPIPIPAIEHFIYRPKRAIQFIPLLAGLGITTAFTTGATGLGVSLTQYTKLSNQLISDVQTLSSTIQDLQDQVDSLAEVVLQNRRGLDLLTAEQGGICLALQEKCCFYANKSGIVRDKIKTLQEELEKRRKGLAANPLWTGLDGLLPYLLPFLGPLLTLLLFLTLGPIILNKLMAFVRKQIEAFQAKPIQVHYHHL

SEQ ID NO: 8642 - protein, 557 aa, synthetic construct
MRFLWRIIALYNIVTVYAGFGDPRKARGLLRKQYGQPCDCRGGQISEPPSDRITQVTCSGKTAYLMPDQSWKCKSTPRDTSPNGPLLECPCSSFQSSVHSSCYTSYQQCKSGNKTYYTATLLKTQTGSTNDVQVLGTTNKLVQSSCNGQKGKPVCWSTTAPIHISDGGGPLDIARIKTVQKKLEKIHKALYPELQYHPLALPEIRDNFRLDAQTFDILNATYNLLQMSNTSLAHDCWLCLKMGPPIPLAIPNFLLSYVNYSNESLVNNPCPIISPLLIQPMTFSNSFCLFSPSYSSTKEIDLGYVVFDNCTSIIHATDPLCAVNGSVFVCGNNMAYTYLPTNWTGLCVLATLLPDIDIIPGDEPIPIPAIEHFIYRPKRAIQFIPLLAGLGITTAFTTGATGLGVSLTQYTKLSNQLISDVQTLSSTIQDLQDQVDSLAEVVLQNRRGLDLLTAEQGGICLALQEKCCFYANKSGIVRDKIKTLQEELEKRRKGLAANPLWTGLDGLLPYLLPFLGPLLTLLLFLTLGPIILNKLMAFVRKQIEAFQAKPIQVHYHH

SEQ ID NO: 8643 - protein, 562 aa, synthetic construct; identical to SEQ ID NO: 8418

SEQ ID NO: 8644 - protein, 561 aa, synthetic construct
MGFTTKIIFLYNLVLVYAGFDDPRKAIELVQKRYGRPCDCSGGQVSEPPSDRVSQVTCSGKTAYLMPDQRWKCKSIPKDTSPSGPLQECPCNSYQSSVHSSCYTSYQQCRSGNKTYYTATLLKTQTGGTSDVQVLGSTNKLIQSPCNGIKGQSICWSTTAPIHVSDGGGPLDTTRIKSVQRKLEEIHKALYPELQYHPLAIPKVRDNLMVDAQTLNILNATYNLLLMSNTSLVDDCWLCLKLGPPTPLAIPNFLLSYVTRSSDNISCLIIPPLLVQPMQFSNSSCLFSPSYNSTEEIDLGHVAFSNCTSITNVTGPICAVNGSVFLCGNNMAYTYLPTNWTGLCVLATLLPDIDIIPGDEPVPIPAIDHFIYRPKRAIQFIPLLAGLGITAAFTTGATGLGVSVTQYTKLSNQLISDVQILSSTIQDLQDQVDSLAEVVLQNRRGLDLLTAEQGGICLALQEKCCFYVNKSGIVRDKIKTLQEELERRRKDLASNPLWTGLQGLLPYLLPFLGPLLTLLLLLTIGPCIFNRLVQFVKDRISVVQALVLTQQYHQLKPLEYE

SEQ ID NO: 8645 - protein, 560 aa, synthetic construct
MGFTTKIIFLYNLVLVYAGFDDPRKAIELVQKRYGRPCDCSGGQVSEPPSDRVSQVTCSGKTAYLMPDQRWKCKSIPKDTSPSGPLQECPCNSYQSSVHSSCYTSYQQCRSGNKTYYTATLLKTQTGGTSDVQVLGSTNKLIQSPCNGIKGQSICWSTTAPIHVSDGGGPLDTTRIKSVQRKLEEIHKALYPELQYHPLAIPKVRDNLMVDAQTLNILNATYNLLLMSNTSLVDDCWLCLKLGPPTPLAIPNFLLSYVTRSSDNISCLIIPPLLVQPMQFSNSSCLFSPSYNSTEEIDLGHVAFSNCTSITNVTGPICAVNGSVFLCGNNMAYTYLPTNWTGLCVLATLLPDIDIIPGDEPVPIPAIDHFIYRPKRAIQFIPLLAGLGITAAFTTGATGLGVSVTQYTKLSNQLISDVQILSSTIQDLQDQVDSLAEVVLQNRRGLDLLTAEQGGICLALQEKCCFYVNKSGIVRDKIKTLQEELERRRKDLASNPLWTGLQGLLPYLLPFLGPLLTLLLLLTIGPCIFNRLVQFVKDRISVVQALVLTQQYHQLKPLEY

SEQ ID NO: 8646 - protein, 559 aa, synthetic construct
MGFTTKIIFLYNLVLVYAGFDDPRKAIELVQKRYGRPCDCSGGQVSEPPSDRVSQVTCSGKTAYLMPDQRWKCKSIPKDTSPSGPLQECPCNSYQSSVHSSCYTSYQQCRSGNKTYYTATLLKTQTGGTSDVQVLGSTNKLIQSPCNGIKGQSICWSTTAPIHVSDGGGPLDTTRIKSVQRKLEEIHKALYPELQYHPLAIPKVRDNLMVDAQTLNILNATYNLLLMSNTSLVDDCWLCLKLGPPTPLAIPNFLLSYVTRSSDNISCLIIPPLLVQPMQFSNSSCLFSPSYNSTEEIDLGHVAFSNCTSITNVTGPICAVNGSVFLCGNNMAYTYLPTNWTGLCVLATLLPDIDIIPGDEPVPIPAIDHFIYRPKRAIQFIPLLAGLGITAAFTTGATGLGVSVTQYTKLSNQLISDVQILSSTIQDLQDQVDSLAEVVLQNRRGLDLLTAEQGGICLALQEKCCFYVNKSGIVRDKIKTLQEELERRRKDLASNPLWTGLQGLLPYLLPFLGPLLTLLLLLTIGPCIFNRLVQFVKDRISVVQALVLTQQYHQLKPLE

SEQ ID NO: 8647 - protein, 558 aa, synthetic construct
MGFTTKIIFLYNLVLVYAGFDDPRKAIELVQKRYGRPCDCSGGQVSEPPSDRVSQVTCSGKTAYLMPDQRWKCKSIPKDTSPSGPLQECPCNSYQSSVHSSCYTSYQQCRSGNKTYYTATLLKTQTGGTSDVQVLGSTNKLIQSPCNGIKGQSICWSTTAPIHVSDGGGPLDTTRIKSVQRKLEEIHKALYPELQYHPLAIPKVRDNLMVDAQTLNILNATYNLLLMSNTSLVDDCWLCLKLGPPTPLAIPNFLLSYVTRSSDNISCLIIPPLLVQPMQFSNSSCLFSPSYNSTEEIDLGHVAFSNCTSITNVTGPICAVNGSVFLCGNNMAYTYLPTNWTGLCVLATLLPDIDIIPGDEPVPIPAIDHFIYRPKRAIQFIPLLAGLGITAAFTTGATGLGVSVTQYTKLSNQLISDVQILSSTIQDLQDQVDSLAEVVLQNRRGLDLLTAEQGGICLALQEKCCFYVNKSGIVRDKIKTLQEELERRRKDLASNPLWTGLQGLLPYLLPFLGPLLTLLLLLTIGPCIFNRLVQFVKDRISVVQALVLTQQYHQLKPL

SEQ ID NO: 8648 - protein, 557 aa, synthetic construct
MGFTTKIIFLYNLVLVYAGFDDPRKAIELVQKRYGRPCDCSGGQVSEPPSDRVSQVTCSGKTAYLMPDQRWKCKSIPKDTSPSGPLQECPCNSYQSSVHSSCYTSYQQCRSGNKTYYTATLLKTQTGGTSDVQVLGSTNKLIQSPCNGIKGQSICWSTTAPIHVSDGGGPLDTTRIKSVQRKLEEIHKALYPELQYHPLAIPKVRDNLMVDAQTLNILNATYNLLLMSNTSLVDDCWLCLKLGPPTPLAIPNFLLSYVTRSSDNISCLIIPPLLVQPMQFSNSSCLFSPSYNSTEEIDLGHVAFSNCTSITNVTGPICAVNGSVFLCGNNMAYTYLPTNWTGLCVLATLLPDIDIIPGDEPVPIPAIDHFIYRPKRAIQFIPLLAGLGITAAFTTGATGLGVSVTQYTKLSNQLISDVQILSSTIQDLQDQVDSLAEVVLQNRRGLDLLTAEQGGICLALQEKCCFYVNKSGIVRDKIKTLQEELERRRKDLASNPLWTGLQGLLPYLLPFLGPLLTLLLLLTIGPCIFNRLVQFVKDRISVVQALVLTQQYHQLKP

SEQ ID NO: 8649 - protein, 556 aa, synthetic construct
MGFTTKIIFLYNLVLVYAGFDDPRKAIELVQKRYGRPCDCSGGQVSEPPSDRVSQVTCSGKTAYLMPDQRWKCKSIPKDTSPSGPLQECPCNSYQSSVHSSCYTSYQQCRSGNKTYYTATLLKTQTGGTSDVQVLGSTNKLIQSPCNGIKGQSICWSTTAPIHVSDGGGPLDTTRIKSVQRKLEEIHKALYPELQYHPLAIPKVRDNLMVDAQTLNILNATYNLLLMSNTSLVDDCWLCLKLGPPTPLAIPNFLLSYVTRSSDNISCLIIPPLLVQPMQFSNSSCLFSPSYNSTEEIDLGHVAFSNCTSITNVTGPICAVNGSVFLCGNNMAYTYLPTNWTGLCVLATLLPDIDIIPGDEPVPIPAIDHFIYRPKRAIQFIPLLAGLGITAAFTTGATGLGVSVTQYTKLSNQLISDVQILSSTIQDLQDQVDSLAEVVLQNRRGLDLLTAEQGGICLALQEKCCFYVNKSGIVRDKIKTLQEELERRRKDLASNPLWTGLQGLLPYLLPFLGPLLTLLLLLTIGPCIFNRLVQFVKDRISVVQALVLTQQYHQLK

SEQ ID NO: 8650 - protein, 555 aa, synthetic construct
MGFTTKIIFLYNLVLVYAGFDDPRKAIELVQKRYGRPCDCSGGQVSEPPSDRVSQVTCSGKTAYLMPDQRWKCKSIPKDTSPSGPLQECPCNSYQSSVHSSCYTSYQQCRSGNKTYYTATLLKTQTGGTSDVQVLGSTNKLIQSPCNGIKGQSICWSTTAPIHVSDGGGPLDTTRIKSVQRKLEEIHKALYPELQYHPLAIPKVRDNLMVDAQTLNILNATYNLLLMSNTSLVDDCWLCLKLGPPTPLAIPNFLLSYVTRSSDNISCLIIPPLLVQPMQFSNSSCLFSPSYNSTEEIDLGHVAFSNCTSITNVTGPICAVNGSVFLCGNNMAYTYLPTNWTGLCVLATLLPDIDIIPGDEPVPIPAIDHFIYRPKRAIQFIPLLAGLGITAAFTTGATGLGVSVTQYTKLSNQLISDVQILSSTIQDLQDQVDSLAEVVLQNRRGLDLLTAEQGGICLALQEKCCFYVNKSGIVRDKIKTLQEELERRRKDLASNPLWTGLQGLLPYLLPFLGPLLTLLLLLTIGPCIFNRLVQFVKDRISVVQALVLTQQYHQL

SEQ ID NO: 8651 - protein, 554 aa, synthetic construct
MGFTTKIIFLYNLVLVYAGFDDPRKAIELVQKRYGRPCDCSGGQVSEPPSDRVSQVTCSGKTAYLMPDQRWKCKSIPKDTSPSGPLQECPCNSYQSSVHSSCYTSYQQCRSGNKTYYTATLLKTQTGGTSDVQVLGSTNKLIQSPCNGIKGQSICWSTTAPIHVSDGGGPLDTTRIKSVQRKLEEIHKALYPELQYHPLAIPKVRDNLMVDAQTLNILNATYNLLLMSNTSLVDDCWLCLKLGPPTPLAIPNFLLSYVTRSSDNISCLIIPPLLVQPMQFSNSSCLFSPSYNSTEEIDLGHVAFSNCTSITNVTGPICAVNGSVFLCGNNMAYTYLPTNWTGLCVLATLLPDIDIIPGDEPVPIPAIDHFIYRPKRAIQFIPLLAGLGITAAFTTGATGLGVSVTQYTKLSNQLISDVQILSSTIQDLQDQVDSLAEVVLQNRRGLDLLTAEQGGICLALQEKCCFYVNKSGIVRDKIKTLQEELERRRKDLASNPLWTGLQGLLPYLLPFLGPLLTLLLLLTIGPCIFNRLVQFVKDRISVVQALVLTQQYHQ

SEQ ID NO: 8652 - protein, 553 aa, synthetic construct
MGFTTKIIFLYNLVLVYAGFDDPRKAIELVQKRYGRPCDCSGGQVSEPPSDRVSQVTCSGKTAYLMPDQRWKCKSIPKDTSPSGPLQECPCNSYQSSVHSSCYTSYQQCRSGNKTYYTATLLKTQTGGTSDVQVLGSTNKLIQSPCNGIKGQSICWSTTAPIHVSDGGGPLDTTRIKSVQRKLEEIHKALYPELQYHPLAIPKVRDNLMVDAQTLNILNATYNLLLMSNTSLVDDCWLCLKLGPPTPLAIPNFLLSYVTRSSDNISCLIIPPLLVQPMQFSNSSCLFSPSYNSTEEIDLGHVAFSNCTSITNVTGPICAVNGSVFLCGNNMAYTYLPTNWTGLCVLATLLPDIDIIPGDEPVPIPAIDHFIYRPKRAIQFIPLLAGLGITAAFTTGATGLGVSVTQYTKLSNQLISDVQILSSTIQDLQDQVDSLAEVVLQNRRGLDLLTAEQGGICLALQEKCCFYVNKSGIVRDKIKTLQEELERRRKDLASNPLWTGLQGLLPYLLPFLGPLLTLLLLLTIGPCIFNRLVQFVKDRISVVQALVLTQQYH

SEQ ID NO: 8653 - protein, 552 aa, synthetic construct
MGFTTKIIFLYNLVLVYAGFDDPRKAIELVQKRYGRPCDCSGGQVSEPPSDRVSQVTCSGKTAYLMPDQRWKCKSIPKDTSPSGPLQECPCNSYQSSVHSSCYTSYQQCRSGNKTYYTATLLKTQTGGTSDVQVLGSTNKLIQSPCNGIKGQSICWSTTAPIHVSDGGGPLDTTRIKSVQRKLEEIHKALYPELQYHPLAIPKVRDNLMVDAQTLNILNATYNLLLMSNTSLVDDCWLCLKLGPPTPLAIPNFLLSYVTRSSDNISCLIIPPLLVQPMQFSNSSCLFSPSYNSTEEIDLGHVAFSNCTSITNVTGPICAVNGSVFLCGNNMAYTYLPTNWTGLCVLATLLPDIDIIPGDEPVPIPAIDHFIYRPKRAIQFIPLLAGLGITAAFTTGATGLGVSVTQYTKLSNQLISDVQILSSTIQDLQDQVDSLAEVVLQNRRGLDLLTAEQGGICLALQEKCCFYVNKSGIVRDKIKTLQEELERRRKDLASNPLWTGLQGLLPYLLPFLGPLLTLLLLLTIGPCIFNRLVQFVKDRISVVQALVLTQQY

SEQ ID NO: 8654 - protein, 551 aa, synthetic construct
MGFTTKIIFLYNLVLVYAGFDDPRKAIELVQKRYGRPCDCSGGQVSEPPSDRVSQVTCSGKTAYLMPDQRWKCKSIPKDTSPSGPLQECPCNSYQSSVHSSCYTSYQQCRSGNKTYYTATLLKTQTGGTSDVQVLGSTNKLIQSPCNGIKGQSICWSTTAPIHVSDGGGPLDTTRIKSVQRKLEEIHKALYPELQYHPLAIPKVRDNLMVDAQTLNILNATYNLLLMSNTSLVDDCWLCLKLGPPTPLAIPNFLLSYVTRSSDNISCLIIPPLLVQPMQFSNSSCLFSPSYNSTEEIDLGHVAFSNCTSITNVTGPICAVNGSVFLCGNNMAYTYLPTNWTGLCVLATLLPDIDIIPGDEPVPIPAIDHFIYRPKRAIQFIPLLAGLGITAAFTTGATGLGVSVTQYTKLSNQLISDVQILSSTIQDLQDQVDSLAEVVLQNRRGLDLLTAEQGGICLALQEKCCFYVNKSGIVRDKIKTLQEELERRRKDLASNPLWTGLQGLLPYLLPFLGPLLTLLLLLTIGPCIFNRLVQFVKDRISVVQALVLTQQ

SEQ ID NO: 8655 - protein, 550 aa, synthetic construct
MGFTTKIIFLYNLVLVYAGFDDPRKAIELVQKRYGRPCDCSGGQVSEPPSDRVSQVTCSGKTAYLMPDQRWKCKSIPKDTSPSGPLQECPCNSYQSSVHSSCYTSYQQCRSGNKTYYTATLLKTQTGGTSDVQVLGSTNKLIQSPCNGIKGQSICWSTTAPIHVSDGGGPLDTTRIKSVQRKLEEIHKALYPELQYHPLAIPKVRDNLMVDAQTLNILNATYNLLLMSNTSLVDDCWLCLKLGPPTPLAIPNFLLSYVTRSSDNISCLIIPPLLVQPMQFSNSSCLFSPSYNSTEEIDLGHVAFSNCTSITNVTGPICAVNGSVFLCGNNMAYTYLPTNWTGLCVLATLLPDIDIIPGDEPVPIPAIDHFIYRPKRAIQFIPLLAGLGITAAFTTGATGLGVSVTQYTKLSNQLISDVQILSSTIQDLQDQVDSLAEVVLQNRRGLDLLTAEQGGICLALQEKCCFYVNKSGIVRDKIKTLQEELERRRKDLASNPLWTGLQGLLPYLLPFLGPLLTLLLLLTIGPCIFNRLVQFVKDRISVVQALVLTQ

SEQ ID NO: 8656 - protein, 1546 aa, synthetic construct
MDPQCTMGLSNILFVMAFLLSGAAPLKIQAYFNETADLPCQFANSQNQSLSELVVFWQDQENLVLNEVYLGKEKFDSVHSKYMGRTSFDSDSWTLRLHNLQIKDKGLYQCIIHHKKPTGMIRIHQMNSELSVLANFSQPEIVPISNITENVYINLTCSSIHGYPEPKKMSVLLRTKNSTIEYDGIMQKSQDNVTELYDVSISLSVSFPDVTSNMTIFCILETDKTRLLSSPFSIELEDPQPPPDHIPWITAVLPTVIICVMVFCLILWKWKKKKRPRNSYKCGTNTMEREESEQTKKREKIHIPERSDEAQRVFKSSKTSSCDKSDTCFGSGEGRGSLLTCGDVEENPGPALPVTALLLPLALLLHAARPQVQLLESGAELARPGASVKMSCKASGYTFTRYTMHWVKQRPGQGLEWIGYINPSRGYTNYNQKFKDKATLTTDKSSSTAYMQLSSLTSEDSAVYYCAGYYDDHYCLDYWGQGTLVTVSSGGGGSGGGGSGGGGSDIVMTQSPAIMSASPGEKVTMTCSASSSVSYMNWYQQKSGTSPKRWIYDTSKLASGVPAHFRGSGSGTSYSLTISGMEAEDAATYYCQQWSSNPFTFGSGTKLEIKRDPSTTTPAPRPPTPAPTIASQPLSLRPEACRPAAGGAVHTRGLDFACDIYIWAPLAGTCGVLLLSLVITLYCKRGRKKGSGEGRGSLLTCGDVEENPGPMEYASDASLDPEAPWPPAPRARACRVLPWALVAGLLLLLLLAAACAVFLACPWAVSGARASPGSAASPRLREGPELSPDDPAGLLDLRQGMFAQLVAQNVLLIDGPLSWYSDPGLAGVSLTGGLSYKEDTKELVVAKAGVYYVFFQLELRRVVAGEGSGSVSLALHLQPLRSAAGAAALALTVDLPPASSEARNSAFGFQGRLLHLSAGQRLGVHLHTEARARHAWQLTQGATVLGLFRVTPEIPAGLPSPRSEGSGEGRGSLLTCGDVEENPGPGFTTKIIFLYNLVLVYAGFDDPRKAIELVQKRYGRPCDCSGGQVSEPPSDRVSQVTCSGKTAYLMPDQRWKCKSIPKDTSPSGPLQECPCNSYQSSVHSSCYTSYQQCRSGNKTYYTATLLKTQTGGTSDVQVLGSTNKLIQSPCNGIKGQSICWSTTAPIHVSDGGGPLDTTRIKSVQRKLEEIHKALYPELQYHPLAIPKVRDNLMVDAQTLNILNATYNLLLMSNTSLVDDCWLCLKLGPPTPLAIPNFLLSYVTRSSDNISCLIIPPLLVQPMQFSNSSCLFSPSYNSTEEIDLGHVAFSNCTSITNVTGPICAVNGSVFLCGNNMAYTYLPTNWTGLCVLATLLPDIDIIPGDEPVPIPAIDHFIYRPKRAIQFIPLLAGLGITAAFTTGATGLGVSVTQYTKLSNQLISDVQILSSTIQDLQDQVDSLAEVVLQNRRGLDLLTAEQGGICLALQEKCCFYVNKSGIVRDKIKTLQEELERRRKDLASNPLWTGLQGLLPYLLPFLGPLLTLLLLLTIGPCIFNRLTAFINDKLNIIHAMGSTSPVWWNSADIQHS

SEQ ID NO: 8657 - protein, 1539 aa, synthetic construct
MDPQCTMGLSNILFVMAFLLSGAAPLKIQAYFNETADLPCQFANSQNQSLSELVVFWQDQENLVLNEVYLGKEKFDSVHSKYMGRTSFDSDSWTLRLHNLQIKDKGLYQCIIHHKKPTGMIRIHQMNSELSVLANFSQPEIVPISNITENVYINLTCSSIHGYPEPKKMSVLLRTKNSTIEYDGIMQKSQDNVTELYDVSISLSVSFPDVTSNMTIFCILETDKTRLLSSPFSIELEDPQPPPDHIPWITAVLPTVIICVMVFCLILWKWKKKKRPRNSYKCGTNTMEREESEQTKKREKIHIPERSDEAQRVFKSSKTSSCDKSDTCFGSGEGRGSLLTCGDVEENPGPALPVTALLLPLALLLHAARPQVQLLESGAELARPGASVKMSCKASGYTFTRYTMHWVKQRPGQGLEWIGYINPSRGYTNYNQKFKDKATLTTDKSSSTAYMQLSSLTSEDSAVYYCAGYYDDHYCLDYWGQGTLVTVSSGGGGSGGGGSGGGGSDIVMTQSPAIMSASPGEKVTMTCSASSSVSYMNWYQQKSGTSPKRWIYDTSKLASGVPAHFRGSGSGTSYSLTISGMEAEDAATYYCQQWSSNPFTFGSGTKLEIKRDPSTTTPAPRPPTPAPTIASQPLSLRPEACRPAAGGAVHTRGLDFACDIYIWAPLAGTCGVLLLSLVITLYCKRGRKKGSGEGRGSLLTCGDVEENPGPMEYASDASLDPEAPWPPAPRARACRVLPWALVAGLLLLLLLAAACAVFLACPWAVSGARASPGSAASPRLREGPELSPDDPAGLLDLRQGMFAQLVAQNVLLIDGPLSWYSDPGLAGVSLTGGLSYKEDTKELVVAKAGVYYVFFQLELRRVVAGEGSGSVSLALHLQPLRSAAGAAALALTVDLPPASSEARNSAFGFQGRLLHLSAGQRLGVHLHTEARARHAWQLTQGATVLGLFRVTPEIPAGLPSPRSEGSGEGRGSLLTCGDVEENPGPGFTTKIIFLYNLVLVYAGFDDPRKAIELVQKRYGRPCDCSGGQVSEPPSDRVSQVTCSGKTAYLMPDQRWKCKSIPKDTSPSGPLQECPCNSYQSSVHSSCYTSYQQCRSGNKTYYTATLLKTQTGGTSDVQVLGSTNKLIQSPCNGIKGQSICWSTTAPIHVSDGGGPLDTTRIKSVQRKLEEIHKALYPELQYHPLAIPKVRDNLMVDAQTLNILNATYNLLLMSNTSLVDDCWLCLKLGPPTPLAIPNFLLSYVTRSSDNISCLIIPPLLVQPMQFSNSSCLFSPSYNSTEEIDLGHVAFSNCTSITNVTGPICAVNGSVFLCGNNMAYTYLPTNWTGLCVLATLLPDIDIIPGDEPVPIPAIDHFIYRPKRAIQFIPLLAGLGITAAFTTGATGLGVSVTQYTKLSNQLISDVQILSSTIQDLQDQVDSLAEVVLQNRRGLDLLTAEQGGICLALQEKCCFYVNKSGIVRDKIKTLQEELERRRKDLASNPLWTGLQGLLPYLLPFLGPLLTLLLLLTIGPCIFNRLTAFINDKLNIIHAMVLTQQYQVL

SEQ ID NO: 8658 - protein, 1572 aa, synthetic construct
MDPRCTMGLAILIFVTVLLISDAVSVETQAYFNGTAYLPCPFTKAQNISLSELVVFWQDQQKLVLYEHYLGTEKLDSVNAKYLGRTSFDRNNWTLRLHNVQIKDMGSYDCFIQKKPPTGSIILQQTLTELSVIANFSEPEIKLAQNVTGNSGINLTCTSKQGHPKPKKMYFLITNSTNEYGDNMQISQDNVTELFSISNSLSLSFPDGVWHMTVVCVLETESMKISSKPLNFTQEFPSPQTYWKEITASVTVALLLVMLLIIVCHKKPNQPSRPSNTASKLERDSNADRETINLKELEPQIASAKPNAEGSGEGRGSLLTCGDVEENPGPALPVTALLLPLALLLHAARPEVQLVESGGGLVQPGKSLKLSCEASGFTFSGYGMHWVRQAPGRGLESVAYITSSSINIKYADAVKGRFTVSRDNAKNLLFLQMNILKSEDTAMYYCARFDWDKNYWGQGTMVTVSSGGGGSGGGGSGGGGSDIQMTQSPSSLPASLGDRVTINCQASQDISNYLNWYQQKPGKAPKLLIYYTNKLADGVPSRFSGSGSGRDSSFTISSLESEDIGSYYCQQYYNYPWTFGPGTKLEIKRDPSTTTPAPRPPTPAPTIASQPLSLRPEACRPAAGGAVHTRGLDFACDIYIWAPLAGTCGVLLLSLVITLYCKRGRKKGSGEGRGSLLTCGDVEENPGPMDQHTLDVEDTADARHPAGTSCPSDAALLRDTGLLADAALLSDTVRPTNAALPTDAAYPAVNVRDREAAWPPALNFCSRHPKLYGLVALVLLLLIAACVPIFTRTEPRPALTITTSPNLGTRENNADQVTPVSHIGCPNTTQQGSPVFAKLLAKNQASLCNTTLNWHSQDGAGSSYLSQGLRYEEDKKELVVDSPGLYYVFLELKLSPTFTNTGHKVQGWVSLVLQAKPQVDDFDNLALTVELFPCSMENKLVDRSWSQLLLLKAGHRLSVGLRAYLHGAQDAYRDWELSYPNTTSFGLFLVKPDNPWEGSGEGRGSLLTCGDVEENPGPGFTTKIIFLYNLVLVYAGFDDPRKAIELVQKRYGRPCDCSGGQVSEPPSDRVSQVTCSGKTAYLMPDQRWKCKSIPKDTSPSGPLQECPCNSYQSSVHSSCYTSYQQCRSGNKTYYTATLLKTQTGGTSDVQVLGSTNKLIQSPCNGIKGQSICWSTTAPIHVSDGGGPLDTTRIKSVQRKLEEIHKALYPELQYHPLAIPKVRDNLMVDAQTLNILNATYNLLLMSNTSLVDDCWLCLKLGPPTPLAIPNFLLSYVTRSSDNISCLIIPPLLVQPMQFSNSSCLFSPSYNSTEEIDLGHVAFSNCTSITNVTGPICAVNGSVFLCGNNMAYTYLPTNWTGLCVLATLLPDIDIIPGDEPVPIPAIDHFIYRPKRAIQFIPLLAGLGITAAFTTGATGLGVSVTQYTKLSNQLISDVQILSSTIQDLQDQVDSLAEVVLQNRRGLDLLTAEQGGICLALQEKCCFYVNKSGIVRDKIKTLQEELERRRKDLASNPLWTGLQGLLPYLLPFLGPLLTLLLLLTIGPCIFNRLTAFINDKLNIIHAMVLTQQYQVL

SEQ ID NO: 8659 - protein, 1549 aa, synthetic construct
MYLRCTMELNNILFVMTLLLYGAASMKSQAYFNKTGELPCHFTNSQNISLDELVVFWQDQDKLVLYELYRGKENPQNVHRKYKGRTSFDKDNWTLRLHNIQIKDKGLYQCFVHHKGPKGLVPMHQMNSDLSVLANFSQPEIMVTSNRTENSGIINLTCSSIQGYPEPKEMYFLVKTENSSTKYDTVMKKSQNNVTELYNVSISLSFSVPEASNVSIFCVLQLESMKLPSLPYNIDAHTKPTPDGDHILWIAALLVMLVILCGMVFFLTLRKRKKKQPGPSHECETNKVERKESEQTKERVRYHETERSDEAQCVNISKTASGDNSTTQFGSGEGRGSLLTCGDVEENPGPALPVTALLLPLALLLHAARPEVQLVESGGGLVQPKGSLKLSCATSGFTFNIYAMNWVRQAPGKGLEWVARIRSKSKNYATYYAGSVKDRFTISRDDSQSMLYLQMNNLKTEDTAMYYCVRRGYFDVWGAGTTVTVSSSGGGGSGGGGSGGGGSIIVMTQSPKSMSMSVGERVTLSCRASENVDSFVSWYQQKPDQSPQLLIFGASNRSTGVPDRFTGSGSATDFTLTITSVQSEDLAAYHCGQTYSYPFTFGSGTNLEIKRSDPTTTPAPRPPTPAPTIASQPLSLRPEACRPAAGGAVHTRGLDFACDIYIWAPLAGTCGVLLLSLVITLYCNHRNRRRVCKCPRPVVGSGEGRGSLLTCGDVEENPGPMRPRSDAAPDPEAPRPPAPPGRACSPLPWALSAAMLLLVGTCAACALRAWVVPGPRPPALPALPAPLPDAGARLPDSPQAVFAQLVARDVQLKEGPLRWYSDPGLAGVFLGPGLSYDQHTRELMVVEPGLYYVFLHLKLQRVMSSTGSGSVSAALHLQPLGTEAAALDLTLDLPPPSSEARDSAAGFRGSLLHLDAGQRLRVHLRAEAGAHPAWQLAQGATILGLFRVATKVPTGLPSSWPMDTGPGSPPLDGEGSGEGRGSLLTCGDVEENPGPGFTTKIIFLYNLVLVYAGFDDPRKAIELVQKRYGRPCDCSGGQVSEPPSDRVSQVTCSGKTAYLMPDQRWKCKSIPKDTSPSGPLQECPCNSYQSSVHSSCYTSYQQCRSGNKTYYTATLLKTQTGGTSDVQVLGSTNKLIQSPCNGIKGQSICWSTTAPIHVSDGGGPLDTTRIKSVQRKLEEIHKALYPELQYHPLAIPKVRDNLMVDAQTLNILNATYNLLLMSNTSLVDDCWLCLKLGPPTPLAIPNFLLSYVTRSSDNISCLIIPPLLVQPMQFSNSSCLFSPSYNSTEEIDLGHVAFSNCTSITNVTGPICAVNGSVFLCGNNMAYTYLPTNWTGLCVLATLLPDIDIIPGDEPVPIPAIDHFIYRPKRAIQFIPLLAGLGITAAFTTGATGLGVSVTQYTKLSNQLISDVQILSSTIQDLQDQVDSLAEVVLQNRRGLDLLTAEQGGICLALQEKCCFYVNKSGIVRDKIKTLQEELERRRKDLASNPLWTGLQGLLPYLLPFLGPLLTLLLLLTIGPCIFNRLTAFINDKLNIIHAMVLTQQYQVL

SEQ ID NO: 8660 - protein, 1469 aa, synthetic construct
MDPQCTMGLSNILFVMAFLLSGAAPLKIQAYFNETADLPCQFANSQNQSLSELVVFWQDQENLVLNEVYLGKEKFDSVHSKYMGRTSFDSDSWTLRLHNLQIKDKGLYQCIIHHKKPTGMIRIHQMNSELSVLANFSQPEIVPISNITENVYINLTCSSIHGYPEPKKMSVLLRTKNSTIEYDGIMQKSQDNVTELYDVSISLSVSFPDVTSNMTIFCILETDKTRLLSSPFSIELEDPQPPPDHIPWITAVLPTVIICVMVFCLILWKWKKKKRPRNSYKCGTNTMEREESEQTKKREKIHIPERSDEAQRVFKSSKTSSCDKSDTCFGSGEGRGSLLTCGDVEENPGPALPVTALLLPLALLLHAARPQVQLLESGAELARPGASVKMSCKASGYTFTRYTMHWVKQRPGQGLEWIGYINPSRGYTNYNQKFKDKATLTTDKSSSTAYMQLSSLTSEDSAVYYCAGYYDDHYCLDYWGQGTLVTVSSGGGGSGGGGSGGGGSDIVMTQSPAIMSASPGEKVTMTCSASSSVSYMNWYQQKSGTSPKRWIYDTSKLASGVPAHFRGSGSGTSYSLTISGMEAEDAATYYCQQWSSNPFTFGSGTKLEIKRDPSTTTPAPRPPTPAPTIASQPLSLRPEACRPAAGGAVHTRGLDFACDIYIWAPLAGTCGVLLLSLVITLYCKRGRKKGSGEGRGSLLTCGDVEENPGPMEYASDASLDPEAPWPPAPRARACRVLPWALVAGLLLLLLLAAACAVFLACPWAVSGARASPGSAASPRLREGPELSPDDPAGLLDLRQGMFAQLVAQNVLLIDGPLSWYSDPGLAGVSLTGGLSYKEDTKELVVAKAGVYYVFFQLELRRVVAGEGSGSVSLALHLQPLRSAAGAAALALTVDLPPASSEARNSAFGFQGRLLHLSAGQRLGVHLHTEARARHAWQLTQGATVLGLFRVTPEIPAGLPSPRSEGSGEGRGSLLTCGDVEENPGPETDTLLLWVLLLWVPGSTGDAPPPCRCMTSSSPYQEFLWRMQRPGNIDAPSYRSLSKGTPTFTAHTHMPRNCYHSATLCMHANTHYWTGKMINPSCPGGLGVTVCWTYFTQTGMSDGGGVQDQAREKHVKEVISQLTRVHGTSSPYKGLDLSKLHETLRTHTRLVSLFNTTLTGLHEVSAQNPTNCWICLPLNFRPYVSIPVPEQWNNFSTEINTTSVLVGPLVSNLEITHTSNLTCVKFSNTTYTTNSQCIRWVTPPTQIVCLPSGIFFVCGTSAYRCLNGSSESMCFLSFLVPPMTIYTEQDLYSYVISKPRNKRVPILPFVIGAGVLGALGTGIGGITTSTQFYYKLSQELNGDMERVADSLVTLQDQLNSLAAVVLQNRRALDLLTAERGGTCLFLGEECCYYVNQSGIVTEKVKEIRDRIQRRAEELRNTGPWGLLSQWMPWILPFLGPLAAIILLLLFGPCIFNLLVNFVSSRIEAVK

SEQ ID NO: 8661 - protein, 1502 aa, synthetic construct
MDPRCTMGLAILIFVTVLLISDAVSVETQAYFNGTAYLPCPFTKAQNISLSELVVFWQDQQKLVLYEHYLGTEKLDSVNAKYLGRTSFDRNNWTLRLHNVQIKDMGSYDCFIQKKPPTGSIILQQTLTELSVIANFSEPEIKLAQNVTGNSGINLTCTSKQGHPKPKKMYFLITNSTNEYGDNMQISQDNVTELFSISNSLSLSFPDGVWHMTVVCVLETESMKISSKPLNFTQEFPSPQTYWKEITASVTVALLLVMLLIIVCHKKPNQPSRPSNTASKLERDSNADRETINLKELEPQIASAKPNAEGSGEGRGSLLTCGDVEENPGPALPVTALLLPLALLLHAARPEVQLVESGGGLVQPGKSLKLSCEASGFTFSGYGMHWVRQAPGRGLESVAYITSSSINIKYADAVKGRFTVSRDNAKNLLFLQMNILKSEDTAMYYCARFDWDKNYWGQGTMVTVSSGGGGSGGGGSGGGGSDIQMTQSPSSLPASLGDRVTINCQASQDISNYLNWYQQKPGKAPKLLIYYTNKLADGVPSRFSGSGSGRDSSFTISSLESEDIGSYYCQQYYNYPWTFGPGTKLEIKRDPSTTTPAPRPPTPAPTIASQPLSLRPEACRPAAGGAVHTRGLDFACDIYIWAPLAGTCGVLLLSLVITLYCKRGRKKGSGEGRGSLLTCGDVEENPGPMDQHTLDVEDTADARHPAGTSCPSDAALLRDTGLLADAALLSDTVRPTNAALPTDAAYPAVNVRDREAAWPPALNFCSRHPKLYGLVALVLLLLIAACVPIFTRTEPRPALTITTSPNLGTRENNADQVTPVSHIGCPNTTQQGSPVFAKLLAKNQASLCNTTLNWHSQDGAGSSYLSQGLRYEEDKKELVVDSPGLYYVFLELKLSPTFTNTGHKVQGWVSLVLQAKPQVDDFDNLALTVELFPCSMENKLVDRSWSQLLLLKAGHRLSVGLRAYLHGAQDAYRDWELSYPNTTSFGLFLVKPDNPWEGSGEGRGSLLTCGDVEENPGPETDTLLLWVLLLWVPGSTGDAPPPCRCMTSSSPYQEFLWRMQRPGNIDAPSYRSLSKGTPTFTAHTHMPRNCYHSATLCMHANTHYWTGKMINPSCPGGLGVTVCWTYFTQTGMSDGGGVQDQAREKHVKEVISQLTRVHGTSSPYKGLDLSKLHETLRTHTRLVSLFNTTLTGLHEVSAQNPTNCWICLPLNFRPYVSIPVPEQWNNFSTEINTTSVLVGPLVSNLEITHTSNLTCVKFSNTTYTTNSQCIRWVTPPTQIVCLPSGIFFVCGTSAYRCLNGSSESMCFLSFLVPPMTIYTEQDLYSYVISKPRNKRVPILPFVIGAGVLGALGTGIGGITTSTQFYYKLSQELNGDMERVADSLVTLQDQLNSLAAVVLQNRRALDLLTAERGGTCLFLGEECCYYVNQSGIVTEKVKEIRDRIQRRAEELRNTGPWGLLSQWMPWILPFLGPLAAIILLLLFGPCIFNLLVNFVSSRIEAVK

SEQ ID NO: 8662 - protein, 1479 aa, synthetic construct
MYLRCTMELNNILFVMTLLLYGAASMKSQAYFNKTGELPCHFTNSQNISLDELVVFWQDQDKLVLYELYRGKENPQNVHRKYKGRTSFDKDNWTLRLHNIQIKDKGLYQCFVHHKGPKGLVPMHQMNSDLSVLANFSQPEIMVTSNRTENSGIINLTCSSIQGYPEPKEMYFLVKTENSSTKYDTVMKKSQNNVTELYNVSISLSFSVPEASNVSIFCVLQLESMKLPSLPYNIDAHTKPTPDGDHILWIAALLVMLVILCGMVFFLTLRKRKKKQPGPSHECETNKVERKESEQTKERVRYHETERSDEAQCVNISKTASGDNSTTQFGSGEGRGSLLTCGDVEENPGPALPVTALLLPLALLLHAARPEVQLVESGGGLVQPKGSLKLSCATSGFTFNIYAMNWVRQAPGKGLEWVARIRSKSKNYATYYAGSVKDRFTISRDDSQSMLYLQMNNLKTEDTAMYYCVRRGYFDVWGAGTTVTVSSSGGGGSGGGGSGGGGSIIVMTQSPKSMSMSVGERVTLSCRASENVDSFVSWYQQKPDQSPQLLIFGASNRSTGVPDRFTGSGSATDFTLTITSVQSEDLAAYHCGQTYSYPFTFGSGTNLEIKRSDPTTTPAPRPPTPAPTIASQPLSLRPEACRPAAGGAVHTRGLDFACDIYIWAPLAGTCGVLLLSLVITLYCNHRNRRRVCKCPRPVVGSGEGRGSLLTCGDVEENPGPMRPRSDAAPDPEAPRPPAPPGRACSPLPWALSAAMLLLVGTCAACALRAWVVPGPRPPALPALPAPLPDAGARLPDSPQAVFAQLVARDVQLKEGPLRWYSDPGLAGVFLGPGLSYDQHTRELMVVEPGLYYVFLHLKLQRVMSSTGSGSVSAALHLQPLGTEAAALDLTLDLPPPSSEARDSAAGFRGSLLHLDAGQRLRVHLRAEAGAHPAWQLAQGATILGLFRVATKVPTGLPSSWPMDTGPGSPPLDGEGSGEGRGSLLTCGDVEENPGPETDTLLLWVLLLWVPGSTGDAPPPCRCMTSSSPYQEFLWRMQRPGNIDAPSYRSLSKGTPTFTAHTHMPRNCYHSATLCMHANTHYWTGKMINPSCPGGLGVTVCWTYFTQTGMSDGGGVQDQAREKHVKEVISQLTRVHGTSSPYKGLDLSKLHETLRTHTRLVSLFNTTLTGLHEVSAQNPTNCWICLPLNFRPYVSIPVPEQWNNFSTEINTTSVLVGPLVSNLEITHTSNLTCVKFSNTTYTTNSQCIRWVTPPTQIVCLPSGIFFVCGTSAYRCLNGSSESMCFLSFLVPPMTIYTEQDLYSYVISKPRNKRVPILPFVIGAGVLGALGTGIGGITTSTQFYYKLSQELNGDMERVADSLVTLQDQLNSLAAVVLQNRRALDLLTAERGGTCLFLGEECCYYVNQSGIVTEKVKEIRDRIQRRAEELRNTGPWGLLSQWMPWILPFLGPLAAIILLLLFGPCIFNLLVNFVSSRIEAVK

SEQ ID NO: 8663 - protein, 1509 aa, synthetic construct
MDPQCTMGLSNILFVMAFLLSGAAPLKIQAYFNETADLPCQFANSQNQSLSELVVFWQDQENLVLNEVYLGKEKFDSVHSKYMGRTSFDSDSWTLRLHNLQIKDKGLYQCIIHHKKPTGMIRIHQMNSELSVLANFSQPEIVPISNITENVYINLTCSSIHGYPEPKKMSVLLRTKNSTIEYDGIMQKSQDNVTELYDVSISLSVSFPDVTSNMTIFCILETDKTRLLSSPFSIELEDPQPPPDHIPWITAVLPTVIICVMVFCLILWKWKKKKRPRNSYKCGTNTMEREESEQTKKREKIHIPERSDEAQRVFKSSKTSSCDKSDTCFGSGEGRGSLLTCGDVEENPGPALPVTALLLPLALLLHAARPQVQLLESGAELARPGASVKMSCKASGYTFTRYTMHWVKQRPGQGLEWIGYINPSRGYTNYNQKFKDKATLTTDKSSSTAYMQLSSLTSEDSAVYYCAGYYDDHYCLDYWGQGTLVTVSSGGGGSGGGGSGGGGSDIVMTQSPAIMSASPGEKVTMTCSASSSVSYMNWYQQKSGTSPKRWIYDTSKLASGVPAHFRGSGSGTSYSLTISGMEAEDAATYYCQQWSSNPFTFGSGTKLEIKRDPSTTTPAPRPPTPAPTIASQPLSLRPEACRPAAGGAVHTRGLDFACDIYIWAPLAGTCGVLLLSLVITLYCKRGRKKGSGEGRGSLLTCGDVEENPGPMEYASDASLDPEAPWPPAPRARACRVLPWALVAGLLLLLLLAAACAVFLACPWAVSGARASPGSAASPRLREGPELSPDDPAGLLDLRQGMFAQLVAQNVLLIDGPLSWYSDPGLAGVSLTGGLSYKEDTKELVVAKAGVYYVFFQLELRRVVAGEGSGSVSLALHLQPLRSAAGAAALALTVDLPPASSEARNSAFGFQGRLLHLSAGQRLGVHLHTEARARHAWQLTQGATVLGLFRVTPEIPAGLPSPRSEGSGEGRGSLLTCGDVEENPGPETDTLLLWVLLLWVPGSTGDAPPPCRCMTSSSPYQEFLWRMQRPGNIDAPSYRSLSKGTPTFTAHTHMPRNCYHSATLCMHANTHYWTGKMINPSCPGGLGVTVCWTYFTQTGMSDGGGVQDQAREKHVKEVISQLTRVHGTSSPYKGLDLSKLHETLRTHTRLVSLFNTTLTGLHEVSAQNPTNCWICLPLNFRPYVSIPVPEQWNNFSTEINTTSVLVGPLVSNLEITHTSNLTCVKFSNTTYTTNSQCIRWVTPPTQIVCLPSGIFFVCGTSAYRCLNGSSESMCFLSFLVPPMTIYTEQDLYSYVISKPRNKRVPILPFVIGAGVLGALGTGIGGITTSTQFYYKLSQELNGDMERVADSLVTLQDQLNSLAAVVLQNRRALDLLTAERGGTCLFLGEECCYYVNQSGIVTEKVKEIRDRIQRRAEELRNTGPWGLLSQWMPWILPFLGPLAAIILLLLFGPCIFNLLVNFVSSRIEAVKLQMEPKMQSKTKIYRRPLDRPASPRSDVNDIKGTPPEEIS

SEQ ID NO: 8664 - protein, 14 aa, synthetic construct
GGGGGGGGGGGGGG

SEQ ID NO: 8665 - protein, 14 aa, synthetic construct
GGGGGGGGGGGGGG

SEQ ID NO: 8666 - protein, 14 aa, synthetic construct
GGGGGGGGGGGGGG

SEQ ID NO: 8667 - protein, 14 aa, synthetic construct
GGGGGGGGGGGGGG

SEQ ID NO: 8668 - protein, 14 aa, synthetic construct
GGGGGGGGGGGGGG

SEQ ID NO: 8669 - protein, 14 aa, synthetic construct
GGGGGGGGGGGGGG

SEQ ID NO: 8670 - protein, 14 aa, synthetic construct
GGGGGGGGGGGGGG

SEQ ID NO: 8671 - protein, 14 aa, synthetic construct
GGGGGGGGGGGGGG

SEQ ID NO: 8672 - protein, 14 aa, synthetic construct
GGGGGGGGGGGGGG

SEQ ID NO: 8673 - protein, 14 aa, synthetic construct
GGGGGGGGGGGGGG

SEQ ID NO: 8674 - protein, 14 aa, synthetic construct
GGGGGGGGGGGGGG

SEQ ID NO: 8675 - protein, 14 aa, synthetic construct
GGGGGGGGGGGGGG

SEQ ID NO: 8676 - protein, 14 aa, synthetic construct
GGGGGGGGGGGGGG

SEQ ID NO: 8677 - protein, 14 aa, synthetic construct
GGGGGGGGGGGGGG

SEQ ID NO: 8678 - protein, 14 aa, synthetic construct
GGGGGGGGGGGGGG

SEQ ID NO: 8679 - protein, 14 aa, synthetic construct
GGGGGGGGGGGGGG

SEQ ID NO: 8680 - protein, 14 aa, synthetic construct
GGGGGGGGGGGGGG

SEQ ID NO: 8681 - protein, 21 aa, synthetic construct
MALPVTALLLPLALLLHAARP

SEQ ID NO: 8682 - protein, 19 aa, synthetic construct
MDWIWRILFLVGAATGAHS

SEQ ID NO: 8683 - protein, 20 aa, synthetic construct
MPPPRLLFFLLFLTPMEVRP

SEQ ID NO: 8684 - protein, 10 aa, synthetic construct
GGGGGGGGGG

SEQ ID NO: 8685 - protein, 114 aa, synthetic construct
QEVTQIPAALSVPEGENLVLNCSFTDSAIYNLQWFRQDPGKGLTSLLLIQSSQREQTSGRLNASLDKSSGRSTLYIAASQPGDSATYLCAVRPTSGGSYIPTFGRGTSLIVHPY

SEQ ID NO: 8686 - protein, 109 aa, synthetic construct
QQGEEDPQALSIQEGENATMNCSYKTSINNLQWYRQNSGRGLVHLILIRSNEREKHSGRLRVTLDTSKKSSSLLITASRAADTASYFCATDGDTPLVFGKGTRLSVIAN

SEQ ID NO: 8687 - protein, 117 aa, synthetic construct
AQKVTQAQTEISVVEKEDVTLDCVYETRDTAYYLFWYKQPPSGELVFLIRQPWWGSSRGISGRYSWNFQKSTSSFNFTITASQVVDSAVYFCAMSVPDSRGHYQFTFGKGTKLSVIP

SEQ ID NO: 8688 - protein, 110 aa, synthetic construct
ENVEQHPSTLSVQEGDSAVIKCTYSDSASNYFPWYKQELGKRPQLIIDIRSNVGEKKDQRIAVTLNKTAKHFSLHITETQPEDSAVYFCAATEDYQLIWGAGTKLIIKPD

SEQ ID NO: 8689 - protein, 115 aa, synthetic construct
QRKEVEQDPGPFNVPEGATVAFNCTYSNSASQSFFWYRQDCRKEPKLLMSVYSSGNEDGRFTAQLNRASQYISLLIRDSKLSDSATYLCVVKPDPGAGSYQLTFGKGTKLSVIPN

SEQ ID NO: 8690 - protein, 115 aa, synthetic construct
KNQVEQSPQSLIILEGKNCTLQCNYTVSPFSNLRWYKQDTGRGPVSLTILTFSENTKSNGRYTATLDADTKQSSLHITASQLSDSASYICVVSGGTDSWGKLQFGAGTQVVVTPD

SEQ ID NO: 8691 - protein, 114 aa, synthetic construct
EDQVTQSPEALRLQEGESSSLNCSYTVSGLRGLFWYRQDPGKGPEFLFTLYSAGEEKEKERLKATLTKKESFLHITAPKPEDSATYLCAVQANRGSTLGRLYFGRGTQLTVWPD

SEQ ID NO: 8692 - protein, 113 aa, synthetic construct
KQEVTQIPAALSVPEGENLVLNCSFTDSAIYNLQWFRQDPGKGLTSLLLIQSSQREQTSGRLNASLDKSSGRSTLYIAASQPGDSATYLCAVRETSGSRLTFGEGTQLTVNPD

SEQ ID NO: 8693 - protein, 109 aa, synthetic construct
QNIDQPTEMTATEGAIVQINCTYQTSGFNGLFWYQQHAGEAPTFLSYNVLDGLEEKGRFSSFLSRSKGYSYLLLKELQMKDSASYLCASVDGNNRLAFGKGNQVVVIPN

SEQ ID NO: 8694 - protein, 10 aa, synthetic construct
GGGGGGGGGG

SEQ ID NO: 8695 - protein, 10 aa, synthetic construct
GGGGGGGGGG

SEQ ID NO: 8696 - protein, 10 aa, synthetic construct
GGGGGGGGGG

SEQ ID NO: 8697 - protein, 10 aa, synthetic construct
GGGGGGGGGG

SEQ ID NO: 8698 - protein, 10 aa, synthetic construct
GGGGGGGGGG

SEQ ID NO: 8699 - protein, 10 aa, synthetic construct
GGGGGGGGGG

SEQ ID NO: 8700 - protein, 10 aa, synthetic construct
GGGGGGGGGG

SEQ ID NO: 8701 - protein, 10 aa, synthetic construct
GGGGGGGGGG

SEQ ID NO: 8702 - protein, 112 aa, synthetic construct
NAGVTQTPKFQVLKTGQSMTLQCAQDMNHEYMSWYRQDPGMGLRLIHYSVAIQTTDQGEVPNGYNVSRSTIEDFPLRLLSAAPSQTSVYFCASSYLGNTGELFFGEGSRLTV

SEQ ID NO: 8703 - protein, 111 aa, synthetic construct
DGGITQSPKYLFRKEGQNVTLSCEQNLNHDAMYWYRQDPGQGLRLIYYSWAQGDFQKGDIAEGYSVSREKKESFPLTVTSAQKNPTAFYLCASSWGAPYEQYFGPGTRLTV

SEQ ID NO: 8704 - protein, 115 aa, synthetic construct
NAGVTQTPKFRVLKTGQSMTLLCAQDMNHEYMYWYRQDPGMGLRLIHYSGWGKDTAKGEVPDGYNVSRLKKQNFLLGLESAAPSQTSVYFCASKVGPGQHNSPLHFGNGTRLTVT

SEQ ID NO: 8705 - protein, 110 aa, synthetic construct
GITQSPKYLFRKEGQNVTLSCEQNLNHDAMYWYRQDPGQGLRLIYYSQIVNDFQKGDIAEGYSVSREKKESFPLTVTSAQKNPTAFYLCASSPGALYEQYFGPGTRLTVT

SEQ ID NO: 8706 - protein, 111 aa, synthetic construct
GVTQTPKFRVLKTGQSMTLLCAQDMNHEYMYWYRQDPGMGLRLIHYSVGEGTTAKGEVPDGYNVSRLKKQNFLLGLESAAPSQTSVYFCASRGYHRLNNEQFFGPGTRLTV

SEQ ID NO: 8707 - protein, 110 aa, synthetic construct
DVTQTPRNRITKTGKRIMLECSQTKGHDRMYWYRQDPGLGLRLIYYSFDVKDINKGEISDGYSVSRQAQAKFSLSLESAIPNQTALYFCATSGQGAYEEQFFGPGTRLTV

SEQ ID NO: 8708 - protein, 109 aa, synthetic construct
SRYLVKRTGEKVFLECVQDMDHENMFWYRQDPGLGLRLIYFSYDVKMKEKGDIPEGYSVSREKKERFSLILESASTNQTSMYLCASSLWGRLAKNIQYFGAGTRLSVLE

SEQ ID NO: 8709 - protein, 106 aa, synthetic construct
SRYLVKRTGEKVFLECVQDMDHENMFWYRQDPGLGLRLIYFSYDVKMKEKGDIPEGYSVSREKKERFSLILESASTNQTSMYLCASSFWGRSTDTQYFGPGTRLTV

SEQ ID NO: 8710 - protein, 113 aa, synthetic construct
GVTQSPTHLIKTRGQQVTLRCSPKSGHDTVSWYQQALGQGPQFIFQYYEEEERQRGNFPDRFSGHQFPNYSSELNVNALLLGDSALYLCASSLGWRGGRYNEQFFGPGTRLTV

SEQ ID NO: 8711 - protein, 10 aa, synthetic construct
GGGGGGGGGG

SEQ ID NO: 8712 - protein, 10 aa, synthetic construct
GGGGGGGGGG

SEQ ID NO: 8713 - protein, 10 aa, synthetic construct
GGGGGGGGGG

SEQ ID NO: 8714 - protein, 10 aa, synthetic construct
GGGGGGGGGG

SEQ ID NO: 8715 - protein, 10 aa, synthetic construct
GGGGGGGGGG

SEQ ID NO: 8716 - protein, 10 aa, synthetic construct
GGGGGGGGGG

SEQ ID NO: 8717 - protein, 10 aa, synthetic construct
GGGGGGGGGG

SEQ ID NO: 8718 - protein, 10 aa, synthetic construct
GGGGGGGGGG

SEQ ID NO: 8719 - protein, 108 aa, synthetic construct
DIQMTQSPSSLSASVGDRVTITCKASDHINNWLAWYQQKPGQAPKLLIYGATTLETGVPSRFSGSGSGTDYTLTISSLQPEDFATYYCQQSWNTPWTFGQGTKLEIKR

SEQ ID NO: 8720 - protein, 111 aa, synthetic construct
DIVLTQSPASLAVSLGQRATISCRASKSVSTSGYSYLHWYQQKPGQPPKLLIYLASNLESGVPARFSGSGSGTDFTLNIHPVEEEDAATYYCQHSRELPFTFGSGTKLEIK

SEQ ID NO: 8721 - protein, 107 aa, synthetic construct
DIQMTQSPSSLSASVGDRVTITCRASQNVGTAVAWFQQKPGKAPKILIYSASNRYTGVPSRSTGSGSGTDFTLTISSLQPEDFATYYCQQYSTYPLTFGQGTKLEIK

SEQ ID NO: 8722 - protein, 107 aa, synthetic construct
DIVLTQSQKFMSTSVGDRVSIICRASQSVGTAVAWYQLKAGQSPKLLIYSASNRFTGVPDRFTGSGSGTDFTLTISNVQSEDLADYFCQQYSTYPLAFGAGTKLELK

SEQ ID NO: 8723 - protein, 113 aa, synthetic construct
QPVLTQPPSASGTPGQRVTISCSGSSSNIGNNFVSWYQQLPGTAPKLLIYRNNQRPSGVPDRFSGSKTGTSASLAISGLRSEDEADYYCAAWDDSVRGPVFGGGTELTVLAAA

SEQ ID NO: 8724 - protein, 111 aa, synthetic construct
QPVLTQSSSASASLGSSVKLTCTLSSGHSSYIIAWHQQQPGKAPRYLMKVEGSGSYNKGSGIPERFSGSSSGADRYLTISNLQSEDEADYYCETWDSNTHVFGTGTKVTVL

SEQ ID NO: 8725 - protein, 111 aa, synthetic construct; identical to SEQ ID NO: 8724

SEQ ID NO: 8726 - protein, 113 aa, synthetic construct
DIVMTQSPSSLTVTAGEKVTMSCKSSQSLLNSGNQKNYLTWYQQKPGQPPKLLIYWASTRESGVPDRFTGSGSGTDFTLTISSVQAEDLAVYYCQNDYSYPLTFGAGTKLELK

SEQ ID NO: 8727 - protein, 114 aa, synthetic construct
DIVMTQSPDSLAVSLGERATINCESSQSLLNSGNQKNYLTWYQQKPGQPPKPLIYWASTRESGVPDRFSGSGSGTDFTLTISSLQAEDVAVYYCQNDYSYPYLFGQGTKLEIKR

SEQ ID NO: 8728 - protein, 108 aa, synthetic construct
DIVMTQSPATLSVSPGERATLSCRASQSVSNDVVWYQQKPGQAPRLLIYYASNRYTGIPARFSGSGSGTEFTLTISSLQSEDFAVYYCQQDYTSPWTFGQGTKLEIKR

SEQ ID NO: 8729 - protein, 108 aa, synthetic construct
DIQMTQSPSSLSASVGDRVTITCRASQDVSTAVAWYQQKPGKAPKLLIYSASFLYSGVPSRFSGSRSGTDFTLTISSLQPEDFATYYCQQYLYQPWTFGQGTKVEIKR

SEQ ID NO: 8730 - protein, 113 aa, synthetic construct
DIVMTQSPDSLAVSLGERATINCKSSQSLLYSSNSKNYLAWYQQKPGQPPKLLIYWASTRESGVPDRFSGSGSGTDFTLTISSLQAEDVAVYYCQQPYSYPLSFGAGTKLELK

SEQ ID NO: 8731 - protein, 108 aa, synthetic construct
DIQMTQSPSSLSASVGDRVTITCRASQDISNYLNWYQQKPGKAPKLLIYYTSRLHSGVPSRFSGSGSGTDFTLTISSLQPEDFATYYCQQGNTLPYTFGQGTKVEIKR

SEQ ID NO: 8732 - protein, 108 aa, synthetic construct
DIQMTQSPSSLSASVGDRVTITCKASQDVGTAVDWYQQKPGKAPKLLIYWASTRHTGVPSRFSGSGSGTDFTLTISSLQPEDFATYYCQQYNSYPLTFGQGTKVEIKR

SEQ ID NO: 8733 - protein, 109 aa, synthetic construct
DIQMTQSPSSLSASVGDRVTITCRASQDVNTAVAWYQQKPGKAPKLLIYSASFLYSGVPSRFSGSRSGTDFTLTISSLQPEDFATYYCQQAYTTPPTFGQGTKVEIKRT

SEQ ID NO: 8734 - protein, 108 aa, synthetic construct
SYVLTQPPSVSVAPGQTARITCGGNNIGGKSVHWYQQPPGQAPVVVVYDDSDRPSGIPERFSGSNSGNTATLTISRVEAGDEAVYYCQVWDSSSDHVVFGGGTKLTVL

SEQ ID NO: 8735 - protein, 10 aa, synthetic construct
GGGGGGGGGG

SEQ ID NO: 8736 - protein, 10 aa, synthetic construct
GGGGGGGGGG

SEQ ID NO: 8737 - protein, 10 aa, synthetic construct
GGGGGGGGGG

SEQ ID NO: 8738 - protein, 10 aa, synthetic construct
GGGGGGGGGG

SEQ ID NO: 8739 - protein, 10 aa, synthetic construct
GGGGGGGGGG

SEQ ID NO: 8740 - protein, 10 aa, synthetic construct
GGGGGGGGGG

SEQ ID NO: 8741 - protein, 10 aa, synthetic construct
GGGGGGGGGG

SEQ ID NO: 8742 - protein, 10 aa, synthetic construct
GGGGGGGGGG

SEQ ID NO: 8743 - protein, 121 aa, synthetic construct
QVQLQQPGAELVKPGASVKMSCKASGYAFSSYWINWMKQKPGQGLEWIGQIYPGDGDTNYNGKFKGRATLTADTSSSTAYMQLSSLTSEDSAVYFCARSITTVVGCAMDYWGQGTSVTVSS

SEQ ID NO: 8744 - protein, 121 aa, synthetic construct
QVQLVESGGGLVQPGGSLKLSCAASGFDFSRYWMSWVRQAPGKGLEWIGEINPTSSTINFTPSLKDKVFISRDNAKNTLYLQMSKVRSEDTALYYCARGNYYRYGDAMDYWGQGTSVTVSS

SEQ ID NO: 8745 - protein, 114 aa, synthetic construct
EVQLVESGGGLVQPGGSLRLSCAASGFTFSTYGMAWVRQTPDRRLELVATINSNGGKTYHPDSVKGRFTISRDNSKNTLYLQMNSLRAEDTAVYYCTREGLDYWGQGTLVTVSS

SEQ ID NO: 8746 - protein, 114 aa, synthetic construct
EVQLVESGGGIVQPGGSLKLSCAASGFTFNDFGMSWIRQTPDKRLELVATINTNGGTTHYPDSVKGRFSISRDNAKKFVYLQMSSLKSDDTAIYYCPREGLDYWGQGTTLTVSS

SEQ ID NO: 8747 - protein, 113 aa, synthetic construct
QVQLQQSGAEVKKPGESLKISCKGSGYTFTGYYMHWVRQAPGQRPEWLGRMNAKSGEADSAQRFQGRVTMTRDTSINTAYMELRDLRSDDTAVYYCTRGPLLWGQGTLVTVSS

SEQ ID NO: 8748 - protein, 122 aa, synthetic construct
EVQLVQSGAEVKKPGASVKVSCKASGYTFTSYYMHWVRQAPGQGLEWMGIINPSGGRTSYAQKFQGRVTMTRDTSTGTVYMELSSLRSEDTAVYYCARSHCSGGSCYSIDYWGQGTLVTVSS

SEQ ID NO: 8749 - protein, 122 aa, synthetic construct; identical to SEQ ID NO: 8748

SEQ ID NO: 8750 - protein, 118 aa, synthetic construct
QIQLVQSGPELKKPGETVKISCKASGYTFTNYGMNWVKQAPGKGLKWMGWINTNTGEPTYAEEFKGRFAFSLETSASTAYLQINNLKNEDTATYFCARLGFGNAMDYWGQGTSVTVSS

SEQ ID NO: 8751 - protein, 118 aa, synthetic construct
QVQLVQSGSELKKPGASVKISCKASGYTFTNYGMNWVKQAPGQGLKWMGWINTYTGEPTYAEEFKGRFAFSLETSASTAYLQITSLKNEDTATYFCARLGFGNAMDYWGQGTSVTVSS

SEQ ID NO: 8752 - protein, 118 aa, synthetic construct
EVQLVQSGAEVKKPGASVRVSCKASGYTFTNYGMNWVRQAPGQGLEWMGWINTYTGEPTYADDFKGRVTMTTDTSTSTAYMELRSLRSDDTAVYYCARIGDSSPSDYWGQGTLVTVSS

SEQ ID NO: 8753 - protein, 117 aa, synthetic construct
EVQLVESGGGLVQPGGSLRLSCAASGFNIDYYGMHWVRQAPGKGLEWVASLYGGSDSTDYADSVKGRFTISADTSKNTAYLQMNSLRAEDTAVYYCSRQYSAYFDYWGQGTLVTVSS

SEQ ID NO: 8754 - protein, 119 aa, synthetic construct
QVQLVQSGAEVKKPGASVKVSCKASGYTFTDHAIHWVRQAPGQRLEWMGYFSPGNDDFKYSQKFQGRVTITADTSASTAYMELSSLRSEDTAVYFCTRSLNMAYWGQGTLVTVSSGSTS

SEQ ID NO: 8755 - protein, 117 aa, synthetic construct
EVQLVESGGGLVQPGGSLRLSCAASGYTFSDYFMSWVRQAPGKGLEWVATISNGGTYTYYPDSVKGRFTISRDNSKNTLYLQMNSLRAEDTAVYYCARFDGYIFDYWGQGTLVTVSS

SEQ ID NO: 8756 - protein, 115 aa, synthetic construct
EVQLVESGGGLVQPGGSLRLSCAASGYTFTEYTIHWVRQAPGKGLEWVANINPNNGGTTYNQKFEDRFTISRDNSKNTLYLQMNSLRAEDTAVYYCARGWNFDYWGQGTLVTVSS

SEQ ID NO: 8757 - protein, 120 aa, synthetic construct
EVQLVESGGGLVQPGGSLRLSCAASGFNIKDTYIHWVRQAPGKGLEWVARIYPTNGYTRYADSVKGRFTISADTSKNTAYLQMNSLRAEDTAVYYCSRWGGAGAYAMDVWGQGTLVTVSS

SEQ ID NO: 8758 - protein, 122 aa, synthetic construct
QLQLQESGPGLVKPSETLSLTCTVSGGSISSSSYFWGWIRQPPGKGLEWIGSIYYSGITYYNPSLKSRVTISVDTSKNQFSLKLSSVTAADTAVYYCARHDGAVAGLFDYWGQGTLVTVSSA

SEQ ID NO: 8759 - protein, 10 aa, synthetic construct
GGGGGGGGGG

SEQ ID NO: 8760 - protein, 10 aa, synthetic construct
GGGGGGGGGG

SEQ ID NO: 8761 - protein, 10 aa, synthetic construct
GGGGGGGGGG

SEQ ID NO: 8762 - protein, 10 aa, synthetic construct
GGGGGGGGGG

SEQ ID NO: 8763 - protein, 10 aa, synthetic construct
GGGGGGGGGG

SEQ ID NO: 8764 - protein, 10 aa, synthetic construct
GGGGGGGGGG

SEQ ID NO: 8765 - protein, 10 aa, synthetic construct
GGGGGGGGGG

SEQ ID NO: 8766 - protein, 10 aa, synthetic construct
GGGGGGGGGG

SEQ ID NO: 8767 - protein, 244 aa, synthetic construct
DIQMTQSPSSLSASVGDRVTITCKASDHINNWLAWYQQKPGQAPKLLIYGATTLETGVPSRFSGSGSGTDYTLTISSLQPEDFATYYCQQSWNTPWTFGQGTKLEIKRGGGGSGGGGSGGGGSQVQLQQPGAELVKPGASVKMSCKASGYAFSSYWINWMKQKPGQGLEWIGQIYPGDGDTNYNGKFKGRATLTADTSSSTAYMQLSSLTSEDSAVYFCARSITTVVGCAMDYWGQGTSVTVSS

SEQ ID NO: 8768 - protein, 247 aa, synthetic construct
QVQLVESGGGLVQPGGSLKLSCAASGFDFSRYWMSWVRQAPGKGLEWIGEINPTSSTINFTPSLKDKVFISRDNAKNTLYLQMSKVRSEDTALYYCARGNYYRYGDAMDYWGQGTSVTVSSGGGGSGGGGSGGGGSDIVLTQSPASLAVSLGQRATISCRASKSVSTSGYSYLHWYQQKPGQPPKLLIYLASNLESGVPARFSGSGSGTDFTLNIHPVEEEDAATYYCQHSRELPFTFGSGTKLEIK

SEQ ID NO: 8769 - protein, 236 aa, synthetic construct
DIQMTQSPSSLSASVGDRVTITCRASQNVGTAVAWFQQKPGKAPKILIYSASNRYTGVPSRSTGSGSGTDFTLTISSLQPEDFATYYCQQYSTYPLTFGQGTKLEIKGGGGSGGGGSGGGGSEVQLVESGGGLVQPGGSLRLSCAASGFTFSTYGMAWVRQTPDRRLELVATINSNGGKTYHPDSVKGRFTISRDNSKNTLYLQMNSLRAEDTAVYYCTREGLDYWGQGTLVTVSS

SEQ ID NO: 8770 - protein, 236 aa, synthetic construct
DIVLTQSQKFMSTSVGDRVSIICRASQSVGTAVAWYQLKAGQSPKLLIYSASNRFTGVPDRFTGSGSGTDFTLTISNVQSEDLADYFCQQYSTYPLAFGAGTKLELKGGGGSGGGGSGGGGSEVQLVESGGGIVQPGGSLKLSCAASGFTFNDFGMSWIRQTPDKRLELVATINTNGGTTHYPDSVKGRFSISRDNAKKFVYLQMSSLKSDDTAIYYCPREGLDYWGQGTTLTVSS

SEQ ID NO: 8771 - protein, 241 aa, synthetic construct
QPVLTQPPSASGTPGQRVTISCSGSSSNIGNNFVSWYQQLPGTAPKLLIYRNNQRPSGVPDRFSGSKTGTSASLAISGLRSEDEADYYCAAWDDSVRGPVFGGGTELTVLAAAGGGGSGGGGSGGGGSQVQLQQSGAEVKKPGESLKISCKGSGYTFTGYYMHWVRQAPGQRPEWLGRMNAKSGEADSAQRFQGRVTMTRDTSINTAYMELRDLRSDDTAVYYCTRGPLLWGQGTLVTVSS

SEQ ID NO: 8772 - protein, 248 aa, synthetic construct
QPVLTQSSSASASLGSSVKLTCTLSSGHSSYIIAWHQQQPGKAPRYLMKVEGSGSYNKGSGIPERFSGSSSGADRYLTISNLQSEDEADYYCETWDSNTHVFGTGTKVTVLGGGGSGGGGSGGGGSEVQLVQSGAEVKKPGASVKVSCKASGYTFTSYYMHWVRQAPGQGLEWMGIINPSGGRTSYAQKFQGRVTMTRDTSTGTVYMELSSLRSEDTAVYYCARSHCSGGSCYSIDYWGQGTLVTVSS

SEQ ID NO: 8773 - protein, 248 aa, synthetic construct; identical to SEQ ID NO: 8772

SEQ ID NO: 8774 - protein, 246 aa, synthetic construct
DIVMTQSPSSLTVTAGEKVTMSCKSSQSLLNSGNQKNYLTWYQQKPGQPPKLLIYWASTRESGVPDRFTGSGSGTDFTLTISSVQAEDLAVYYCQNDYSYPLTFGAGTKLELKGGGGSGGGGSGGGGSQIQLVQSGPELKKPGETVKISCKASGYTFTNYGMNWVKQAPGKGLKWMGWINTNTGEPTYAEEFKGRFAFSLETSASTAYLQINNLKNEDTATYFCARLGFGNAMDYWGQGTSVTVSS

SEQ ID NO: 8775 - protein, 247 aa, synthetic construct
DIVMTQSPDSLAVSLGERATINCESSQSLLNSGNQKNYLTWYQQKPGQPPKPLIYWASTRESGVPDRFSGSGSGTDFTLTISSLQAEDVAVYYCQNDYSYPYLFGQGTKLEIKRGGGGSGGGGSGGGGSQVQLVQSGSELKKPGASVKISCKASGYTFTNYGMNWVKQAPGQGLKWMGWINTYTGEPTYAEEFKGRFAFSLETSASTAYLQITSLKNEDTATYFCARLGFGNAMDYWGQGTSVTVSS

SEQ ID NO: 8776 - protein, 241 aa, synthetic construct
DIVMTQSPATLSVSPGERATLSCRASQSVSNDVVWYQQKPGQAPRLLIYYASNRYTGIPARFSGSGSGTEFTLTISSLQSEDFAVYYCQQDYTSPWTFGQGTKLEIKRGGGGSGGGGSGGGGSEVQLVQSGAEVKKPGASVRVSCKASGYTFTNYGMNWVRQAPGQGLEWMGWINTYTGEPTYADDFKGRVTMTTDTSTSTAYMELRSLRSDDTAVYYCARIGDSSPSDYWGQGTLVTVSS

SEQ ID NO: 8777 - protein, 240 aa, synthetic construct
DIQMTQSPSSLSASVGDRVTITCRASQDVSTAVAWYQQKPGKAPKLLIYSASFLYSGVPSRFSGSRSGTDFTLTISSLQPEDFATYYCQQYLYQPWTFGQGTKVEIKRGGGGSGGGGSGGGGSEVQLVESGGGLVQPGGSLRLSCAASGFNIDYYGMHWVRQAPGKGLEWVASLYGGSDSTDYADSVKGRFTISADTSKNTAYLQMNSLRAEDTAVYYCSRQYSAYFDYWGQGTLVTVSS

SEQ ID NO: 8778 - protein, 247 aa, synthetic construct
QVQLVQSGAEVKKPGASVKVSCKASGYTFTDHAIHWVRQAPGQRLEWMGYFSPGNDDFKYSQKFQGRVTITADTSASTAYMELSSLRSEDTAVYFCTRSLNMAYWGQGTLVTVSSGSTSGGGGSGGGGSGGGGSDIVMTQSPDSLAVSLGERATINCKSSQSLLYSSNSKNYLAWYQQKPGQPPKLLIYWASTRESGVPDRFSGSGSGTDFTLTISSLQAEDVAVYYCQQPYSYPLSFGAGTKLELK

SEQ ID NO: 8779 - protein, 243 aa, synthetic construct
DIVMTQSPDSLAVSLGERATINCKSSQSLLYSSNSKNYLAWYQQKPGQPPKLLIYWASTRESGVPDRFSGSGSGTDFTLTISSLQAEDVAVYYCQQPYSYPLSFGAGTKLELKGGGGSGGGGSGGGGSQVQLVQSGAEVKKPGASVKVSCKASGYTFTDHAIHWVRQAPGQRLEWMGYFSPGNDDFKYSQKFQGRVTITADTSASTAYMELSSLRSEDTAVYFCTRSLNMAYWGQGTLVTVSS

SEQ ID NO: 8780 - protein, 240 aa, synthetic construct
DIQMTQSPSSLSASVGDRVTITCRASQDISNYLNWYQQKPGKAPKLLIYYTSRLHSGVPSRFSGSGSGTDFTLTISSLQPEDFATYYCQQGNTLPYTFGQGTKVEIKRGGGGSGGGGSGGGGSEVQLVESGGGLVQPGGSLRLSCAASGYTFSDYFMSWVRQAPGKGLEWVATISNGGTYTYYPDSVKGRFTISRDNSKNTLYLQMNSLRAEDTAVYYCARFDGYIFDYWGQGTLVTVSS

SEQ ID NO: 8781 - protein, 238 aa, synthetic construct
DIQMTQSPSSLSASVGDRVTITCKASQDVGTAVDWYQQKPGKAPKLLIYWASTRHTGVPSRFSGSGSGTDFTLTISSLQPEDFATYYCQQYNSYPLTFGQGTKVEIKRGGGGSGGGGSGGGGSEVQLVESGGGLVQPGGSLRLSCAASGYTFTEYTIHWVRQAPGKGLEWVANINPNNGGTTYNQKFEDRFTISRDNSKNTLYLQMNSLRAEDTAVYYCARGWNFDYWGQGTLVTVSS

SEQ ID NO: 8782 - protein, 244 aa, synthetic construct
DIQMTQSPSSLSASVGDRVTITCRASQDVNTAVAWYQQKPGKAPKLLIYSASFLYSGVPSRFSGSRSGTDFTLTISSLQPEDFATYYCQQAYTTPPTFGQGTKVEIKRTGGGGSGGGGSGGGGSEVQLVESGGGLVQPGGSLRLSCAASGFNIKDTYIHWVRQAPGKGLEWVARIYPTNGYTRYADSVKGRFTISADTSKNTAYLQMNSLRAEDTAVYYCSRWGGAGAYAMDVWGQGTLVTVSS

SEQ ID NO: 8783 - protein, 245 aa, synthetic construct
SYVLTQPPSVSVAPGQTARITCGGNNIGGKSVHWYQQPPGQAPVVVVYDDSDRPSGIPERFSGSNSGNTATLTISRVEAGDEAVYYCQVWDSSSDHVVFGGGTKLTVLGGGGSGGGGSGGGGSQLQLQESGPGLVKPSETLSLTCTVSGGSISSSSYFWGWIRQPPGKGLEWIGSIYYSGITYYNPSLKSRVTISVDTSKNQFSLKLSSVTAADTAVYYCARHDGAVAGLFDYWGQGTLVTVSSA

SEQ ID NO: 8784 - protein, 10 aa, synthetic construct
GGGGGGGGGG

SEQ ID NO: 8785 - protein, 10 aa, synthetic construct
GGGGGGGGGG

SEQ ID NO: 8786 - protein, 10 aa, synthetic construct
GGGGGGGGGG

SEQ ID NO: 8787 - protein, 10 aa, synthetic construct
GGGGGGGGGG

SEQ ID NO: 8788 - protein, 10 aa, synthetic construct
GGGGGGGGGG

SEQ ID NO: 8789 - protein, 10 aa, synthetic construct
GGGGGGGGGG

SEQ ID NO: 8790 - protein, 10 aa, synthetic construct
GGGGGGGGGG

SEQ ID NO: 8791 - protein, 10 aa, synthetic construct
GGGGGGGGGG

SEQ ID NO: 8792 - protein, 124 aa, synthetic construct
QVQLVQSGGGLVQPGGSLRLSCAASRRSSRSWAMAWFRQAPGKEREFVAKISGDGRLTTYGDSVKGRFTISRDNAEYLVYLQMDSLKPDDTAVYYCAADDNYVTASWRSGPDYWGRGTQVTVSS

SEQ ID NO: 8793 - protein, 118 aa, synthetic construct
QVQLVESGGGVVQPGRSLRLSCAASGYRSSVCMGWFRQAPGKGLERVALIGRDGSTTYIDSVKGRFTISRDNSKNTLYLQMNSLRAEDTAVYYCARGLGYWACEYNYWGQGTLVTVSS

SEQ ID NO: 8794 - protein, 118 aa, synthetic construct
QVQLVESGGGVVQPGRSLRLSCAASGYRSSVCMGWFRQAPGKGLERVAVIGRDGSTTYIDSVKGRFTISRDNSKNTLYLQMNSLRAEDTAVYYCARGLGYWACDYNYWGQGTLVTVSS

SEQ ID NO: 8795 - protein, 118 aa, synthetic construct
QVQLVESGGGVVQPGRSLRLSCAASGYRSSVCMGWFRQAPGKGLERVAVIGRDGSTTYIDSVKGRFTISRDNSKNTLYLQMNSLRAEDTAVYYCARGLGYWACEYDYWGQGTLVTVSS

SEQ ID NO: 8796 - protein, 122 aa, synthetic construct
QVQLQESGPGLVKPSQTLSLTCTVSGGSITTGEFYWNWFRQPPGKGLEWMGAIAASGSTTYSPSFESRTSISRDTSKNQFSLKLSSVTAADTAVYYCGRSFGVAAVTTGQNRGQGTLVTVSS

SEQ ID NO: 8797 - protein, 122 aa, synthetic construct
QVQLQESGPGLVKPSQTLSLTCTVSGASITTGEYYWNWFRQPPGKGLEWMGAIAASGSTTYSPSFESRTSISRDTSKNQFSLKLSSVTAADTAVYYCGRSFGVAAVTTGQNRGQGTLVTVSS

SEQ ID NO: 8798 - protein, 125 aa, synthetic construct
EVQLVESGGGLVQPGGSLRLSCAASGNTYSTNYMAWFRQAPGKGLEEVAVIYTRGGHTYYVDSVRGRFTISQDNAKNSLYLQMNSLRAEDTAVYYCAASSRHRLGLNNPRDYDYWGQGTLVTVSS

SEQ ID NO: 8799 - protein, 125 aa, synthetic construct
QVQLVESGGGVVQPGGSLRLSCAASFSGYGVSTMAWFRQAPGKGLEGVAAITVGSGNTYYADSVTGRFTISRDNSKNTVYLQMNSLRAEDTAMYYCAVGYLSGGSWDVPGRYNYWGQGTLVTVSS

SEQ ID NO: 8800 - protein, 125 aa, synthetic construct
QVQLVESGGGVVQPGGSLRLSCAASFSGYGVSTMAWFRQAPGKGLEGVAAITVGSGNTYYADSVKGRFTISRDNSKNTVYLQMNSLRAEDTAMYYCAVGWLSGGSWHVPGRYNYWGQGTLVTVSS

SEQ ID NO: 8801 - protein, 125 aa, synthetic construct
EVQLVESGGGLVQPGGSLRLSCAASGNTYSSNWMGWFRQAPGKGLEEVAVIYTRGGHTYYVDSVRGRFTISQDNAKNSLYLQMNSLRAEDTAVYYCAASSRHRLGLNNPRDYDYWGQGTLVTVSS

SEQ ID NO: 8802 - protein, 123 aa, synthetic construct
EVQLVESGGGLVQPGGSLRLSCAASGYIYSSNCMGWFRQAPGKGREWVARIHTGSGSTYYTDSVKGRFTISQDNSKNTLYLQMNSLRAEDTAVYDCAAGRVVLGAVVCTNEYWGQGTLVTVSS

SEQ ID NO: 8803 - protein, 122 aa, synthetic construct
EVQLVESGGGLVQPGGSLRLSCATSGFTFDGPDMAWYRQAPGKGCELVSIISADGRTYYADSVKGRFTISRDNSKNTVYLQMNSLRAEDTAVYYCALDPRKNCRGGYCCANWGQGTLVTVSS

SEQ ID NO: 8804 - protein, 122 aa, synthetic construct
EVQLVESGGGLVQPGGSLRLSCAASAFTFDGPDMAWYRQAPGKGCELVSIISADGRTYYTDSVKGRFTISRDNSKNTVYLQMNSLRAEDTAVYYCALDPRKNCRGGYCCANWGQGTLVTVSS

SEQ ID NO: 8805 - protein, 119 aa, synthetic construct
AVQLVESGGGLVQAGDSLRLTCTASGRAFSTYFMAWFRQAPGKEREFVAGIAWSGGSTAYADSVKGRFTISRDNAKNTVYLQMNSLKSEDTAVYYCASRGIEVEEFGAWGQGTQVTVSS

SEQ ID NO: 8806 - protein, 120 aa, synthetic construct
QVQLVESGGGLVQAGGSLRLSCAASGGTLSKNTVAWFRQAPGKERGFVASITWDGRTTYYADSVKGRFTISRDNAKNTVYLQMNSLKPEDTAVYVCADLGKWPAGPADYWGQGTQVTVSS

SEQ ID NO: 8807 - protein, 119 aa, synthetic construct
GVTQSPTHLIKTRGQQATLRCSPISGHTSVYWYQQALGLGLQFLLWYDEGEERNRGNFPPRFSGRQFPNYSSELNVNALELEDSALYLCASSLGGPRGLAGLRGDEQFFGPGTRLTVLE

SEQ ID NO: 8808 - protein, 140 aa, synthetic construct
MGPRLLFWALLCLLGTGPVEAGVTQSPTHLIKTRGQQATLRCSPISGHTSVYWYQQALGLGLQFLLWYDEGEERNRGNFPPRFSGRQFPNYSSELNVNALELEDSALYLCASSLGGPRGLAGLRGDEQFFGPGTRLTVLE

SEQ ID NO: 8809 - protein, 117 aa, synthetic construct
GVTQSPTHLIKTRGQQATLRCSPISGHTSVYWYQQALGLGLQFLLWYDEGEERNRGNFPPRFSGRQFPNYSSELNVNALELEDSALYLCASSLGGDELGADGNEQFFGPGTRLTVLE

SEQ ID NO: 8810 - protein, 138 aa, synthetic construct
MGPRLLFWALLCLLGTGPVEAGVTQSPTHLIKTRGQQATLRCSPISGHTSVYWYQQALGLGLQFLLWYDEGEERNRGNFPPRFSGRQFPNYSSELNVNALELEDSALYLCASSLGGDELGADGNEQFFGPGTRLTVLE

SEQ ID NO: 8811 - protein, 10 aa, synthetic construct
GGGGGGGGGG

SEQ ID NO: 8812 - protein, 10 aa, synthetic construct
GGGGGGGGGG

SEQ ID NO: 8813 - protein, 10 aa, synthetic construct
GGGGGGGGGG

SEQ ID NO: 8814 - protein, 10 aa, synthetic construct
GGGGGGGGGG

SEQ ID NO: 8815 - protein, 124 aa, synthetic construct
GSDLGIKLLFAAAKGQDDEVRILLAAGADVNAKDFEGYTPLHVAAYDGHLEIVEVLLKAGADVNAKDSQGRTPLHEAAYSGHLEIVEVLLKAGADVNAQDDAGETPADLAAAWGHEDIAEVLQK

SEQ ID NO: 8816 - protein, 90 aa, synthetic construct
MLPAPKNLVVSRITEDSARLSWTAPDAAFDSFPIRYIETLIWGEAIWLDVPGSERSYDLTGLKPGTEYAVVITGVKGGRFSSPLVASFTT

SEQ ID NO: 8817 - protein, 192 aa, synthetic construct
GMRTEDLPKAVVFLEPQWYRVLEKDSVTLKCQGAYSPEDNSTQWFHNESLISSQASSYFIDAATVDDSGEYRCQTNLSTLSDPVQLEVHIGWLLLQAPRWVFKEEDPIHLRCHSWKNTALHKVTYLQNGKGRKYFHHNSDFYIPKATLKDSGSYFCRGLVGSKNVSSETVNITITQGLAVSTISSFFPPGYQ

SEQ ID NO: 8818 - protein, 307 aa, synthetic construct
MALPVTALLLPLALLLHAARPLFNQEVQIPLTESYCGPCPKNWICYKNNCYQFFDESKNWYESQASCMSQNASLLKVYSKEDQDLLKLVKSYHWMGLVHIPTNGSWQWEDGSILSPNLLTIIEMQKGDCALYASSFKGYIENCSTPNTYICMQRTVGGGGSGGGGSGGGGSDLFNQEVQIPLTESYCGPCPKNWICYKNNCYQFFDESKNWYESQASCMSQNASLLKVYSKEDQDLLKLVKSYHWMGLVHIPTNGSWQWEDGSILSPNLLTIIEMQKGDCALYASSFKGYIENCSTPNTYICMQRTV

SEQ ID NO: 8819 - protein, 187 aa, synthetic construct
MELTDLLLAAMLLAVARLTLSSPVAPACDPRLLNKLLRDSHLLHSRLSQCPDVDPLSIPVLLPAVDFSLGEWKTQTEQSKAQDILGAVSLLLEGVMAARGQLEPSCLSSLLGQLSGQVRLLLGALQGLLGTQLPLQGRTTAHKDPNALFLSLQQLLRGKVRFLLLVEGPTLCVRRTLPTTAVPSSTS

SEQ ID NO: 8820 - protein, 327 aa, synthetic construct
MALPVTALLLPLALLLHAARPEVQLLESGGGLIQPGGSLRLSCAASGFTFSSHAMTWVRQAPGKGLEWVSAISGSGDYTHYADSVKGRFTISRDNSKNTVYLQMNSLRAEDSAVYYCAKDEDGGSLLGHRGQGTLVTVSSTRGGGGSEPHSLSYDITVIPKFRPGPRWCAVQGQVDEKTFLHYDCGNKTVTPVSPLGKKLNVTTAWKAQNPVLREVVDILTEQLWDIQLENYTPKEPLTLQARMSCEQKAEGHSSGSWQFSFDGQIFLLFDSEKRMWTTVHPGARKMKEKWENDKVVATLLWGWSMGDCIGWLEDFLMGMDSTLEPS

SEQ ID NO: 8821 - protein, 51 aa, synthetic construct
MDPDLEIRAAFLRQRNTALRTEVAELEQEVQRLENEVSQYETRYGPLGGGK

SEQ ID NO: 8822 - protein, 51 aa, synthetic construct
MDPDLEIEAAFLERENTALETRVAELRQRVQRLRNRVSQYRTRYGPLGGGK

SEQ ID NO: 8823 - protein, 28 aa, synthetic construct
EVAALEKEVAALEKEVAALEKEVAALEK

SEQ ID NO: 8824 - protein, 28 aa, synthetic construct
KVAALKEKVAALKEKVAALKEKVAALKE

SEQ ID NO: 8825 - protein, 135 aa, synthetic construct
LFNQEVQIPLTESYCGPCPKNWICYKNNCYQFFDESKNWYESQASCMSQNASLLKVYSKEDQDLLKLVKSAHWMGLVHIPTNGSWQWEDGSILSPNLLTIIEMQKGDCALYASSFKGFIENCSTPNTYICMQRTV

SEQ ID NO: 8826 - protein, 135 aa, synthetic construct
LFNQEVQIPLTESYCGPCPKNWICYKNNCYQFFDESKNWYESQASCMSQNASLLKVYSKEDQDLLKLVKSAHWMGLVHIPTNGSWQWEDGSILSPNLLTIIEMQKGDCALYASSFKGYIENCSTPNTYICMQRTV

SEQ ID NO: 8827 - protein, 286 aa, synthetic construct
LFNQEVQIPLTESYCGPCPKNWICYKNNCYQFFDESKNWYESQASCMSQNASLLKVYSKEDQDLLKLVKSAHWMGLVHIPTNGSWQWEDGSILSPNLLTIIEMQKGDCALYASSFKGFIENCSTPNTYICMQRTVGGGGSGGGGSGGGGSDLFNQEVQIPLTESYCGPCPKNWICYKNNCYQFFDESKNWYESQASCMSQNASLLKVYSKEDQDLLKLVKSAHWMGLVHIPTNGSWQWEDGSILSPNLLTIIEMQKGDCALYASSFKGFIENCSTPNTYICMQRTV

SEQ ID NO: 8828 - protein, 286 aa, synthetic construct
LFNQEVQIPLTESYCGPCPKNWICYKNNCYQFFDESKNWYESQASCMSQNASLLKVYSKEDQDLLKLVKSAHWMGLVHIPTNGSWQWEDGSILSPNLLTIIEMQKGDCALYASSFKGYIENCSTPNTYICMQRTVSGGGGSGGGGSGGGGDLFNQEVQIPLTESYCGPCPKNWICYKNNCYQFFDESKNWYESQASCMSQNASLLKVYSKEDQDLLKLVKSAHWMGLVHIPTNGSWQWEDGSILSPNLLTIIEMQKGDCALYASSFKGYIENCSTPNTYICMQRTV

SEQ ID NO: 8829 - protein, 180 aa, synthetic construct
EPHSLSYDITVIPKFRPGPRWCAVQGQVDEKTFLHYDCGNKTVTPVSPLGKKLNVTTAWKAQNPVLREVVDILTEQLWDIQLENYTPKEPLTLQARMSCEQKAEGHSSGSWQFSFDGQIFLLFDSEKRMWTTVHPGARKMKEKWENDKVVATLLWGWSMGDCIGWLEDFLMGMDSTLEPS

SEQ ID NO: 8830 - protein, 180 aa, synthetic construct
EPHSLSYDITVIPKFRPGPRWCAVQGQVDEKTFLHYDCGNKTVTPVSPLGKKLNVTTAWKAQNPVLREVVDILTEQLWDIQLENYTPKEPLTLQARMSCEQKAEGHSSGSWQFSFDGQIFLLFDSEKRMWTTVHPGARKMKEKWENDKVVATKLYLWSMGDCIGWLEDFLMGMDSTLEPS

SEQ ID NO: 8831 - protein, 15 aa, synthetic construct
GGGGSGGGGSGGGGS

SEQ ID NO: 8832 - protein, 6 aa, synthetic construct
SGGGGS

SEQ ID NO: 8833 - protein, 141 aa, synthetic construct
DIQNPDPAVYQLRDSKSSDKSVCLFTDFDSQTNVSQSKDSDVYITDKTVLDMRSMDFKSNSAVAWSNKSDFACANAFNNSIIPEDTFFPSPESSCDVKLVEKSFETDTNLNFQNLSVIGFRILLLKVAGFNLLMTLRLWSS

SEQ ID NO: 8834 - protein, 140 aa, synthetic construct
IQNPDPAVYQLRDSKSSDKSVCLFTDFDSQTNVSQSKDSDVYITDKTVLDMRSMDFKSNSAVAWSNKSDFACANAFNNSIIPEDTFFPSPESSCDVKLVEKSFETDTNLNFQNLSVIGFRILLLKVAGFNLLMTLRLWSS

SEQ ID NO: 8835 - protein, 140 aa, synthetic construct
IQNPDPAVYQLRDSKSSDKSVCLFTDFDSQTNVSQSKDSDVYITDKCVLDMRSMDFKSNSAVAWSNKSDFACANAFNNSIIPEDTFFPSSDVPCDVKLVEKSFETDTNLNFQNLSVIGFRILLLKVAGFNLLMTLRLWSS

SEQ ID NO: 8836 - protein, 140 aa, synthetic construct; identical to SEQ ID NO: 8834

SEQ ID NO: 8837 - protein, 137 aa, synthetic construct
PDPAVYQLRDSKSSDKSVCLFTDFDSQTNVSQSKDSDVYITDKTVLDMRSMDFKSNSAVAWSNKSDFACANAFNNSIIPEDTFFPSPESSCDVKLVEKSFETDTNLNFQNLSVIGFRILLLKVAGFNLLMTLRLWSS

SEQ ID NO: 8838 - protein, 140 aa, synthetic construct
IQNPDPAVYQLRDSKSSDKSVCLFTDFDSQTNVSQSKDSDVYITDKCVLDMRSMDFKSNSAVAWSNKSDFACANAFNNSIIPEDTFFPSPESSCDVKLVEKSFETDTNLNFQNLSVIGFRILLLKVAGFNLLMTLRLWSS

SEQ ID NO: 8839 - protein, 137 aa, synthetic construct
PDPAVYQLRDSKSSDKSVCLFTDFDSQTNVSQSKDSDVYITDKCVLDMRSMDFKSNSAVAWSNKSDFACANAFNNSIIPEDTFFPSPESSCDVKLVEKSFETDTNLNFQNLSVIGFRILLLKVAGFNLLMTLRLWSS

SEQ ID NO: 8840 - protein, 140 aa, synthetic construct
IQNPDPAVYQLRDSKSSDKSVCLFTDFDSQTNVSQSKDSDVYITDKTVLDMRSMDFKSNSAVAWSNKSDFACANAFNNSIIPEDTFFPSSDVPCDVKLVEKSFETDTNLNFQNLSVIGFRILLLKVAGFNLLMTLRLWSS

SEQ ID NO: 8841 - protein, 140 aa, synthetic construct
IQNPDPAVYQLRDSKSSDKSVCLFTDFDSQTNVSQSKDSDVYITDKTVLDMRSMDFKSNRAVAWSNKSDFACANAFNNSIIPEDTFFPSPESSCDVKLVEKSFETDTNLNFQNLSVIGFRILLLKVAGFNLLMTLRLWSS

SEQ ID NO: 8842 - protein, 140 aa, synthetic construct
IQNPDPAVYQLRDSKSSDKSVCLFTDFDSQTNVSQSKDSDVYITDKTVLDMRSMDFKSNRAVAWSNKSDFACANAFNNSIIPEDTFFPSSDVPCDVKLVEKSFETDTNLNFQNLSVIGFRILLLKVAGFNLLMTLRLWSS

SEQ ID NO: 8843 - protein, 140 aa, synthetic construct
IQNPDPAVYQLRDSKSSDKSVCLFTDFDSQTNVSQSKDSDVYITDKTVLDMRSMDFKSNSAVAWSNKSDFACANAFNNSIIPEDTFFPSSDSSCDVKLVEKSFETDTNLNFQNLSVIGFRILLLKVAGFNLLMTLRLWSS

SEQ ID NO: 8844 - protein, 239 aa, synthetic construct
IQNPDPAVYQLRDSKSSDKSVCLFTDFDSQTNVSQSKDSDVYITDKTVLDMRSMDFKSNSAVAWSNKSDFACANAFNNSIIPEDTFFPSPESSCGTQSFGLLDPKLCYLLDGILFIYGVILTALFLRVKFSRSADAPAYQQGQNQLYNELNLGRREEYDVLDKRRGRDPEMGGKPQRRKNPQEGLYNELQKDKMAEAYSEIGMKGERRRGKGHDGLYQGLSTATKDTYDALHMQALPPR

SEQ ID NO: 8845 - protein, 136 aa, synthetic construct
IQNPEPAVYQLKDPRSQDSTLCLFTDFDSQINVPKTMESGTFITDKTVLDMKAMDSKSNGAIAWSNQTSFTCQDIFKETNATYPSSDVPCDATLTEKSFETDMNLNFQNLSVMGLRILLLKVAGFNLLMTLRLWSS

SEQ ID NO: 8846 - protein, 133 aa, synthetic construct
VQDPDPSVYQMRSPKTGRTVCLFTDFDSQADFQKPEGATVISLNSTVLDMKVMDSKSNGALTWNSETNIECKENFQQPFYPSSNYSCDAKLIEKSFETDMDLNFYNLLVIGLRILLLKVIGFNLFMTLRLWSC

SEQ ID NO: 8847 - protein, 177 aa, synthetic construct
EDLNKVFPPEVAVFEPSEAEISHTQKATLVCLATGFFPDHVELSWWVNGKEVHSGVSTDPQPLKEQPALNDSRYCLSSRLRVSATFWQNPRNHFRCQVQFYGLSENDEWTQDRAKPVTQIVSAEAWGRADCGFTSVSYQQGVLSATILYEILLGKATLYAVLVSALVLMAMVKRKDF

SEQ ID NO: 8848 - protein, 179 aa, synthetic construct
EDLKNVFPPEVAVFEPSEAEISHTQKATLVCLATGFYPDHVELSWWVNGKEVHSGVSTDPQPLKEQPALNDSRYCLSSRLRVSATFWQNPRNHFRCQVQFYGLSENDEWTQDRAKPVTQIVSAEAWGRADCGFTSESYQQGVLSATILYEILLGKATLYAVLVSALVLMAMVKRKDSRG

SEQ ID NO: 8849 - protein, 179 aa, synthetic construct; identical to SEQ ID NO: 8848

SEQ ID NO: 8850 - protein, 179 aa, synthetic construct
EDLKNVFPPEVAVFEPSEAEISHTQKATLVCLATGFYPDHVELSWWVNGKEVHSGVCTDPQPLKEQPALNDSRYCLSSRLRVSATFWQNPRNHFRCQVQFYGLSENDEWTQDRAKPVTQIVSAEAWGRADCGFTSESYQQGVLSATILYEILLGKATLYAVLVSALVLMAMVKRKDSRG

SEQ ID NO: 8851 - protein, 179 aa, synthetic construct
EDLKNVFPPEVAVFEPSKAEIAHTQKATLVCLATGFYPDHVELSWWVNGKEVHSGVCTDPQPLKEQPALNDSRYCLSSRLRVSATFWQNPRNHFRCQVQFYGLSENDEWTQDRAKPVTQIVSAEAWGRADCGITSASYHQGVLSATILYEILLGKATLYAVLVSALVLMAMVKRKDSRG

SEQ ID NO: 8852 - protein, 179 aa, synthetic construct; identical to SEQ ID NO: 8848

SEQ ID NO: 8853 - protein, 178 aa, synthetic construct
DLKNVFPPEVAVFEPSEAEISHTQKATLVCLATGFYPDHVELSWWVNGKEVHSGVSTDPQPLKEQPALNDSRYCLSSRLRVSATFWQNPRNHFRCQVQFYGLSENDEWTQDRAKPVTQIVSAEAWGRADCGFTSESYQQGVLSATILYEILLGKATLYAVLVSALVLMAMVKRKDSRG

SEQ ID NO: 8854 - protein, 177 aa, synthetic construct
EDLKNVFPPEVAVFEPSEAEISHTQKATLVCLATGFFPDHVELSWWVNGKEVHSGVSTDPQPLKEQPALNDSRYCLSSRLRVSATFWQNPRNHFRCQVQFYGLSENDEWTQDRAKPVTQIVSAEAWGRADCGFTSESYQQGVLSATILYEILLGKATLYAVLVSALVLMAMVKRKDF

SEQ ID NO: 8855 - protein, 177 aa, synthetic construct; identical to SEQ ID NO: 8847

SEQ ID NO: 8856 - protein, 179 aa, synthetic construct
EDLKNVFPPEVAVFEPSKAEIAHTQKATLVCLATGFYPDHVELSWWVNGKEVHSGVSTDPQPLKEQPALNDSRYCLSSRLRVSATFWQNPRNHFRCQVQFYGLSENDEWTQDRAKPVTQIVSAEAWGRADCGITSASYHQGVLSATILYEILLGKATLYAVLVSALVLMAMVKRKDSRG

SEQ ID NO: 8857 - protein, 179 aa, synthetic construct
EDLKNVFPPEVAVFEPSKAEIAHTQKATLVCLATGFYPDHVELSWWVNGKEVHSGVSTDPQPLKEQPALNDSRYCLSSRLRVSATFWQNPRNHFRCQVQFYGLSENDEWTQDRAKPVTQIVSAEAWGRADCGFTSESYQQGVLSATILYEILLGKATLYAVLVSALVLMAMVKRKDSRG

SEQ ID NO: 8858 - protein, 179 aa, synthetic construct
EDLKNVFPPEVAVFEPSKAEISHTQKATLVCLATGFYPDHVELSWWVNGKEVHSGVSTDPQPLKEQPALNDSRYCLSSRLRVSATFWQNPRNHFRCQVQFYGLSENDEWTQDRAKPVTQIVSAEAWGRADCGITSESYQQGVLSATILYEILLGKATLYAVLVSALVLMAMVKRKDSRG

SEQ ID NO: 8859 - protein, 179 aa, synthetic construct
EDLKNVFPPEVAVFEPSKAEISHTQKATLVCLATGFYPDHVELSWWVNGKEVHSGVSTDPQPLKEQPALNDSRYCLSSRLRVSATFWQNPRNHFRCQVQFYGLSENDEWTQDRAKPVTQIVSAEAWGRADCGFTSASYQQGVLSATILYEILLGKATLYAVLVSALVLMAMVKRKDSRG

SEQ ID NO: 8860 - protein, 179 aa, synthetic construct
EDLKNVFPPEVAVFEPSKAEISHTQKATLVCLATGFYPDHVELSWWVNGKEVHSGVSTDPQPLKEQPALNDSRYCLSSRLRVSATFWQNPRNHFRCQVQFYGLSENDEWTQDRAKPVTQIVSAEAWGRADCGFTSESYHQGVLSATILYEILLGKATLYAVLVSALVLMAMVKRKDSRG

SEQ ID NO: 8861 - protein, 179 aa, synthetic construct
EDLKNVFPPEVAVFEPSRAEIAHTQKATLVCLATGFYPDHVELSWWVNGKEVHSGVSTDPQPLKEQPALNDSRYCLSSRLRVSATFWQNPRNHFRCQVQFYGLSENDEWTQDRAKPVTQIVSAEAWGRADCGFTSESYQQGVLSATILYEILLGKATLYAVLVSALVLMAMVKRKDSRG

SEQ ID NO: 8862 - protein, 179 aa, synthetic construct
EDLKNVFPPEVAVFEPSRAEISHTQKATLVCLATGFYPDHVELSWWVNGKEVHSGVSTDPQPLKEQPALNDSRYCLSSRLRVSATFWQNPRNHFRCQVQFYGLSENDEWTQDRAKPVTQIVSAEAWGRADCGFTSESYQQGVLSATILYEILLGKATLYAVLVSALVLMAMVKRKDSRG

SEQ ID NO: 8863 - protein, 179 aa, synthetic construct
EDLKNVFPPEVAVFEPSKAEIAHTQKATLVCLATGFYPDHVELSWWVNGKEVHSGVSTDPQPLKEQPALNDSRYCLSSGLRVSATFWQNPRNHFRCQVQFYGLSENDEWTQDRAKPVTQIVSAEAWGRADCGITSASYHQGVLSATILYEILLGKATLYAVLVSALVLMAMVKRKDSRG

SEQ ID NO: 8864 - protein, 179 aa, synthetic construct
EDLKNVFPPEVAVFEPSKAEIAHTQKATLVCLATGFYPDHVELSWWVNGKEVHSGVSTDPQPLKEQPALNDSRYCLSSGLRVSATFWQNPRNHFRCQVQFYGLSENDEWTQDRAKPVTQIVSAEAWGRADCGFTSESYQQGVLSATILYEILLGKATLYAVLVSALVLMAMVKRKDSRG

SEQ ID NO: 8865 - protein, 179 aa, synthetic construct
EDLKNVFPPEVAVFEPSEAEISHTQKATLVCLATGFYPDHVELSWWVNGKEVHSGVSTDPQPLKEQPALNDSRYCLSSGLRVSATFWQNPRNHFRCQVQFYGLSENDEWTQDRAKPVTQIVSAEAWGRADCGFTSESYQQGVLSATILYEILLGKATLYAVLVSALVLMAMVKRKDSRG

SEQ ID NO: 8866 - protein, 171 aa, synthetic construct
EDLRNVTPPKVSLFEPSKAEIANKQKATLVCLARGFFPDHVELSWWVNGKEVHSGVSTDPQAYKESNYSYCLSSRLRVSATFWHNPRNHFRCQVQFHGLSEEDKWPEGSPKPVTQNISAEAWGRACGITSSYQQGVLSATILYEILLGKATLYAVLVSTLVVMAMVKRKNS

SEQ ID NO: 8867 - protein, 177 aa, synthetic construct
EDLQKVTPPTVTVFEPSEAEISRTQKATLVCLARGFYPDHVELSWWVNGKEVTSGFSTDPQPDKERPSENDSSYCLSSRLRVSASFWHNPRNHFRCQVQFYGLGDDDEWKYDRVKPITQNISAEAWGRADCGFTSVSYHQGVLSATILYEILLGKATLYAVLVSILVLMAKVKRKGS

SEQ ID NO: 8868 - protein, 276 aa, synthetic construct
EDLKNVFPPEVAVFEPSEAEISHTQKATLVCLATGFYPDHVELSWWVNGKEVHSGVSTDPQPLKEQPALNDSRYCLSSRLRVSATFWQNPRNHFRCQVQFYGLSENDEWTQDRAKPVTQIVSAEAWGRADCGSQSFGLLDPKLCYLLDGILFIYGVILTALFLRVKFSRSADAPAYQQGQNQLYNELNLGRREEYDVLDKRRGRDPEMGGKPQRRKNPQEGLYNELQKDKMAEAYSEIGMKGERRRGKGHDGLYQGLSTATKDTYDALHMQALPPR

SEQ ID NO: 8869 - protein, 269 aa, synthetic construct
GCPALPTGVGGTPFPSLAPPIMLLVDGKQQMVVVCLVLDVAPPGLDSPIWFSAGNGSALDAFTYGPSPATDGTWTNLAHLSLPSEELASWEPLVCHTGPGAEGHSRSTQPMHLSGEASTARTCPQEPLRGTPGGALWLGVLRLLLFKLLLFDLLLTCSCLCDPAGPLPSPATTTRLRALGSHRLHPATETGGREATSSPRPQPRDRRWGDTPPGRKPGSPVWGEGSYLSSYPTCPAQAWCSRSRLRAPSSSLGAFFAGDLPPPLQAGAA

SEQ ID NO: 8870 - protein, 258 aa, synthetic construct
TPFPSLAPPIMLLVDGKQQMVVVCLVLDVAPPGLDSPIWFSAGNGSALDAFTYGPSPATDGTWTNLAHLSLPSEELASWEPLVCHTGPGAEGHSRSTQPMHLSGEASTARTCPQEPLRGTPGGALWLGVLRLLLFKLLLFDLLLTCSCLCDPAGPLPSPATTTRLRALGSHRLHPATETGGREATSSPRPQPRDRRWGDTPPGRKPGSPVWGEGSYLSSYPTCPAQAWCSRSALRAPSSSLGAFFAGDLPPPLQAGAA

SEQ ID NO: 8871 - protein, 210 aa, synthetic construct
TPFPSLAPPIMLLVDGKQQMVVVCLVLDVAPPGLDSPIWFSAGNGSALDAFTYGPSPATDGTWTNLAHLSLPSEELASWEPLVCHTGPGAEGHSRSTQPMHLSGEASTARTCPQEPLRGTPGGALWLGVLRLLLFKLLLFDLLLTCSCLCDPAGPLPSPATTTRLRALGSHRLHPATETGGREATSSPRPQPRDRRWGDTPPGRKPGSPV

SEQ ID NO: 8872 - protein, 189 aa, synthetic construct
DKQLDADVSPKPTIFLPSIAETKLQKAGTYLCLLEKFFPDIIKIHWQEKKSNTILGSQEGNTMKTNDTYMKFSWLTVPEESLDKEHRCIVRHENNKNGIDQEIIFPPIKTDVTTVDPKYNYSKDANDVITMDPKDNWSKDANDTLLLQLTNTSAYYMYLLLLLKSVVYFAIITCCLLGRTAFCCNGEKS

SEQ ID NO: 8873 - protein, 173 aa, synthetic construct
DKQLDADVSPKPTIFLPSIAETKLQKAGTYLCLLEKFFPDVIKIHWQEKKSNTILGSQEGNTMKTNDTYMKFSWLTVPEKSLDKEHRCIVRHENNKNGVDQEIIFPPIKTDVITMDPKDNCSKDANDTLLLQLTNTSAYYMYLLLLLKSVVYFAIITCCLLRRTAFCCNGEKS

SEQ ID NO: 8874 - protein, 153 aa, synthetic construct
SQPHTKPSVFVMKNGTNVACLVKEFYPKDIRINLVSSKKITEFDPAIVISPSGKYNAVKLGKYEDSNSVTCSVQHDNKTVHSTDFEVKTDSTDHVKPKETENTKQPSKSCHKPKAIVHTEKVNMMSLTVLGLRMLFAKTVAVNFLLTAKLFFL

SEQ ID NO: 8875 - protein, 153 aa, synthetic construct; identical to SEQ ID NO: 8874

SEQ ID NO: 8876 - protein, 107 aa, synthetic construct
IQNPDPAVYITDKTVLDMRSMDFKSNSAVAWSNKSDFACANAFNNSIIPEDTFFPSPESSCDVKLVEKSFETDTNLNFQNLSVIGFRILLLKVAGFNLLMTLRLWSS

SEQ ID NO: 8877 - protein, 179 aa, synthetic construct
EDLKNVFPPEVAVFEPSRAEISHTQKATLVCLATGFYPDHVELSWWVNGKEVHSGVCTDPQPLKEQPALNDSRYCLSSRLRVSATFWQNPRNHFRCQVQFYGLSENDEWTQDRAKPVTQIVSAEAWGRADCGFTSESYQQGVLSATILYEILLGKATLYAVLVSALVLMAMVKRKDSRG

SEQ ID NO: 8878 - protein, 179 aa, synthetic construct
EDLKNVFPPEVAVFEPSRAEIAHTQKATLVCLATGFYPDHVELSWWVNGKEVHSGVCTDPQPLKEQPALNDSRYCLSSRLRVSATFWQNPRNHFRCQVQFYGLSENDEWTQDRAKPVTQIVSAEAWGRADCGFTSESYQQGVLSATILYEILLGKATLYAVLVSALVLMAMVKRKDSRG

SEQ ID NO: 8879 - protein, 30 aa, synthetic construct
QSFGLLDPKLCYLLDGILFIYGVILTALFL

SEQ ID NO: 8880 - protein, 143 aa, synthetic construct
QSFGLLDPKLCYLLDGILFIYGVILTALFLRVKFSRSADAPAYQQGQNQLYNELNLGRREEYDVLDKRRGRDPEMGGKPQRRKNPQEGLYNELQKDKMAEAYSEIGMKGERRRGKGHDGLYQGLSTATKDTYDALHMQALPPR

SEQ ID NO: 8881 - protein, 143 aa, synthetic construct; identical to SEQ ID NO: 8880

SEQ ID NO: 8882 - protein, 41 aa, synthetic construct
RSKRSRLLHSDYMNMTPRRPGPTRKHYQPYAPPRDFAAYRS

SEQ ID NO: 8883 - protein, 42 aa, synthetic construct
KRGRKKLLYIFKQPFMRPVQTTQEEDGCSCRFPEEEEGGCEL

SEQ ID NO: 8884 - protein, 55 aa, synthetic construct
KNRKAKAKPVTRGAGAGGRQRGQNKERPPPVPNPDYEPIRKGQRDLYSGLNQRRI

SEQ ID NO: 8885 - protein, 30 aa, synthetic construct; identical to SEQ ID NO: 8879

SEQ ID NO: 8886 - protein, 113 aa, synthetic construct
RVKFSRSADAPAYQQGQNQLYNELNLGRREEYDVLDKRRGRDPEMGGKPQRRKNPQEGLYNELQKDKMAEAYSEIGMKGERRRGKGHDGLYQGLSTATKDTYDALHMQALPPR

SEQ ID NO: 8887 - protein, 143 aa, synthetic construct; identical to SEQ ID NO: 8880

SEQ ID NO: 8888 - protein, 41 aa, synthetic construct; identical to SEQ ID NO: 8882

SEQ ID NO: 8889 - protein, 42 aa, synthetic construct; identical to SEQ ID NO: 8883

SEQ ID NO: 8890 - protein, 184 aa, synthetic construct
QSFGLLDPKLCYLLDGILFIYGVILTALFLRSKRSRLLHSDYMNMTPRRPGPTRKHYQPYAPPRDFAAYRSRVKFSRSADAPAYQQGQNQLYNELNLGRREEYDVLDKRRGRDPEMGGKPQRRKNPQEGLYNELQKDKMAEAYSEIGMKGERRRGKGHDGLYQGLSTATKDTYDALHMQALPPR

SEQ ID NO: 8891 - protein, 185 aa, synthetic construct
QSFGLLDPKLCYLLDGILFIYGVILTALFLKRGRKKLLYIFKQPFMRPVQTTQEEDGCSCRFPEEEEGGCELRVKFSRSADAPAYQQGQNQLYNELNLGRREEYDVLDKRRGRDPEMGGKPQRRKNPQEGLYNELQKDKMAEAYSEIGMKGERRRGKGHDGLYQGLSTATKDTYDALHMQALPPR

SEQ ID NO: 8892 - protein, 184 aa, synthetic construct; identical to SEQ ID NO: 8890

SEQ ID NO: 8893 - protein, 185 aa, synthetic construct; identical to SEQ ID NO: 8891

SEQ ID NO: 8894 - protein, 60 aa, synthetic construct
IPEDTFFPSPESSCDVKLVEKSFETDTNLNFQNLSVIGFRILLLKVAGFNLLMTLRLWSS

SEQ ID NO: 8895 - protein, 50 aa, synthetic construct
ESSCDVKLVEKSFETDTNLNFQNLSVIGFRILLLKVAGFNLLMTLRLWSS

SEQ ID NO: 8896 - protein, 179 aa, synthetic construct; identical to SEQ ID NO: 8850

SEQ ID NO: 8897 - protein, 115 aa, synthetic construct
EQPALNDSRYCLSSRLRVSATFWQNPRNHFRCQVQFYGLSENDEWTQDRAKPVTQIVSAEAWGRADCGFTSESYQQGVLSATILYEILLGKATLYAVLVSALVLMAMVKRKDSRG

SEQ ID NO: 8898 - protein, 53 aa, synthetic construct
GRADCGFTSESYQQGVLSATILYEILLGKATLYAVLVSALVLMAMVKRKDSRG

SEQ ID NO: 8899 - protein, 51 aa, synthetic construct
ADCGFTSESYQQGVLSATILYEILLGKATLYAVLVSALVLMAMVKRKDSRG

SEQ ID NO: 8900 - protein, 173 aa, synthetic construct; identical to SEQ ID NO: 8873

SEQ ID NO: 8901 - protein, 168 aa, synthetic construct
ADVSPKPTIFLPSIAETKLQKAGTYLCLLEKFFPDVIKIHWQEKKSNTILGSQEGNTMKTNDTYMKFSWLTVPEKSLDKEHRCIVRHENNKNGVDQEIIFPPIKTDVITMDPKDNCSKDANDTLLLQLTNTSAYYMYLLLLLKSVVYFAIITCCLLRRTAFCCNGEKS

SEQ ID NO: 8902 - protein, 166 aa, synthetic construct
VSPKPTIFLPSIAETKLQKAGTYLCLLEKFFPDVIKIHWQEKKSNTILGSQEGNTMKTNDTYMKFSWLTVPEKSLDKEHRCIVRHENNKNGVDQEIIFPPIKTDVITMDPKDNCSKDANDTLLLQLTNTSAYYMYLLLLLKSVVYFAIITCCLLRRTAFCCNGEKS

SEQ ID NO: 8903 - protein, 161 aa, synthetic construct
TIFLPSIAETKLQKAGTYLCLLEKFFPDVIKIHWQEKKSNTILGSQEGNTMKTNDTYMKFSWLTVPEKSLDKEHRCIVRHENNKNGVDQEIIFPPIKTDVITMDPKDNCSKDANDTLLLQLTNTSAYYMYLLLLLKSVVYFAIITCCLLRRTAFCCNGEKS

SEQ ID NO: 8904 - protein, 67 aa, synthetic construct
PIKTDVITMDPKDNCSKDANDTLLLQLTNTSAYYMYLLLLLKSVVYFAIITCCLLRRTAFCCNGEKS

SEQ ID NO: 8905 - protein, 59 aa, synthetic construct
MDPKDNCSKDANDTLLLQLTNTSAYYMYLLLLLKSVVYFAIITCCLLRRTAFCCNGEKS

SEQ ID NO: 8906 - protein, 153 aa, synthetic construct; identical to SEQ ID NO: 8874

SEQ ID NO: 8907 - protein, 68 aa, synthetic construct
EVKTDSTDHVKPKETENTKQPSKSCHKPKAIVHTEKVNMMSLTVLGLRMLFAKTVAVNFLLTAKLFFL

SEQ ID NO: 8908 - protein, 61 aa, synthetic construct
DHVKPKETENTKQPSKSCHKPKAIVHTEKVNMMSLTVLGLRMLFAKTVAVNFLLTAKLFFL

SEQ ID NO: 8909 - protein, 177 aa, synthetic construct
EDLKNVFPPEVAVFEPSEAEISHTQKATLVCLATGFYPDHVELSWWVNGKEVHSGVCTDPQPLKEQPALNDSRYCLSSRLRVSATFWQNPRNHFRCQVQFYGLSENDEWTQDRAKPVTQIVSAEAWGRADCDVKLVEKSFETDTNLNFQNLSVIGFRILLLKVAGFNLLMTLRLWSS

SEQ ID NO: 8910 - protein, 142 aa, synthetic construct
IQNPDPAVYQLRDSKSSDKSVCLFTDFDSQTNVSQSKDSDVYITDKCVLDMRSMDFKSNSAVAWSNKSDFACANAFNNSIIPEDTFFPSPESSCGFTSESYQQGVLSATILYEILLGKATLYAVLVSALVLMAMVKRKDSRG

SEQ ID NO: 8911 - protein, 174 aa, synthetic construct
EDLKNVFPPEVAVFEPSEAEISHTQKATLVCLATGFYPDHVELSWWVNGKEVHSGVCTDPQPLKEQPALNDSRYCLSSRLRVSATFWQNPRNHFRCQVQFYGLSENDEWTQDRAKPVTQIVSAEAWGRADCGFTSESYQQGVLSATNLSVIGFRILLLKVAGFNLLMTLRLWSS

SEQ ID NO: 8912 - protein, 145 aa, synthetic construct
IQNPDPAVYQLRDSKSSDKSVCLFTDFDSQTNVSQSKDSDVYITDKCVLDMRSMDFKSNSAVAWSNKSDFACANAFNNSIIPEDTFFPSPESSCDVKLVEKSFETDTNLNFQILYEILLGKATLYAVLVSALVLMAMVKRKDSRG

SEQ ID NO: 8913 - protein, 160 aa, synthetic construct
IQNPDPAVYQLRDSKSSDKSVCLFTDFDSQTNVSQSKDSDVYITDKCVLDMRSMDFKSNSAVAWSNKSDFACANAFNNSIIPEDTFFPSPESSDSTDHVKPKETENTKQPSKSCHKPKAIVHTEKVNMMSLTVLGLRMLFAKTVAVNFLLTAKLFFLLTA

SEQ ID NO: 8914 - protein, 263 aa, synthetic construct
EDLKNVFPPEVAVFEPSEAEISHTQKATLVCLATGFYPDHVELSWWVNGKEVHSGVCTDPQPLKEQPALNDSRYCLSSRLRVSATFWQNPRNHFRCQVQFYGLSENDEWTQDRAKPVTQIVSAEAWGRADDVIKIHWQEKKSNTILGSQEGNTMKTNDTYMKFSWLTVPEKSLDKEHRCIVRHENNKNGVDQEIIFPPIKTDVITMDPKDNCSKDANDTLLLQLTNTSAYYMYLLLLLKSVVYFAIITCCLLMAMVKRKDSRG

SEQ ID NO: 8915 - protein, 177 aa, synthetic construct
EDLKNVFPPEVAVFEPSEAEISHTQKATLVCLATGFYPDHVELSWWVNGKEVHSGVSTDPQPLKEQPALNDSRYCLSSRLRVSATFWQNPRNHFRCQVQFYGLSENDEWTQDRAKPVTQIVSAEAWGRADCDVKLVEKSFETDTNLNFQNLSVIGFRILLLKVAGFNLLMTLRLWSS

SEQ ID NO: 8916 - protein, 142 aa, synthetic construct
IQNPDPAVYQLRDSKSSDKSVCLFTDFDSQTNVSQSKDSDVYITDKTVLDMRSMDFKSNSAVAWSNKSDFACANAFNNSIIPEDTFFPSPESSCGFTSESYQQGVLSATILYEILLGKATLYAVLVSALVLMAMVKRKDSRG

SEQ ID NO: 8917 - protein, 174 aa, synthetic construct
EDLKNVFPPEVAVFEPSEAEISHTQKATLVCLATGFYPDHVELSWWVNGKEVHSGVSTDPQPLKEQPALNDSRYCLSSRLRVSATFWQNPRNHFRCQVQFYGLSENDEWTQDRAKPVTQIVSAEAWGRADCGFTSESYQQGVLSATNLSVIGFRILLLKVAGFNLLMTLRLWSS

SEQ ID NO: 8918 - protein, 145 aa, synthetic construct
IQNPDPAVYQLRDSKSSDKSVCLFTDFDSQTNVSQSKDSDVYITDKTVLDMRSMDFKSNSAVAWSNKSDFACANAFNNSIIPEDTFFPSPESSCDVKLVEKSFETDTNLNFQILYEILLGKATLYAVLVSALVLMAMVKRKDSRG

SEQ ID NO: 8919 - protein, 160 aa, synthetic construct
IQNPDPAVYQLRDSKSSDKSVCLFTDFDSQTNVSQSKDSDVYITDKTVLDMRSMDFKSNSAVAWSNKSDFACANAFNNSIIPEDTFFPSPESSDSTDHVKPKETENTKQPSKSCHKPKAIVHTEKVNMMSLTVLGLRMLFAKTVAVNFLLTAKLFFLLTA

SEQ ID NO: 8920 - protein, 263 aa, synthetic construct
EDLKNVFPPEVAVFEPSEAEISHTQKATLVCLATGFYPDHVELSWWVNGKEVHSGVSTDPQPLKEQPALNDSRYCLSSRLRVSATFWQNPRNHFRCQVQFYGLSENDEWTQDRAKPVTQIVSAEAWGRADDVIKIHWQEKKSNTILGSQEGNTMKTNDTYMKFSWLTVPEKSLDKEHRCIVRHENNKNGVDQEIIFPPIKTDVITMDPKDNCSKDANDTLLLQLTNTSAYYMYLLLLLKSVVYFAIITCCLLMAMVKRKDSRG

SEQ ID NO: 8921 - protein, 157 aa, synthetic construct
IQNPDPAVYQLRDSKSSDKSVCLFTDFDSQTNVSQSKDSDVYITDKCVLDMRSMDFKSNSAVAWSNKSDFACANAFNNSIIPEDTFFPSPESSDSTDHVKPKETENTKQPSKSCHKPKAIVHTEKVNMMSLTVLGLRMLFAKTVAVNFLLTAKLFFL

SEQ ID NO: 8922 - protein, 264 aa, synthetic construct
EDLKNVFPPEVAVFEPSEAEISHTQKATLVCLATGFYPDHVELSWWVNGKEVHSGVCTDPQPLKEQPALNDSRYCLSSRLRVSATFWQNPRNHFRCQVQFYGLSENDEWTQDRAKPVTQIVSAEAWGRADDVIKIHWQEKKSNTILGSQEGNTMKTNDTYMKFSWLTVPEKSLDKEHRCIVRHENNKNGVDQEIIFPPIKTDVITMDPKDNCSKDANDTLLLQLTNTSAYYMYLLLLLKSVVYFAIITCCLLRRTAFCCNGEKS

SEQ ID NO: 8923 - protein, 157 aa, synthetic construct
IQNPDPAVYQLRDSKSSDKSVCLFTDFDSQTNVSQSKDSDVYITDKTVLDMRSMDFKSNSAVAWSNKSDFACANAFNNSIIPEDTFFPSPESSDSTDHVKPKETENTKQPSKSCHKPKAIVHTEKVNMMSLTVLGLRMLFAKTVAVNFLLTAKLFFL

SEQ ID NO: 8924 - protein, 264 aa, synthetic construct
EDLKNVFPPEVAVFEPSEAEISHTQKATLVCLATGFYPDHVELSWWVNGKEVHSGVSTDPQPLKEQPALNDSRYCLSSRLRVSATFWQNPRNHFRCQVQFYGLSENDEWTQDRAKPVTQIVSAEAWGRADDVIKIHWQEKKSNTILGSQEGNTMKTNDTYMKFSWLTVPEKSLDKEHRCIVRHENNKNGVDQEIIFPPIKTDVITMDPKDNCSKDANDTLLLQLTNTSAYYMYLLLLLKSVVYFAIITCCLLRRTAFCCNGEKS

SEQ ID NO: 8925 - protein, 218 aa, synthetic construct
QSFGLLDPKLCYLLDGILFIYGVILTALFLHRRACRKRIRQKLHLCYPVQTSQPKLELVDSRPRRSSTQLRSGASVTEPVAEERGLMSQPLMETCHSVGAAYLESLPLQDASPAGGPSSPRDLPEPRVSTEHTNNKIEKIYIMKADTVIVGTVKAELPEGRGLAGPAEPELEEELEADHTPHYPEQETEPPLGSCSDVMLSVEEEGKEDPLPTAASGK

SEQ ID NO: 8926 - protein, 331 aa, synthetic construct
QSFGLLDPKLCYLLDGILFIYGVILTALFLHRRACRKRIRQKLHLCYPVQTSQPKLELVDSRPRRSSTQLRSGASVTEPVAEERGLMSQPLMETCHSVGAAYLESLPLQDASPAGGPSSPRDLPEPRVSTEHTNNKIEKIYIMKADTVIVGTVKAELPEGRGLAGPAEPELEEELEADHTPHYPEQETEPPLGSCSDVMLSVEEEGKEDPLPTAASGKRVKFSRSADAPAYQQGQNQLYNELNLGRREEYDVLDKRRGRDPEMGGKPQRRKNPQEGLYNELQKDKMAEAYSEIGMKGERRRGKGHDGLYQGLSTATKDTYDALHMQALPPR

SEQ ID NO: 8927 - protein, 218 aa, synthetic construct; identical to SEQ ID NO: 8925

SEQ ID NO: 8928 - protein, 331 aa, synthetic construct; identical to SEQ ID NO: 8926

SEQ ID NO: 8929 - protein, 110 aa, synthetic construct
LGEPQLCYILDAILFLYGIVLTLLYCKRGRKKLLYIFKQPFMRPVQTTQEEDGCSCRFPEEEEGGCELRLKIQVRKAAITSYEKSDGVYTGLSTRNQETYETLKHEKPPQ

SEQ ID NO: 8930 - protein, 110 aa, synthetic construct
LGEPQLCYILDAILFLYGIVLTLLYCRLKIQVRKAAITSYEKSDGVYTGLSTRNQETYETLKHEKPPQKRGRKKLLYIFKQPFMRPVQTTQEEDGCSCRFPEEEEGGCEL

SEQ ID NO: 8931 - protein, 110 aa, synthetic construct; identical to SEQ ID NO: 8929

SEQ ID NO: 8932 - protein, 110 aa, synthetic construct; identical to SEQ ID NO: 8930

SEQ ID NO: 8933 - protein, 109 aa, synthetic construct
LGEPQLCYILDAILFLYGIVLTLLYCRSKRSRLLHSDYMNMTPRRPGPTRKHYQPYAPPRDFAAYRSRLKIQVRKAAITSYEKSDGVYTGLSTRNQETYETLKHEKPPQ

SEQ ID NO: 8934 - protein, 109 aa, synthetic construct; identical to SEQ ID NO: 8933

SEQ ID NO: 8935 - protein, 162 aa, synthetic construct
QSFGLLDPKLCYLLDGILFIYGVILTALFLHLCCRRRRARLRFMKQFYKRVKFSRSADAPAYQQGQNQLYNELNLGRREEYDVLDKRRGRDPEMGGKPQRRKNPQEGLYNELQKDKMAEAYSEIGMKGERRRGKGHDGLYQGLSTATKDTYDALHMQALPPR

SEQ ID NO: 8936 - protein, 175 aa, synthetic construct
QSFGLLDPKLCYLLDGILFIYGVILTALFLLYCNHRNRRRVCKCPRPVVKSGDKPSLSARYVRVKFSRSADAPAYQQGQNQLYNELNLGRREEYDVLDKRRGRDPEMGGKPQRRKNPQEGLYNELQKDKMAEAYSEIGMKGERRRGKGHDGLYQGLSTATKDTYDALHMQALPPR

SEQ ID NO: 8937 - protein, 183 aa, synthetic construct
QSFGLLDPKLCYLLDGILFIYGVILTALFLCVRCRHRRRQAERMSQIKRLLSEKKTCQCPHRFQKTCSPIRVKFSRSADAPAYQQGQNQLYNELNLGRREEYDVLDKRRGRDPEMGGKPQRRKNPQEGLYNELQKDKMAEAYSEIGMKGERRRGKGHDGLYQGLSTATKDTYDALHMQALPPR

SEQ ID NO: 8938 - protein, 183 aa, synthetic construct; identical to SEQ ID NO: 8937

SEQ ID NO: 8939 - protein, 196 aa, synthetic construct
MNQADPRLRAVCLWTLTSAAMSRGDNCTDLLALGIPSITQAWGLWVLLGAVTLLFLISLAAHLSQWTRGRSRSHPGQGRSGESVEEVPLYGNLHYLQTGRLSQDPEPDQQDPTLGGPARAAEEVMCYTSLQLRPPQGRIPGPGTPVKYSEVVLDSEPKSQASGPEPELYASVCAQTRRARASFPDQAYANSQPAAS

SEQ ID NO: 8940 - protein, 172 aa, synthetic construct
DNCTDLLALGIPSITQAWGLWVLLGAVTLLFLISLAAHLSQWTRGRSRSHPGQGRSGESVEEVPLYGNLHYLQTGRLSQDPEPDQQDPTLGGPARAAEEVMCYTSLQLRPPQGRIPGPGTPVKYSEVVLDSEPKSQASGPEPELYASVCAQTRRARASFPDQAYANSQPAAS

SEQ ID NO: 8941 - protein, 196 aa, synthetic construct
MNQADPRLRAVCLWTLTSAAMSRGDQCTDLLALGIPSITQAWGLWVLLGAVTLLFLISLAAHLSQWTRGRSRSHPGQGRSGESVEEVPLYGNLHYLQTGRLSQDPEPDQQDPTLGGPARAAEEVMCYTSLQLRPPQGRIPGPGTPVKYSEVVLDSEPKSQASGPEPELYASVCAQTRRARASFPDQAYANSQPAAS

SEQ ID NO: 8942 - protein, 172 aa, synthetic construct
DQCTDLLALGIPSITQAWGLWVLLGAVTLLFLISLAAHLSQWTRGRSRSHPGQGRSGESVEEVPLYGNLHYLQTGRLSQDPEPDQQDPTLGGPARAAEEVMCYTSLQLRPPQGRIPGPGTPVKYSEVVLDSEPKSQASGPEPELYASVCAQTRRARASFPDQAYANSQPAAS

SEQ ID NO: 8943 - protein, 186 aa, synthetic construct
MSGISGCPFFLWGLLALLGLALVISLIFNISHYVEKQRQDKMYSYSSDHTRVDEYYIEDTPIYGNLDDMISEPMDENCYEQMKARPEKSVNKMQEATPSAQATNETQMCYASLDHSVKGKRRKPRKQNTHFSDKDGDEQLHAIDASVSKTTLVDSFSPESQAVEENIHDDPIRLFGLIRAKREPIN

SEQ ID NO: 8944 - protein, 186 aa, synthetic construct; identical to SEQ ID NO: 8943

SEQ ID NO: 8945 - protein, 214 aa, synthetic construct
GMRTEDLPKAVVFLEPQWYRVLEKDSVTLKCQGAYSPEDNSTQWFHNESLISSQASSYFIDAATVDDSGEYRCQTNLSTLSDPVQLEVHIGWLLLQAPRWVFKEEDPIHLRCHSWKNTALHKVTYLQNGKGRKYFHHNSDFYIPKATLKDSGSYFCRGLVGSKNVSSETVNITITQGLAVPTISSFFPPGYQVSFCLVMVLLFAVDTGLYFSVK

SEQ ID NO: 8946 - protein, 213 aa, synthetic construct
GMRTEDLPKAVVFLEPQWYRVLEKDSVTLKCQGAYSPEDNSTQWFHNESLISSQASSYFIDAATVDDSGEYRCQTNLSTLSDPVQLEVHIGWLLLQAPRWVFKEEDPIHLRCHSWKNTALHKVTYLQNGKGRKYFHHNSDFYIPKATLKDSGSYFCRGLVGSKNVSSETVNITITQGLAVPTISSFFPPGYQVSFCLVMVLLFAVDTGLYFSV

SEQ ID NO: 8947 - protein, 212 aa, synthetic construct
GMRTEDLPKAVVFLEPQWYRVLEKDSVTLKCQGAYSPEDNSTQWFHNESLISSQASSYFIDAATVDDSGEYRCQTNLSTLSDPVQLEVHIGWLLLQAPRWVFKEEDPIHLRCHSWKNTALHKVTYLQNGKGRKYFHHNSDFYIPKATLKDSGSYFCRGLVGSKNVSSETVNITITQGLAVPTISSFFPPGYQVSFCLVMVLLFAVDTGLYFS

SEQ ID NO: 8948 - protein, 213 aa, synthetic construct
GMRTEDLPKAVVFLEPQWYRVLEKDSVTLKCQGAYSPEDNSTQWFHNESLISSQASSYFIDAATVDDSGEYRCQTNLSTLSDPVQLEVHIGWLLLQAPRWVFKEEDPIHLRCHSWKNTALHKVTYLQNGKGRKYFHHNSDFYIPKATLKDSGSYFCRGLVGSKNVSSETVNITITQGLAVPTISSFFPPGYQVSFCLVMVLLFAVDTGLYFYV

SEQ ID NO: 8949 - protein, 238 aa, synthetic construct
GMRTEDLPKAVVFLEPQWYRVLEKDSVTLKCQGAYSPEDNSTQWFHNESLISSQASSYFIDAATVDDSGEYRCQTNLSTLSDPVQLEVHIGWLLLQAPRWVFKEEDPIHLRCHSWKNTALHKVTYLQNGKGRKYFHHNSDFYIPKATLKDSGSYFCRGLVGSKNVSSETVNITITQGLAVPTISSFFPPGYQVSFCLVMVLLFAVDTGLYFSVKTNIRSSTRDWKDHKFKWRKDPQDK

SEQ ID NO: 8950 - protein, 22 aa, synthetic construct
VKQTLNFDLLKLAGDVESNPGP

SEQ ID NO: 8951 - protein, 18 aa, synthetic construct
EGRGSLLTCGDVEENPGP

SEQ ID NO: 8952 - protein, 18 aa, synthetic construct
EGRGSLLTCGDVEENPGP

SEQ ID NO: 8953 - protein, 19 aa, synthetic construct
ATNFSLLKQAGDVEENPGP

SEQ ID NO: 8954 - protein, 19 aa, synthetic construct
ATNFSLLKQAGDVEQNPGP

SEQ ID NO: 8955 - protein, 20 aa, synthetic construct
QCTNYALLKLAGDVESNPGP

SEQ ID NO: 8956 - protein, 4 aa, synthetic construct
SGSG

SEQ ID NO: 8957 - protein, 4 aa, synthetic construct
SGSG

SEQ ID NO: 8958 - protein, 4 aa, synthetic construct
RAKR

SEQ ID NO: 8959 - protein, 4 aa, synthetic construct
RAKR

SEQ ID NO: 8960 - protein, 4 aa, synthetic construct
RAKR

SEQ ID NO: 8961 - protein, 106 aa, synthetic construct
GQPKANPTVTLFPPSSEELQANKATLVCLISDFYPGAVTVAWKADGSPVKAGVETTKPSKQSNNKYAASSYLSLTPEQWKSHRSYSCQVTHEGSTVEKTVAPTECS

SEQ ID NO: 8962 - protein, 103 aa, synthetic construct
ASTKGPSVFPLAPSSKSTSGGTAALGCLVKDYFPEPVTVSWNSGALTSGVHTFPAVLQSSGLYSLSSVVTVPSSSLGTQTYICNVNHKPSNTKVDKRVEPKSC

SEQ ID NO: 8963 - protein, 102 aa, synthetic construct
ASTKGPSVFPLAPSSKSTSGGTAALGCLVKDYFPEPVTVSWNSGALTSGVHTFPAVLQSSGLYSLSSVVTVPSSSLGTQTYICNVNHKPSNTKVDKRVEPKS

SEQ ID NO: 8964 - protein, 113 aa, synthetic construct
ASTKGPSVFPLAPSSKSTSGGTAALGCLVKDYFPEPVTVSWNSGALTSGVHTFPAVLQSSGLYSLSSVVTVPSSSLGTQTYICNVNHKPSNTKVDKRVEPKSCDKTHTCPPCP

SEQ ID NO: 8965 - protein, 103 aa, synthetic construct
ASTKGPSVFPLAPSSKSTSGGTAALGCLVKDYFPEPVTVSWNSGALTSGVHTFPAVLQSSGLYSLSSVVTVPSSSLGTQTYICNVNHKPSNTKVDKKVEPKSC

SEQ ID NO: 8966 - protein, 102 aa, synthetic construct
ASTKGPSVFPLAPSSKSTSGGTAALGCLVKDYFPEPVTVSWNSGALTSGVHTFPAVLQSSGLYSLSSVVTVPSSSLGTQTYICNVNHKPSNTKVDKKVEPKS

SEQ ID NO: 8967 - protein, 113 aa, synthetic construct
ASTKGPSVFPLAPSSKSTSGGTAALGCLVKDYFPEPVTVSWNSGALTSGVHTFPAVLQSSGLYSLSSVVTVPSSSLGTQTYICNVNHKPSNTKVDKKVEPKSCDKTHTCPPCP

SEQ ID NO: 8968 - protein, 101 aa, synthetic construct
ASTKGPSVFPLAPCSRSTSESTAALGCLVKDYFPEPVTVSWNSGALTSGVHTFPAVLQSSGLYSLSSVVTVPSSNFGTQTYTCNVDHKPSNTKVDKTVERK

SEQ ID NO: 8969 - protein, 102 aa, synthetic construct
ASTKGPSVFPLAPCSRSTSESTAALGCLVKDYFPEPVTVSWNSGALTSGVHTFPAVLQSSGLYSLSSVVTVPSSNFGTQTYTCNVDHKPSNTKVDKTVERKC

SEQ ID NO: 8970 - protein, 103 aa, synthetic construct
ASTKGPSVFPLAPCSRSTSESTAALGCLVKDYFPEPVTVSWNSGALTSGVHTFPAVLQSSGLYSLSSVVTVPSSNFGTQTYTCNVDHKPSNTKVDKTVERKCC

SEQ ID NO: 8971 - protein, 103 aa, synthetic construct
ASTKGPSVFPLAPCSRSTSESTAALGCLVKDYFPEPVTVSWNSGALTSGVHTFPAVLQSSGLYSLSSVVTVPSSSLGTKTYTCNVDHKPSNTKVDKRVESKYG

SEQ ID NO: 8972 - protein, 121 aa, synthetic construct
ASPTSPKVFPLSLCSTQPDGNVVIACLVQGFFPQEPLSVTWSESGQGVTARNFPPSQDASGDLYTTSSQLTLPATQCLAGKSVTCHVKHYTNPSQDVTVPCPVPSTPPTPSPSTPPTPSPS

SEQ ID NO: 8973 - protein, 108 aa, synthetic construct
ASPTSPKVFPLSLDSTPQDGNVVVACLVQGFFPQEPLSVTWSESGQNVTARNFPPSQDASGDLYTTSSQLTLPATQCPDGKSVTCHVKHYTNPSQDVTVPCPVPPPPP

SEQ ID NO: 8974 - protein, 159 aa, synthetic construct
APTKAPDVFPIISGCRHPKDNSPVVLACLITGYHPTSVTVTWYMGTQSQPQRTFPEIQRRDSYYMTSSQLSTPLQQWRQGEYKCVVQHTASKSKKEIFRWPESPKAQASSVPTAQPQAEGSLAKATTAPATTRNTGRGGEEKKKEKEKEEQEERETKTP

SEQ ID NO: 8975 - protein, 103 aa, synthetic construct
ASTQSPSVFPLTRCCKNIPSNATSVTLGCLATGYFPEPVMVTWDTGSLNGTTMTLPATTLTLSGHYATISLLTVSGAWAKQMFTCRVAHTPSSTDWVDNKTFS

SEQ ID NO: 8976 - protein, 104 aa, synthetic construct
GSASAPTLFPLVSCENSPSDTSSVAVGCLAQDFLPDSITLSWKYKNNSDISSTRGFPSVLRGGKYAATSQVLLPSKDVMQGTDEHVVCKVQHPNGNKEKNVPLP

SEQ ID NO: 8977 - protein, 80 aa, synthetic construct
IQNPDPAVYQLRDSKSSDKSVCLFTDFDSQTNVSQSKDSDVYITDKTVLDMRSMDFKSNSAVAWSNKSDFACANAFNNSI

SEQ ID NO: 8978 - protein, 90 aa, synthetic construct
IQNPDPAVYQLRDSKSSDKSVCLFTDFDSQTNVSQSKDSDVYITDKTVLDMRSMDFKSNSAVAWSNKSDFACANAFNNSIIPEDTFFPSP

SEQ ID NO: 8979 - protein, 126 aa, synthetic construct
EDLKNVFPPEVAVFEPSEAEISHTQKATLVCLATGFYPDHVELSWWVNGKEVHSGVSTDPQPLKEQPALNDSRYCLSSRLRVSATFWQNPRNHFRCQVQFYGLSENDEWTQDRAKPVTQIVSAEAW

SEQ ID NO: 8980 - protein, 128 aa, synthetic construct
EDLKNVFPPEVAVFEPSEAEISHTQKATLVCLATGFYPDHVELSWWVNGKEVHSGVSTDPQPLKEQPALNDSRYCLSSRLRVSATFWQNPRNHFRCQVQFYGLSENDEWTQDRAKPVTQIVSAEAWGR

SEQ ID NO: 8981 - protein, 106 aa, synthetic construct
DKQLDADVSPKPTIFLPSIAETKLQKAGTYLCLLEKFFPDVIKIHWQEKKSNTILGSQEGNTMKTNDTYMKFSWLTVPEKSLDKEHRCIVRHENNKNGVDQEIIFP

SEQ ID NO: 8982 - protein, 114 aa, synthetic construct
DKQLDADVSPKPTIFLPSIAETKLQKAGTYLCLLEKFFPDVIKIHWQEKKSNTILGSQEGNTMKTNDTYMKFSWLTVPEKSLDKEHRCIVRHENNKNGVDQEIIFPPIKTDVIT

SEQ ID NO: 8983 - protein, 85 aa, synthetic construct
SQPHTKPSVFVMKNGTNVACLVKEFYPKDIRINLVSSKKITEFDPAIVISPSGKYNAVKLGKYEDSNSVTCSVQHDNKTVHSTDF

SEQ ID NO: 8984 - protein, 92 aa, synthetic construct
SQPHTKPSVFVMKNGTNVACLVKEFYPKDIRINLVSSKKITEFDPAIVISPSGKYNAVKLGKYEDSNSVTCSVQHDNKTVHSTDFEVKTDST

SEQ ID NO: 8985 - protein, 131 aa, synthetic construct
EDLKNVFPPEVAVFEPSEAEISHTQKATLVCLATGFYPDHVELSWWVNGKEVHSGVSTDPQPLKEQPALNDSRYCLSSRLRVSATFWQNPRNHFRCQVQFYGLSENDEWTQDRAKPVTQIVSAEAWGRADC

SEQ ID NO: 8986 - protein, 94 aa, synthetic construct
IQNPDPAVYQLRDSKSSDKSVCLFTDFDSQTNVSQSKDSDVYITDKTVLDMRSMDFKSNSAVAWSNKSDFACANAFNNSIIPEDTFFPSPESSC

SEQ ID NO: 8987 - protein, 94 aa, synthetic construct; identical to SEQ ID NO: 8986

SEQ ID NO: 8988 - protein, 79 aa, synthetic construct
KSSDKSVCLFTDFDSQTNVSQSKDSDVYITDKTVLDMRSMDFKSNSAVAWSNKSDFACANAFNNSIIPEDTFFPSPESS

SEQ ID NO: 8989 - protein, 126 aa, synthetic construct; identical to SEQ ID NO: 8979

SEQ ID NO: 8990 - protein, 110 aa, synthetic construct
PEVAVFEPSEAEISHTQKATLVCLATGFYPDHVELSWWVNGKEVHSGVSTDPQPLKEQPALNDSRYCLSSRLRVSATFWQNPRNHFRCQVQFYGLSENDEWTQDRAKPVT

SEQ ID NO: 8991 - protein, 114 aa, synthetic construct; identical to SEQ ID NO: 8982

SEQ ID NO: 8992 - protein, 95 aa, synthetic construct
PKPTIFLPSIAETKLQKAGTYLCLLEKFFPDVIKIHWQEKKSNTILGSQEGNTMKTNDTYMKFSWLTVPEKSLDKEHRCIVRHENNKNGVDQEII

SEQ ID NO: 8993 - protein, 85 aa, synthetic construct; identical to SEQ ID NO: 8983

SEQ ID NO: 8994 - protein, 92 aa, synthetic construct; identical to SEQ ID NO: 8984

SEQ ID NO: 8995 - protein, 21 aa, synthetic construct
DVKLVEKSFETDTNLNFQNLS

SEQ ID NO: 8996 - protein, 22 aa, synthetic construct
CDVKLVEKSFETDTNLNFQNLS

SEQ ID NO: 8997 - protein, 19 aa, synthetic construct
GRADCGFTSESYQQGVLSA

SEQ ID NO: 8998 - protein, 27 aa, synthetic construct
QIVSAEAWGRADCGFTSESYQQGVLSA

SEQ ID NO: 8999 - protein, 24 aa, synthetic construct
MDPKDNCSKDANDTLLLQLTNTSA

SEQ ID NO: 9000 - protein, 34 aa, synthetic construct
FPPIKTDVITMDPKDNCSKDANDTLLLQLTNTSA

SEQ ID NO: 9001 - protein, 44 aa, synthetic construct
EVKTDSTDHVKPKETENTKQPSKSCHKPKAIVHTEKVNMMSLTV

SEQ ID NO: 9002 - protein, 37 aa, synthetic construct
DHVKPKETENTKQPSKSCHKPKAIVHTEKVNMMSLTV

SEQ ID NO: 9003 - protein, 10 aa, synthetic construct
QSFGLLDPKL

SEQ ID NO: 9004 - protein, 5 aa, synthetic construct
GGGGG

SEQ ID NO: 9005 - protein, 20 aa, synthetic construct
VIGFRILLLKVAGFNLLMTL

SEQ ID NO: 9006 - protein, 23 aa, synthetic construct
TILYEILLGKATLYAVLVSALVL

SEQ ID NO: 9007 - protein, 23 aa, synthetic construct
YYMYLLLLLKSVVYFAIITCCLL

SEQ ID NO: 9008 - protein, 23 aa, synthetic construct
LGLRMLFAKTVAVNFLLTAKLFF

SEQ ID NO: 9009 - protein, 20 aa, synthetic construct
CYLLDGILFIYGVILTALFL

SEQ ID NO: 9010 - protein, 10 aa, synthetic construct
GGGGGGGGGG

SEQ ID NO: 9011 - protein, 5 aa, synthetic construct
RLWSS

SEQ ID NO: 9012 - protein, 11 aa, synthetic construct
MAMVKRKDSRG

SEQ ID NO: 9013 - protein, 12 aa, synthetic construct
RRTAFCCNGEKS

SEQ ID NO: 9014 - protein, 113 aa, synthetic construct; identical to SEQ ID NO: 8886

SEQ ID NO: 9015 - protein, 10 aa, synthetic construct
GGGGGGGGGG

SEQ ID NO: 9016 - protein, 10 aa, synthetic construct
DKTHTCPPCP

SEQ ID NO: 9017 - protein, 9 aa, synthetic construct
CCVECPPCP

SEQ ID NO: 9018 - protein, 234 aa, synthetic construct
PAEPKSPDKTHTCPPCPAPPVAGPSVFLFPPKPKDTLMIARTPEVTCVVVDVSHEDPEVKFNWYVDGVEVHNAKTKPREEQYNSTYRVVSVLTVLHQDWLNGKEYKCKVSNKALPAPIEKTISKAKGQPREPQVYTLPPSRDELTKNQVSLTCLVKGFYPSDIAVEWESNGQPENNYKTTPPVLDSDGSFFLYSKLTVDKSRWQQGNVFSCSVMHEALHNHYTQKSLSLSPGKK

SEQ ID NO: 9019 - protein, 235 aa, synthetic construct
PAEPKSPDKTHTCPPCPAPPVAGPSVFLFPPKPKDTLMIARTPEVTCVVVDVSHEDPEVKFNWYVDGVEVHNAKTKPREEQYNSTYRVVSVLTVLHQDWLNGKEYKCKVSNKALPAPIEKTISKAKGQPREPQVYTLPPSRDELTKNQVSLTCLVKGFYPSDIAVEWESNGQPENNYKTTPPVLDSDGSFFLYSKLTVDKSRWQQGNVFSCSVMHEALHNHYTQKSLSSLSPGKK

SEQ ID NO: 9020 - protein, 229 aa, synthetic construct
ESKYGPPCPPCPAPEFEGGPSVFLFPPKPKDTLMISRTPEVTCVVVDVSQEDPEVQFNWYVDGVEVHNAKTKPREEQFNSTYRVVSVLTVLHQDWLNGKEYKCKVSNKGLPSSIEKTISKAKGQPREPQVYTLPPSQEEMTKNQVSLTCLVKGFYPSDIAVEWESNGQPENNYKTTPPVLDSDGSFFLYSRLTVDKSRWQEGNVFSCSVMHEALHNHYTQKSLSLSLGK

SEQ ID NO: 9021 - protein, 119 aa, synthetic construct
ESKYGPPCPPCPGQPREPQVYTLPPSQEEMTKNQVSLTCLVKGFYPSDIAVEWESNGQPENNYKTTPPVLDSDGSFFLYSRLTVDKSRWQEGNVFSCSVMHEALHNHYTQKSLSLSLGK

SEQ ID NO: 9022 - protein, 12 aa, synthetic construct
ESKYGPPCPPCP

SEQ ID NO: 9023 - protein, 10 aa, synthetic construct
GGGGGGGGGG

SEQ ID NO: 9024 - protein, 210 aa, synthetic construct
MRPRLWLLLAAQLTVLHGNSVLQQTPAYIKVQTNKMVMLSCEAKISLSNMRIYWLRQRQAPSSDSHHEFLALWDSAKGTIHGEEVEQEKIAVFRDASRFILNLTSVKPEDSGIYFCMIVGSPELTFGKGTQLSVVDFLPTTAQPTKKSTLKKRVCRLPRPETQKGPLCSPITLGLLVAGVLVLLVSLGVAIHLCCRRRRARLRFMKQFYK

SEQ ID NO: 9025 - protein, 235 aa, synthetic construct
MALPVTALLLPLALLLHAARPSQFRVSPLDRTWNLGETVELKCQVLLSNPTSGCSWLFQPRGAAASPTFLLYLSQNKPKAAEGLDTQRFSGKRLGDTFVLTLSDFRRENEGYYFCSALSNSIMYFSHFVPVFLPAKPTTTPAPRPPTPAPTIASQPLSLRPEACRPAAGGAVHTRGLDFACDIYIWAPLAGTCGVLLLSLVITLYCNHRNRRRVCKCPRPVVKSGDKPSLSARYV

SEQ ID NO: 9026 - protein, 458 aa, synthetic construct
MNRGVPFRHLLLVLQLALLPAATQGKKVVLGKKGDTVELTCTASQKKSIQFHWKNSNQIKILGNQGSFLTKGPSKLNDRADSRRSLWDQGNFPLIIKNLKIEDSDTYICEVEDQKEEVQLLVFGLTANSDTHLLQGQSLTLTLESPPGSSPSVQCRSPRGKNIQGGKTLSVSQLELQDSGTWTCTVLQNQKKVEFKIDIVVLAFQKASSIVYKKEGEQVEFSFPLAFTVEKLTGSGELWWQAERASSSKSWITFDLKNKEVSVKRVTQDPKLQMGKKLPLHLTLPQALPQYAGSGNLTLALEAKTGKLHQEVNLVVMRATQLQKNLTCEVWGPTSPKLMLSLKLENKEAKVSKREKAVWVLNPEAGMWQCLLSDSGQVLLESNIKVLPTWSTPVQPMALIVLGGVAGLLLFIGLGIFFCVRCRHRRRQAERMSQIKRLLSEKKTCQCPHRFQKTCSPI

SEQ ID NO: 9027 - protein, 19 aa, synthetic construct
HLCCRRRRARLRFMKQFYK

SEQ ID NO: 9028 - protein, 32 aa, synthetic construct
LYCNHRNRRRVCKCPRPVVKSGDKPSLSARYV

SEQ ID NO: 9029 - protein, 40 aa, synthetic construct
CVRCRHRRRQAERMSQIKRLLSEKKTCQCPHRFQKTCSPI

SEQ ID NO: 9030 - protein, 10 aa, synthetic construct
GGGGGGGGGG

SEQ ID NO: 9031 - protein, 730 aa, synthetic construct
MALPVTALLLPLALLLHAARPDIQMTQTTSSLSASLGDRVTISCRASQDISKYLNWYQQKPDGTVKLLIYHTSRLHSGVPSRFSGSGSGTDYSLTISNLEQEDIATYFCQQGNTLPYTFGGGTKLEITGGGGSGGGGSGGGGSEVKLQESGPGLVAPSQSLSVTCTVSGVSLPDYGVSWIRQPPRKGLEWLGVIWGSETTYYNSALKSRLTIIKDNSKSQVFLKMNSLQTDDTAIYYCAKHYYYGGSYAMDYWGQGTSVTVSSTRGGSGVFTLEDFVGDWRQTAGYNLDQVLEQGGVSSLFQNLGVSVTPIQRIVLSGENGLKIDIHVIIPYEGLSGDQMGQIEKIFKVVYPVDDHHFKVILHYGTLVIDGVTPNMIDYFGRPYEGIAVFDGKKITVTGTLWNGNKIIDERLINPDGSLLFRVTINGVTGWRLCERILALEGGSWSHPQFEKDYKDDDDKGSDYKDDDDKGSDYKDDDDKGSDYKDDDDKAWSHPQFEKHHHHHHHHTSGSGEGRGSLLTCGDVEENPGPHMTEYKPTVRLATRDDVPRAVRTLAAAFADYPATRHTVDPDRHIERVTELQELFLTRVGLDIGKVWVADDGAAVAVWTTPESVEAGAVFAEIGPRMAELSGSRLAAQQQMEGLLAPHRPKEPAWFLATVGVSPDHQGKGLGSAVVLPGVEAAERAGVPAFLETSAPRNLPFYERLGFTVTADVEVPEGPRTWCMTRKPGA

SEQ ID NO: 9032 - protein, 675 aa, synthetic construct
MPSWALFMVTSCLLLAPQNLAQVSSQDVSLLASDSEPLKCFSRTFEDLTCFWDEEEAAPSGTYQLLYAYPREKPRACPLSSQSMPHFGTRYVCQFPDQEEVRLFFPLHLWVKNVFLNQTRTQRVLFVDSVGLPAPPSIIKAMGGSQPGELQISWEEPAPEISDFLRYELRYGPRDPKNSTGPTVIQLIATETCCPALQRPHSASALDQSPCAQPTMPWQDGPKQTSPSREASALTAEGGSCLISGLQPGNSYWLQLRSEPDGISLGGSWGSWSLPVTVDLPGDAVALGLQCFTLDLKNVTCQWQQQDHASSQGFFYHSRARCCPRDRYPIWENCEEEEKTNPGLQTPQFSRCHFKSRNDSIIHILVEVTTAPGTVHSYLGSPFWIHQAVRLPTPNLHWREISSGHLELEWQHPSSWAAQETCYQLRYTGEGHQDWKVLEPPLGARGGTLELRPRSRYRLQLRARLNGPTYQGPWSSWSDPTRVETATETATRGGSGVFTLEDFVGDWRQTAGYNLDQVLEQGGVSSLFQNLGVSVTPIQRIVLSGENGLKIDIHVIIPYEGLSGDQMGQIEKIFKVVYPVDDHHFKVILHYGTLVIDGVTPNMIDYFGRPYEGIAVFDGKKITVTGTLWNGNKIIDERLINPDGSLLFRVTINGVTGWRLCERILASWKDASGWS

SEQ ID NO: 9033 - protein, 483 aa, synthetic construct
MPPPRLLFFLLFLTPMEVRPDYKDDDDKEEPLVVKVEEGDNAVLQCLKGTSDGPTQQLTWSRESPLKPFLKLSLGLPGLGIHMRPLAIWLFIFNVSQQMGGFYLCQPGPPSEKAWQPGWTVNVEGSGELFRWNVSDLGGLGCGLKNRSSEGPSSPSGKLMSPKLYVWAKDRPEIWEGEPPCLPPRDSLNQSLSQDLTMAPGSTLWLSCGVPPDSVSRGPLSWTHVHPKGPKSLLSLELKDDRPARDMWVMETGLLLPRATAQDAGKYYCHRGNLTMSFHLEITARPVLWHWLLRTGGWTRGGSGVFTLEDFVGDWRQTAGYNLDQVLEQGGVSSLFQNLGVSVTPIQRIVLSGENGLKIDIHVIIPYEGLSGDQMGQIEKIFKVVYPVDDHHFKVILHYGTLVIDGVTPNMIDYFGRPYEGIAVFDGKKITVTGTLWNGNKIIDERLINPDGSLLFRVTINGVTGWRLCERILASWKDASGWS

SEQ ID NO: 9034 - protein, 765 aa, synthetic construct
MPPPRLLFFLLFLTPMEVRPDYKDDDDKEEPLVVKVEEGDNAVLQCLKGTSDGPTQQLTWSRESPLKPFLKLSLGLPGLGIHMRPLAIWLFIFNVSQQMGGFYLCQPGPPSEKAWQPGWTVNVEGSGELFRWNVSDLGGLGCGLKNRSSEGPSSPSGKLMSPKLYVWAKDRPEIWEGEPPCLPPRDSLNQSLSQDLTMAPGSTLWLSCGVPPDSVSRGPLSWTHVHPKGPKSLLSLELKDDRPARDMWVMETGLLLPRATAQDAGKYYCHRGNLTMSFHLEITARPVLWHWLLRTGGWTRGGSGVFTLEDFVGDWRQTAGYNLDQVLEQGGVSSLFQNLGVSVTPIQRIVLSGENGLKIDIHVIIPYEGLSGDQMGQIEKIFKVVYPVDDHHFKVILHYGTLVIDGVTPNMIDYFGRPYEGIAVFDGKKITVTGTLWNGNKIIDERLINPDGSLLFRVTINGVTGWRLCERILALEGGSWSHPQFEKDYKDDDDKGSDYKDDDDKGSDYKDDDDKGSDYKDDDDKAWSHPQFEKHHHHHHHHTSGSGEGRGSLLTCGDVEENPGPHMTEYKPTVRLATRDDVPRAVRTLAAAFADYPATRHTVDPDRHIERVTELQELFLTRVGLDIGKVWVADDGAAVAVWTTPESVEAGAVFAEIGPRMAELSGSRLAAQQQMEGLLAPHRPKEPAWFLATVGVSPDHQGKGLGSAVVLPGVEAAERAGVPAFLETSAPRNLPFYERLGFTVTADVEVPEGPRTWCMTRKPGA

SEQ ID NO: 9035 - protein, 10 aa, synthetic construct
GGGGGGGGGG

SEQ ID NO: 9036 - protein, 199 aa, synthetic construct
MTEYKPTVRLATRDDVPRAVRTLAAAFADYPATRHTVDPDRHIERVTELQELFLTRVGLDIGKVWVADDGAAVAVWTTPESVEAGAVFAEIGPRMAELSGSRLAAQQQMEGLLAPHRPKEPAWFLATVGVSPDHQGKGLGSAVVLPGVEAAERAGVPAFLETSAPRNLPFYERLGFTVTADVEVPEGPRTWCMTRKPGA

SEQ ID NO: 9037 - protein, 132 aa, synthetic construct
MAKPLSQEESTLIERATATINSIPISEDYSVASAALSSDGRIFTGVNVYHFTGGPCAELVVLGTAAAAAAGNLTCIVAIGNENRGILSPCGRCRQVLLDLHPGIKAIVKDSDGQPTAVGIRELLPSGYVWEG

SEQ ID NO: 9038 - protein, 172 aa, synthetic construct
MGNEASYPLEMCSHFDADEIKRLGKRFKKLDLDNSGSLSVEEFMSLPELQQNPLVQRVIDIFDTDGNGEVDFKEFIEGVSQFSVKGDKEQKLRFAFRIYDMDKDGYISNGELFQVLKMMVGNNTKLADTQLQQIVDKTIINADKDGDGRISFEEFCAVVGGLDIHKKMVVDV

SEQ ID NO: 9039 - protein, 357 aa, synthetic construct
MLLLVTSLLLCELPHPAFLLIPRKVCNGIGIGEFKDSLSINATNIKHFKNCTSISGDLHILPVAFRGDSFTHTPPLDPQELDILKTVKEITGFLLIQAWPENRTDLHAFENLEIIRGRTKQHGQFSLAVVSLNITSLGLRSLKEISDGDVIISGNKNLCYANTINWKKLFGTSGQKTKIISNRGENSCKATGQVCHALCSPEGCWGPEPRDCVSCRNVSRGRECVDKCNLLEGEPREFVENSECIQCHPECLPQAMNITCTGRGPDNCIQCAHYIDGPHCVKTCPAGVMGENNTLVWKYADAGHVCHLCHPNCTYGCTGPGLEGCPTNGPKIPSIATGMVGALLLLLVVALGIGLFM

SEQ ID NO: 9040 - protein, 424 aa, synthetic construct
MRPSGTAGAAFLALLAALCPASRALEEKKGNYVVTDHGSCVRACGADSYEMEEDGVRKCKKCEGPCRKVCNGIGIGEFKDSLSINATNIKHFKNCTSISGDLHILPVAFRGDSFTHTPPLDPQELDILKTVKEITGFLLIQAWPENRTDLHAFENLEIIRGRTKQHGQFSLAVVSLNITSLGLRSLKEISDGDVIISGNKNLCYANTINWKKLFGTSGQKTKIISNRGENSCKATGQVCHALCSPEGCWGPEPRDCVSCRNVSRGRECVDKCNLLEGEPREFVENSECIQCHPECLPQAMNITCTGRGPDNCIQCAHYIDGPHCVKTCPAGVMGENNTLVWKYADAGHVCHLCHPNCTYGCTGPGLEGCPTNGPKIPSIATGMVGALLLLLVVALGIGLFMRRRHIVRKRTLRRLLQERELVEP

SEQ ID NO: 9041 - protein, 333 aa, synthetic construct
MPPPRLLFFLLFLTPMEVRPEEPLVVKVEEGDNAVLQCLKGTSDGPTQQLTWSRESPLKPFLKLSLGLPGLGIHMRPLAIWLFIFNVSQQMGGFYLCQPGPPSEKAWQPGWTVNVEGSGELFRWNVSDLGGLGCGLKNRSSEGPSSPSGKLMSPKLYVWAKDRPEIWEGEPPCLPPRDSLNQSLSQDLTMAPGSTLWLSCGVPPDSVSRGPLSWTHVHPKGPKSLLSLELKDDRPARDMWVMETGLLLPRATAQDAGKYYCHRGNLTMSFHLEITARPVLWHWLLRTGGWKVSAVTLAYLIFCLCSLVGILHLQRALVLRRKRKRMTDPTRRF

SEQ ID NO: 9042 - protein, 105 aa, synthetic construct
MALPVTALLLPLALLLHAARPFEMLQMAGQCSQNEYFDSLLHACIPCQLRCSSNTPPLTCQRYCNASVTNSVKGTNAILWTCLGLSLIISLAVFVLMFLLRKINS

SEQ ID NO: 9043 - protein, 188 aa, synthetic construct
MATYEVLCEVARKLGTDDREVVLFLLNVFIPQPTLAQLIGALRALKEEGRLTFPLLAECLFRAGRRDLLRDLLHLDPRFLERHLAGTMSYFSPYQLTVLHVDGELCARDIRSLIFLSKDTIGSRSTPQTFLHWVYCMENLDLLGPTDVDALMSMLRSLSRVDLQRQVQTLMGLHLSGPSHSQHYRHTP

SEQ ID NO: 9044 - protein, 241 aa, synthetic construct
MSDSKEVPSLPFLRHLLEELDSHEDSLLLFLCHDAAPGCTTVTQALCSLSQQRKLTLAALVEMLYVLQRMDLLKSRFGLSKEGAEQLLGTSFLTRYRKLMVCVGEELDSSELRALRLFACNLNPSLSTALSESSRFVELVLALENVGLVSPSSVSVLADMLRTLRRLDLCQQLVEYEQQEQARYRYCYAASPSLPVRTLRRGHGASEHEQLCMPVQESSDSPELLRTPVQESSSDSPEQTT

SEQ ID NO: 9045 - protein, 188 aa, synthetic construct; identical to SEQ ID NO: 9043

SEQ ID NO: 9046 - protein, 400 aa, synthetic construct
MLEGVQVETISPGDGRTFPKRGQTCVVHYTGMLEDGKKVDSSRDRNKPFKFMLGKQEVIRGWEEGVAQMSVGQRAKLTISPDYAYGATGHPGIIPPHATLVFDVELLKLESGGGSGVDGFGDVGALESLRGNADLAYILSMEPCGHCLIINNVNFCRESGLRTRTGSNIDCEKLRRRFSSLHFMVEVKGDLTAKKMVLALLELAQQDHGALDCCVVVILSHGCQASHLQFPGAVYGTDGCPVSVEKIVNIFNGTSCPSLGGKPKLFFIQACGGEQKDHGFEVASTSPEDESPGSNPEPDATPFQEGLRTFDQLDAISSLPTPSDIFVSYSTFPGFVSWRDPKSGSWYVETLDDIFEQWAHSEDLQSLLLRVANAVSVKGIYKQMPGCFNFLRKKLFFKTS

SEQ ID NO: 9047 - protein, 395 aa, synthetic construct
MYRMQLLSCIALSLALVTNSAPTSSSTKKTQLQLEHLLLDLQMILNGINNYKNPKLTRMLTFKFYMPKKATELKHLQCLEEELKPLEEVLNLAQSKNFHLRPRDLISNINVIVLELKGSETTFMCEYADETATIVEFLNRWITFCQSIISTLTTRGGGSSRKIEVMYPPPYLDNEKSNGTIIHVKGKHLCPSPLFPGPSKPFWVLVVVGGVLACYSLLVTVAFIIFWVRSKRSSSRAKRSGSGATNFSLLKQAGDVEENPGPHMAKPLSQEESTLIERATATINSIPISEDYSVASAALSSDGRIFTGVNVYHFTGGPCAELVVLGTAAAAAAGNLTCIVAIGNENRGILSPCGRCRQVLLDLHPGIKAIVKDSDGQPTAVGIRELLPSGYVWEG

SEQ ID NO: 9048 - protein, 30 aa, synthetic construct; identical to SEQ ID NO: 8879

SEQ ID NO: 9049 - protein, 30 aa, synthetic construct; identical to SEQ ID NO: 8879

SEQ ID NO: 9050 - protein, 30 aa, synthetic construct
QSFGLLDPKLSYLLDGILFIYGVILTALFL

SEQ ID NO: 9051 - protein, 30 aa, synthetic construct; identical to SEQ ID NO: 9050

SEQ ID NO: 9052 - protein, 36 aa, synthetic construct
RDQRLPPDAHKPPGGGSFRTPIQEEQADAHSTLAKI

SEQ ID NO: 9053 - protein, 36 aa, synthetic construct; identical to SEQ ID NO: 9052

SEQ ID NO: 9054 - protein, 66 aa, synthetic construct
QSFGLLDPKLCYLLDGILFIYGVILTALFLRDQRLPPDAHKPPGGGSFRTPIQEEQADAHSTLAKI

SEQ ID NO: 9055 - protein, 66 aa, synthetic construct; identical to SEQ ID NO: 9054

SEQ ID NO: 9056 - protein, 66 aa, synthetic construct
QSFGLLDPKLSYLLDGILFIYGVILTALFLRDQRLPPDAHKPPGGGSFRTPIQEEQADAHSTLAKI

SEQ ID NO: 9057 - protein, 66 aa, synthetic construct; identical to SEQ ID NO: 9056

SEQ ID NO: 9058 - protein, 115 aa, synthetic construct
MGGLEPCSRLLLLPLLLAVSGLRPVQAGSQAQSDCSCSTVSPGVLAGIVMGDLVLTVLIALAVYFLGRLVPRGRGAAEAATRKQRITETESPYQELQGQRSDVYSDLNTQRPYYK

SEQ ID NO: 9059 - protein, 86 aa, synthetic construct
QAQSDCSCSTVSPGVLAGIVMGDLVLTVLIALAVYFLGRLVPRGRGAAEAATRKQRITETESPYQELQGQRSDVYSDLNTQRPYYK

SEQ ID NO: 9060 - protein, 115 aa, synthetic construct
MGGLEPCSRLLLLPLLLAVSGLRPVQAGTQAQSDCSCSTVSPGVLAGIVMGDLVLTVLIALAVYFLGRLVPRGRGAAEAATRKQRITETESPYQELQGQRSDVYSDLNTQRPYYK

SEQ ID NO: 9061 - protein, 86 aa, synthetic construct; identical to SEQ ID NO: 9059

SEQ ID NO: 9062 - protein, 115 aa, synthetic construct
MGGLEPCSRLLLLPLLLAVSGLRPVQAGSQAQSDCSSSTVSPGVLAGIVMGDLVLTVLIALAVYFLGRLVPRGRGAAEAATRKQRITETESPYQELQGQRSDVYSDLNTQRPYYK

SEQ ID NO: 9063 - protein, 86 aa, synthetic construct
QAQSDCSSSTVSPGVLAGIVMGDLVLTVLIALAVYFLGRLVPRGRGAAEAATRKQRITETESPYQELQGQRSDVYSDLNTQRPYYK

SEQ ID NO: 9064 - protein, 115 aa, synthetic construct
MGGLEPCSRLLLLPLLLAVSGLRPVQAGTQAQSDCSSSTVSPGVLAGIVMGDLVLTVLIALAVYFLGRLVPRGRGAAEAATRKQRITETESPYQELQGQRSDVYSDLNTQRPYYK

SEQ ID NO: 9065 - protein, 86 aa, synthetic construct; identical to SEQ ID NO: 9063

SEQ ID NO: 9066 - protein, 183 aa, synthetic construct
LWVSQPPEIRTLEGSSAFLPCSFNASQGRLAIGSVTWFRDEVVPGKEVRNGTPEFRGRLAPLASSRFLHDHQAELHIRDVRGHDASIYVCRVEVLGLGVGTGNGTRLVVEKEHPQLGAGTVLLLRAGFYAVSFLSVAVGSTVYYQGKCLTWKGPRRQLPAVVPAPLPPPCGSSAHLLPPVPGG

SEQ ID NO: 9067 - protein, 76 aa, synthetic construct
VVEKEHPQLGAGTVLLLRAGFYAVSFLSVAVGSTVYYQGKCLTWKGPRRQLPAVVPAPLPPPCGSSAHLLPPVPGG

SEQ ID NO: 9068 - protein, 108 aa, synthetic construct
LWVSQPPEIRTLEGSSAFLPCSFNASQGRLAIGSVTWFRDEVVPGKEVRNGTPEFRGRLAPLASSRFLHDHQAELHIRDVRGHDASIYVCRVEVLGLGVGTGNGTRLV

SEQ ID NO: 9069 - protein, 9 aa, synthetic construct
VEKEHPQLG

SEQ ID NO: 9070 - protein, 21 aa, synthetic construct
AGTVLLLRAGFYAVSFLSVAV

SEQ ID NO: 9071 - protein, 44 aa, synthetic construct
GQHRVLSGQVPDLEGTKATACCGACSFASSMWKLCPSAATCSRR

SEQ ID NO: 9072 - protein, 183 aa, synthetic construct; identical to SEQ ID NO: 9066

SEQ ID NO: 9073 - protein, 75 aa, synthetic construct
VEKEHPQLGAGTVLLLRAGFYAVSFLSVAVGSTVYYQGKCLTWKGPRRQLPAVVPAPLPPPCGSSAHLLPPVPGG

SEQ ID NO: 9074 - protein, 108 aa, synthetic construct; identical to SEQ ID NO: 9068

SEQ ID NO: 9075 - protein, 9 aa, synthetic construct
VEKEHPQLG

SEQ ID NO: 9076 - protein, 21 aa, synthetic construct
AGTVLLLRAGFYAVSFLSVAV

SEQ ID NO: 9077 - protein, 45 aa, synthetic construct
GSTVYYQGKCLTWKGPRRQLPAVVPAPLPPPCGSSAHLLPPVPGG

SEQ ID NO: 9078 - protein, 286 aa, synthetic construct
MAWRALHPLLLLLLLFPGSQAGTSGEFGSLEQSKAQVLQSVAGQTLTVRCQYPPTGSLYEKKGWCKEASALVCIRLVTSSKPRTMAWTSRFTIWDDPDAGFFTVTMTDLREEDSGHYWCRIYRPSDNSVSKSVRFYLVVSPASASTQTSWTPRDLVSSQTQTQSCVPPTAGARQAPESPSTIPVPSQPQNSTLRPGPAAPIALVPVFCGLLVAKSLVLSALLVWWGDIWWKTMMELRSLDTQKATCHLQQVTDLPWTSVSSPVEREILYHTVARTKISDDDDEHTL

SEQ ID NO: 9079 - protein, 255 aa, synthetic construct
QSKAQVLQSVAGQTLTVRCQYPPTGSLYEKKGWCKEASALVCIRLVTSSKPRTMAWTSRFTIWDDPDAGFFTVTMTDLREEDSGHYWCRIYRPSDNSVSKSVRFYLVVSPASASTQTSWTPRDLVSSQTQTQSCVPPTAGARQAPESPSTIPVPSQPQNSTLRPGPAAPIALVPVFCGLLVAKSLVLSALLVWWGDIWWKTMMELRSLDTQKATCHLQQVTDLPWTSVSSPVEREILYHTVARTKISDDDDEHTL

SEQ ID NO: 9080 - protein, 156 aa, synthetic construct
KSVRFYLVVSPASASTQTSWTPRDLVSSQTQTQSCVPPTAGARQAPESPSTIPVPSQPQNSTLRPGPAAPIALVPVFCGLLVAKSLVLSALLVWWGDIWWKTMMELRSLDTQKATCHLQQVTDLPWTSVSSPVEREILYHTVARTKISDDDDEHTL

SEQ ID NO: 9081 - protein, 99 aa, synthetic construct
QSKAQVLQSVAGQTLTVRCQYPPTGSLYEKKGWCKEASALVCIRLVTSSKPRTMAWTSRFTIWDDPDAGFFTVTMTDLREEDSGHYWCRIYRPSDNSVS

SEQ ID NO: 9082 - protein, 72 aa, synthetic construct
KSVRFYLVVSPASASTQTSWTPRDLVSSQTQTQSCVPPTAGARQAPESPSTIPVPSQPQNSTLRPGPAAPIA

SEQ ID NO: 9083 - protein, 21 aa, synthetic construct
LVPVFCGLLVAKSLVLSALLV

SEQ ID NO: 9084 - protein, 63 aa, synthetic construct
WWGDIWWKTMMELRSLDTQKATCHLQQVTDLPWTSVSSPVEREILYHTVARTKISDDDDEHTL

SEQ ID NO: 9085 - protein, 285 aa, synthetic construct
MAWRALHPLLLLLLLFPGSQAGSSFEGSTRQSKAQVLQSVAGQTLTVRCQYPPTGSLYEKKGWCKEASALVCIRLVTSSKPRTMAWTSRFTIWDDPDAGFFTVTMTDLREEDSGHYWCRIYRPSDNSVSKSVRFYLVVSPASASTQTSWTPRDLVSSQTQTQSCVPPTAGARQAPESPSTIPVPSQPQNSTLRPGPAAPIALVPVFCGLLVAKSLVLSALLVWWGDIWWKTMMELRSLDTQKATCHLQQVTDLPWTSVSSPVEREILYHTVARTKISDDDDEHTL

SEQ ID NO: 9086 - protein, 255 aa, synthetic construct; identical to SEQ ID NO: 9079

SEQ ID NO: 9087 - protein, 156 aa, synthetic construct; identical to SEQ ID NO: 9080

SEQ ID NO: 9088 - protein, 99 aa, synthetic construct; identical to SEQ ID NO: 9081

SEQ ID NO: 9089 - protein, 72 aa, synthetic construct; identical to SEQ ID NO: 9082

SEQ ID NO: 9090 - protein, 21 aa, synthetic construct
LVPVFCGLLVAKSLVLSALLV

SEQ ID NO: 9091 - protein, 63 aa, synthetic construct; identical to SEQ ID NO: 9084

SEQ ID NO: 9092 - protein, 283 aa, synthetic construct
QQQTLPKPFIWAEPHFMVPKEKQVTICCQGNYGAVEYQLHFEGSLFAVDRPKPPERINKVQFYIPDMNSRMAGQYSCIYRVGELWSEPSNLLDLVVTEMYDTPTLSVHPGPEVISGEKVTFYCRLDTATSMFLLLKEGRSSHVQRGYGKVQAEFPLGPVTTAHRGTYRCFGSYNNHAWSFPSEPVKLLVTGDIENTSLAPEDPTFPADTWGTYLLTTETGLQKDHALWDHTAQNLLRMGLAFLVLVALVWFLVEDWLSRKRTRERASRASTWEGRRRLNTQTL

SEQ ID NO: 9093 - protein, 186 aa, synthetic construct
EMYDTPTLSVHPGPEVISGEKVTFYCRLDTATSMFLLLKEGRSSHVQRGYGKVQAEFPLGPVTTAHRGTYRCFGSYNNHAWSFPSEPVKLLVTGDIENTSLAPEDPTFPADTWGTYLLTTETGLQKDHALWDHTAQNLLRMGLAFLVLVALVWFLVEDWLSRKRTRERASRASTWEGRRRLNTQTL

SEQ ID NO: 9094 - protein, 176 aa, synthetic construct
HPGPEVISGEKVTFYCRLDTATSMFLLLKEGRSSHVQRGYGKVQAEFPLGPVTTAHRGTYRCFGSYNNHAWSFPSEPVKLLVTGDIENTSLAPEDPTFPADTWGTYLLTTETGLQKDHALWDHTAQNLLRMGLAFLVLVALVWFLVEDWLSRKRTRERASRASTWEGRRRLNTQTL

SEQ ID NO: 9095 - protein, 93 aa, synthetic construct
GDIENTSLAPEDPTFPADTWGTYLLTTETGLQKDHALWDHTAQNLLRMGLAFLVLVALVWFLVEDWLSRKRTRERASRASTWEGRRRLNTQTL

SEQ ID NO: 9096 - protein, 97 aa, synthetic construct
QQQTLPKPFIWAEPHFMVPKEKQVTICCQGNYGAVEYQLHFEGSLFAVDRPKPPERINKVQFYIPDMNSRMAGQYSCIYRVGELWSEPSNLLDLVVT

SEQ ID NO: 9097 - protein, 10 aa, synthetic construct
EMYDTPTLSV

SEQ ID NO: 9098 - protein, 83 aa, synthetic construct
HPGPEVISGEKVTFYCRLDTATSMFLLLKEGRSSHVQRGYGKVQAEFPLGPVTTAHRGTYRCFGSYNNHAWSFPSEPVKLLVT

SEQ ID NO: 9099 - protein, 47 aa, synthetic construct
GDIENTSLAPEDPTFPADTWGTYLLTTETGLQKDHALWDHTAQNLLR

SEQ ID NO: 9100 - protein, 21 aa, synthetic construct
MGLAFLVLVALVWFLVEDWLS

SEQ ID NO: 9101 - protein, 25 aa, synthetic construct
RKRTRERASRASTWEGRRRLNTQTL

SEQ ID NO: 9102 - protein, 283 aa, synthetic construct; identical to SEQ ID NO: 9092

SEQ ID NO: 9103 - protein, 186 aa, synthetic construct; identical to SEQ ID NO: 9093

SEQ ID NO: 9104 - protein, 177 aa, synthetic construct
VHPGPEVISGEKVTFYCRLDTATSMFLLLKEGRSSHVQRGYGKVQAEFPLGPVTTAHRGTYRCFGSYNNHAWSFPSEPVKLLVTGDIENTSLAPEDPTFPADTWGTYLLTTETGLQKDHALWDHTAQNLLRMGLAFLVLVALVWFLVEDWLSRKRTRERASRASTWEGRRRLNTQTL

SEQ ID NO: 9105 - protein, 93 aa, synthetic construct; identical to SEQ ID NO: 9095

SEQ ID NO: 9106 - protein, 97 aa, synthetic construct; identical to SEQ ID NO: 9096

SEQ ID NO: 9107 - protein, 10 aa, synthetic construct
EMYDTPTLSV

SEQ ID NO: 9108 - protein, 83 aa, synthetic construct; identical to SEQ ID NO: 9098

SEQ ID NO: 9109 - protein, 47 aa, synthetic construct; identical to SEQ ID NO: 9099

SEQ ID NO: 9110 - protein, 21 aa, synthetic construct
MGLAFLVLVALVWFLVEDWLS

SEQ ID NO: 9111 - protein, 25 aa, synthetic construct
RKRTRERASRASTWEGRRRLNTQTL

SEQ ID NO: 9112 - protein, 238 aa, synthetic construct
GMRTEDLPKAVVFLEPQWYRVLEKDSVTLKCQGAYSPEDNSTQWFHNESLISSQASSYFIDAATVDDSGEYRCQTNLSTLSDPVQLEVHIGWLLLQAPRWVFKEEDPIHLRCHSWKNTALHKVTYLQNGKGRKYFHHNSDFYIPKATLKDSGSYFCRGLVGSKNVSSETVNITITQGLAVSTISSFFPPGYQVSFCLVMVLLFAVDTGLYFSVKTNIRSSTRDWKDHKFKWRKDPQDK

SEQ ID NO: 9113 - protein, 238 aa, synthetic construct; identical to SEQ ID NO: 9112

SEQ ID NO: 9114 - protein, 238 aa, synthetic construct; identical to SEQ ID NO: 8949

SEQ ID NO: 9115 - protein, 89 aa, synthetic construct
MIPAVVLLLLLLVEQAAALGSLGEPQLCYILDAILFLYGIVLTLLYCRLKIQVRKAAITSYEKSDGVYTGLSTRNQETYETLKHEKPPQ

SEQ ID NO: 9116 - protein, 68 aa, synthetic construct
LGEPQLCYILDAILFLYGIVLTLLYCRLKIQVRKAAITSYEKSDGVYTGLSTRNQETYETLKHEKPPQ

SEQ ID NO: 9117 - protein, 89 aa, synthetic construct
MIPAVVLLLLLLVEQAAALGTLGEPQLCYILDAILFLYGIVLTLLYCRLKIQVRKAAITSYEKSDGVYTGLSTRNQETYETLKHEKPPQ

SEQ ID NO: 9118 - protein, 68 aa, synthetic construct; identical to SEQ ID NO: 9116

SEQ ID NO: 9119 - protein, 89 aa, synthetic construct
MIPAVVLLLLLLVEQAAALGSLGEPQLSYILDAILFLYGIVLTLLYCRLKIQVRKAAITSYEKSDGVYTGLSTRNQETYETLKHEKPPQ

SEQ ID NO: 9120 - protein, 68 aa, synthetic construct
LGEPQLSYILDAILFLYGIVLTLLYCRLKIQVRKAAITSYEKSDGVYTGLSTRNQETYETLKHEKPPQ

SEQ ID NO: 9121 - protein, 89 aa, synthetic construct
MIPAVVLLLLLLVEQAAALGTLGEPQLSYILDAILFLYGIVLTLLYCRLKIQVRKAAITSYEKSDGVYTGLSTRNQETYETLKHEKPPQ

SEQ ID NO: 9122 - protein, 68 aa, synthetic construct; identical to SEQ ID NO: 9120

SEQ ID NO: 9123 - protein, 150 aa, synthetic construct
QSFGLLDPKLSYLLDGILFIYGVILTALFLWRRKRKEKQSETSPKEFLTIYEDVKDLKTRRNHEQEQTFPGGGSTIYSMIQSQSSAPTSQEPAYTLYSLIQPSRKSGSRKRNHSPSFNSTIYEVIGKSQPKAQNPARLSRKELENFDVYS

SEQ ID NO: 9124 - protein, 120 aa, synthetic construct
WRRKRKEKQSETSPKEFLTIYEDVKDLKTRRNHEQEQTFPGGGSTIYSMIQSQSSAPTSQEPAYTLYSLIQPSRKSGSRKRNHSPSFNSTIYEVIGKSQPKAQNPARLSRKELENFDVYS

SEQ ID NO: 9125 - protein, 152 aa, synthetic construct
QSFGLLDPKLSYLLDGILFIYGVILTALFLWRRKRKEKQSETSPKEFLTIYEDVKDLKTRRNHEQEQTFPGGGSTIYSMIQSQSSAPTSQEPAYTLYSLIQPSRKSGSRKRNHSPSFNSTIYEVIGKSQPKAQNPARLSRKELENFDVYSSR

SEQ ID NO: 9126 - protein, 120 aa, synthetic construct; identical to SEQ ID NO: 9124

SEQ ID NO: 9127 - protein, 199 aa, synthetic construct
AKPTTTPAPRPPTPAPTIASQPLSLRPEACRPAAGGAVHTRGLDFACDSNLFVASWIAVMIIFRIGMAVAIFCCFFFPSWRRKRKEKQSETSPKEFLTIYEDVKDLKTRRNHEQEQTFPGGGSTIYSMIQSQSSAPTSQEPAYTLYSLIQPSRKSGSRKRNHSPSFNSTIYEVIGKSQPKAQNPARLSRKELENFDVYS

SEQ ID NO: 9128 - protein, 48 aa, synthetic construct
AKPTTTPAPRPPTPAPTIASQPLSLRPEACRPAAGGAVHTRGLDFACD

SEQ ID NO: 9129 - protein, 31 aa, synthetic construct
SNLFVASWIAVMIIFRIGMAVAIFCCFFFPS

SEQ ID NO: 9130 - protein, 120 aa, synthetic construct; identical to SEQ ID NO: 9124

SEQ ID NO: 9131 - protein, 199 aa, synthetic construct; identical to SEQ ID NO: 9127

SEQ ID NO: 9132 - protein, 48 aa, synthetic construct; identical to SEQ ID NO: 9128

SEQ ID NO: 9133 - protein, 31 aa, synthetic construct; identical to SEQ ID NO: 9129

SEQ ID NO: 9134 - protein, 120 aa, synthetic construct; identical to SEQ ID NO: 9124

SEQ ID NO: 9135 - protein, 199 aa, synthetic construct
AKPTTTPAPRPPTPAPTIASQPLSLRPEAARPAAGGAVHTRGLDFACDSNLFVASWIAVMIIFRIGMAVAIFCCFFFPSWRRKRKEKQSETSPKEFLTIYEDVKDLKTRRNHEQEQTFPGGGSTIYSMIQSQSSAPTSQEPAYTLYSLIQPSRKSGSRKRNHSPSFNSTIYEVIGKSQPKAQNPARLSRKELENFDVYS

SEQ ID NO: 9136 - protein, 48 aa, synthetic construct
AKPTTTPAPRPPTPAPTIASQPLSLRPEAARPAAGGAVHTRGLDFACD

SEQ ID NO: 9137 - protein, 199 aa, synthetic construct; identical to SEQ ID NO: 9135

SEQ ID NO: 9138 - protein, 48 aa, synthetic construct; identical to SEQ ID NO: 9136

SEQ ID NO: 9139 - protein, 89 aa, synthetic construct
GMRTEDLPKAVVFLEPQWYRVLEKDSVTLKCQGAYSPEDNSTQWFHNESLISSQASSYFIDAATVDDSGEYRCQTNLSTLSDPVQLEVH

SEQ ID NO: 9140 - protein, 84 aa, synthetic construct
IGWLLLQAPRWVFKEEDPIHLRCHSWKNTALHKVTYLQNGKGRKYFHHNSDFYIPKATLKDSGSYFCRGLVGSKNVSSETVNIT

SEQ ID NO: 9141 - protein, 14 aa, synthetic construct
IGWLLLQAPRWVFK

SEQ ID NO: 9142 - protein, 70 aa, synthetic construct
EEDPIHLRCHSWKNTALHKVTYLQNGKGRKYFHHNSDFYIPKATLKDSGSYFCRGLVGSKNVSSETVNIT

SEQ ID NO: 9143 - protein, 17 aa, synthetic construct
ITQGLAVSTISSFFPPG

SEQ ID NO: 9144 - protein, 23 aa, synthetic construct
YQVSFCLVMVLLFAVDTGLYFSV

SEQ ID NO: 9145 - protein, 25 aa, synthetic construct
KTNIRSSTRDWKDHKFKWRKDPQDK

SEQ ID NO: 9146 - protein, 238 aa, synthetic construct; identical to SEQ ID NO: 9112

SEQ ID NO: 9147 - protein, 149 aa, synthetic construct
IGWLLLQAPRWVFKEEDPIHLRCHSWKNTALHKVTYLQNGKGRKYFHHNSDFYIPKATLKDSGSYFCRGLVGSKNVSSETVNITITQGLAVSTISSFFPPGYQVSFCLVMVLLFAVDTGLYFSVKTNIRSSTRDWKDHKFKWRKDPQDK

SEQ ID NO: 9148 - protein, 65 aa, synthetic construct
ITQGLAVSTISSFFPPGYQVSFCLVMVLLFAVDTGLYFSVKTNIRSSTRDWKDHKFKWRKDPQDK

SEQ ID NO: 9149 - protein, 89 aa, synthetic construct; identical to SEQ ID NO: 9139

SEQ ID NO: 9150 - protein, 84 aa, synthetic construct; identical to SEQ ID NO: 9140

SEQ ID NO: 9151 - protein, 14 aa, synthetic construct
IGWLLLQAPRWVFK

SEQ ID NO: 9152 - protein, 70 aa, synthetic construct; identical to SEQ ID NO: 9142

SEQ ID NO: 9153 - protein, 17 aa, synthetic construct
ITQGLAVPTISSFFPPG

SEQ ID NO: 9154 - protein, 23 aa, synthetic construct
YQVSFCLVMVLLFAVDTGLYFSV

SEQ ID NO: 9155 - protein, 25 aa, synthetic construct
KTNIRSSTRDWKDHKFKWRKDPQDK

SEQ ID NO: 9156 - protein, 238 aa, synthetic construct; identical to SEQ ID NO: 8949

SEQ ID NO: 9157 - protein, 149 aa, synthetic construct
IGWLLLQAPRWVFKEEDPIHLRCHSWKNTALHKVTYLQNGKGRKYFHHNSDFYIPKATLKDSGSYFCRGLVGSKNVSSETVNITITQGLAVPTISSFFPPGYQVSFCLVMVLLFAVDTGLYFSVKTNIRSSTRDWKDHKFKWRKDPQDK

SEQ ID NO: 9158 - protein, 65 aa, synthetic construct
ITQGLAVPTISSFFPPGYQVSFCLVMVLLFAVDTGLYFSVKTNIRSSTRDWKDHKFKWRKDPQDK

SEQ ID NO: 9159 - protein, 89 aa, synthetic construct; identical to SEQ ID NO: 9139

SEQ ID NO: 9160 - protein, 84 aa, synthetic construct; identical to SEQ ID NO: 9140

SEQ ID NO: 9161 - protein, 14 aa, synthetic construct
IGWLLLQAPRWVFK

SEQ ID NO: 9162 - protein, 70 aa, synthetic construct; identical to SEQ ID NO: 9142

SEQ ID NO: 9163 - protein, 17 aa, synthetic construct
ITQGLAVSTISSFFPPG

SEQ ID NO: 9164 - protein, 23 aa, synthetic construct
YQVSFCLVMVLLFAVDTGLYFSV

SEQ ID NO: 9165 - protein, 25 aa, synthetic construct
KTNIRSSTRDWKDHKFKWRKDPQDK

SEQ ID NO: 9166 - protein, 238 aa, synthetic construct; identical to SEQ ID NO: 9112

SEQ ID NO: 9167 - protein, 149 aa, synthetic construct; identical to SEQ ID NO: 9147

SEQ ID NO: 9168 - protein, 65 aa, synthetic construct; identical to SEQ ID NO: 9148

SEQ ID NO: 9169 - protein, 97 aa, synthetic construct
VAEGKTDNQYTLFVAGGTVLLLLFVISITTIIVIFLNRRRRRERRDLFTESWDTQKAPNNYRSPISTGQPTNQSMDDTREDIYVNYPTFSRRPKTRV

SEQ ID NO: 9170 - protein, 15 aa, synthetic construct
VAEGKTDNQYTLFVA

SEQ ID NO: 9171 - protein, 21 aa, synthetic construct
GGTVLLLLFVISITTIIVIFL

SEQ ID NO: 9172 - protein, 61 aa, synthetic construct
NRRRRRERRDLFTESWDTQKAPNNYRSPISTGQPTNQSMDDTREDIYVNYPTFSRRPKTRV

SEQ ID NO: 9173 - protein, 97 aa, synthetic construct; identical to SEQ ID NO: 9169

SEQ ID NO: 9174 - protein, 15 aa, synthetic construct
VAEGKTDNQYTLFVA

SEQ ID NO: 9175 - protein, 21 aa, synthetic construct
GGTVLLLLFVISITTIIVIFL

SEQ ID NO: 9176 - protein, 61 aa, synthetic construct; identical to SEQ ID NO: 9172

SEQ ID NO: 9177 - protein, 336 aa, synthetic construct
MDYPTLLLALLHVYRALCEEVLWHTSVPFAENMSLECVYPSMGILTQVEWFKIGTQQDSIAIFSPTHGMVIRKPYAERVYFLNSTMASNNMTLFFRNASEDDVGYYSCSLYTYPQGTWQKVIQVVQSDSFEAAVPSNSHIVSEPGKNVTLTCQPQMTWPVQAVRWEKIQPRQIDLLTYCNLVHGRNFTSKFPRQIVSNCSHGRWSVIVIPDVTVSDSGLYRCYLQASAGENETFVMRLTVAEGKTDNQYTLFVAGGTVLLLLFVISITTIIVIFLNRRRRRERRDLFTESWDTQKAPNNYRSPISTGQPTNQSMDDTREDIYVNYPTFSRRPKTRV

SEQ ID NO: 9178 - protein, 318 aa, synthetic construct
EEVLWHTSVPFAENMSLECVYPSMGILTQVEWFKIGTQQDSIAIFSPTHGMVIRKPYAERVYFLNSTMASNNMTLFFRNASEDDVGYYSCSLYTYPQGTWQKVIQVVQSDSFEAAVPSNSHIVSEPGKNVTLTCQPQMTWPVQAVRWEKIQPRQIDLLTYCNLVHGRNFTSKFPRQIVSNCSHGRWSVIVIPDVTVSDSGLYRCYLQASAGENETFVMRLTVAEGKTDNQYTLFVAGGTVLLLLFVISITTIIVIFLNRRRRRERRDLFTESWDTQKAPNNYRSPISTGQPTNQSMDDTREDIYVNYPTFSRRPKTRV

SEQ ID NO: 9179 - protein, 336 aa, synthetic construct; identical to SEQ ID NO: 9177

SEQ ID NO: 9180 - protein, 318 aa, synthetic construct; identical to SEQ ID NO: 9178

SEQ ID NO: 9181 - protein, 318 aa, synthetic construct
AALGKDTIPWLGHLLVGLSGAFGFIILVYLLINCRNTGPWLKKVLKCNTPDPSKFFSQLSSEHGGDVQKWLSSPFPSSSFSPGGLAPEISPLEVLERDKVTQLLLQQDKVPEPASLSSNHSLTSCFTNQGYFFFHLPDALEIEACQVYFTYDPYSEEDPDEGVAGAPTGSSPQPLQPLSGEDDAYCTFPSRDDLLLFSPSLLGGPSPPSTAPGGSGAGEERMPPSLQERVPRDWDPQPLGPPTPGVPDLVDFQPPPELVLREAGEEVPDAGPREGVSFPWSRPPGQGEFRALNARLPLNTDAYLSLQELQGQDPTHLV

SEQ ID NO: 9182 - protein, 116 aa, synthetic construct
NPFLFALEAVVISVGSMGLIISLLCVYFWLERTMPRIPTLKNLEDLVTEYHGNFSAWSGVSKGLAESLQPDYSERLCLVSEIPPKGGALGEGPGASPCNQHSPYWAPPCYTLKPET

SEQ ID NO: 9183 - protein, 108 aa, synthetic construct; identical to SEQ ID NO: 9068

SEQ ID NO: 9184 - protein, 108 aa, synthetic construct; identical to SEQ ID NO: 9068

SEQ ID NO: 9185 - protein, 99 aa, synthetic construct; identical to SEQ ID NO: 9081

SEQ ID NO: 9186 - protein, 63 aa, synthetic construct; identical to SEQ ID NO: 9084

SEQ ID NO: 9187 - protein, 97 aa, synthetic construct; identical to SEQ ID NO: 9096

SEQ ID NO: 9188 - protein, 83 aa, synthetic construct; identical to SEQ ID NO: 9098

SEQ ID NO: 9189 - protein, 190 aa, synthetic construct
QQQTLPKPFIWAEPHFMVPKEKQVTICCQGNYGAVEYQLHFEGSLFAVDRPKPPERINKVQFYIPDMNSRMAGQYSCIYRVGELWSEPSNLLDLVVTEMYDTPTLSVHPGPEVISGEKVTFYCRLDTATSMFLLLKEGRSSHVQRGYGKVQAEFPLGPVTTAHRGTYRCFGSYNNHAWSFPSEPVKLLVT

SEQ ID NO: 9190 - protein, 97 aa, synthetic construct; identical to SEQ ID NO: 9096

SEQ ID NO: 9191 - protein, 83 aa, synthetic construct; identical to SEQ ID NO: 9098

SEQ ID NO: 9192 - protein, 190 aa, synthetic construct; identical to SEQ ID NO: 9189

SEQ ID NO: 9193 - protein, 89 aa, synthetic construct; identical to SEQ ID NO: 9139

SEQ ID NO: 9194 - protein, 84 aa, synthetic construct; identical to SEQ ID NO: 9140

SEQ ID NO: 9195 - protein, 70 aa, synthetic construct; identical to SEQ ID NO: 9142

SEQ ID NO: 9196 - protein, 173 aa, synthetic construct
GMRTEDLPKAVVFLEPQWYRVLEKDSVTLKCQGAYSPEDNSTQWFHNESLISSQASSYFIDAATVDDSGEYRCQTNLSTLSDPVQLEVHIGWLLLQAPRWVFKEEDPIHLRCHSWKNTALHKVTYLQNGKGRKYFHHNSDFYIPKATLKDSGSYFCRGLVGSKNVSSETVNIT

SEQ ID NO: 9197 - protein, 89 aa, synthetic construct; identical to SEQ ID NO: 9139

SEQ ID NO: 9198 - protein, 84 aa, synthetic construct; identical to SEQ ID NO: 9140

SEQ ID NO: 9199 - protein, 14 aa, synthetic construct
IGWLLLQAPRWVFK

SEQ ID NO: 9200 - protein, 70 aa, synthetic construct; identical to SEQ ID NO: 9142

SEQ ID NO: 9201 - protein, 173 aa, synthetic construct; identical to SEQ ID NO: 9196

SEQ ID NO: 9202 - protein, 89 aa, synthetic construct; identical to SEQ ID NO: 9139

SEQ ID NO: 9203 - protein, 84 aa, synthetic construct; identical to SEQ ID NO: 9140

SEQ ID NO: 9204 - protein, 14 aa, synthetic construct
IGWLLLQAPRWVFK

SEQ ID NO: 9205 - protein, 70 aa, synthetic construct; identical to SEQ ID NO: 9142

SEQ ID NO: 9206 - protein, 173 aa, synthetic construct; identical to SEQ ID NO: 9196

SEQ ID NO: 9207 - protein, 5 aa, synthetic construct
LGEPQ

SEQ ID NO: 9208 - protein, 5 aa, synthetic construct
LGEPQ

SEQ ID NO: 9209 - protein, 30 aa, synthetic construct; identical to SEQ ID NO: 8879

SEQ ID NO: 9210 - protein, 30 aa, synthetic construct; identical to SEQ ID NO: 8879

SEQ ID NO: 9211 - protein, 30 aa, synthetic construct; identical to SEQ ID NO: 9050

SEQ ID NO: 9212 - protein, 30 aa, synthetic construct; identical to SEQ ID NO: 9050

SEQ ID NO: 9213 - protein, 26 aa, synthetic construct
LGEPQLCYILDAILFLYGIVLTLLYC

SEQ ID NO: 9214 - protein, 26 aa, synthetic construct
LGEPQLCYILDAILFLYGIVLTLLYC

SEQ ID NO: 9215 - protein, 26 aa, synthetic construct
LGEPQLSYILDAILFLYGIVLTLLYC

SEQ ID NO: 9216 - protein, 26 aa, synthetic construct
LGEPQLSYILDAILFLYGIVLTLLYC

SEQ ID NO: 9217 - protein, 21 aa, synthetic construct
AGTVLLLRAGFYAVSFLSVAV

SEQ ID NO: 9218 - protein, 21 aa, synthetic construct
AGTVLLLRAGFYAVSFLSVAV

SEQ ID NO: 9219 - protein, 21 aa, synthetic construct
LVPVFCGLLVAKSLVLSALLV

SEQ ID NO: 9220 - protein, 21 aa, synthetic construct
LVPVFCGLLVAKSLVLSALLV

SEQ ID NO: 9221 - protein, 21 aa, synthetic construct
MGLAFLVLVALVWFLVEDWLS

SEQ ID NO: 9222 - protein, 21 aa, synthetic construct
MGLAFLVLVALVWFLVEDWLS

SEQ ID NO: 9223 - protein, 31 aa, synthetic construct; identical to SEQ ID NO: 9129

SEQ ID NO: 9224 - protein, 31 aa, synthetic construct; identical to SEQ ID NO: 9129

SEQ ID NO: 9225 - protein, 23 aa, synthetic construct
YQVSFCLVMVLLFAVDTGLYFSV

SEQ ID NO: 9226 - protein, 23 aa, synthetic construct
YQVSFCLVMVLLFAVDTGLYFSV

SEQ ID NO: 9227 - protein, 23 aa, synthetic construct
YQVSFCLVMVLLFAVDTGLYFSV

SEQ ID NO: 9228 - protein, 21 aa, synthetic construct
GGTVLLLLFVISITTIIVIFL

SEQ ID NO: 9229 - protein, 21 aa, synthetic construct
LSYILDAILFLYGIVLTLLYC

SEQ ID NO: 9230 - protein, 21 aa, synthetic construct
LCYILDAILFLYGIVLTLLYC

SEQ ID NO: 9231 - protein, 20 aa, synthetic construct
CYLLDGILFIYGVILTALFL

SEQ ID NO: 9232 - protein, 9 aa, synthetic construct
VEKEHPQLG

SEQ ID NO: 9233 - protein, 9 aa, synthetic construct
VEKEHPQLG

SEQ ID NO: 9234 - protein, 72 aa, synthetic construct; identical to SEQ ID NO: 9082

SEQ ID NO: 9235 - protein, 72 aa, synthetic construct; identical to SEQ ID NO: 9082

SEQ ID NO: 9236 - protein, 47 aa, synthetic construct; identical to SEQ ID NO: 9099

SEQ ID NO: 9237 - protein, 47 aa, synthetic construct; identical to SEQ ID NO: 9099

SEQ ID NO: 9238 - protein, 48 aa, synthetic construct; identical to SEQ ID NO: 9128

SEQ ID NO: 9239 - protein, 48 aa, synthetic construct; identical to SEQ ID NO: 9128

SEQ ID NO: 9240 - protein, 48 aa, synthetic construct; identical to SEQ ID NO: 9136

SEQ ID NO: 9241 - protein, 48 aa, synthetic construct; identical to SEQ ID NO: 9136

SEQ ID NO: 9242 - protein, 17 aa, synthetic construct
ITQGLAVSTISSFFPPG

SEQ ID NO: 9243 - protein, 17 aa, synthetic construct
ITQGLAVPTISSFFPPG

SEQ ID NO: 9244 - protein, 17 aa, synthetic construct
ITQGLAVSTISSFFPPG

SEQ ID NO: 9245 - protein, 15 aa, synthetic construct
VAEGKTDNQYTLFVA

SEQ ID NO: 9246 - protein, 10 aa, synthetic construct
QSFGLLDPKL

SEQ ID NO: 9247 - protein, 44 aa, synthetic construct; identical to SEQ ID NO: 9071

SEQ ID NO: 9248 - protein, 45 aa, synthetic construct; identical to SEQ ID NO: 9077

SEQ ID NO: 9249 - protein, 63 aa, synthetic construct; identical to SEQ ID NO: 9084

SEQ ID NO: 9250 - protein, 63 aa, synthetic construct; identical to SEQ ID NO: 9084

SEQ ID NO: 9251 - protein, 25 aa, synthetic construct
RKRTRERASRASTWEGRRRLNTQTL

SEQ ID NO: 9252 - protein, 25 aa, synthetic construct
RKRTRERASRASTWEGRRRLNTQTL

SEQ ID NO: 9253 - protein, 25 aa, synthetic construct
KTNIRSSTRDWKDHKFKWRKDPQDK

SEQ ID NO: 9254 - protein, 25 aa, synthetic construct
KTNIRSSTRDWKDHKFKWRKDPQDK

SEQ ID NO: 9255 - protein, 25 aa, synthetic construct
KTNIRSSTRDWKDHKFKWRKDPQDK

SEQ ID NO: 9256 - protein, 61 aa, synthetic construct; identical to SEQ ID NO: 9172

SEQ ID NO: 9257 - protein, 42 aa, synthetic construct
RLKIQVRKAAITSYEKSDGVYTGLSTRNQETYETLKHEKPPQ

SEQ ID NO: 9258 - protein, 42 aa, synthetic construct; identical to SEQ ID NO: 9257

SEQ ID NO: 9259 - protein, 113 aa, synthetic construct; identical to SEQ ID NO: 8886

SEQ ID NO: 9260 - protein, 113 aa, synthetic construct; identical to SEQ ID NO: 8886

SEQ ID NO: 9261 - protein, 113 aa, synthetic construct; identical to SEQ ID NO: 8886

SEQ ID NO: 9262 - protein, 36 aa, synthetic construct; identical to SEQ ID NO: 9052

SEQ ID NO: 9263 - protein, 36 aa, synthetic construct; identical to SEQ ID NO: 9052

SEQ ID NO: 9264 - protein, 120 aa, synthetic construct; identical to SEQ ID NO: 9124

SEQ ID NO: 9265 - protein, 120 aa, synthetic construct; identical to SEQ ID NO: 9124

SEQ ID NO: 9266 - protein, 41 aa, synthetic construct; identical to SEQ ID NO: 8882

SEQ ID NO: 9267 - protein, 42 aa, synthetic construct; identical to SEQ ID NO: 8883

SEQ ID NO: 9268 - protein, 41 aa, synthetic construct; identical to SEQ ID NO: 8882

SEQ ID NO: 9269 - protein, 42 aa, synthetic construct; identical to SEQ ID NO: 8883

SEQ ID NO: 9270 - protein, 232 aa, synthetic construct
LQDPCSNCPAGTFCDNNRNQICSPCPPNSFSSAGGQRTCDICRQCKGVFRTRKECSSTSNAECDCTPGFHCLGAGCSMCEQDCKQGQELTKKGCKDCCFGTFNDQKRGICRPWTNCSLDGKSVLVNGTKERDVVCGPSPADLSPGASSVTPPAPAREPGHSPQIISFFLALTSTALLFLLFFLTLRFSVVKRGRKKLLYIFKQPFMRPVQTTQEEDGCSCRFPEEEEGGCEL

SEQ ID NO: 9271 - protein, 232 aa, synthetic construct; identical to SEQ ID NO: 9270

SEQ ID NO: 9272 - protein, 202 aa, synthetic construct
NKILVKQSPMLVAYDNAVNLSCKYSYNLFSREFRASLHKGLDSAVEVCVVYGNYSQQLQVYSKTGFNCDGKLGNESVTFYLQNLYVNQTDIYFCKIEVMYPPPYLDNEKSNGTIIHVKGKHLCPSPLFPGPSKPFWVLVVVGGVLACYSLLVTVAFIIFWVRSKRSRLLHSDYMNMTPRRPGPTRKHYQPYAPPRDFAAYRS

SEQ ID NO: 9273 - protein, 202 aa, synthetic construct; identical to SEQ ID NO: 9272

SEQ ID NO: 9274 - protein, 249 aa, synthetic construct
LHCVGDTYPSNDRCCHECRPGNGMVSRCSRSQNTVCRPCGPGFYNDVVSSKPCKPCTWCNLRSGSERKQLCTATQDTVCRCRAGTQPLDSYKPGVDCAPCPPGHFSPGDNQACKPWTNCTLAGKHTLQPASNSSDAICEDRDPPATQPQETQGPPARPITVQPTEAWPRTSQGPSTRPVEVPGGRAVAAILGLGLVLGLLGPLAILLALYLLRRDQRLPPDAHKPPGGGSFRTPIQEEQADAHSTLAKI

SEQ ID NO: 9275 - protein, 249 aa, synthetic construct; identical to SEQ ID NO: 9274

SEQ ID NO: 9276 - protein, 346 aa, synthetic construct
KGCQGSADHVVSISGVPLQLQPNSIQTKVDSIAWKKLLPSQNGFHHILKWENGSLPSNTSNDRFSFIVKNLSLLIKAAQQQDSGLYCLEVTSISGKVQTATFQVFVFDKVEKPRLQGQGKILDRGRCQVALSCLVSRDGNVSYAWYRGSKLIQTAGNLTYLDEEVDINGTHTYTCNVSNPVSWESHTLNLTQDCQNAHQEFRFWPFLVIIVILSALFLGTLACFCVWRRKRKEKQSETSPKEFLTIYEDVKDLKTRRNHEQEQTFPGGGSTIYSMIQSQSSAPTSQEPAYTLYSLIQPSRKSGSRKRNHSPSFNSTIYEVIGKSQPKAQNPARLSRKELENFDVYS

SEQ ID NO: 9277 - protein, 346 aa, synthetic construct; identical to SEQ ID NO: 9276

SEQ ID NO: 9278 - protein, 268 aa, synthetic construct
TPAAPPKAVLKLEPQWINVLQEDSVTLTCRGTHSPESDSIQWFHNGNLIPTHTQPSYRFKANNNDSGEYTCQTGQTSLSDPVHLTVLSEWLVLQTPHLEFQEGETIVLRCHSWKDKPLVKVTFFQNGKSKKFSRSDPNFSIPQANHSHSGDYHCTGNIGYTLYSSKPVTITVQAPSSSPMGIIVAVVTGIAVAAIVAAVVALIYCRKKRISALPGYPECREMGETLPEKPANPTNPDEADKVGAENTITYSLLMHPDALEEPDDQNRI

SEQ ID NO: 9279 - protein, 268 aa, synthetic construct; identical to SEQ ID NO: 9278

SEQ ID NO: 9280 - protein, 360 aa, synthetic construct
QVVDTTKAVITLQPPWVSVFQEETVTLHCEVLHLPGSSSTQWFLNGTATQTSTPSYRITSASVNDSGEYRCQRGLSGRSDPIQLEIHRGWLLLQVSSRVFTEGEPLALRCHAWKDKLVYNVLYYRNGKAFKFFHWNSNLTILKTNISHNGTYHCSGMGKHRYTSAGISVTVKELFPAPVLNASVTSPLLEGNLVTLSCETKLLLQRPGLQLYFSFYMGSKTLRGRNTSSEYQILTARREDSGLYWCEAATEDGNVLKRSPELELQVLGLQLPTPVWFHVLFYLAVGIMFLVNTVLWVTIRKELKRKKKWDLEISLDSGHEKKVISSLQEDRHLEEELKCQEQKEEQLQEGVHRKEPQGAT

SEQ ID NO: 9281 - protein, 360 aa, synthetic construct; identical to SEQ ID NO: 9280

SEQ ID NO: 9282 - protein, 9 aa, synthetic construct
GGGGGGGGG

SEQ ID NO: 9283 - protein, 9 aa, synthetic construct
GGGGGGGGG

SEQ ID NO: 9284 - protein, 225 aa, synthetic construct
MYRMQLLSCIALSLALVTNSAPTSSSTKKTQLQLEHLLLDLQMILNGINNYKNPKLTAMLTKKFYMPKKATELKHLQCLEEELKPLEEVLNLAQSKNFHLRPRDLISNINVIVLELKGSETTFMCEYADETATIVEFLNRWITFCASIISTLTKIEVMYPPPYLDNEKSNGTIIHVKGKHLCPSPLFPGPSKPFWVLVVVGGVLACYSLLVTVAFIIFWVRSKRS

SEQ ID NO: 9285 - protein, 225 aa, synthetic construct
MYRMQLLSCIALSLALVTNSAPTSSSTKKTQLQLEHLLLDLQMILNGINNYKNPKLTEMLTAKFYMPKKATELKHLQCLEEELKPLEEVLNLAQSKNFHLRPRDLISNINVIVLELKGSETTFMCEYADETATIVEFLNRWITFCQSIISTLTKIEVMYPPPYLDNEKSNGTIIHVKGKHLCPSPLFPGPSKPFWVLVVVGGVLACYSLLVTVAFIIFWVRSKRS

SEQ ID NO: 9286 - protein, 225 aa, synthetic construct
MYRMQLLSCIALSLALVTNSAPTSSSTKKTQLQLEHLLLDLQMILNGINNYKNPKLTEMLTAKFYMPKKATELKHLQCLEEELKPLEEVLNLAQSKNFHLRPRDLISNINVAVLELKGSETTFMCEYADETATIVEFLNRWITFCQSIISTLTKIEVMYPPPYLDNEKSNGTIIHVKGKHLCPSPLFPGPSKPFWVLVVVGGVLACYSLLVTVAFIIFWVRSKRS

SEQ ID NO: 9287 - protein, 225 aa, synthetic construct
MYRMQLLSCIALSLALVTNSAPASSSTKKTQLQLEHLLLDLQMILNGINNYKNPKLTRMLTAKFAMPKKATELKHLQCLEEELKPLEEVLNGAQSKNFHLRPRDLISNINVIVLELKGSETTFMCEYADETATIVEFLNRWITFGQSIISTLTKIEVMYPPPYLDNEKSNGTIIHVKGKHLCPSPLFPGPSKPFWVLVVVGGVLACYSLLVTVAFIIFWVRSKRS

SEQ ID NO: 9288 - protein, 206 aa, synthetic construct
MYRMQLLSCIALSLALVTNSNWVNVISDLKKIEDLIQSMHIDATLYTESDVHPSCKVTAMKCFLLELQVISLESGDASIHDTVKNLIILANNSLSSNGNVTESGCKECEELEEKNIKEFLQSFVHIVQMFINTSKIEVMYPPPYLDNEKSNGTIIHVKGKHLCPSPLFPGPSKPFWVLVVVGGVLACYSLLVTVAFIIFWVRSKRS

SEQ ID NO: 9289 - protein, 206 aa, synthetic construct
MYRMQLLSCIALSLALVTNSNWVNVISSLKKIEDLIQSMHIDATLYTESDVHPSCKVTAMKCFLLELQVISLESGDASIHDTVENLIILANNSLSSNGNVTESGCKECEELEEKNIKEFLQSFVHIVQMFINTSKIEVMYPPPYLDNEKSNGTIIHVKGKHLCPSPLFPGPSKPFWVLVVVGGVLACYSLLVTVAFIIFWVRSKRS

SEQ ID NO: 9290 - protein, 206 aa, synthetic construct
MYRMQLLSCIALSLALVTNSNWVNVISDLKKIEDLIQSMHIDATLYTESDVHPSCKVTAMKCFLLELQVISLESGDASIHDTVENLIIRANNSLSSNGNVTESGCKECEELEEKNIKEFLQSFVHIVQMFINTSKIEVMYPPPYLDNEKSNGTIIHVKGKHLCPSPLFPGPSKPFWVLVVVGGVLACYSLLVTVAFIIFWVRSKRS

SEQ ID NO: 9291 - protein, 153 aa, synthetic construct
MYRMQLLSCIALSLALVTNSAPTSSSTKKTQLQLEHLLLDLQMILNGINNYKNPKLTRMLTFKFYMPKKATELKHLQCLEEELKPLEEVLNLAQSKNFHLRPRDLISNINVIVLELKGSETTFMCEYADETATIVEFLNRWITFCQSIISTLT

SEQ ID NO: 9292 - protein, 153 aa, synthetic construct
MYRMQLLSCIALSLALVTNSAPTSSSTKKTQLQLEHLLLDLQMILNGINNYKNPKLTAMLTKKFYMPKKATELKHLQCLEEELKPLEEVLNLAQSKNFHLRPRDLISNINVIVLELKGSETTFMCEYADETATIVEFLNRWITFCASIISTLT

SEQ ID NO: 9293 - protein, 153 aa, synthetic construct
MYRMQLLSCIALSLALVTNSAPTSSSTKKTQLQLEHLLLDLQMILNGINNYKNPKLTEMLTAKFYMPKKATELKHLQCLEEELKPLEEVLNLAQSKNFHLRPRDLISNINVIVLELKGSETTFMCEYADETATIVEFLNRWITFCQSIISTLT

SEQ ID NO: 9294 - protein, 153 aa, synthetic construct
MYRMQLLSCIALSLALVTNSAPTSSSTKKTQLQLEHLLLDLQMILNGINNYKNPKLTEMLTAKFYMPKKATELKHLQCLEEELKPLEEVLNLAQSKNFHLRPRDLISNINVAVLELKGSETTFMCEYADETATIVEFLNRWITFCQSIISTLT

SEQ ID NO: 9295 - protein, 153 aa, synthetic construct
MYRMQLLSCIALSLALVTNSAPASSSTKKTQLQLEHLLLDLQMILNGINNYKNPKLTRMLTAKFAMPKKATELKHLQCLEEELKPLEEVLNGAQSKNFHLRPRDLISNINVIVLELKGSETTFMCEYADETATIVEFLNRWITFGQSIISTLT

SEQ ID NO: 9296 - protein, 162 aa, synthetic construct
MRISKPHLRSISIQCYLCLLLNSHFLTEAGIHVFILGCFSAGLPKTEANWVNVISDLKKIEDLIQSMHIDATLYTESDVHPSCKVTAMKCFLLELQVISLESGDASIHDTVENLIILANNSLSSNGNVTESGCKECEELEEKNIKEFLQSFVHIVQMFINTS

SEQ ID NO: 9297 - protein, 134 aa, synthetic construct
MYRMQLLSCIALSLALVTNSNWVNVISDLKKIEDLIQSMHIDATLYTESDVHPSCKVTAMKCFLLELQVISLESGDASIHDTVKNLIILANNSLSSNGNVTESGCKECEELEEKNIKEFLQSFVHIVQMFINTS

SEQ ID NO: 9298 - protein, 134 aa, synthetic construct
MYRMQLLSCIALSLALVTNSNWVNVISSLKKIEDLIQSMHIDATLYTESDVHPSCKVTAMKCFLLELQVISLESGDASIHDTVENLIILANNSLSSNGNVTESGCKECEELEEKNIKEFLQSFVHIVQMFINTS

SEQ ID NO: 9299 - protein, 134 aa, synthetic construct
MYRMQLLSCIALSLALVTNSNWVNVISDLKKIEDLIQSMHIDATLYTESDVHPSCKVTAMKCFLLELQVISLESGDASIHDTVENLIIRANNSLSSNGNVTESGCKECEELEEKNIKEFLQSFVHIVQMFINTS

SEQ ID NO: 9300 - protein, 178 aa, synthetic construct
MALPVTALLLPLALLLHAARPYFGKLESKLSVIRNLNDQVLFIDQGNRPLFEDMTDSDCRDNAPRTIFIISMYKDSQPRGMAVTISVKCEKISTLSCENKIISFKEMNPPDNIKDTKSDIIFFQRSVPGHDNKMQFESSSYEGYFLACEKERDLFKLILKKEDELGDRSIMFTVQNED

SEQ ID NO: 9301 - protein, 233 aa, synthetic construct
MYRMQLLSCIALSLALVTNSAPTSSSTKKTQLQLEHLLLDLQMILNGINNYKNPKLTRMLTFKFYMPKKATELKHLQCLEEELKPLEEVLNLAQSKNFHLRPRDLISNINVIVLELKGSETTFMCEYADETATIVEFLNRWITFCQSIISTLTHMLQMAGQCSQNEYFDSLLHACIPCQLRCSSNTPPLTCQRYCNASVTNSVKGTNAILWTCLGLSLIISLAVFVLMFLLRK

SEQ ID NO: 9302 - protein, 233 aa, synthetic construct
MYRMQLLSCIALSLALVTNSAPTSSSTKKTQLQLEHLLLDLQMILNGINNYKNPKLTAMLTKKFYMPKKATELKHLQCLEEELKPLEEVLNLAQSKNFHLRPRDLISNINVIVLELKGSETTFMCEYADETATIVEFLNRWITFCASIISTLTHMLQMAGQCSQNEYFDSLLHACIPCQLRCSSNTPPLTCQRYCNASVTNSVKGTNAILWTCLGLSLIISLAVFVLMFLLRK

SEQ ID NO: 9303 - protein, 233 aa, synthetic construct
MYRMQLLSCIALSLALVTNSAPTSSSTKKTQLQLEHLLLDLQMILNGINNYKNPKLTEMLTAKFYMPKKATELKHLQCLEEELKPLEEVLNLAQSKNFHLRPRDLISNINVIVLELKGSETTFMCEYADETATIVEFLNRWITFCQSIISTLTHMLQMAGQCSQNEYFDSLLHACIPCQLRCSSNTPPLTCQRYCNASVTNSVKGTNAILWTCLGLSLIISLAVFVLMFLLRK

SEQ ID NO: 9304 - protein, 233 aa, synthetic construct
MYRMQLLSCIALSLALVTNSAPTSSSTKKTQLQLEHLLLDLQMILNGINNYKNPKLTEMLTAKFYMPKKATELKHLQCLEEELKPLEEVLNLAQSKNFHLRPRDLISNINVAVLELKGSETTFMCEYADETATIVEFLNRWITFCQSIISTLTHMLQMAGQCSQNEYFDSLLHACIPCQLRCSSNTPPLTCQRYCNASVTNSVKGTNAILWTCLGLSLIISLAVFVLMFLLRK

SEQ ID NO: 9305 - protein, 233 aa, synthetic construct
MYRMQLLSCIALSLALVTNSAPASSSTKKTQLQLEHLLLDLQMILNGINNYKNPKLTRMLTAKFAMPKKATELKHLQCLEEELKPLEEVLNGAQSKNFHLRPRDLISNINVIVLELKGSETTFMCEYADETATIVEFLNRWITFGQSIISTLTHMLQMAGQCSQNEYFDSLLHACIPCQLRCSSNTPPLTCQRYCNASVTNSVKGTNAILWTCLGLSLIISLAVFVLMFLLRK

SEQ ID NO: 9306 - protein, 242 aa, synthetic construct
MRISKPHLRSISIQCYLCLLLNSHFLTEAGIHVFILGCFSAGLPKTEANWVNVISDLKKIEDLIQSMHIDATLYTESDVHPSCKVTAMKCFLLELQVISLESGDASIHDTVENLIILANNSLSSNGNVTESGCKECEELEEKNIKEFLQSFVHIVQMFINTSHMLQMAGQCSQNEYFDSLLHACIPCQLRCSSNTPPLTCQRYCNASVTNSVKGTNAILWTCLGLSLIISLAVFVLMFLLRK

SEQ ID NO: 9307 - protein, 242 aa, synthetic construct
MRISKPHLRSISIQCYLCLLLNSHFLTEAGIHVFILGCFSAGLPKTEANWVNVISDLKKIEDLIQSMHIDATLYTESDVHPSCKVTAMKCFLLELQVISLESGDASIHDTVKNLIILANNSLSSNGNVTESGCKECEELEEKNIKEFLQSFVHIVQMFINTSHMLQMAGQCSQNEYFDSLLHACIPCQLRCSSNTPPLTCQRYCNASVTNSVKGTNAILWTCLGLSLIISLAVFVLMFLLRK

SEQ ID NO: 9308 - protein, 547 aa, synthetic construct
MYRMQLLSCIALSLALVTNSAPTSSSTKKTQLQLEHLLLDLQMILNGINNYKNPKLTRMLTFKFYMPKKATELKHLQCLEEELKPLEEVLNLAQSKNFHLRPRDLISNINVIVLELKGSETTFMCEYADETATIVEFLNRWITFCQSIISTLTHMFPQDRPFEDTCHGNPSHYYDKAVRRCCYRCPMGLFPTQQCPQRPTDCRKQCEPDYYLDEADRCTACVTCSRDDLVEKTPCAWNSSRVCECRPGMFCSTSAVNSCARCFFHSVCPAGMIVKFPGTAQKNTVCEPASPGVSPACASPENCKEPSSGTIPQAKPTPVSPATSSASTMPVRGGTRLAQEAASKLTRAPDSPSSVGRPSSDPGLSPTQPCPEGSGDCRKQCEPDYYLDEAGRCTACVSCSRDDLVEKTPCAWNSSRTCECRPGMICATSATNSCARCVPYPICAAETVTKPQDMAEKDTTFEAPPLGTQPDCNPTPENGEAPASTSPTQSLLVDSQASKTLPIPTSAPVALSSTGKPVLDAGPVLFWVILVLVVVVGSSAFLLCHRR

SEQ ID NO: 9309 - protein, 9 aa, synthetic construct
GGGGGGGGG

SEQ ID NO: 9310 - protein, 223 aa, synthetic construct
QSFGLLDPKLCYLLDGILFIYGVILTALFLRVRFSRSADAPAYQQGQNQLYNELNLGRREEYDVLDRRRGRDPEMGGKPQRRRNPQEGLYNELQRDRMAEAYSEIGMRGERRRGKGHDGLYQGLSTATRDTYDALHMQALPPREFGGSGFNVLMVHRRSHTGERPFQCNQCGASFTQRGNLLRHIRLHTGERPFRCHLCNYACQRRDALTASAEARHIRAEMG

SEQ ID NO: 9311 - protein, 222 aa, synthetic construct
QSFGLLDPKLCYLLDGILFIYGVILTALFLRVRFSRSADAPAYQQGQNQLYNELNLGRREEYDVLDRRRGRDPEMGGRPQRRRNPQEGLYNELQRDRMAEAYSEIGMRGERRRGRGHDGLYQGLSTATRDTYDALHMQALPPRGPGGSFNVLMVHRRSHTGERPFQCNQCGASFTQRGNLLRHIRLHTGERPFRCHLCNYACQRRDALTASAEARHIRAEMG

SEQ ID NO: 9312 - protein, 143 aa, synthetic construct
QSFGLLDPKLCYLLDGILFIYGVILTALFLRVRFSRSADAPAYQQGQNQLYNELNLGRREEYDVLDRRRGRDPEMGGKPQRRRNPQEGLYNELQRDRMAEAYSEIGMRGERRRGKGHDGLYQGLSTATRDTYDALHMQALPPR

SEQ ID NO: 9313 - protein, 143 aa, synthetic construct
QSFGLLDPKLCYLLDGILFIYGVILTALFLRVRFSRSADAPAYQQGQNQLYNELNLGRREEYDVLDRRRGRDPEMGGRPQRRRNPQEGLYNELQRDRMAEAYSEIGMRGERRRGRGHDGLYQGLSTATRDTYDALHMQALPPR

SEQ ID NO: 9314 - protein, 78 aa, synthetic construct
GGSGFNVLMVHRRSHTGERPFQCNQCGASFTQRGNLLRHIRLHTGERPFRCHLCNYACQRRDALTASAEARHIRAEMG

SEQ ID NO: 9315 - protein, 77 aa, synthetic construct
GGSFNVLMVHRRSHTGERPFQCNQCGASFTQRGNLLRHIRLHTGERPFRCHLCNYACQRRDALTASAEARHIRAEMG

SEQ ID NO: 9316 - protein, 77 aa, synthetic construct; identical to SEQ ID NO: 9315

SEQ ID NO: 9317 - protein, 109 aa, synthetic construct
GGGVQVETISPGDGRTFPKRGQTCVVHYTGMLEDGKKVDSSRDRNKPFKFMLGKQEVIRGWEEGVAQMSVGQRAKLTISPDYAYGATGHPGIIPPHATLVFDVELLKLG

SEQ ID NO: 9318 - protein, 148 aa, synthetic construct
LGEPQLCYILDAILFLYGIVLTLLYCGGSGFNVLMVHRRSHTGERPFQCNQCGASFTQRGNLLRHIRLHTGERPFRCHLCNYACQRRDALTASAEARHIRAEMGSGRLKIQVRKAAITSYEKSDGVYTGLSTRNQETYETLKHEKPPQ

SEQ ID NO: 9319 - protein, 145 aa, synthetic construct
LGEPQLCYILDAILFLYGIVLTLLYCGGSFNVLMVHRRSHTGERPFQCNQCGASFTQRGNLLRHIRLHTGERPFRCHLCNYACQRRDALTASAEARHIRAEMGRLKIQVRKAAITSYEKSDGVYTGLSTRNQETYETLKHEKPPQ

SEQ ID NO: 9320 - protein, 222 aa, synthetic construct
QSFGLLDPKLCYLLDGILFIYGVILTALFLRVRFSRSADAPAYQQGQNQLYNELNLGRREEYDVLDRRRGRDPEMGGKPQRRRNPQEGLYNELQRDRMAEAYSEIGMRGERRRGKGHDGLYQGLSTATRDTYDALHMQALPPREFGGSFNVLMVHRRSHTGERPFQCNQCGASFTQRGNLLRHIRLHTGERPFRCHLCNYACQRRDALTASAEARHIRAEMG

SEQ ID NO: 9321 - protein, 254 aa, synthetic construct
QSFGLLDPKLCYLLDGILFIYGVILTALFLRVRFSRSADAPAYQQGQNQLYNELNLGRREEYDVLDRRRGRDPEMGGRPQRRRNPQEGLYNELQRDRMAEAYSEIGMRGERRRGRGHDGLYQGLSTATRDTYDALHMQALPPRGPGGGVQVETISPGDGRTFPKRGQTCVVHYTGMLEDGKKVDSSRDRNKPFKFMLGKQEVIRGWEEGVAQMSVGQRAKLTISPDYAYGATGHPGIIPPHATLVFDVELLKLG

SEQ ID NO: 9322 - protein, 10 aa, synthetic construct
GGGGGGGGGG

SEQ ID NO: 9323 - protein, 112 aa, synthetic construct
RVKFSRSADAPAYQQGQNQLYNELNLGRREEYDVLDKRRGRDPEMGGKPRRKNPQEGLYNELQKDKMAEAYSEIGMKGERRRGKGHDGLYQGLSTATKDTYDALHMQALPPR

SEQ ID NO: 9324 - protein, 112 aa, synthetic construct; identical to SEQ ID NO: 9323

SEQ ID NO: 9325 - protein, 238 aa, synthetic construct
IQNPDPAVYQLRDSKSSDKSVCLFTDFDSQTNVSQSKDSDVYITDKTVLDMRSMDFKSNSAVAWSNKSDFACANAFNNSIIPEDTFFPSPESSCGTQSFGLLDPKLCYLLDGILFIYGVILTALFLRVKFSRSADAPAYQQGQNQLYNELNLGRREEYDVLDKRRGRDPEMGGKPRRKNPQEGLYNELQKDKMAEAYSEIGMKGERRRGKGHDGLYQGLSTATKDTYDALHMQALPPR

SEQ ID NO: 9326 - protein, 275 aa, synthetic construct
EDLKNVFPPEVAVFEPSEAEISHTQKATLVCLATGFYPDHVELSWWVNGKEVHSGVSTDPQPLKEQPALNDSRYCLSSRLRVSATFWQNPRNHFRCQVQFYGLSENDEWTQDRAKPVTQIVSAEAWGRADCGSQSFGLLDPKLCYLLDGILFIYGVILTALFLRVKFSRSADAPAYQQGQNQLYNELNLGRREEYDVLDKRRGRDPEMGGKPRRKNPQEGLYNELQKDKMAEAYSEIGMKGERRRGKGHDGLYQGLSTATKDTYDALHMQALPPR

SEQ ID NO: 9327 - protein, 142 aa, synthetic construct
QSFGLLDPKLCYLLDGILFIYGVILTALFLRVKFSRSADAPAYQQGQNQLYNELNLGRREEYDVLDKRRGRDPEMGGKPRRKNPQEGLYNELQKDKMAEAYSEIGMKGERRRGKGHDGLYQGLSTATKDTYDALHMQALPPR

SEQ ID NO: 9328 - protein, 142 aa, synthetic construct; identical to SEQ ID NO: 9327

SEQ ID NO: 9329 - protein, 112 aa, synthetic construct; identical to SEQ ID NO: 9323

SEQ ID NO: 9330 - protein, 142 aa, synthetic construct; identical to SEQ ID NO: 9327

SEQ ID NO: 9331 - protein, 183 aa, synthetic construct
QSFGLLDPKLCYLLDGILFIYGVILTALFLRSKRSRLLHSDYMNMTPRRPGPTRKHYQPYAPPRDFAAYRSRVKFSRSADAPAYQQGQNQLYNELNLGRREEYDVLDKRRGRDPEMGGKPRRKNPQEGLYNELQKDKMAEAYSEIGMKGERRRGKGHDGLYQGLSTATKDTYDALHMQALPPR

SEQ ID NO: 9332 - protein, 184 aa, synthetic construct
QSFGLLDPKLCYLLDGILFIYGVILTALFLKRGRKKLLYIFKQPFMRPVQTTQEEDGCSCRFPEEEEGGCELRVKFSRSADAPAYQQGQNQLYNELNLGRREEYDVLDKRRGRDPEMGGKPRRKNPQEGLYNELQKDKMAEAYSEIGMKGERRRGKGHDGLYQGLSTATKDTYDALHMQALPPR

SEQ ID NO: 9333 - protein, 183 aa, synthetic construct; identical to SEQ ID NO: 9331

SEQ ID NO: 9334 - protein, 183 aa, synthetic construct; identical to SEQ ID NO: 9331

SEQ ID NO: 9335 - protein, 330 aa, synthetic construct
QSFGLLDPKLCYLLDGILFIYGVILTALFLHRRACRKRIRQKLHLCYPVQTSQPKLELVDSRPRRSSTQLRSGASVTEPVAEERGLMSQPLMETCHSVGAAYLESLPLQDASPAGGPSSPRDLPEPRVSTEHTNNKIEKIYIMKADTVIVGTVKAELPEGRGLAGPAEPELEEELEADHTPHYPEQETEPPLGSCSDVMLSVEEEGKEDPLPTAASGKRVKFSRSADAPAYQQGQNQLYNELNLGRREEYDVLDKRRGRDPEMGGKPRRKNPQEGLYNELQKDKMAEAYSEIGMKGERRRGKGHDGLYQGLSTATKDTYDALHMQALPPR

SEQ ID NO: 9336 - protein, 330 aa, synthetic construct; identical to SEQ ID NO: 9335

SEQ ID NO: 9337 - protein, 161 aa, synthetic construct
QSFGLLDPKLCYLLDGILFIYGVILTALFLHLCCRRRRARLRFMKQFYKRVKFSRSADAPAYQQGQNQLYNELNLGRREEYDVLDKRRGRDPEMGGKPRRKNPQEGLYNELQKDKMAEAYSEIGMKGERRRGKGHDGLYQGLSTATKDTYDALHMQALPPR

SEQ ID NO: 9338 - protein, 174 aa, synthetic construct
QSFGLLDPKLCYLLDGILFIYGVILTALFLLYCNHRNRRRVCKCPRPVVKSGDKPSLSARYVRVKFSRSADAPAYQQGQNQLYNELNLGRREEYDVLDKRRGRDPEMGGKPRRKNPQEGLYNELQKDKMAEAYSEIGMKGERRRGKGHDGLYQGLSTATKDTYDALHMQALPPR

SEQ ID NO: 9339 - protein, 182 aa, synthetic construct
QSFGLLDPKLCYLLDGILFIYGVILTALFLCVRCRHRRRQAERMSQIKRLLSEKKTCQCPHRFQKTCSPIRVKFSRSADAPAYQQGQNQLYNELNLGRREEYDVLDKRRGRDPEMGGKPRRKNPQEGLYNELQKDKMAEAYSEIGMKGERRRGKGHDGLYQGLSTATKDTYDALHMQALPPR

SEQ ID NO: 9340 - protein, 182 aa, synthetic construct; identical to SEQ ID NO: 9339

SEQ ID NO: 9341 - protein, 222 aa, synthetic construct
QSFGLLDPKLCYLLDGILFIYGVILTALFLRVRFSRSADAPAYQQGQNQLYNELNLGRREEYDVLDRRRGRDPEMGGKPRRRNPQEGLYNELQRDRMAEAYSEIGMRGERRRGKGHDGLYQGLSTATRDTYDALHMQALPPREFGGSGFNVLMVHRRSHTGERPFQCNQCGASFTQRGNLLRHIRLHTGERPFRCHLCNYACQRRDALTASAEARHIRAEMG

SEQ ID NO: 9342 - protein, 221 aa, synthetic construct
QSFGLLDPKLCYLLDGILFIYGVILTALFLRVRFSRSADAPAYQQGQNQLYNELNLGRREEYDVLDRRRGRDPEMGGRPRRRNPQEGLYNELQRDRMAEAYSEIGMRGERRRGRGHDGLYQGLSTATRDTYDALHMQALPPRGPGGSFNVLMVHRRSHTGERPFQCNQCGASFTQRGNLLRHIRLHTGERPFRCHLCNYACQRRDALTASAEARHIRAEMG

SEQ ID NO: 9343 - protein, 142 aa, synthetic construct
QSFGLLDPKLCYLLDGILFIYGVILTALFLRVRFSRSADAPAYQQGQNQLYNELNLGRREEYDVLDRRRGRDPEMGGKPRRRNPQEGLYNELQRDRMAEAYSEIGMRGERRRGKGHDGLYQGLSTATRDTYDALHMQALPPR

SEQ ID NO: 9344 - protein, 142 aa, synthetic construct
QSFGLLDPKLCYLLDGILFIYGVILTALFLRVRFSRSADAPAYQQGQNQLYNELNLGRREEYDVLDRRRGRDPEMGGRPRRRNPQEGLYNELQRDRMAEAYSEIGMRGERRRGRGHDGLYQGLSTATRDTYDALHMQALPPR

SEQ ID NO: 9345 - protein, 221 aa, synthetic construct
QSFGLLDPKLCYLLDGILFIYGVILTALFLRVRFSRSADAPAYQQGQNQLYNELNLGRREEYDVLDRRRGRDPEMGGKPRRRNPQEGLYNELQRDRMAEAYSEIGMRGERRRGKGHDGLYQGLSTATRDTYDALHMQALPPREFGGSFNVLMVHRRSHTGERPFQCNQCGASFTQRGNLLRHIRLHTGERPFRCHLCNYACQRRDALTASAEARHIRAEMG

SEQ ID NO: 9346 - protein, 253 aa, synthetic construct
QSFGLLDPKLCYLLDGILFIYGVILTALFLRVRFSRSADAPAYQQGQNQLYNELNLGRREEYDVLDRRRGRDPEMGGRPRRRNPQEGLYNELQRDRMAEAYSEIGMRGERRRGRGHDGLYQGLSTATRDTYDALHMQALPPRGPGGGVQVETISPGDGRTFPKRGQTCVVHYTGMLEDGKKVDSSRDRNKPFKFMLGKQEVIRGWEEGVAQMSVGQRAKLTISPDYAYGATGHPGIIPPHATLVFDVELLKLG

SEQ ID NO: 9347 - protein, 1384 aa, synthetic construct
MALPVTALLLPLALLLHAARPDIQMTQSPSSLSASVGDRVTITCKASDHINNWLAWYQQKPGQAPKLLIYGATTLETGVPSRFSGSGSGTDYTLTISSLQPEDFATYYCQQSWNTPWTFGQGTKLEIKRLEDLKNVFPPEVAVFEPSEAEISHTQKATLVCLATGFYPDHVELSWWVNGKEVHSGVSTDPQPLKEQPALNDSRYCLSSRLRVSATFWQNPRNHFRCQVQFYGLSENDEWTQDRAKPVTQIVSAEAWGRADCGSQSFGLLDPKLCYLLDGILFIYGVILTALFLRVKFSRSADAPAYQQGQNQLYNELNLGRREEYDVLDKRRGRDPEMGGKPRRKNPQEGLYNELQKDKMAEAYSEIGMKGERRRGKGHDGLYQGLSTATKDTYDALHMQALPPRRAKRSGSGATNFSLLKQAGDVEENPGPTSMDWIWRILFLVGAATGAHSFEQVQLQQPGAELVKPGASVKMSCKASGYAFSSYWINWMKQKPGQGLEWIGQIYPGDGDTNYNGKFKGRATLTADTSSSTAYMQLSSLTSEDSAVYFCARSITTVVGCAMDYWGQGTSVTVSSTRIQNPDPAVYQLRDSKSSDKSVCLFTDFDSQTNVSQSKDSDVYITDKTVLDMRSMDFKSNSAVAWSNKSDFACANAFNNSIIPEDTFFPSPESSCGTITQGLAVSTISSFFPPGYQVSFCLVMVLLFAVDTGLYFSVKTNIRSSTRDWKDHKFKWRKDPQDKRAKRSGSGATNFSLLKQAGDVEENPGPSRGHMCHQQLVISWFSLVFLASPLVAIWELKKDVYVVELDWYPDAPGEMVVLTCDTPEEDGITWTLDQSSEVLGSGKTLTIQVKEFGDAGQYTCHKGGEVLSHSLLLLHKKEDGIWSTDILKDQKEPKNKTFLRCEAKNYSGRFTCWWLTTISTDLTFSVKSSRGSSDPQGVTCGAATLSAERVRGDNKEYEYSVECQEDSACPAAEESLPIEVMVDAVHKLKYENYTSSFFIRDIIKPDPPKNLQLKPLKNSRQVEVSWEYPDTWSTPHSYFSLTFCVQVQGKSKREKKDRVFTDKTSATVICRKNASISVRAQDRYYSSSWSEWASVPCSGGGGSGGGGSGGGGSRNLPVATPDPGMFPCLHHSQNLLRAVSNMLQKARQTLEFYPCTSEEIDHEDITKDKTSTVEACLPLELTKNESCLNSRETSFITNGSCLASRKTSFMMALCLSSIYEDLKMYQVEFKTMNAKLLMDPKRQIFLDQNMLAVIDELMQALNFNSETVPQKSSLEEPDFYKTKIKLCILLHAFRIRAVTIDRVMSYLNASGSKIEVMYPPPYLDNEKSNGTIIHVKGKHLCPSPLFPGPSKPFWVLVVVGGVLACYSLLVTVAFIIFWVRSKRS

SEQ ID NO: 9348 - protein, 542 aa, synthetic construct
MCHQQLVISWFSLVFLASPLVAIWELKKDVYVVELDWYPDAPGEMVVLTCDTPEEDGITWTLDQSSEVLGSGKTLTIQVKEFGDAGQYTCHKGGEVLSHSLLLLHKKEDGIWSTDILKDQKEPKNKTFLRCEAKNYSGRFTCWWLTTISTDLTFSVKSSRGSSDPQGVTCGAATLSAERVRGDNKEYEYSVECQEDSACPAAEESLPIEVMVDAVHKLKYENYTSSFFIRDIIKPDPPKNLQLKPLKNSRQVEVSWEYPDTWSTPHSYFSLTFCVQVQGKSKREKKDRVFTDKTSATVICRKNASISVRAQDRYYSSSWSEWASVPCSGGGGSGGGGSGGGGSRNLPVATPDPGMFPCLHHSQNLLRAVSNMLQKARQTLEFYPCTSEEIDHEDITKDKTSTVEACLPLELTKNESCLNSRETSFITNGSCLASRKTSFMMALCLSSIYEDLKMYQVEFKTMNAKLLMDPKRQIFLDQNMLAVIDELMQALNFNSETVPQKSSLEEPDFYKTKIKLCILLHAFRIRAVTIDRVMSYLNASGS

SEQ ID NO: 9349 - protein, 614 aa, synthetic construct
MCHQQLVISWFSLVFLASPLVAIWELKKDVYVVELDWYPDAPGEMVVLTCDTPEEDGITWTLDQSSEVLGSGKTLTIQVKEFGDAGQYTCHKGGEVLSHSLLLLHKKEDGIWSTDILKDQKEPKNKTFLRCEAKNYSGRFTCWWLTTISTDLTFSVKSSRGSSDPQGVTCGAATLSAERVRGDNKEYEYSVECQEDSACPAAEESLPIEVMVDAVHKLKYENYTSSFFIRDIIKPDPPKNLQLKPLKNSRQVEVSWEYPDTWSTPHSYFSLTFCVQVQGKSKREKKDRVFTDKTSATVICRKNASISVRAQDRYYSSSWSEWASVPCSGGGGSGGGGSGGGGSRNLPVATPDPGMFPCLHHSQNLLRAVSNMLQKARQTLEFYPCTSEEIDHEDITKDKTSTVEACLPLELTKNESCLNSRETSFITNGSCLASRKTSFMMALCLSSIYEDLKMYQVEFKTMNAKLLMDPKRQIFLDQNMLAVIDELMQALNFNSETVPQKSSLEEPDFYKTKIKLCILLHAFRIRAVTIDRVMSYLNASGSKIEVMYPPPYLDNEKSNGTIIHVKGKHLCPSPLFPGPSKPFWVLVVVGGVLACYSLLVTVAFIIFWVRSKRS

SEQ ID NO: 9350 - protein, 1465 aa, synthetic construct
MALPVTALLLPLALLLHAARPEFNAGVTQTPKFQVLKTGQSMTLQCAQDMNHEYMSWYRQDPGMGLRLIHYSVAIQTTDQGEVPNGYNVSRSTIEDFPLRLLSAAPSQTSVYFCASSYLGNTGELFFGEGSRLTVLEDLKNVFPPEVAVFEPSEAEISHTQKATLVCLATGFYPDHVELSWWVNGKEVHSGVSTDPQPLKEQPALNDSRYCLSSRLRVSATFWQNPRNHFRCQVQFYGLSENDEWTQDRAKPVTQIVSAEAWGRADCGSQSFGLLDPKLCYLLDGILFIYGVILTALFLRVKFSRSADAPAYQQGQNQLYNELNLGRREEYDVLDKRRGRDPEMGGKPQRRKNPQEGLYNELQKDKMAEAYSEIGMKGERRRGKGHDGLYQGLSTATKDTYDALHMQALPPRRAKRSGSGATNFSLLKQAGDVEENPGPTSMDWIWRILFLVGAATGAHSFEQEVTQIPAALSVPEGENLVLNCSFTDSAIYNLQWFRQDPGKGLTSLLLIQSSQREQTSGRLNASLDKSSGRSTLYIAASQPGDSATYLCAVRPTSGGSYIPTFGRGTSLIVHPYTRIQNPDPAVYQLRDSKSSDKSVCLFTDFDSQTNVSQSKDSDVYITDKTVLDMRSMDFKSNSAVAWSNKSDFACANAFNNSIIPEDTFFPSPESSCGTQSFGLLDPKLCYLLDGILFIYGVILTALFLRVKFSRSADAPAYQQGQNQLYNELNLGRREEYDVLDKRRGRDPEMGGKPQRRKNPQEGLYNELQKDKMAEAYSEIGMKGERRRGKGHDGLYQGLSTATKDTYDALHMQALPPRRAKRSGSGVKQTLNFDLLKLAGDVESNPGPSRGHMCHQQLVISWFSLVFLASPLVAIWELKKDVYVVELDWYPDAPGEMVVLTCDTPEEDGITWTLDQSSEVLGSGKTLTIQVKEFGDAGQYTCHKGGEVLSHSLLLLHKKEDGIWSTDILKDQKEPKNKTFLRCEAKNYSGRFTCWWLTTISTDLTFSVKSSRGSSDPQGVTCGAATLSAERVRGDNKEYEYSVECQEDSACPAAEESLPIEVMVDAVHKLKYENYTSSFFIRDIIKPDPPKNLQLKPLKNSRQVEVSWEYPDTWSTPHSYFSLTFCVQVQGKSKREKKDRVFTDKTSATVICRKNASISVRAQDRYYSSSWSEWASVPCSGGGGSGGGGSGGGGSRNLPVATPDPGMFPCLHHSQNLLRAVSNMLQKARQTLEFYPCTSEEIDHEDITKDKTSTVEACLPLELTKNESCLNSRETSFITNGSCLASRKTSFMMALCLSSIYEDLKMYQVEFKTMNAKLLMDPKRQIFLDQNMLAVIDELMQALNFNSETVPQKSSLEEPDFYKTKIKLCILLHAFRIRAVTIDRVMSYLNASGSKIEVMYPPPYLDNEKSNGTIIHVKGKHLCPSPLFPGPSKPFWVLVVVGGVLACYSLLVTVAFIIFWVRSKRS

SEQ ID NO: 9351 - protein, 1459 aa, synthetic construct
MALPVTALLLPLALLLHAARPEFDGGITQSPKYLFRKEGQNVTLSCEQNLNHDAMYWYRQDPGQGLRLIYYSWAQGDFQKGDIAEGYSVSREKKESFPLTVTSAQKNPTAFYLCASSWGAPYEQYFGPGTRLTVLEDLKNVFPPEVAVFEPSEAEISHTQKATLVCLATGFYPDHVELSWWVNGKEVHSGVSTDPQPLKEQPALNDSRYCLSSRLRVSATFWQNPRNHFRCQVQFYGLSENDEWTQDRAKPVTQIVSAEAWGRADCGSQSFGLLDPKLCYLLDGILFIYGVILTALFLRVKFSRSADAPAYQQGQNQLYNELNLGRREEYDVLDKRRGRDPEMGGKPQRRKNPQEGLYNELQKDKMAEAYSEIGMKGERRRGKGHDGLYQGLSTATKDTYDALHMQALPPRRAKRSGSGATNFSLLKQAGDVEENPGPTSMDWIWRILFLVGAATGAHSFEQQGEEDPQALSIQEGENATMNCSYKTSINNLQWYRQNSGRGLVHLILIRSNEREKHSGRLRVTLDTSKKSSSLLITASRAADTASYFCATDGDTPLVFGKGTRLSVIANTRIQNPDPAVYQLRDSKSSDKSVCLFTDFDSQTNVSQSKDSDVYITDKTVLDMRSMDFKSNSAVAWSNKSDFACANAFNNSIIPEDTFFPSPESSCGTQSFGLLDPKLCYLLDGILFIYGVILTALFLRVKFSRSADAPAYQQGQNQLYNELNLGRREEYDVLDKRRGRDPEMGGKPQRRKNPQEGLYNELQKDKMAEAYSEIGMKGERRRGKGHDGLYQGLSTATKDTYDALHMQALPPRRAKRSGSGVKQTLNFDLLKLAGDVESNPGPSRGHMCHQQLVISWFSLVFLASPLVAIWELKKDVYVVELDWYPDAPGEMVVLTCDTPEEDGITWTLDQSSEVLGSGKTLTIQVKEFGDAGQYTCHKGGEVLSHSLLLLHKKEDGIWSTDILKDQKEPKNKTFLRCEAKNYSGRFTCWWLTTISTDLTFSVKSSRGSSDPQGVTCGAATLSAERVRGDNKEYEYSVECQEDSACPAAEESLPIEVMVDAVHKLKYENYTSSFFIRDIIKPDPPKNLQLKPLKNSRQVEVSWEYPDTWSTPHSYFSLTFCVQVQGKSKREKKDRVFTDKTSATVICRKNASISVRAQDRYYSSSWSEWASVPCSGGGGSGGGGSGGGGSRNLPVATPDPGMFPCLHHSQNLLRAVSNMLQKARQTLEFYPCTSEEIDHEDITKDKTSTVEACLPLELTKNESCLNSRETSFITNGSCLASRKTSFMMALCLSSIYEDLKMYQVEFKTMNAKLLMDPKRQIFLDQNMLAVIDELMQALNFNSETVPQKSSLEEPDFYKTKIKLCILLHAFRIRAVTIDRVMSYLNASGSKIEVMYPPPYLDNEKSNGTIIHVKGKHLCPSPLFPGPSKPFWVLVVVGGVLACYSLLVTVAFIIFWVRSKRS

SEQ ID NO: 9352 - protein, 1471 aa, synthetic construct
MALPVTALLLPLALLLHAARPEFNAGVTQTPKFRVLKTGQSMTLLCAQDMNHEYMYWYRQDPGMGLRLIHYSGWGKDTAKGEVPDGYNVSRLKKQNFLLGLESAAPSQTSVYFCASKVGPGQHNSPLHFGNGTRLTVTLEDLKNVFPPEVAVFEPSEAEISHTQKATLVCLATGFYPDHVELSWWVNGKEVHSGVSTDPQPLKEQPALNDSRYCLSSRLRVSATFWQNPRNHFRCQVQFYGLSENDEWTQDRAKPVTQIVSAEAWGRADCGSQSFGLLDPKLCYLLDGILFIYGVILTALFLRVKFSRSADAPAYQQGQNQLYNELNLGRREEYDVLDKRRGRDPEMGGKPQRRKNPQEGLYNELQKDKMAEAYSEIGMKGERRRGKGHDGLYQGLSTATKDTYDALHMQALPPRRAKRSGSGATNFSLLKQAGDVEENPGPTSMDWIWRILFLVGAATGAHSFEAQKVTQAQTEISVVEKEDVTLDCVYETRDTAYYLFWYKQPPSGELVFLIRQPWWGSSRGISGRYSWNFQKSTSSFNFTITASQVVDSAVYFCAMSVPDSRGHYQFTFGKGTKLSVIPTRIQNPDPAVYQLRDSKSSDKSVCLFTDFDSQTNVSQSKDSDVYITDKTVLDMRSMDFKSNSAVAWSNKSDFACANAFNNSIIPEDTFFPSPESSCGTQSFGLLDPKLCYLLDGILFIYGVILTALFLRVKFSRSADAPAYQQGQNQLYNELNLGRREEYDVLDKRRGRDPEMGGKPQRRKNPQEGLYNELQKDKMAEAYSEIGMKGERRRGKGHDGLYQGLSTATKDTYDALHMQALPPRRAKRSGSGVKQTLNFDLLKLAGDVESNPGPSRGHMCHQQLVISWFSLVFLASPLVAIWELKKDVYVVELDWYPDAPGEMVVLTCDTPEEDGITWTLDQSSEVLGSGKTLTIQVKEFGDAGQYTCHKGGEVLSHSLLLLHKKEDGIWSTDILKDQKEPKNKTFLRCEAKNYSGRFTCWWLTTISTDLTFSVKSSRGSSDPQGVTCGAATLSAERVRGDNKEYEYSVECQEDSACPAAEESLPIEVMVDAVHKLKYENYTSSFFIRDIIKPDPPKNLQLKPLKNSRQVEVSWEYPDTWSTPHSYFSLTFCVQVQGKSKREKKDRVFTDKTSATVICRKNASISVRAQDRYYSSSWSEWASVPCSGGGGSGGGGSGGGGSRNLPVATPDPGMFPCLHHSQNLLRAVSNMLQKARQTLEFYPCTSEEIDHEDITKDKTSTVEACLPLELTKNESCLNSRETSFITNGSCLASRKTSFMMALCLSSIYEDLKMYQVEFKTMNAKLLMDPKRQIFLDQNMLAVIDELMQALNFNSETVPQKSSLEEPDFYKTKIKLCILLHAFRIRAVTIDRVMSYLNASGSKIEVMYPPPYLDNEKSNGTIIHVKGKHLCPSPLFPGPSKPFWVLVVVGGVLACYSLLVTVAFIIFWVRSKRS

SEQ ID NO: 9353 - protein, 1459 aa, synthetic construct
MALPVTALLLPLALLLHAARPEFGITQSPKYLFRKEGQNVTLSCEQNLNHDAMYWYRQDPGQGLRLIYYSQIVNDFQKGDIAEGYSVSREKKESFPLTVTSAQKNPTAFYLCASSPGALYEQYFGPGTRLTVTLEDLKNVFPPEVAVFEPSEAEISHTQKATLVCLATGFYPDHVELSWWVNGKEVHSGVSTDPQPLKEQPALNDSRYCLSSRLRVSATFWQNPRNHFRCQVQFYGLSENDEWTQDRAKPVTQIVSAEAWGRADCGSQSFGLLDPKLCYLLDGILFIYGVILTALFLRVKFSRSADAPAYQQGQNQLYNELNLGRREEYDVLDKRRGRDPEMGGKPQRRKNPQEGLYNELQKDKMAEAYSEIGMKGERRRGKGHDGLYQGLSTATKDTYDALHMQALPPRRAKRSGSGATNFSLLKQAGDVEENPGPTSMDWIWRILFLVGAATGAHSFEENVEQHPSTLSVQEGDSAVIKCTYSDSASNYFPWYKQELGKRPQLIIDIRSNVGEKKDQRIAVTLNKTAKHFSLHITETQPEDSAVYFCAATEDYQLIWGAGTKLIIKPDTRIQNPDPAVYQLRDSKSSDKSVCLFTDFDSQTNVSQSKDSDVYITDKTVLDMRSMDFKSNSAVAWSNKSDFACANAFNNSIIPEDTFFPSPESSCGTQSFGLLDPKLCYLLDGILFIYGVILTALFLRVKFSRSADAPAYQQGQNQLYNELNLGRREEYDVLDKRRGRDPEMGGKPQRRKNPQEGLYNELQKDKMAEAYSEIGMKGERRRGKGHDGLYQGLSTATKDTYDALHMQALPPRRAKRSGSGVKQTLNFDLLKLAGDVESNPGPSRGHMCHQQLVISWFSLVFLASPLVAIWELKKDVYVVELDWYPDAPGEMVVLTCDTPEEDGITWTLDQSSEVLGSGKTLTIQVKEFGDAGQYTCHKGGEVLSHSLLLLHKKEDGIWSTDILKDQKEPKNKTFLRCEAKNYSGRFTCWWLTTISTDLTFSVKSSRGSSDPQGVTCGAATLSAERVRGDNKEYEYSVECQEDSACPAAEESLPIEVMVDAVHKLKYENYTSSFFIRDIIKPDPPKNLQLKPLKNSRQVEVSWEYPDTWSTPHSYFSLTFCVQVQGKSKREKKDRVFTDKTSATVICRKNASISVRAQDRYYSSSWSEWASVPCSGGGGSGGGGSGGGGSRNLPVATPDPGMFPCLHHSQNLLRAVSNMLQKARQTLEFYPCTSEEIDHEDITKDKTSTVEACLPLELTKNESCLNSRETSFITNGSCLASRKTSFMMALCLSSIYEDLKMYQVEFKTMNAKLLMDPKRQIFLDQNMLAVIDELMQALNFNSETVPQKSSLEEPDFYKTKIKLCILLHAFRIRAVTIDRVMSYLNASGSKIEVMYPPPYLDNEKSNGTIIHVKGKHLCPSPLFPGPSKPFWVLVVVGGVLACYSLLVTVAFIIFWVRSKRS

SEQ ID NO: 9354 - protein, 1465 aa, synthetic construct
MALPVTALLLPLALLLHAARPEFGVTQTPKFRVLKTGQSMTLLCAQDMNHEYMYWYRQDPGMGLRLIHYSVGEGTTAKGEVPDGYNVSRLKKQNFLLGLESAAPSQTSVYFCASRGYHRLNNEQFFGPGTRLTVLEDLKNVFPPEVAVFEPSEAEISHTQKATLVCLATGFYPDHVELSWWVNGKEVHSGVSTDPQPLKEQPALNDSRYCLSSRLRVSATFWQNPRNHFRCQVQFYGLSENDEWTQDRAKPVTQIVSAEAWGRADCGSQSFGLLDPKLCYLLDGILFIYGVILTALFLRVKFSRSADAPAYQQGQNQLYNELNLGRREEYDVLDKRRGRDPEMGGKPQRRKNPQEGLYNELQKDKMAEAYSEIGMKGERRRGKGHDGLYQGLSTATKDTYDALHMQALPPRRAKRSGSGATNFSLLKQAGDVEENPGPTSMDWIWRILFLVGAATGAHSFEQRKEVEQDPGPFNVPEGATVAFNCTYSNSASQSFFWYRQDCRKEPKLLMSVYSSGNEDGRFTAQLNRASQYISLLIRDSKLSDSATYLCVVKPDPGAGSYQLTFGKGTKLSVIPNTRIQNPDPAVYQLRDSKSSDKSVCLFTDFDSQTNVSQSKDSDVYITDKTVLDMRSMDFKSNSAVAWSNKSDFACANAFNNSIIPEDTFFPSPESSCGTQSFGLLDPKLCYLLDGILFIYGVILTALFLRVKFSRSADAPAYQQGQNQLYNELNLGRREEYDVLDKRRGRDPEMGGKPQRRKNPQEGLYNELQKDKMAEAYSEIGMKGERRRGKGHDGLYQGLSTATKDTYDALHMQALPPRRAKRSGSGVKQTLNFDLLKLAGDVESNPGPSRGHMCHQQLVISWFSLVFLASPLVAIWELKKDVYVVELDWYPDAPGEMVVLTCDTPEEDGITWTLDQSSEVLGSGKTLTIQVKEFGDAGQYTCHKGGEVLSHSLLLLHKKEDGIWSTDILKDQKEPKNKTFLRCEAKNYSGRFTCWWLTTISTDLTFSVKSSRGSSDPQGVTCGAATLSAERVRGDNKEYEYSVECQEDSACPAAEESLPIEVMVDAVHKLKYENYTSSFFIRDIIKPDPPKNLQLKPLKNSRQVEVSWEYPDTWSTPHSYFSLTFCVQVQGKSKREKKDRVFTDKTSATVICRKNASISVRAQDRYYSSSWSEWASVPCSGGGGSGGGGSGGGGSRNLPVATPDPGMFPCLHHSQNLLRAVSNMLQKARQTLEFYPCTSEEIDHEDITKDKTSTVEACLPLELTKNESCLNSRETSFITNGSCLASRKTSFMMALCLSSIYEDLKMYQVEFKTMNAKLLMDPKRQIFLDQNMLAVIDELMQALNFNSETVPQKSSLEEPDFYKTKIKLCILLHAFRIRAVTIDRVMSYLNASGSKIEVMYPPPYLDNEKSNGTIIHVKGKHLCPSPLFPGPSKPFWVLVVVGGVLACYSLLVTVAFIIFWVRSKRS

SEQ ID NO: 9355 - protein, 1464 aa, synthetic construct
MALPVTALLLPLALLLHAARPEFDVTQTPRNRITKTGKRIMLECSQTKGHDRMYWYRQDPGLGLRLIYYSFDVKDINKGEISDGYSVSRQAQAKFSLSLESAIPNQTALYFCATSGQGAYEEQFFGPGTRLTVLEDLKNVFPPEVAVFEPSEAEISHTQKATLVCLATGFYPDHVELSWWVNGKEVHSGVSTDPQPLKEQPALNDSRYCLSSRLRVSATFWQNPRNHFRCQVQFYGLSENDEWTQDRAKPVTQIVSAEAWGRADCGSQSFGLLDPKLCYLLDGILFIYGVILTALFLRVKFSRSADAPAYQQGQNQLYNELNLGRREEYDVLDKRRGRDPEMGGKPQRRKNPQEGLYNELQKDKMAEAYSEIGMKGERRRGKGHDGLYQGLSTATKDTYDALHMQALPPRRAKRSGSGATNFSLLKQAGDVEENPGPTSMDWIWRILFLVGAATGAHSFEKNQVEQSPQSLIILEGKNCTLQCNYTVSPFSNLRWYKQDTGRGPVSLTILTFSENTKSNGRYTATLDADTKQSSLHITASQLSDSASYICVVSGGTDSWGKLQFGAGTQVVVTPDTRIQNPDPAVYQLRDSKSSDKSVCLFTDFDSQTNVSQSKDSDVYITDKTVLDMRSMDFKSNSAVAWSNKSDFACANAFNNSIIPEDTFFPSPESSCGTQSFGLLDPKLCYLLDGILFIYGVILTALFLRVKFSRSADAPAYQQGQNQLYNELNLGRREEYDVLDKRRGRDPEMGGKPQRRKNPQEGLYNELQKDKMAEAYSEIGMKGERRRGKGHDGLYQGLSTATKDTYDALHMQALPPRRAKRSGSGVKQTLNFDLLKLAGDVESNPGPSRGHMCHQQLVISWFSLVFLASPLVAIWELKKDVYVVELDWYPDAPGEMVVLTCDTPEEDGITWTLDQSSEVLGSGKTLTIQVKEFGDAGQYTCHKGGEVLSHSLLLLHKKEDGIWSTDILKDQKEPKNKTFLRCEAKNYSGRFTCWWLTTISTDLTFSVKSSRGSSDPQGVTCGAATLSAERVRGDNKEYEYSVECQEDSACPAAEESLPIEVMVDAVHKLKYENYTSSFFIRDIIKPDPPKNLQLKPLKNSRQVEVSWEYPDTWSTPHSYFSLTFCVQVQGKSKREKKDRVFTDKTSATVICRKNASISVRAQDRYYSSSWSEWASVPCSGGGGSGGGGSGGGGSRNLPVATPDPGMFPCLHHSQNLLRAVSNMLQKARQTLEFYPCTSEEIDHEDITKDKTSTVEACLPLELTKNESCLNSRETSFITNGSCLASRKTSFMMALCLSSIYEDLKMYQVEFKTMNAKLLMDPKRQIFLDQNMLAVIDELMQALNFNSETVPQKSSLEEPDFYKTKIKLCILLHAFRIRAVTIDRVMSYLNASGSKIEVMYPPPYLDNEKSNGTIIHVKGKHLCPSPLFPGPSKPFWVLVVVGGVLACYSLLVTVAFIIFWVRSKRS

SEQ ID NO: 9356 - protein, 1462 aa, synthetic construct
MALPVTALLLPLALLLHAARPEFSRYLVKRTGEKVFLECVQDMDHENMFWYRQDPGLGLRLIYFSYDVKMKEKGDIPEGYSVSREKKERFSLILESASTNQTSMYLCASSLWGRLAKNIQYFGAGTRLSVLELEDLKNVFPPEVAVFEPSEAEISHTQKATLVCLATGFYPDHVELSWWVNGKEVHSGVSTDPQPLKEQPALNDSRYCLSSRLRVSATFWQNPRNHFRCQVQFYGLSENDEWTQDRAKPVTQIVSAEAWGRADCGSQSFGLLDPKLCYLLDGILFIYGVILTALFLRVKFSRSADAPAYQQGQNQLYNELNLGRREEYDVLDKRRGRDPEMGGKPQRRKNPQEGLYNELQKDKMAEAYSEIGMKGERRRGKGHDGLYQGLSTATKDTYDALHMQALPPRRAKRSGSGATNFSLLKQAGDVEENPGPTSMDWIWRILFLVGAATGAHSFEEDQVTQSPEALRLQEGESSSLNCSYTVSGLRGLFWYRQDPGKGPEFLFTLYSAGEEKEKERLKATLTKKESFLHITAPKPEDSATYLCAVQANRGSTLGRLYFGRGTQLTVWPDTRIQNPDPAVYQLRDSKSSDKSVCLFTDFDSQTNVSQSKDSDVYITDKTVLDMRSMDFKSNSAVAWSNKSDFACANAFNNSIIPEDTFFPSPESSCGTQSFGLLDPKLCYLLDGILFIYGVILTALFLRVKFSRSADAPAYQQGQNQLYNELNLGRREEYDVLDKRRGRDPEMGGKPQRRKNPQEGLYNELQKDKMAEAYSEIGMKGERRRGKGHDGLYQGLSTATKDTYDALHMQALPPRRAKRSGSGVKQTLNFDLLKLAGDVESNPGPSRGHMCHQQLVISWFSLVFLASPLVAIWELKKDVYVVELDWYPDAPGEMVVLTCDTPEEDGITWTLDQSSEVLGSGKTLTIQVKEFGDAGQYTCHKGGEVLSHSLLLLHKKEDGIWSTDILKDQKEPKNKTFLRCEAKNYSGRFTCWWLTTISTDLTFSVKSSRGSSDPQGVTCGAATLSAERVRGDNKEYEYSVECQEDSACPAAEESLPIEVMVDAVHKLKYENYTSSFFIRDIIKPDPPKNLQLKPLKNSRQVEVSWEYPDTWSTPHSYFSLTFCVQVQGKSKREKKDRVFTDKTSATVICRKNASISVRAQDRYYSSSWSEWASVPCSGGGGSGGGGSGGGGSRNLPVATPDPGMFPCLHHSQNLLRAVSNMLQKARQTLEFYPCTSEEIDHEDITKDKTSTVEACLPLELTKNESCLNSRETSFITNGSCLASRKTSFMMALCLSSIYEDLKMYQVEFKTMNAKLLMDPKRQIFLDQNMLAVIDELMQALNFNSETVPQKSSLEEPDFYKTKIKLCILLHAFRIRAVTIDRVMSYLNASGSKIEVMYPPPYLDNEKSNGTIIHVKGKHLCPSPLFPGPSKPFWVLVVVGGVLACYSLLVTVAFIIFWVRSKRS

SEQ ID NO: 9357 - protein, 1458 aa, synthetic construct
MALPVTALLLPLALLLHAARPEFSRYLVKRTGEKVFLECVQDMDHENMFWYRQDPGLGLRLIYFSYDVKMKEKGDIPEGYSVSREKKERFSLILESASTNQTSMYLCASSFWGRSTDTQYFGPGTRLTVLEDLKNVFPPEVAVFEPSEAEISHTQKATLVCLATGFYPDHVELSWWVNGKEVHSGVSTDPQPLKEQPALNDSRYCLSSRLRVSATFWQNPRNHFRCQVQFYGLSENDEWTQDRAKPVTQIVSAEAWGRADCGSQSFGLLDPKLCYLLDGILFIYGVILTALFLRVKFSRSADAPAYQQGQNQLYNELNLGRREEYDVLDKRRGRDPEMGGKPQRRKNPQEGLYNELQKDKMAEAYSEIGMKGERRRGKGHDGLYQGLSTATKDTYDALHMQALPPRRAKRSGSGATNFSLLKQAGDVEENPGPTSMDWIWRILFLVGAATGAHSFEKQEVTQIPAALSVPEGENLVLNCSFTDSAIYNLQWFRQDPGKGLTSLLLIQSSQREQTSGRLNASLDKSSGRSTLYIAASQPGDSATYLCAVRETSGSRLTFGEGTQLTVNPDTRIQNPDPAVYQLRDSKSSDKSVCLFTDFDSQTNVSQSKDSDVYITDKTVLDMRSMDFKSNSAVAWSNKSDFACANAFNNSIIPEDTFFPSPESSCGTQSFGLLDPKLCYLLDGILFIYGVILTALFLRVKFSRSADAPAYQQGQNQLYNELNLGRREEYDVLDKRRGRDPEMGGKPQRRKNPQEGLYNELQKDKMAEAYSEIGMKGERRRGKGHDGLYQGLSTATKDTYDALHMQALPPRRAKRSGSGVKQTLNFDLLKLAGDVESNPGPSRGHMCHQQLVISWFSLVFLASPLVAIWELKKDVYVVELDWYPDAPGEMVVLTCDTPEEDGITWTLDQSSEVLGSGKTLTIQVKEFGDAGQYTCHKGGEVLSHSLLLLHKKEDGIWSTDILKDQKEPKNKTFLRCEAKNYSGRFTCWWLTTISTDLTFSVKSSRGSSDPQGVTCGAATLSAERVRGDNKEYEYSVECQEDSACPAAEESLPIEVMVDAVHKLKYENYTSSFFIRDIIKPDPPKNLQLKPLKNSRQVEVSWEYPDTWSTPHSYFSLTFCVQVQGKSKREKKDRVFTDKTSATVICRKNASISVRAQDRYYSSSWSEWASVPCSGGGGSGGGGSGGGGSRNLPVATPDPGMFPCLHHSQNLLRAVSNMLQKARQTLEFYPCTSEEIDHEDITKDKTSTVEACLPLELTKNESCLNSRETSFITNGSCLASRKTSFMMALCLSSIYEDLKMYQVEFKTMNAKLLMDPKRQIFLDQNMLAVIDELMQALNFNSETVPQKSSLEEPDFYKTKIKLCILLHAFRIRAVTIDRVMSYLNASGSKIEVMYPPPYLDNEKSNGTIIHVKGKHLCPSPLFPGPSKPFWVLVVVGGVLACYSLLVTVAFIIFWVRSKRS

SEQ ID NO: 9358 - protein, 1461 aa, synthetic construct
MALPVTALLLPLALLLHAARPEFGVTQSPTHLIKTRGQQVTLRCSPKSGHDTVSWYQQALGQGPQFIFQYYEEEERQRGNFPDRFSGHQFPNYSSELNVNALLLGDSALYLCASSLGWRGGRYNEQFFGPGTRLTVLEDLKNVFPPEVAVFEPSEAEISHTQKATLVCLATGFYPDHVELSWWVNGKEVHSGVSTDPQPLKEQPALNDSRYCLSSRLRVSATFWQNPRNHFRCQVQFYGLSENDEWTQDRAKPVTQIVSAEAWGRADCGSQSFGLLDPKLCYLLDGILFIYGVILTALFLRVKFSRSADAPAYQQGQNQLYNELNLGRREEYDVLDKRRGRDPEMGGKPQRRKNPQEGLYNELQKDKMAEAYSEIGMKGERRRGKGHDGLYQGLSTATKDTYDALHMQALPPRRAKRSGSGATNFSLLKQAGDVEENPGPTSMDWIWRILFLVGAATGAHSFEQNIDQPTEMTATEGAIVQINCTYQTSGFNGLFWYQQHAGEAPTFLSYNVLDGLEEKGRFSSFLSRSKGYSYLLLKELQMKDSASYLCASVDGNNRLAFGKGNQVVVIPNTRIQNPDPAVYQLRDSKSSDKSVCLFTDFDSQTNVSQSKDSDVYITDKTVLDMRSMDFKSNSAVAWSNKSDFACANAFNNSIIPEDTFFPSPESSCGTQSFGLLDPKLCYLLDGILFIYGVILTALFLRVKFSRSADAPAYQQGQNQLYNELNLGRREEYDVLDKRRGRDPEMGGKPQRRKNPQEGLYNELQKDKMAEAYSEIGMKGERRRGKGHDGLYQGLSTATKDTYDALHMQALPPRRAKRSGSGVKQTLNFDLLKLAGDVESNPGPSRGHMCHQQLVISWFSLVFLASPLVAIWELKKDVYVVELDWYPDAPGEMVVLTCDTPEEDGITWTLDQSSEVLGSGKTLTIQVKEFGDAGQYTCHKGGEVLSHSLLLLHKKEDGIWSTDILKDQKEPKNKTFLRCEAKNYSGRFTCWWLTTISTDLTFSVKSSRGSSDPQGVTCGAATLSAERVRGDNKEYEYSVECQEDSACPAAEESLPIEVMVDAVHKLKYENYTSSFFIRDIIKPDPPKNLQLKPLKNSRQVEVSWEYPDTWSTPHSYFSLTFCVQVQGKSKREKKDRVFTDKTSATVICRKNASISVRAQDRYYSSSWSEWASVPCSGGGGSGGGGSGGGGSRNLPVATPDPGMFPCLHHSQNLLRAVSNMLQKARQTLEFYPCTSEEIDHEDITKDKTSTVEACLPLELTKNESCLNSRETSFITNGSCLASRKTSFMMALCLSSIYEDLKMYQVEFKTMNAKLLMDPKRQIFLDQNMLAVIDELMQALNFNSETVPQKSSLEEPDFYKTKIKLCILLHAFRIRAVTIDRVMSYLNASGSKIEVMYPPPYLDNEKSNGTIIHVKGKHLCPSPLFPGPSKPFWVLVVVGGVLACYSLLVTVAFIIFWVRSKRS

SEQ ID NO: 9359 - protein, 1436 aa, synthetic construct
MALPVTALLLPLALLLHAARPNAGVTQTPKFQVLKTGQSMTLQCAQDMNHEYMSWYRQDPGMGLRLIHYSVAIQTTDQGEVPNGYNVSRSTIEDFPLRLLSAAPSQTSVYFCASSYLGNTGELFFGEGSRLTVLEDKQLDADVSPKPTIFLPSIAETKLQKAGTYLCLLEKFFPDVIKIHWQEKKSNTILGSQEGNTMKTNDTYMKFSWLTVPEKSLDKEHRCIVRHENNKNGVDQEIIFPPIKTDVITGSQSFGLLDPKLCYLLDGILFIYGVILTALFLRVKFSRSADAPAYQQGQNQLYNELNLGRREEYDVLDKRRGRDPEMGGKPRRKNPQEGLYNELQKDKMAEAYSEIGMKGERRRGKGHDGLYQGLSTATKDTYDALHMQALPPRRAKRSGSGATNFSLLKQAGDVEENPGPTSMDWIWRILFLVGAATGAHSFEQEVTQIPAALSVPEGENLVLNCSFTDSAIYNLQWFRQDPGKGLTSLLLIQSSQREQTSGRLNASLDKSSGRSTLYIAASQPGDSATYLCAVRPTSGGSYIPTFGRGTSLIVHPYTRSQPHTKPSVFVMKNGTNVACLVKEFYPKDIRINLVSSKKITEFDPAIVISPSGKYNAVKLGKYEDSNSVTCSVQHDNKTVHSTDFGTQSFGLLDPKLCYLLDGILFIYGVILTALFLRVKFSRSADAPAYQQGQNQLYNELNLGRREEYDVLDKRRGRDPEMGGKPRRKNPQEGLYNELQKDKMAEAYSEIGMKGERRRGKGHDGLYQGLSTATKDTYDALHMQALPPRRAKRSGSGVKQTLNFDLLKLAGDVESNPGPSRGHMCHQQLVISWFSLVFLASPLVAIWELKKDVYVVELDWYPDAPGEMVVLTCDTPEEDGITWTLDQSSEVLGSGKTLTIQVKEFGDAGQYTCHKGGEVLSHSLLLLHKKEDGIWSTDILKDQKEPKNKTFLRCEAKNYSGRFTCWWLTTISTDLTFSVKSSRGSSDPQGVTCGAATLSAERVRGDNKEYEYSVECQEDSACPAAEESLPIEVMVDAVHKLKYENYTSSFFIRDIIKPDPPKNLQLKPLKNSRQVEVSWEYPDTWSTPHSYFSLTFCVQVQGKSKREKKDRVFTDKTSATVICRKNASISVRAQDRYYSSSWSEWASVPCSGGGGSGGGGSGGGGSRNLPVATPDPGMFPCLHHSQNLLRAVSNMLQKARQTLEFYPCTSEEIDHEDITKDKTSTVEACLPLELTKNESCLNSRETSFITNGSCLASRKTSFMMALCLSSIYEDLKMYQVEFKTMNAKLLMDPKRQIFLDQNMLAVIDELMQALNFNSETVPQKSSLEEPDFYKTKIKLCILLHAFRIRAVTIDRVMSYLNASGSKIEVMYPPPYLDNEKSNGTIIHVKGKHLCPSPLFPGPSKPFWVLVVVGGVLACYSLLVTVAFIIFWVRSKRS

SEQ ID NO: 9360 - protein, 1445 aa, synthetic construct
MALPVTALLLPLALLLHAARPDIQMTQSPSSLSASVGDRVTITCKASDHINNWLAWYQQKPGQAPKLLIYGATTLETGVPSRFSGSGSGTDYTLTISSLQPEDFATYYCQQSWNTPWTFGQGTKLEIKRGQPKANPTVTLFPPSSEELQANKATLVCLISDFYPGAVTVAWKADGSPVKAGVETTKPSKQSNNKYAASSYLSLTPEQWKSHRSYSCQVTHEGSTVEKTVAPTECSGSQSFGLLDPKLCYLLDGILFIYGVILTALFLRVKFSRSADAPAYQQGQNQLYNELNLGRREEYDVLDKRRGRDPEMGGKPRRKNPQEGLYNELQKDKMAEAYSEIGMKGERRRGKGHDGLYQGLSTATKDTYDALHMQALPPRRAKRSGSGATNFSLLKQAGDVEENPGPTSMDWIWRILFLVGAATGAHSFEQVQLQQPGAELVKPGASVKMSCKASGYAFSSYWINWMKQKPGQGLEWIGQIYPGDGDTNYNGKFKGRATLTADTSSSTAYMQLSSLTSEDSAVYFCARSITTVVGCAMDYWGQGTSVTVSSASTKGPSVFPLAPSSKSTSGGTAALGCLVKDYFPEPVTVSWNSGALTSGVHTFPAVLQSSGLYSLSSVVTVPSSSLGTQTYICNVNHKPSNTKVDKRVEPKSCGTQSFGLLDPKLCYLLDGILFIYGVILTALFLRVKFSRSADAPAYQQGQNQLYNELNLGRREEYDVLDKRRGRDPEMGGKPRRKNPQEGLYNELQKDKMAEAYSEIGMKGERRRGKGHDGLYQGLSTATKDTYDALHMQALPPRRAKRSGSGVKQTLNFDLLKLAGDVESNPGPSRGHMCHQQLVISWFSLVFLASPLVAIWELKKDVYVVELDWYPDAPGEMVVLTCDTPEEDGITWTLDQSSEVLGSGKTLTIQVKEFGDAGQYTCHKGGEVLSHSLLLLHKKEDGIWSTDILKDQKEPKNKTFLRCEAKNYSGRFTCWWLTTISTDLTFSVKSSRGSSDPQGVTCGAATLSAERVRGDNKEYEYSVECQEDSACPAAEESLPIEVMVDAVHKLKYENYTSSFFIRDIIKPDPPKNLQLKPLKNSRQVEVSWEYPDTWSTPHSYFSLTFCVQVQGKSKREKKDRVFTDKTSATVICRKNASISVRAQDRYYSSSWSEWASVPCSGGGGSGGGGSGGGGSRNLPVATPDPGMFPCLHHSQNLLRAVSNMLQKARQTLEFYPCTSEEIDHEDITKDKTSTVEACLPLELTKNESCLNSRETSFITNGSCLASRKTSFMMALCLSSIYEDLKMYQVEFKTMNAKLLMDPKRQIFLDQNMLAVIDELMQALNFNSETVPQKSSLEEPDFYKTKIKLCILLHAFRIRAVTIDRVMSYLNASGSKIEVMYPPPYLDNEKSNGTIIHVKGKHLCPSPLFPGPSKPFWVLVVVGGVLACYSLLVTVAFIIFWVRSKRS

SEQ ID NO: 9361 - protein, 749 aa, synthetic construct
MALPVTALLLPLALLLHAARPDIQMTQSPSSLSASVGDRVTITCRASQDISSYLNWYQQKPGKAPKLLIYYTSRLHSGVPSRFSGSGSGTDFTLTISSLQPEDFATYYCQQGNTLPYTFGQGTKVEIKRLEDLKNVFPPEVAVFEPSEAEISHTQKATLVCLATGFYPDHVELSWWVNGKEVHSGVCTDPQPLKEQPALNDSRYCLSSRLRVSATFWQNPRNHFRCQVQFYGLSENDEWTQDRAKPVTQIVSAEAWGRADCGFTSESYQQGVLSATILYEILLGKATLYAVLVSALVLMAMVKRKDSRGRAKRSGSGATNFSLLKQAGDVEENPGPTSATMDWIWRILFLVGAATGAHSGPEVQLVESGGGLVQPGGSLRLSCAASGGDWSANFMYWYRQAPGKQRELVARISGRGVVDYVESVKGRFTISRDNSKNTLYLQMNSLRAEDTAVYYCAVASYWGQGTLVTVSSGSGGGGSGGGGSGGGGSFEVQLVESGGGLVQPGGSLRLSCAASGYTFSDYFMSWVRQAPGKGLEWVATISNGGTYTYYPDSVKGRFTISRDNSKNTLYLQMNSLRAEDTAVYYCARFDGYIFDYWGQGTLVTVSSTRIQNPDPAVYQLRDSKSSDKSVCLFTDFDSQTNVSQSKDSDVYITDKCVLDMRSMDFKSNSAVAWSNKSDFACANAFNNSIIPEDTFFPSPESSCDVKLVEKSFETDTNLNFQNLSVIGFRILLLKVAGFNLLMTLRLWSS

SEQ ID NO: 9362 - protein, 677 aa, synthetic construct
MALPVTALLLPLALLLHAARPDIQMTQSPSSLSASVGDRVTITCKASDHINNWLAWYQQKPGQAPKLLIYGATTLETGVPSRFSGSGSGTDYTLTISSLQPEDFATYYCQQSWNTPWTFGQGTKLEIKRLEDLKNVFPPEVAVFEPSEAEISHTQKATLVCLATGFYPDHVELSWWVNGKEVHSGVSTDPQPLKEQPALNDSRYCLSSRLRVSATFWQNPRNHFRCQVQFYGLSENDEWTQDRAKPVTQIVSAEAWGRADCGSLGEPQLCYILDAILFLYGIVLTLLYCRLKIQVRKAAITSYEKSDGVYTGLSTRNQETYETLKHEKPPQRAKRSGSGATNFSLLKQAGDVEENPGPTSMDWIWRILFLVGAATGAHSFEQVQLQQPGAELVKPGASVKMSCKASGYAFSSYWINWMKQKPGQGLEWIGQIYPGDGDTNYNGKFKGRATLTADTSSSTAYMQLSSLTSEDSAVYFCARSITTVVGCAMDYWGQGTSVTVSSTRASTKGPSVFPLAPSSKSTSGGTAALGCLVKDYFPEPVTVSWNSGALTSGVHTFPAVLQSSGLYSLSSVVTVPSSSLGTQTYICNVNHKPSNTKVDKRVEPKSCGTLGEPQLCYILDAILFLYGIVLTLLYCRLKIQVRKAAITSYEKSDGVYTGLSTRNQETYETLKHEKPPQ

SEQ ID NO: 9363 - protein, 751 aa, synthetic construct
MALPVTALLLPLALLLHAARPEFNAGVTQTPKFQVLKTGQSMTLQCAQDMNHEYMSWYRQDPGMGLRLIHYSVAIQTTDQGEVPNGYNVSRSTIEDFPLRLLSAAPSQTSVYFCASSYLGNTGELFFGEGSRLTVLEDLKNVFPPEVAVFEPSEAEISHTQKATLVCLATGFYPDHVELSWWVNGKEVHSGVSTDPQPLKEQPALNDSRYCLSSRLRVSATFWQNPRNHFRCQVQFYGLSENDEWTQDRAKPVTQIVSAEAWGRADCGSQSFGLLDPKLCYLLDGILFIYGVILTALFLRVKFSRSADAPAYQQGQNQLYNELNLGRREEYDVLDKRRGRDPEMGGKPQRRKNPQEGLYNELQKDKMAEAYSEIGMKGERRRGKGHDGLYQGLSTATKDTYDALHMQALPPRRAKRSGSGATNFSLLKQAGDVEENPGPTSMDWIWRILFLVGAATGAHSFEQEVTQIPAALSVPEGENLVLNCSFTDSAIYNLQWFRQDPGKGLTSLLLIQSSQREQTSGRLNASLDKSSGRSTLYIAASQPGDSATYLCAVRPTSGGSYIPTFGRGTSLIVHPYTRASTKGPSVFPLAPSSKSTSGGTAALGCLVKDYFPEPVTVSWNSGALTSGVHTFPAVLQSSGLYSLSSVVTVPSSSLGTQTYICNVNHKPSNTKVDKRVEPKSCGTLGEPQLCYILDAILFLYGIVLTLLYCRLKIQVRKAAITSYEKSDGVYTGLSTRNQETYETLKHEKPPQ

SEQ ID NO: 9364 - protein, 1179 aa, synthetic construct
MGPRLLFWALLCLLGTGPVEAGVTQSPTHLIKTRGQQATLRCSPISGHTSVYWYQQALGLGLQFLLWYDEGEERNRGNFPPRFSGRQFPNYSSELNVNALELEDSALYLCASSLGGPRGLAGLRGDEQFFGPGTRLTVLEGTGGGGSGGGEFNAGVTQTPKFQVLKTGQSMTLQCAQDMNHEYMSWYRQDPGMGLRLIHYSVAIQTTDQGEVPNGYNVSRSTIEDFPLRLLSAAPSQTSVYFCASSYLGNTGELFFGEGSRLTVLEDLKNVFPPEVAVFEPSEAEISHTQKATLVCLATGFYPDHVELSWWVNGKEVHSGVSTDPQPLKEQPALNDSRYCLSSRLRVSATFWQNPRNHFRCQVQFYGLSENDEWTQDRAKPVTQIVSAEAWGRADCGSQSFGLLDPKLCYLLDGILFIYGVILTALFLRVKFSRSADAPAYQQGQNQLYNELNLGRREEYDVLDKRRGRDPEMGGKPQRRKNPQEGLYNELQKDKMAEAYSEIGMKGERRRGKGHDGLYQGLSTATKDTYDALHMQALPPRRAKRSGSGATNFSLLKQAGDVEENPGPTSMDWIWRILFLVGAATGAHSFEQEVTQIPAALSVPEGENLVLNCSFTDSAIYNLQWFRQDPGKGLTSLLLIQSSQREQTSGRLNASLDKSSGRSTLYIAASQPGDSATYLCAVRPTSGGSYIPTFGRGTSLIVHPYTRIQNPDPAVYQLRDSKSSDKSVCLFTDFDSQTNVSQSKDSDVYITDKTVLDMRSMDFKSNSAVAWSNKSDFACANAFNNSIIPEDTFFPSPESSCGTQSFGLLDPKLCYLLDGILFIYGVILTALFLRVKFSRSADAPAYQQGQNQLYNELNLGRREEYDVLDKRRGRDPEMGGKPQRRKNPQEGLYNELQKDKMAEAYSEIGMKGERRRGKGHDGLYQGLSTATKDTYDALHMQALPPRRAKRSGSGVKQTLNFDLLKLAGDVESNPGPSRGHMTEYKPTVRLATRDDVPRAVRTLAAAFADYPATRHTVDPDRHIERVTELQELFLTRVGLDIGKVWVADDGAAVAVWTTPESVEAGAVFAEIGPRMAELSGSRLAAQQQMEGLLAPHRPKEPAWFLATVGVSPDHQGKGLGSAVVLPGVEAAERAGVPAFLETSAPRNLPFYERLGFTVTADVEVPEGPRTWCMTRKPGA

SEQ ID NO: 9365 - protein, 1178 aa, synthetic construct
MGPRLLFWALLCLLGTGPVEAGVTQSPTHLIKTRGQQATLRCSPISGHTSVYWYQQALGLGLQFLLWYDEGEERNRGNFPPRFSGRQFPNYSSELNVNALELEDSALYLCASSLGGDELGADGNEQFFGPGTRLTVLEGTGGGGSGGGSEFNAGVTQTPKFQVLKTGQSMTLQCAQDMNHEYMSWYRQDPGMGLRLIHYSVAIQTTDQGEVPNGYNVSRSTIEDFPLRLLSAAPSQTSVYFCASSYLGNTGELFFGEGSRLTVLEDLKNVFPPEVAVFEPSEAEISHTQKATLVCLATGFYPDHVELSWWVNGKEVHSGVSTDPQPLKEQPALNDSRYCLSSRLRVSATFWQNPRNHFRCQVQFYGLSENDEWTQDRAKPVTQIVSAEAWGRADCGSQSFGLLDPKLCYLLDGILFIYGVILTALFLRVKFSRSADAPAYQQGQNQLYNELNLGRREEYDVLDKRRGRDPEMGGKPQRRKNPQEGLYNELQKDKMAEAYSEIGMKGERRRGKGHDGLYQGLSTATKDTYDALHMQALPPRRAKRSGSGATNFSLLKQAGDVEENPGPTSMDWIWRILFLVGAATGAHSFEQEVTQIPAALSVPEGENLVLNCSFTDSAIYNLQWFRQDPGKGLTSLLLIQSSQREQTSGRLNASLDKSSGRSTLYIAASQPGDSATYLCAVRPTSGGSYIPTFGRGTSLIVHPYTRIQNPDPAVYQLRDSKSSDKSVCLFTDFDSQTNVSQSKDSDVYITDKTVLDMRSMDFKSNSAVAWSNKSDFACANAFNNSIIPEDTFFPSPESSCGTQSFGLLDPKLCYLLDGILFIYGVILTALFLRVKFSRSADAPAYQQGQNQLYNELNLGRREEYDVLDKRRGRDPEMGGKPQRRKNPQEGLYNELQKDKMAEAYSEIGMKGERRRGKGHDGLYQGLSTATKDTYDALHMQALPPRRAKRSGSGVKQTLNFDLLKLAGDVESNPGPSRGHMTEYKPTVRLATRDDVPRAVRTLAAAFADYPATRHTVDPDRHIERVTELQELFLTRVGLDIGKVWVADDGAAVAVWTTPESVEAGAVFAEIGPRMAELSGSRLAAQQQMEGLLAPHRPKEPAWFLATVGVSPDHQGKGLGSAVVLPGVEAAERAGVPAFLETSAPRNLPFYERLGFTVTADVEVPEGPRTWCMTRKPGA

SEQ ID NO: 9366 - protein, 1188 aa, synthetic construct
MALPVTALLLPLALLLHAARPACEVQLLESGGGLIQPGGSLRLSCAASGFTFSSHAMTWVRQAPGKGLEWVSAISGSGDYTHYADSVKGRFTISRDNSKNTVYLQMNSLRAEDSAVYYCAKDEDGGSLLGHRGQGTLVTVSSGTGGGGSGGGGSGGGGSEFNAGVTQTPKFQVLKTGQSMTLQCAQDMNHEYMSWYRQDPGMGLRLIHYSVAIQTTDQGEVPNGYNVSRSTIEDFPLRLLSAAPSQTSVYFCASSYLGNTGELFFGEGSRLTVLEDLKNVFPPEVAVFEPSEAEISHTQKATLVCLATGFYPDHVELSWWVNGKEVHSGVSTDPQPLKEQPALNDSRYCLSSRLRVSATFWQNPRNHFRCQVQFYGLSENDEWTQDRAKPVTQIVSAEAWGRADCGSQSFGLLDPKLCYLLDGILFIYGVILTALFLRVKFSRSADAPAYQQGQNQLYNELNLGRREEYDVLDKRRGRDPEMGGKPQRRKNPQEGLYNELQKDKMAEAYSEIGMKGERRRGKGHDGLYQGLSTATKDTYDALHMQALPPRRAKRSGSGATNFSLLKQAGDVEENPGPTSMDWIWRILFLVGAATGAHSFEQEVTQIPAALSVPEGENLVLNCSFTDSAIYNLQWFRQDPGKGLTSLLLIQSSQREQTSGRLNASLDKSSGRSTLYIAASQPGDSATYLCAVRPTSGGSYIPTFGRGTSLIVHPYTRIQNPDPAVYQLRDSKSSDKSVCLFTDFDSQTNVSQSKDSDVYITDKTVLDMRSMDFKSNSAVAWSNKSDFACANAFNNSIIPEDTFFPSPESSCGTQSFGLLDPKLCYLLDGILFIYGVILTALFLRVKFSRSADAPAYQQGQNQLYNELNLGRREEYDVLDKRRGRDPEMGGKPQRRKNPQEGLYNELQKDKMAEAYSEIGMKGERRRGKGHDGLYQGLSTATKDTYDALHMQALPPRRAKRSGSGVKQTLNFDLLKLAGDVESNPGPSRGHMTEYKPTVRLATRDDVPRAVRTLAAAFADYPATRHTVDPDRHIERVTELQELFLTRVGLDIGKVWVADDGAAVAVWTTPESVEAGAVFAEIGPRMAELSGSRLAAQQQMEGLLAPHRPKEPAWFLATVGVSPDHQGKGLGSAVVLPGVEAAERAGVPAFLETSAPRNLPFYERLGFTVTADVEVPEGPRTWCMTRKPGA

SEQ ID NO: 9367 - protein, 826 aa, synthetic construct
MALPVTALLLPLALLLHAARPEFNAGVTQTPKFQVLKTGQSMTLQCAQDMNHEYMSWYRQDPGMGLRLIHYSVAIQTTDQGEVPNGYNVSRSTIEDFPLRLLSAAPSQTSVYFCASSYLGNTGELFFGEGSRLTVLEDLKNVFPPEVAVFEPSEAEISHTQKATLVCLATGFYPDHVELSWWVNGKEVHSGVSTDPQPLKEQPALNDSRYCLSSRLRVSATFWQNPRNHFRCQVQFYGLSENDEWTQDRAKPVTQIVSAEAWGRADCGSQSFGLLDPKLCYLLDGILFIYGVILTALFLRVKFSRSADAPAYQQGQNQLYNELNLGRREEYDVLDKRRGRDPEMGGKPQRRKNPQEGLYNELQKDKMAEAYSEIGMKGERRRGKGHDGLYQGLSTATKDTYDALHMQALPPRRAKRSGSGATNFSLLKQAGDVEENPGPTSMDWIWRILFLVGAATGAHSFEQEVTQIPAALSVPEGENLVLNCSFTDSAIYNLQWFRQDPGKGLTSLLLIQSSQREQTSGRLNASLDKSSGRSTLYIAASQPGDSATYLCAVRPTSGGSYIPTFGRGTSLIVHPYTRASTKGPSVFPLAPCSRSTSESTAALGCLVKDYFPEPVTVSWNSGALTSGVHTFPAVLQSSGLYSLSSVVTVPSSSLGTKTYTCNVDHKPSNTKVDKRVESKYGGTQSFGLLDPKLCYLLDGILFIYGVILTALFLRVKFSRSADAPAYQQGQNQLYNELNLGRREEYDVLDKRRGRDPEMGGKPQRRKNPQEGLYNELQKDKMAEAYSEIGMKGERRRGKGHDGLYQGLSTATKDTYDALHMQALPPR

SEQ ID NO: 9368 - protein, 742 aa, synthetic construct
MALPVTALLLPLALLLHAARPEFNAGVTQTPKFQVLKTGQSMTLQCAQDMNHEYMSWYRQDPGMGLRLIHYSVAIQTTDQGEVPNGYNVSRSTIEDFPLRLLSAAPSQTSVYFCASSYLGNTGELFFGEGSRLTVLEDLKNVFPPEVAVFEPSEAEISHTQKATLVCLATGFYPDHVELSWWVNGKEVHSGVSTDPQPLKEQPALNDSRYCLSSRLRVSATFWQNPRNHFRCQVQFYGLSENDEWTQDRAKPVTQIVSAEAWGRADCGSQSFGLLDPKLCYLLDGILFIYGVILTALFLRVKFSRSADAPAYQQGQNQLYNELNLGRREEYDVLDKRRGRDPEMGGKPQRRKNPQEGLYNELQKDKMAEAYSEIGMKGERRRGKGHDGLYQGLSTATKDTYDALHMQALPPRRAKRSGSGATNFSLLKQAGDVEENPGPTSMDWIWRILFLVGAATGAHSFEQEVTQIPAALSVPEGENLVLNCSFTDSAIYNLQWFRQDPGKGLTSLLLIQSSQREQTSGRLNASLDKSSGRSTLYIAASQPGDSATYLCAVRPTSGGSYIPTFGRGTSLIVHPYTRIQNPDPAVYQLRDSKSSDKSVCLFTDFDSQTNVSQSKDSDVYITDKTVLDMRSMDFKSNSAVAWSNKSDFACANAFNNSIIPEDTFFPSPESSCGTLGEPQLCYILDAILFLYGIVLTLLYCRLKIQVRKAAITSYEKSDGVYTGLSTRNQETYETLKHEKPPQ

SEQ ID NO: 9369 - protein, 751 aa, synthetic construct; identical to SEQ ID NO: 9363

SEQ ID NO: 9370 - protein, 1170 aa, synthetic construct
MALPVTALLLPLALLLHAARPEFNAGVTQTPKFQVLKTGQSMTLQCAQDMNHEYMSWYRQDPGMGLRLIHYSVAIQTTDQGEVPNGYNVSRSTIEDFPLRLLSAAPSQTSVYFCASSYLGNTGELFFGEGSRLTVLEDLKNVFPPEVAVFEPSEAEISHTQKATLVCLATGFYPDHVELSWWVNGKEVHSGVSTDPQPLKEQPALNDSRYCLSSRLRVSATFWQNPRNHFRCQVQFYGLSENDEWTQDRAKPVTQIVSAEAWGRADCGSQSFGLLDPKLSYLLDGILFIYGVILTALFLWRRKRKEKQSETSPKEFLTIYEDVKDLKTRRNHEQEQTFPGGGSTIYSMIQSQSSAPTSQEPAYTLYSLIQPSRKSGSRKRNHSPSFNSTIYEVIGKSQPKAQNPARLSRKELENFDVYSTSRVKFSRSADAPAYQQGQNQLYNELNLGRREEYDVLDKRRGRDPEMGGKPQRRKNPQEGLYNELQKDKMAEAYSEIGMKGERRRGKGHDGLYQGLSTATKDTYDALHMQALPPRRAKRSGSGATNFSLLKQAGDVEENPGPMDWIWRILFLVGAATGAHSFEQEVTQIPAALSVPEGENLVLNCSFTDSAIYNLQWFRQDPGKGLTSLLLIQSSQREQTSGRLNASLDKSSGRSTLYIAASQPGDSATYLCAVRPTSGGSYIPTFGRGTSLIVHPYTRIQNPDPAVYQLRDSKSSDKSVCLFTDFDSQTNVSQSKDSDVYITDKTVLDMRSMDFKSNSAVAWSNKSDFACANAFNNSIIPEDTFFPSPESSCGTQSFGLLDPKLCYLLDGILFIYGVILTALFLRVKFSRSADAPAYQQGQNQLYNELNLGRREEYDVLDKRRGRDPEMGGKPQRRKNPQEGLYNELQKDKMAEAYSEIGMKGERRRGKGHDGLYQGLSTATKDTYDALHMQALPPRRAKRSGSGVKQTLNFDLLKLAGDVESNPGPSRGHMTEYKPTVRLATRDDVPRAVRTLAAAFADYPATRHTVDPDRHIERVTELQELFLTRVGLDIGKVWVADDGAAVAVWTTPESVEAGAVFAEIGPRMAELSGSRLAAQQQMEGLLAPHRPKEPAWFLATVGVSPDHQGKGLGSAVVLPGVEAAERAGVPAFLETSAPRNLPFYERLGFTVTADVEVPEGPRTWCMTRKPGA

SEQ ID NO: 9371 - protein, 983 aa, synthetic construct
MALPVTALLLPLALLLHAARPEFNAGVTQTPKFQVLKTGQSMTLQCAQDMNHEYMSWYRQDPGMGLRLIHYSVAIQTTDQGEVPNGYNVSRSTIEDFPLRLLSAAPSQTSVYFCASSYLGNTGELFFGEGSRLTVLEDLKNVFPPEVAVFEPSEAEISHTQKATLVCLATGFYPDHVELSWWVNGKEVHSGVSTDPQPLKEQPALNDSRYCLSSRLRVSATFWQNPRNHFRCQVQFYGLSENDEWTQDRAKPVTQIVSAEAWGRADCGSQSFGLLDPKLCYLLDGILFIYGVILTALFLRVKFSRSADAPAYQQGQNQLYNELNLGRREEYDVLDKRRGRDPEMGGKPQRRKNPQEGLYNELQKDKMAEAYSEIGMKGERRRGKGHDGLYQGLSTATKDTYDALHMQALPPRRAKRSGSGATNFSLLKQAGDVEENPGPTSMDWIWRILFLVGAATGAHSFEQEVTQIPAALSVPEGENLVLNCSFTDSAIYNLQWFRQDPGKGLTSLLLIQSSQREQTSGRLNASLDKSSGRSTLYIAASQPGDSATYLCAVRPTSGGSYIPTFGRGTSLIVHPYTRIQNPDPAVYQLRDSKSSDKSVCLFTDFDSQTNVSQSKDSDVYITDKTVLDMRSMDFKSNSAVAWSNKSDFACANAFNNSIIPEDTFFPSPESSCGTVVEKEHPQLGAGTVLLLRAGFYAVSFLSVAVGSTVYYQGKCLTWKGPRRQLPAVVPAPLPPPCGSSAHLLPPVPGGRAKRSGSGVKQTLNFDLLKLAGDVESNPGPSRGHMTEYKPTVRLATRDDVPRAVRTLAAAFADYPATRHTVDPDRHIERVTELQELFLTRVGLDIGKVWVADDGAAVAVWTTPESVEAGAVFAEIGPRMAELSGSRLAAQQQMEGLLAPHRPKEPAWFLATVGVSPDHQGKGLGSAVVLPGVEAAERAGVPAFLETSAPRNLPFYERLGFTVTADVEVPEGPRTWCMTRKPGA

SEQ ID NO: 9372 - protein, 969 aa, synthetic construct
MALPVTALLLPLALLLHAARPEFNAGVTQTPKFQVLKTGQSMTLQCAQDMNHEYMSWYRQDPGMGLRLIHYSVAIQTTDQGEVPNGYNVSRSTIEDFPLRLLSAAPSQTSVYFCASSYLGNTGELFFGEGSRLTVLEDLKNVFPPEVAVFEPSEAEISHTQKATLVCLATGFYPDHVELSWWVNGKEVHSGVSTDPQPLKEQPALNDSRYCLSSRLRVSATFWQNPRNHFRCQVQFYGLSENDEWTQDRAKPVTQIVSAEAWGRADCGSQSFGLLDPKLCYLLDGILFIYGVILTALFLRVKFSRSADAPAYQQGQNQLYNELNLGRREEYDVLDKRRGRDPEMGGKPQRRKNPQEGLYNELQKDKMAEAYSEIGMKGERRRGKGHDGLYQGLSTATKDTYDALHMQALPPRRAKRSGSGATNFSLLKQAGDVEENPGPTSMDWIWRILFLVGAATGAHSFEQEVTQIPAALSVPEGENLVLNCSFTDSAIYNLQWFRQDPGKGLTSLLLIQSSQREQTSGRLNASLDKSSGRSTLYIAASQPGDSATYLCAVRPTSGGSYIPTFGRGTSLIVHPYTRIQNPDPAVYQLRDSKSSDKSVCLFTDFDSQTNVSQSKDSDVYITDKTVLDMRSMDFKSNSAVAWSNKSDFACANAFNNSIIPEDTFFPSPESSCGTITQGLAVSTISSFFPPGYQVSFCLVMVLLFAVDTGLYFSVKTNIRSSTRDWKDHKFKWRKDPQDKRAKRSGSGATNFSLLKQAGDVEENPGPSRGHMTEYKPTVRLATRDDVPRAVRTLAAAFADYPATRHTVDPDRHIERVTELQELFLTRVGLDIGKVWVADDGAAVAVWTTPESVEAGAVFAEIGPRMAELSGSRLAAQQQMEGLLAPHRPKEPAWFLATVGVSPDHQGKGLGSAVVLPGVEAAERAGVPAFLETSAPRNLPFYERLGFTVTADVEVPEGPRTWCMTRKPGA

SEQ ID NO: 9373 - protein, 688 aa, synthetic construct
MALPVTALLLPLALLLHAARPDIQMTQSPSSLSASVGDRVTITCKASDHINNWLAWYQQKPGQAPKLLIYGATTLETGVPSRFSGSGSGTDYTLTISSLQPEDFATYYCQQSWNTPWTFGQGTKLEIKRGGGGSGGGGSGGGGSQVQLQQPGAELVKPGASVKMSCKASGYAFSSYWINWMKQKPGQGLEWIGQIYPGDGDTNYNGKFKGRATLTADTSSSTAYMQLSSLTSEDSAVYFCARSITTVVGCAMDYWGQGTSVTVSSGTTTPGERSSLPAFYPGTSGSCSGCGSLSLPLLAGLVAADAVASLLIVGAVFLCARPRRSPAQEDGKVYINMPGRGSSRRVKFSRSADAPAYQQGQNQLYNELNLGRREEYDVLDKRRGRDPEMGGKPQRRKNPQEGLYNELQKDKMAEAYSEIGMKGERRRGKGHDGLYQGLSTATKDTYDALHMQALPPRRAKRSGSGVKQTLNFDLLKLAGDVESNPGPGHMTEYKPTVRLATRDDVPRAVRTLAAAFADYPATRHTVDPDRHIERVTELQELFLTRVGLDIGKVWVADDGAAVAVWTTPESVEAGAVFAEIGPRMAELSGSRLAAQQQMEGLLAPHRPKEPAWFLATVGVSPDHQGKGLGSAVVLPGVEAAERAGVPAFLETSAPRNLPFYERLGFTVTADVEVPEGPRTWCMTRKPGA

SEQ ID NO: 9374 - protein, 787 aa, synthetic construct
MALPVTALLLPLALLLHAARPDIQMTQSPSSLSASVGDRVTITCKASDHINNWLAWYQQKPGQAPKLLIYGATTLETGVPSRFSGSGSGTDYTLTISSLQPEDFATYYCQQSWNTPWTFGQGTKLEIKRLEDLKNVFPPEVAVFEPSEAEISHTQKATLVCLATGFYPDHVELSWWVNGKEVHSGVSTDPQPLKEQPALNDSRYCLSSRLRVSATFWQNPRNHFRCQVQFYGLSENDEWTQDRAKPVTQIVSAEAWGRADCGSQSFGLLDPKLCYLLDGILFIYGVILTALFLRVKFSRSADAPAYQQGQNQLYNELNLGRREEYDVLDKRRGRDPEMGGKPQRRKNPQEGLYNELQKDKMAEAYSEIGMKGERRRGKGHDGLYQGLSTATKDTYDALHMQALPPRRAKRSGSGATNFSLLKQAGDVEENPGPTSMDWIWRILFLVGAATGAHSFEQVQLQQPGAELVKPGASVKMSCKASGYAFSSYWINWMKQKPGQGLEWIGQIYPGDGDTNYNGKFKGRATLTADTSSSTAYMQLSSLTSEDSAVYFCARSITTVVGCAMDYWGQGTSVTVSSTRIQNPDPAVYQLRDSKSSDKSVCLFTDFDSQTNVSQSKDSDVYITDKTVLDMRSMDFKSNSAVAWSNKSDFACANAFNNSIIPEDTFFPSPESSCGTMCQNCIELNAATISGFLFAEIVSIFVLAVGVYFIAGQDGVRQSRASDKQTLLPNDQLYQPLKDREDDQYSHLQGNQLRRNRAKRSGSGVKQTLNFDLLKLAGDVESNPGPSR

SEQ ID NO: 9375 - protein, 615 aa, synthetic construct
MALPVTALLLPLALLLHAARPDIQMTQSPSSLSASVGDRVTITCKASQDVGTAVDWYQQKPGKAPKLLIYWASTRHTGVPSRFSGSGSGTDFTLTISSLQPEDFATYYCQQYNSYPLTFGQGTKVEIKRLEDLKNVFPPEVAVFEPSEAEISHTQKATLVCLATGFYPDHVELSWWVNGKEVHSGVCTDPQPLKEQPALNDSRYCLSSRLRVSATFWQNPRNHFRCQVQFYGLSENDEWTQDRAKPVTQIVSAEAWGRADCGFTSESYQQGVLSATILYEILLGKATLYAVLVSALVLMAMVKRKDSRGRAKRSGSGATNFSLLKQAGDVEENPGPTSMDWIWRILFLVGAATGAHSFEVQLVESGGGLVQPGGSLRLSCAASGYTFTEYTIHWVRQAPGKGLEWVANINPNNGGTTYNQKFEDRFTISRDNSKNTLYLQMNSLRAEDTAVYYCARGWNFDYWGQGTLVTVSSTRIQNPDPAVYQLRDSKSSDKFVCLFTDFDSQINVSQSKDSDVYITDKCVLDMRSMDFKSNSAVAWSNKSDFTCANAFNNSIIPEDTFFPSPESSCDVKLVEKSFETDTNLNFQNLSVIGFRILLLKVAGFNLLMTLRLWSS

SEQ ID NO: 9376 - protein, 860 aa, synthetic construct
MALPVTALLLPLALLLHAARPDIQMTQSPSSLSASVGDRVTITCKASDHINNWLAWYQQKPGQAPKLLIYGATTLETGVPSRFSGSGSGTDYTLTISSLQPEDFATYYCQQSWNTPWTFGQGTKLEIKRLEDLKNVFPPEVAVFEPSEAEISHTQKATLVCLATGFYPDHVELSWWVNGKEVHSGVSTDPQPLKEQPALNDSRYCLSSRLRVSATFWQNPRNHFRCQVQFYGLSENDEWTQDRAKPVTQIVSAEAWGRADCGSQSFGLLDPKLCYLLDGILFIYGVILTALFLKRGRKKLLYIFKQPFMRPVQTTQEEDGCSCRFPEEEEGGCELRVKFSRSADAPAYQQGQNQLYNELNLGRREEYDVLDKRRGRDPEMGGKPQRRKNPQEGLYNELQKDKMAEAYSEIGMKGERRRGKGHDGLYQGLSTATKDTYDALHMQALPPRRAKRSGSGATNFSLLKQAGDVEENPGPTSMDWIWRILFLVGAATGAHSFEQVQLQQPGAELVKPGASVKMSCKASGYAFSSYWINWMKQKPGQGLEWIGQIYPGDGDTNYNGKFKGRATLTADTSSSTAYMQLSSLTSEDSAVYFCARSITTVVGCAMDYWGQGTSVTVSSTRIQNPDPAVYQLRDSKSSDKSVCLFTDFDSQTNVSQSKDSDVYITDKTVLDMRSMDFKSNSAVAWSNKSDFACANAFNNSIIPEDTFFPSPESSCGTQSFGLLDPKLCYLLDGILFIYGVILTALFLRVKFSRSADAPAYQQGQNQLYNELNLGRREEYDVLDKRRGRDPEMGGKPQRRKNPQEGLYNELQKDKMAEAYSEIGMKGERRRGKGHDGLYQGLSTATKDTYDALHMQALPPR

SEQ ID NO: 9377 - protein, 859 aa, synthetic construct
MALPVTALLLPLALLLHAARPEFNAGVTQTPKFQVLKTGQSMTLQCAQDMNHEYMSWYRQDPGMGLRLIHYSVAIQTTDQGEVPNGYNVSRSTIEDFPLRLLSAAPSQTSVYFCASSYLGNTGELFFGEGSRLTVLEDLKNVFPPEVAVFEPSEAEISHTQKATLVCLATGFYPDHVELSWWVNGKEVHSGVSTDPQPLKEQPALNDSRYCLSSRLRVSATFWQNPRNHFRCQVQFYGLSENDEWTQDRAKPVTQIVSAEAWGRADCGSQSFGLLDPKLCYLLDGILFIYGVILTALFLKRGRKKLLYIFKQPFMRPVQTTQEEDGCSCRFPEEEEGGCELRVKFSRSADAPAYQQGQNQLYNELNLGRREEYDVLDKRRGRDPEMGGKPQRRKNPQEGLYNELQKDKMAEAYSEIGMKGERRRGKGHDGLYQGLSTATKDTYDALHMQALPPRRAKRSGSGATNFSLLKQAGDVEENPGPTSMDWIWRILFLVGAATGAHSFEQEVTQIPAALSVPEGENLVLNCSFTDSAIYNLQWFRQDPGKGLTSLLLIQSSQREQTSGRLNASLDKSSGRSTLYIAASQPGDSATYLCAVRPTSGGSYIPTFGRGTSLIVHPYTRIQNPDPAVYQLRDSKSSDKSVCLFTDFDSQTNVSQSKDSDVYITDKTVLDMRSMDFKSNSAVAWSNKSDFACANAFNNSIIPEDTFFPSPESSCGTQSFGLLDPKLCYLLDGILFIYGVILTALFLRVKFSRSADAPAYQQGQNQLYNELNLGRREEYDVLDKRRGRDPEMGGKPQRRKNPQEGLYNELQKDKMAEAYSEIGMKGERRRGKGHDGLYQGLSTATKDTYDALHMQALPPR

SEQ ID NO: 9378 - protein, 859 aa, synthetic construct
MALPVTALLLPLALLLHAARPDIQMTQSPSSLSASVGDRVTITCKASDHINNWLAWYQQKPGQAPKLLIYGATTLETGVPSRFSGSGSGTDYTLTISSLQPEDFATYYCQQSWNTPWTFGQGTKLEIKRLEDLKNVFPPEVAVFEPSEAEISHTQKATLVCLATGFYPDHVELSWWVNGKEVHSGVSTDPQPLKEQPALNDSRYCLSSRLRVSATFWQNPRNHFRCQVQFYGLSENDEWTQDRAKPVTQIVSAEAWGRADCGSQSFGLLDPKLCYLLDGILFIYGVILTALFLRSKRSRLLHSDYMNMTPRRPGPTRKHYQPYAPPRDFAAYRSRVKFSRSADAPAYQQGQNQLYNELNLGRREEYDVLDKRRGRDPEMGGKPQRRKNPQEGLYNELQKDKMAEAYSEIGMKGERRRGKGHDGLYQGLSTATKDTYDALHMQALPPRRAKRSGSGATNFSLLKQAGDVEENPGPTSMDWIWRILFLVGAATGAHSFEQVQLQQPGAELVKPGASVKMSCKASGYAFSSYWINWMKQKPGQGLEWIGQIYPGDGDTNYNGKFKGRATLTADTSSSTAYMQLSSLTSEDSAVYFCARSITTVVGCAMDYWGQGTSVTVSSTRIQNPDPAVYQLRDSKSSDKSVCLFTDFDSQTNVSQSKDSDVYITDKTVLDMRSMDFKSNSAVAWSNKSDFACANAFNNSIIPEDTFFPSPESSCGTQSFGLLDPKLCYLLDGILFIYGVILTALFLRVKFSRSADAPAYQQGQNQLYNELNLGRREEYDVLDKRRGRDPEMGGKPQRRKNPQEGLYNELQKDKMAEAYSEIGMKGERRRGKGHDGLYQGLSTATKDTYDALHMQALPPR

SEQ ID NO: 9379 - protein, 818 aa, synthetic construct
MALPVTALLLPLALLLHAARPDIQMTQSPSSLSASVGDRVTITCKASDHINNWLAWYQQKPGQAPKLLIYGATTLETGVPSRFSGSGSGTDYTLTISSLQPEDFATYYCQQSWNTPWTFGQGTKLEIKRLEDLKNVFPPEVAVFEPSEAEISHTQKATLVCLATGFYPDHVELSWWVNGKEVHSGVSTDPQPLKEQPALNDSRYCLSSRLRVSATFWQNPRNHFRCQVQFYGLSENDEWTQDRAKPVTQIVSAEAWGRADCGSQSFGLLDPKLCYLLDGILFIYGVILTALFLRVKFSRSADAPAYQQGQNQLYNELNLGRREEYDVLDKRRGRDPEMGGKPQRRKNPQEGLYNELQKDKMAEAYSEIGMKGERRRGKGHDGLYQGLSTATKDTYDALHMQALPPRRAKRSGSGATNFSLLKQAGDVEENPGPTSMDWIWRILFLVGAATGAHSFEQVQLQQPGAELVKPGASVKMSCKASGYAFSSYWINWMKQKPGQGLEWIGQIYPGDGDTNYNGKFKGRATLTADTSSSTAYMQLSSLTSEDSAVYFCARSITTVVGCAMDYWGQGTSVTVSSTRIQNPDPAVYQLRDSKSSDKSVCLFTDFDSQTNVSQSKDSDVYITDKTVLDMRSMDFKSNSAVAWSNKSDFACANAFNNSIIPEDTFFPSPESSCGTQSFGLLDPKLCYLLDGILFIYGVILTALFLRVKFSRSADAPAYQQGQNQLYNELNLGRREEYDVLDKRRGRDPEMGGKPQRRKNPQEGLYNELQKDKMAEAYSEIGMKGERRRGKGHDGLYQGLSTATKDTYDALHMQALPPR

SEQ ID NO: 9380 - protein, 817 aa, synthetic construct
MALPVTALLLPLALLLHAARPEFNAGVTQTPKFQVLKTGQSMTLQCAQDMNHEYMSWYRQDPGMGLRLIHYSVAIQTTDQGEVPNGYNVSRSTIEDFPLRLLSAAPSQTSVYFCASSYLGNTGELFFGEGSRLTVLEDLKNVFPPEVAVFEPSEAEISHTQKATLVCLATGFYPDHVELSWWVNGKEVHSGVSTDPQPLKEQPALNDSRYCLSSRLRVSATFWQNPRNHFRCQVQFYGLSENDEWTQDRAKPVTQIVSAEAWGRADCGSQSFGLLDPKLCYLLDGILFIYGVILTALFLRVKFSRSADAPAYQQGQNQLYNELNLGRREEYDVLDKRRGRDPEMGGKPQRRKNPQEGLYNELQKDKMAEAYSEIGMKGERRRGKGHDGLYQGLSTATKDTYDALHMQALPPRRAKRSGSGATNFSLLKQAGDVEENPGPTSMDWIWRILFLVGAATGAHSFEQEVTQIPAALSVPEGENLVLNCSFTDSAIYNLQWFRQDPGKGLTSLLLIQSSQREQTSGRLNASLDKSSGRSTLYIAASQPGDSATYLCAVRPTSGGSYIPTFGRGTSLIVHPYTRIQNPDPAVYQLRDSKSSDKSVCLFTDFDSQTNVSQSKDSDVYITDKTVLDMRSMDFKSNSAVAWSNKSDFACANAFNNSIIPEDTFFPSPESSCGTQSFGLLDPKLCYLLDGILFIYGVILTALFLRVKFSRSADAPAYQQGQNQLYNELNLGRREEYDVLDKRRGRDPEMGGKPQRRKNPQEGLYNELQKDKMAEAYSEIGMKGERRRGKGHDGLYQGLSTATKDTYDALHMQALPPR

SEQ ID NO: 9381 - protein, 653 aa, synthetic construct
MALPVTALLLPLALLLHAARPDIQMTQSPSSLSASVGDRVTITCKASDHINNWLAWYQQKPGQAPKLLIYGATTLETGVPSRFSGSGSGTDYTLTISSLQPEDFATYYCQQSWNTPWTFGQGTKLEIKRLEGQPKANPTVTLFPPSSEELQANKATLVCLISDFYPGAVTVAWKADGSPVKAGVETTKPSKQSNNKYAASSYLSLTPEQWKSHRSYSCQVTHEGSTVEKTVAPTECSGSLGEPQLCYILDAILFLYGIVLTLLYCRLKIQVRKAAITSYEKSDGVYTGLSTRNQETYETLKHEKPPQRAKRSGSGATNFSLLKQAGDVEENPGPTSMDWIWRILFLVGAATGAHSFEQVQLQQPGAELVKPGASVKMSCKASGYAFSSYWINWMKQKPGQGLEWIGQIYPGDGDTNYNGKFKGRATLTADTSSSTAYMQLSSLTSEDSAVYFCARSITTVVGCAMDYWGQGTSVTVSSTRASTKGPSVFPLAPSSKSTSGGTAALGCLVKDYFPEPVTVSWNSGALTSGVHTFPAVLQSSGLYSLSSVVTVPSSSLGTQTYICNVNHKPSNTKVDKRVEPKSCGTLGEPQLCYILDAILFLYGIVLTLLYCRLKIQVRKAAITSYEKSDGVYTGLSTRNQETYETLKHEKPPQ

SEQ ID NO: 9382 - protein, 900 aa, synthetic construct
MALPVTALLLPLALLLHAARPDIQMTQSPSSLSASVGDRVTITCKASDHINNWLAWYQQKPGQAPKLLIYGATTLETGVPSRFSGSGSGTDYTLTISSLQPEDFATYYCQQSWNTPWTFGQGTKLEIKRLEDLKNVFPPEVAVFEPSEAEISHTQKATLVCLATGFYPDHVELSWWVNGKEVHSGVSTDPQPLKEQPALNDSRYCLSSRLRVSATFWQNPRNHFRCQVQFYGLSENDEWTQDRAKPVTQIVSAEAWGRADCGSQSFGLLDPKLCYLLDGILFIYGVILTALFLRSKRSRLLHSDYMNMTPRRPGPTRKHYQPYAPPRDFAAYRSRVKFSRSADAPAYQQGQNQLYNELNLGRREEYDVLDKRRGRDPEMGGKPQRRKNPQEGLYNELQKDKMAEAYSEIGMKGERRRGKGHDGLYQGLSTATKDTYDALHMQALPPRRAKRSGSGATNFSLLKQAGDVEENPGPTSMDWIWRILFLVGAATGAHSFEQVQLQQPGAELVKPGASVKMSCKASGYAFSSYWINWMKQKPGQGLEWIGQIYPGDGDTNYNGKFKGRATLTADTSSSTAYMQLSSLTSEDSAVYFCARSITTVVGCAMDYWGQGTSVTVSSTRIQNPDPAVYQLRDSKSSDKSVCLFTDFDSQTNVSQSKDSDVYITDKTVLDMRSMDFKSNSAVAWSNKSDFACANAFNNSIIPEDTFFPSPESSCGTQSFGLLDPKLCYLLDGILFIYGVILTALFLRSKRSRLLHSDYMNMTPRRPGPTRKHYQPYAPPRDFAAYRSRVKFSRSADAPAYQQGQNQLYNELNLGRREEYDVLDKRRGRDPEMGGKPQRRKNPQEGLYNELQKDKMAEAYSEIGMKGERRRGKGHDGLYQGLSTATKDTYDALHMQALPPR

SEQ ID NO: 9383 - protein, 869 aa, synthetic construct
MALPVTALLLPLALLLHAARPDIQMTQSPSSLSASVGDRVTITCKASDHINNWLAWYQQKPGQAPKLLIYGATTLETGVPSRFSGSGSGTDYTLTISSLQPEDFATYYCQQSWNTPWTFGQGTKLEIKRLEDLKNVFPPEVAVFEPSEAEISHTQKATLVCLATGFYPDHVELSWWVNGKEVHSGVSTDPQPLKEQPALNDSRYCLSSRLRVSATFWQNPRNHFRCQVQFYGLSENDEWTQDRAKPVTQIVSAEAWGRADCGSQSFGLLDPKLCYLLDGILFIYGVILTALFLKRGRKKLLYIFKQPFMRPVQTTQEEDGCSCRFPEEEEGGCELRVKFSRSADAPAYQQGQNQLYNELNLGRREEYDVLDKRRGRDPEMGGKPQRRKNPQEGLYNELQKDKMAEAYSEIGMKGERRRGKGHDGLYQGLSTATKDTYDALHMQALPPRRAKRSGSGATNFSLLKQAGDVEENPGPTSMDWIWRILFLVGAATGAHSFEQVQLQQPGAELVKPGASVKMSCKASGYAFSSYWINWMKQKPGQGLEWIGQIYPGDGDTNYNGKFKGRATLTADTSSSTAYMQLSSLTSEDSAVYFCARSITTVVGCAMDYWGQGTSVTVSSTRIQNPDPAVYQLRDSKSSDKSVCLFTDFDSQTNVSQSKDSDVYITDKTVLDMRSMDFKSNSAVAWSNKSDFACANAFNNSIIPEDTFFPSPESSCGTQSFGLLDPKLSYLLDGILFIYGVILTALFLWRRKRKEKQSETSPKEFLTIYEDVKDLKTRRNHEQEQTFPGGGSTIYSMIQSQSSAPTSQEPAYTLYSLIQPSRKSGSRKRNHSPSFNSTIYEVIGKSQPKAQNPARLSRKELENFDVYSSR

SEQ ID NO: 9384 - protein, 868 aa, synthetic construct
MALPVTALLLPLALLLHAARPDIQMTQSPSSLSASVGDRVTITCKASDHINNWLAWYQQKPGQAPKLLIYGATTLETGVPSRFSGSGSGTDYTLTISSLQPEDFATYYCQQSWNTPWTFGQGTKLEIKRLEDLKNVFPPEVAVFEPSEAEISHTQKATLVCLATGFYPDHVELSWWVNGKEVHSGVSTDPQPLKEQPALNDSRYCLSSRLRVSATFWQNPRNHFRCQVQFYGLSENDEWTQDRAKPVTQIVSAEAWGRADCGSQSFGLLDPKLCYLLDGILFIYGVILTALFLRSKRSRLLHSDYMNMTPRRPGPTRKHYQPYAPPRDFAAYRSRVKFSRSADAPAYQQGQNQLYNELNLGRREEYDVLDKRRGRDPEMGGKPQRRKNPQEGLYNELQKDKMAEAYSEIGMKGERRRGKGHDGLYQGLSTATKDTYDALHMQALPPRRAKRSGSGATNFSLLKQAGDVEENPGPTSMDWIWRILFLVGAATGAHSFEQVQLQQPGAELVKPGASVKMSCKASGYAFSSYWINWMKQKPGQGLEWIGQIYPGDGDTNYNGKFKGRATLTADTSSSTAYMQLSSLTSEDSAVYFCARSITTVVGCAMDYWGQGTSVTVSSTRIQNPDPAVYQLRDSKSSDKSVCLFTDFDSQTNVSQSKDSDVYITDKTVLDMRSMDFKSNSAVAWSNKSDFACANAFNNSIIPEDTFFPSPESSCGTQSFGLLDPKLSYLLDGILFIYGVILTALFLWRRKRKEKQSETSPKEFLTIYEDVKDLKTRRNHEQEQTFPGGGSTIYSMIQSQSSAPTSQEPAYTLYSLIQPSRKSGSRKRNHSPSFNSTIYEVIGKSQPKAQNPARLSRKELENFDVYSSR

SEQ ID NO: 9385 - protein, 1042 aa, synthetic construct
MALPVTALLLPLALLLHAARPGVTQTPKFQVLKTGQSMTLQCAQDMNHEYMSWYRQDPGMGLRLIHYSVAIQTTDQGEVPNGYNVSRSTIEDFPLRLLSAAPSQTSVYFCASSYVGDTGELFFGEGSRLTVLEDLKNVFPPEVAVFEPSKAEISRTQKATLVCLATGFYPPHVELSWWVNGKEVHDGVCTDPQPLKEQPALNDSRYCLSSRLRVSATFWQNPRNHFRCQVQFYGLSENDEWTQDRAKPVTQIVSAEAWGRADCGSQSFGLLDPKLCYLLDGILFIYGVILTALFLRVKFSRSADAPAYQQGQNQLYNELNLGRREEYDVLDKRRGRDPEMGGKPQRRKNPQEGLYNELQKDKMAEAYSEIGMKGERRRGKGHDGLYQGLSTATKDTYDALHMQALPPRRAKRSGSGATNFSLLKQAGDVEENPGPTSMDWIWRILFLVGAATGAHSQEVTQIPAALSVPEGENLVLNCSFTDSAIYNLQWFRQDPGKGLTSLLLISPWQREQTSGRLNASLDKSSGRSTLYIAASQPGDSATYLCAVRPLLDGTYIPTFGRGTSLIVHPYIQNPDPAVYQLRDSKSSDKFVCLFTDFDSQINVSQSKDSDVYITDKCVLDMRSMDFKSNSAVAWSNKSDFTCANAFNNSIIPEDTFFPSPESSCGTQSFGLLDPKLCYLLDGILFIYGVILTALFLRVKFSRSADAPAYQQGQNQLYNELNLGRREEYDVLDKRRGRDPEMGGKPQRRKNPQEGLYNELQKDKMAEAYSEIGMKGERRRGKGHDGLYQGLSTATKDTYDALHMQALPPRRAKRSGSGVKQTLNFDLLKLAGDVESNPGPSRGHMTEYKPTVRLATRDDVPRAVRTLAAAFADYPATRHTVDPDRHIERVTELQELFLTRVGLDIGKVWVADDGAAVAVWTTPESVEAGAVFAEIGPRMAELSGSRLAAQQQMEGLLAPHRPKEPAWFLATVGVSPDHQGKGLGSAVVLPGVEAAERAGVPAFLETSAPRNLPFYERLGFTVTADVEVPEGPRTWCMTRKPGA

SEQ ID NO: 9386 - protein, 789 aa, synthetic construct
MALPVTALLLPLALLLHAARPDIQMTQSPSSLSASVGDRVTITCKASDHINNWLAWYQQKPGQAPKLLIYGATTLETGVPSRFSGSGSGTDYTLTISSLQPEDFATYYCQQSWNTPWTFGQGTKLEIKRLEDLKNVFPPEVAVFEPSEAEISHTQKATLVCLATGFYPDHVELSWWVNGKEVHSGVSTDPQPLKEQPALNDSRYCLSSRLRVSATFWQNPRNHFRCQVQFYGLSENDEWTQDRAKPVTQIVSAEAWGRADCGSQSFGLLDPKLCYLLDGILFIYGVILTALFLKRGRKKLLYIFKQPFMRPVQTTQEEDGCSCRFPEEEEGGCELRVKFSRSADAPAYQQGQNQLYNELNLGRREEYDVLDKRRGRDPEMGGKPQRRKNPQEGLYNELQKDKMAEAYSEIGMKGERRRGKGHDGLYQGLSTATKDTYDALHMQALPPRRAKRSGSGATNFSLLKQAGDVEENPGPTSMDWIWRILFLVGAATGAHSFEQVQLQQPGAELVKPGASVKMSCKASGYAFSSYWINWMKQKPGQGLEWIGQIYPGDGDTNYNGKFKGRATLTADTSSSTAYMQLSSLTSEDSAVYFCARSITTVVGCAMDYWGQGTSVTVSSTRIQNPDPAVYQLRDSKSSDKSVCLFTDFDSQTNVSQSKDSDVYITDKTVLDMRSMDFKSNSAVAWSNKSDFACANAFNNSIIPEDTFFPSPESSCGTQSFGLLDPKLCYLLDGILFIYGVILTALFLKRGRKKLLYIFKQPFMRPVQTTQEEDGCSCRFPEEEEGGCEL

SEQ ID NO: 9387 - protein, 788 aa, synthetic construct
MALPVTALLLPLALLLHAARPDIQMTQSPSSLSASVGDRVTITCKASDHINNWLAWYQQKPGQAPKLLIYGATTLETGVPSRFSGSGSGTDYTLTISSLQPEDFATYYCQQSWNTPWTFGQGTKLEIKRLEDLKNVFPPEVAVFEPSEAEISHTQKATLVCLATGFYPDHVELSWWVNGKEVHSGVSTDPQPLKEQPALNDSRYCLSSRLRVSATFWQNPRNHFRCQVQFYGLSENDEWTQDRAKPVTQIVSAEAWGRADCGSQSFGLLDPKLCYLLDGILFIYGVILTALFLRSKRSRLLHSDYMNMTPRRPGPTRKHYQPYAPPRDFAAYRSRVKFSRSADAPAYQQGQNQLYNELNLGRREEYDVLDKRRGRDPEMGGKPQRRKNPQEGLYNELQKDKMAEAYSEIGMKGERRRGKGHDGLYQGLSTATKDTYDALHMQALPPRRAKRSGSGATNFSLLKQAGDVEENPGPTSMDWIWRILFLVGAATGAHSFEQVQLQQPGAELVKPGASVKMSCKASGYAFSSYWINWMKQKPGQGLEWIGQIYPGDGDTNYNGKFKGRATLTADTSSSTAYMQLSSLTSEDSAVYFCARSITTVVGCAMDYWGQGTSVTVSSTRIQNPDPAVYQLRDSKSSDKSVCLFTDFDSQTNVSQSKDSDVYITDKTVLDMRSMDFKSNSAVAWSNKSDFACANAFNNSIIPEDTFFPSPESSCGTQSFGLLDPKLCYLLDGILFIYGVILTALFLKRGRKKLLYIFKQPFMRPVQTTQEEDGCSCRFPEEEEGGCEL

SEQ ID NO: 9388 - protein, 787 aa, synthetic construct
MALPVTALLLPLALLLHAARPDIQMTQSPSSLSASVGDRVTITCKASDHINNWLAWYQQKPGQAPKLLIYGATTLETGVPSRFSGSGSGTDYTLTISSLQPEDFATYYCQQSWNTPWTFGQGTKLEIKRLEDLKNVFPPEVAVFEPSEAEISHTQKATLVCLATGFYPDHVELSWWVNGKEVHSGVSTDPQPLKEQPALNDSRYCLSSRLRVSATFWQNPRNHFRCQVQFYGLSENDEWTQDRAKPVTQIVSAEAWGRADCGSQSFGLLDPKLCYLLDGILFIYGVILTALFLRSKRSRLLHSDYMNMTPRRPGPTRKHYQPYAPPRDFAAYRSRVKFSRSADAPAYQQGQNQLYNELNLGRREEYDVLDKRRGRDPEMGGKPQRRKNPQEGLYNELQKDKMAEAYSEIGMKGERRRGKGHDGLYQGLSTATKDTYDALHMQALPPRRAKRSGSGATNFSLLKQAGDVEENPGPTSMDWIWRILFLVGAATGAHSFEQVQLQQPGAELVKPGASVKMSCKASGYAFSSYWINWMKQKPGQGLEWIGQIYPGDGDTNYNGKFKGRATLTADTSSSTAYMQLSSLTSEDSAVYFCARSITTVVGCAMDYWGQGTSVTVSSTRIQNPDPAVYQLRDSKSSDKSVCLFTDFDSQTNVSQSKDSDVYITDKTVLDMRSMDFKSNSAVAWSNKSDFACANAFNNSIIPEDTFFPSPESSCGTQSFGLLDPKLCYLLDGILFIYGVILTALFLRSKRSRLLHSDYMNMTPRRPGPTRKHYQPYAPPRDFAAYRS

SEQ ID NO: 9389 - protein, 786 aa, synthetic construct
MALPVTALLLPLALLLHAARPEFNAGVTQTPKFQVLKTGQSMTLQCAQDMNHEYMSWYRQDPGMGLRLIHYSVAIQTTDQGEVPNGYNVSRSTIEDFPLRLLSAAPSQTSVYFCASSYLGNTGELFFGEGSRLTVLEDLKNVFPPEVAVFEPSEAEISHTQKATLVCLATGFYPDHVELSWWVNGKEVHSGVSTDPQPLKEQPALNDSRYCLSSRLRVSATFWQNPRNHFRCQVQFYGLSENDEWTQDRAKPVTQIVSAEAWGRADCGSQSFGLLDPKLCYLLDGILFIYGVILTALFLRSKRSRLLHSDYMNMTPRRPGPTRKHYQPYAPPRDFAAYRSRVKFSRSADAPAYQQGQNQLYNELNLGRREEYDVLDKRRGRDPEMGGKPQRRKNPQEGLYNELQKDKMAEAYSEIGMKGERRRGKGHDGLYQGLSTATKDTYDALHMQALPPRRAKRSGSGATNFSLLKQAGDVEENPGPTSMDWIWRILFLVGAATGAHSFEQEVTQIPAALSVPEGENLVLNCSFTDSAIYNLQWFRQDPGKGLTSLLLIQSSQREQTSGRLNASLDKSSGRSTLYIAASQPGDSATYLCAVRPTSGGSYIPTFGRGTSLIVHPYTRIQNPDPAVYQLRDSKSSDKSVCLFTDFDSQTNVSQSKDSDVYITDKTVLDMRSMDFKSNSAVAWSNKSDFACANAFNNSIIPEDTFFPSPESSCGTQSFGLLDPKLCYLLDGILFIYGVILTALFLRSKRSRLLHSDYMNMTPRRPGPTRKHYQPYAPPRDFAAYRS

SEQ ID NO: 9390 - protein, 788 aa, synthetic construct
MALPVTALLLPLALLLHAARPDIQMTQSPSSLSASVGDRVTITCKASDHINNWLAWYQQKPGQAPKLLIYGATTLETGVPSRFSGSGSGTDYTLTISSLQPEDFATYYCQQSWNTPWTFGQGTKLEIKRLEDLKNVFPPEVAVFEPSEAEISHTQKATLVCLATGFYPDHVELSWWVNGKEVHSGVSTDPQPLKEQPALNDSRYCLSSRLRVSATFWQNPRNHFRCQVQFYGLSENDEWTQDRAKPVTQIVSAEAWGRADCGSQSFGLLDPKLCYLLDGILFIYGVILTALFLKRGRKKLLYIFKQPFMRPVQTTQEEDGCSCRFPEEEEGGCELRVKFSRSADAPAYQQGQNQLYNELNLGRREEYDVLDKRRGRDPEMGGKPQRRKNPQEGLYNELQKDKMAEAYSEIGMKGERRRGKGHDGLYQGLSTATKDTYDALHMQALPPRRAKRSGSGATNFSLLKQAGDVEENPGPTSMDWIWRILFLVGAATGAHSFEQVQLQQPGAELVKPGASVKMSCKASGYAFSSYWINWMKQKPGQGLEWIGQIYPGDGDTNYNGKFKGRATLTADTSSSTAYMQLSSLTSEDSAVYFCARSITTVVGCAMDYWGQGTSVTVSSTRIQNPDPAVYQLRDSKSSDKSVCLFTDFDSQTNVSQSKDSDVYITDKTVLDMRSMDFKSNSAVAWSNKSDFACANAFNNSIIPEDTFFPSPESSCGTQSFGLLDPKLCYLLDGILFIYGVILTALFLRSKRSRLLHSDYMNMTPRRPGPTRKHYQPYAPPRDFAAYRS

SEQ ID NO: 9391 - protein, 787 aa, synthetic construct
MALPVTALLLPLALLLHAARPEFNAGVTQTPKFQVLKTGQSMTLQCAQDMNHEYMSWYRQDPGMGLRLIHYSVAIQTTDQGEVPNGYNVSRSTIEDFPLRLLSAAPSQTSVYFCASSYLGNTGELFFGEGSRLTVLEDLKNVFPPEVAVFEPSEAEISHTQKATLVCLATGFYPDHVELSWWVNGKEVHSGVSTDPQPLKEQPALNDSRYCLSSRLRVSATFWQNPRNHFRCQVQFYGLSENDEWTQDRAKPVTQIVSAEAWGRADCGSQSFGLLDPKLCYLLDGILFIYGVILTALFLKRGRKKLLYIFKQPFMRPVQTTQEEDGCSCRFPEEEEGGCELRVKFSRSADAPAYQQGQNQLYNELNLGRREEYDVLDKRRGRDPEMGGKPQRRKNPQEGLYNELQKDKMAEAYSEIGMKGERRRGKGHDGLYQGLSTATKDTYDALHMQALPPRRAKRSGSGATNFSLLKQAGDVEENPGPTSMDWIWRILFLVGAATGAHSFEQEVTQIPAALSVPEGENLVLNCSFTDSAIYNLQWFRQDPGKGLTSLLLIQSSQREQTSGRLNASLDKSSGRSTLYIAASQPGDSATYLCAVRPTSGGSYIPTFGRGTSLIVHPYTRIQNPDPAVYQLRDSKSSDKSVCLFTDFDSQTNVSQSKDSDVYITDKTVLDMRSMDFKSNSAVAWSNKSDFACANAFNNSIIPEDTFFPSPESSCGTQSFGLLDPKLCYLLDGILFIYGVILTALFLRSKRSRLLHSDYMNMTPRRPGPTRKHYQPYAPPRDFAAYRS

SEQ ID NO: 9392 - protein, 1131 aa, synthetic construct
MALPVTALLLPLALLLHAARPDIQMTQSPSSLSASVGDRVTITCKASDHINNWLAWYQQKPGQAPKLLIYGATTLETGVPSRFSGSGSGTDYTLTISSLQPEDFATYYCQQSWNTPWTFGQGTKLEIKRLEDLKNVFPPEVAVFEPSEAEISHTQKATLVCLATGFYPDHVELSWWVNGKEVHSGVSTDPQPLKEQPALNDSRYCLSSRLRVSATFWQNPRNHFRCQVQFYGLSENDEWTQDRAKPVTQIVSAEAWGRADCGSQSFGLLDPKLCYLLDGILFIYGVILTALFLRVRFSRSADAPAYQQGQNQLYNELNLGRREEYDVLDRRRGRDPEMGGKPQRRRNPQEGLYNELQRDRMAEAYSEIGMRGERRRGKGHDGLYQGLSTATRDTYDALHMQALPPREFGGSGFNVLMVHRRSHTGERPFQCNQCGASFTQRGNLLRHIRLHTGERPFRCHLCNYACQRRDALTASAEARHIRAEMGRAKRSGSGATNFSLLKQAGDVEENPGPTSMDWIWRILFLVGAATGAHSFEQVQLQQPGAELVKPGASVKMSCKASGYAFSSYWINWMKQKPGQGLEWIGQIYPGDGDTNYNGKFKGRATLTADTSSSTAYMQLSSLTSEDSAVYFCARSITTVVGCAMDYWGQGTSVTVSSTRIQNPDPAVYQLRDSKSSDKSVCLFTDFDSQTNVSQSKDSDVYITDKTVLDMRSMDFKSNSAVAWSNKSDFACANAFNNSIIPEDTFFPSPESSCGTQSFGLLDPKLCYLLDGILFIYGVILTALFLRVKFSRSADAPAYQQGQNQLYNELNLGRREEYDVLDKRRGRDPEMGGKPQRRKNPQEGLYNELQKDKMAEAYSEIGMKGERRRGKGHDGLYQGLSTATKDTYDALHMQALPPRRAKRSGSGVKQTLNFDLLKLAGDVESNPGPSRGHMTEYKPTVRLATRDDVPRAVRTLAAAFADYPATRHTVDPDRHIERVTELQELFLTRVGLDIGKVWVADDGAAVAVWTTPESVEAGAVFAEIGPRMAELSGSRLAAQQQMEGLLAPHRPKEPAWFLATVGVSPDHQGKGLGSAVVLPGVEAAERAGVPAFLETSAPRNLPFYERLGFTVTADVEVPEGPRTWCMTRKPGA

SEQ ID NO: 9393 - protein, 497 aa, synthetic construct
MALPVTALLLPLALLLHAARPEVQLVQSGAEVKKPGESLKISCKGSGYGFTSYWIGWVRQMPGKGLEWMGIIHPDDSDTKYSPSFQGQVTISADKSISTAYLQWSSLKASDTAMYYCASSYLRGLWGGYFDFWGQGTLVTVSSGGGGSGGGGSGGGGSELQSVLTQPPSASGTPGQRVTISCSGSSSNIGSNYVNWYQQLPGTAPKLLIYGDYQRPSGVPDRFSGSKSGTSASLAISGLRSEDEADYYCATRDDSLSGSVVFGTGTKLTVLGTRTTTPAPRPPTPAPTIASQPLSLRPEACRPAAGGAVHTRGLDFACDIYIWAPLAGTCGVLLLSLVITLYCKRGRKKLLYIFKQPFMRPVQTTQEEDGCSCRFPEEEEGGCELRVKFSRSADAPAYQQGQNQLYNELNLGRREEYDVLDKRRGRDPEMGGKPRRKNPQEGLYNELQKDKMAEAYSEIGMKGERRRGKGHDGLYQGLSTATKDTYDALHMQALPPR

SEQ ID NO: 9394 - protein, 371 aa, synthetic construct
MALPVTALLLPLALLLHAARPQVQLQESGGGLVQAGGSLRLSCAASGTISPIDIMGWYRQAPGKERELVAAIALGGNTYYADSVKGRFTISRDNAKNTVYLQMNSLKPEDTAVYYCAVGYVDKWDDSDYHTYWGQGTQVTVSSGTSTRTTTPAPRPPTPAPTIASQPLSLRPEACRPAAGGAVHTRGLDFACDIYIWAPLAGTCGVLLLSLVITLYCKRGRKKLLYIFKQPFMRPVQTTQEEDGCSCRFPEEEEGGCELRVKFSRSADAPAYQQGQNQLYNELNLGRREEYDVLDKRRGRDPEMGGKPRRKNPQEGLYNELQKDKMAEAYSEIGMKGERRRGKGHDGLYQGLSTATKDTYDALHMQALPPR

SEQ ID NO: 9395 - protein, 621 aa, synthetic construct
MALPVTALLLPLALLLHAARPDIVLTQSPDSLAVSLGERATINCRASESVEYFGTSLMHWYQQKPGQPPKLLIYAASNVESGVPARFSGSGSGTDFTLTISSLQAEDVAVYYCQQSRKVPYTFGQGTKLEIKLEDLKNVFPPEVAVFEPSEAEISHTQKATLVCLATGFYPDHVELSWWVNGKEVHSGVCTDPQPLKEQPALNDSRYCLSSRLRVSATFWQNPRNHFRCQVQFYGLSENDEWTQDRAKPVTQIVSAEAWGRADCGFTSESYQQGVLSATILYEILLGKATLYAVLVSALVLMAMVKRKDSRGRAKRSGSGATNFSLLKQAGDVEENPGPTSMDWIWRILFLVGAATGAHSFEQVQLQESGPGLVKPSQTLSLTCTVSGNSITSDYAWNWIRQFPGKRLEWIGYISYSGSTTYSPSLKSRVTISRDTSKNQFSLKLSSVTAADTAVYYCATGYYYGSGFWGQGTLVTVSSTRIQNPDPAVYQLRDSKSSDKSVCLFTDFDSQTNVSQSKDSDVYITDKCVLDMRSMDFKSNSAVAWSNKSDFACANAFNNSIIPEDTFFPSPESSCDVKLVEKSFETDTNLNFQNLSVIGFRILLLKVAGFNLLMTLRLWSS

SEQ ID NO: 9396 - protein, 621 aa, synthetic construct
MALPVTALLLPLALLLHAARPDIVLTQSPDSLAVSLGERATINCRASESVEYFGTSLMHWYQQKPGQPPKLLIYAASNVESGVPARFSGSGSGTDFTLTISSLQAEDVAVYYCQQSRKVPYTFGQGTKLEIKLEDLKNVFPPEVAVFEPSEAEISHTQKATLVCLATGFYPDHVELSWWVNGKEVHSGVCTDPQPLKEQPALNDSRYCLSSRLRVSATFWQNPRNHFRCQVQFYGLSENDEWTQDRAKPVTQIVSAEAWGRADCGFTSESYQQGVLSATILYEILLGKATLYAVLVSALVLMAMVKRKDSRGRAKRSGSGATNFSLLKQAGDVEENPGPTSMDWIWRILFLVGAATGAHSFEQVQLQESGPGLVKPSQTLSLTCTVSGNSITSDYAWNWIRQFPGKRLEWIGYISYSGSTSYNPSLKSRVTISRDTSKNQFSLKLSSVTAADTAVYYCATGYYYGSGFWGQGTLVTVSSTRIQNPDPAVYQLRDSKSSDKSVCLFTDFDSQTNVSQSKDSDVYITDKCVLDMRSMDFKSNSAVAWSNKSDFACANAFNNSIIPEDTFFPSPESSCDVKLVEKSFETDTNLNFQNLSVIGFRILLLKVAGFNLLMTLRLWSS

SEQ ID NO: 9397 - protein, 811 aa, synthetic construct
MALPVTALLLPLALLLHAARPDIQMTQSPSSLSASVGDRVTITCKASQDVGTAVDWYQQKPGKAPKLLIYWASTRHTGVPSRFSGSGSGTDFTLTISSLQPEDFATYYCQQYNSYPLTFGQGTKVEIKRLEDLKNVFPPEVAVFEPSEAEISHTQKATLVCLATGFYPDHVELSWWVNGKEVHSGVSTDPQPLKEQPALNDSRYCLSSRLRVSATFWQNPRNHFRCQVQFYGLSENDEWTQDRAKPVTQIVSAEAWGRADCGSQSFGLLDPKLCYLLDGILFIYGVILTALFLRVKFSRSADAPAYQQGQNQLYNELNLGRREEYDVLDKRRGRDPEMGGKPQRRKNPQEGLYNELQKDKMAEAYSEIGMKGERRRGKGHDGLYQGLSTATKDTYDALHMQALPPRRAKRSGSGATNFSLLKQAGDVEENPGPTSMDWIWRILFLVGAATGAHSFEVQLVESGGGLVQPGGSLRLSCAASGYTFTEYTIHWVRQAPGKGLEWVANINPNNGGTTYNQKFEDRFTISRDNSKNTLYLQMNSLRAEDTAVYYCARGWNFDYWGQGTLVTVSSTRIQNPDPAVYQLRDSKSSDKSVCLFTDFDSQTNVSQSKDSDVYITDKTVLDMRSMDFKSNSAVAWSNKSDFACANAFNNSIIPEDTFFPSPESSCGTQSFGLLDPKLCYLLDGILFIYGVILTALFLRVKFSRSADAPAYQQGQNQLYNELNLGRREEYDVLDKRRGRDPEMGGKPQRRKNPQEGLYNELQKDKMAEAYSEIGMKGERRRGKGHDGLYQGLSTATKDTYDALHMQALPPR

SEQ ID NO: 9398 - protein, 736 aa, synthetic construct
MALPVTALLLPLALLLHAARPDIQMTQSPSSLSASVGDRVTITCKASQDVGTAVDWYQQKPGKAPKLLIYWASTRHTGVPSRFSGSGSGTDFTLTISSLQPEDFATYYCQQYNSYPLTFGQGTKVEIKRLEDLKNVFPPEVAVFEPSEAEISHTQKATLVCLATGFYPDHVELSWWVNGKEVHSGVSTDPQPLKEQPALNDSRYCLSSRLRVSATFWQNPRNHFRCQVQFYGLSENDEWTQDRAKPVTQIVSAEAWGRADCGSQSFGLLDPKLCYLLDGILFIYGVILTALFLRVKFSRSADAPAYQQGQNQLYNELNLGRREEYDVLDKRRGRDPEMGGKPQRRKNPQEGLYNELQKDKMAEAYSEIGMKGERRRGKGHDGLYQGLSTATKDTYDALHMQALPPRRAKRSGSGATNFSLLKQAGDVEENPGPTSMDWIWRILFLVGAATGAHSFEVQLVESGGGLVQPGGSLRLSCAASGYTFTEYTIHWVRQAPGKGLEWVANINPNNGGTTYNQKFEDRFTISRDNSKNTLYLQMNSLRAEDTAVYYCARGWNFDYWGQGTLVTVSSTRIQNPDPAVYQLRDSKSSDKSVCLFTDFDSQTNVSQSKDSDVYITDKTVLDMRSMDFKSNSAVAWSNKSDFACANAFNNSIIPEDTFFPSPESSCGTLGEPQLCYILDAILFLYGIVLTLLYCRLKIQVRKAAITSYEKSDGVYTGLSTRNQETYETLKHEKPPQ

SEQ ID NO: 9399 - protein, 963 aa, synthetic construct
MALPVTALLLPLALLLHAARPDIQMTQSPSSLSASVGDRVTITCKASQDVGTAVDWYQQKPGKAPKLLIYWASTRHTGVPSRFSGSGSGTDFTLTISSLQPEDFATYYCQQYNSYPLTFGQGTKVEIKRLEDLKNVFPPEVAVFEPSEAEISHTQKATLVCLATGFYPDHVELSWWVNGKEVHSGVSTDPQPLKEQPALNDSRYCLSSRLRVSATFWQNPRNHFRCQVQFYGLSENDEWTQDRAKPVTQIVSAEAWGRADCGSQSFGLLDPKLCYLLDGILFIYGVILTALFLRVKFSRSADAPAYQQGQNQLYNELNLGRREEYDVLDKRRGRDPEMGGKPQRRKNPQEGLYNELQKDKMAEAYSEIGMKGERRRGKGHDGLYQGLSTATKDTYDALHMQALPPRRAKRSGSGATNFSLLKQAGDVEENPGPTSMDWIWRILFLVGAATGAHSFEVQLVESGGGLVQPGGSLRLSCAASGYTFTEYTIHWVRQAPGKGLEWVANINPNNGGTTYNQKFEDRFTISRDNSKNTLYLQMNSLRAEDTAVYYCARGWNFDYWGQGTLVTVSSTRIQNPDPAVYQLRDSKSSDKSVCLFTDFDSQTNVSQSKDSDVYITDKTVLDMRSMDFKSNSAVAWSNKSDFACANAFNNSIIPEDTFFPSPESSCGTITQGLAVSTISSFFPPGYQVSFCLVMVLLFAVDTGLYFSVKTNIRSSTRDWKDHKFKWRKDPQDKRAKRSGSGATNFSLLKQAGDVEENPGPSRGHMTEYKPTVRLATRDDVPRAVRTLAAAFADYPATRHTVDPDRHIERVTELQELFLTRVGLDIGKVWVADDGAAVAVWTTPESVEAGAVFAEIGPRMAELSGSRLAAQQQMEGLLAPHRPKEPAWFLATVGVSPDHQGKGLGSAVVLPGVEAAERAGVPAFLETSAPRNLPFYERLGFTVTADVEVPEGPRTWCMTRKPGA

SEQ ID NO: 9400 - protein, 853 aa, synthetic construct
MALPVTALLLPLALLLHAARPDIQMTQSPSSLSASVGDRVTITCKASQDVGTAVDWYQQKPGKAPKLLIYWASTRHTGVPSRFSGSGSGTDFTLTISSLQPEDFATYYCQQYNSYPLTFGQGTKVEIKRLEDLKNVFPPEVAVFEPSEAEISHTQKATLVCLATGFYPDHVELSWWVNGKEVHSGVSTDPQPLKEQPALNDSRYCLSSRLRVSATFWQNPRNHFRCQVQFYGLSENDEWTQDRAKPVTQIVSAEAWGRADCGSQSFGLLDPKLCYLLDGILFIYGVILTALFLRVKFSRSADAPAYQQGQNQLYNELNLGRREEYDVLDKRRGRDPEMGGKPQRRKNPQEGLYNELQKDKMAEAYSEIGMKGERRRGKGHDGLYQGLSTATKDTYDALHMQALPPRRAKRSGSGATNFSLLKQAGDVEENPGPTSMDWIWRILFLVGAATGAHSFEVQLVESGGGLVQPGGSLRLSCAASGYTFTEYTIHWVRQAPGKGLEWVANINPNNGGTTYNQKFEDRFTISRDNSKNTLYLQMNSLRAEDTAVYYCARGWNFDYWGQGTLVTVSSTRIQNPDPAVYQLRDSKSSDKSVCLFTDFDSQTNVSQSKDSDVYITDKTVLDMRSMDFKSNSAVAWSNKSDFACANAFNNSIIPEDTFFPSPESSCGTQSFGLLDPKLCYLLDGILFIYGVILTALFLKRGRKKLLYIFKQPFMRPVQTTQEEDGCSCRFPEEEEGGCELRVKFSRSADAPAYQQGQNQLYNELNLGRREEYDVLDKRRGRDPEMGGKPQRRKNPQEGLYNELQKDKMAEAYSEIGMKGERRRGKGHDGLYQGLSTATKDTYDALHMQALPPR

SEQ ID NO: 9401 - protein, 738 aa, synthetic construct
MALPVTALLLPLALLLHAARPDIQMTQSPSSLSASVGDRVTITCRASQDISNYLNWYQQKPGKAPKLLIYYTSRLHSGVPSRFSGSGSGTDFTLTISSLQPEDFATYYCQQGNTLPYTFGQGTKVEIKRLEDLKNVFPPEVAVFEPSKAEIAHTQKATLVCLATGFYPDHVELSWWVNGKEVHSGVCTDPQPLKEQPALNDSRYCLSSRLRVSATFWQNPRNHFRCQVQFYGLSENDEWTQDRAKPVTQIVSAEAWGRADCGSQSFGLLDPKLCYLLDGILFIYGVILTALFLRVKFSRSADAPAYQQGQNQLYNELNLGRREEYDVLDKRRGRDPEMGGKPQRRKNPQEGLYNELQKDKMAEAYSEIGMKGERRRGKGHDGLYQGLSTATKDTYDALHMQALPPRRAKRSGSGATNFSLLKQAGDVEENPGPTSMDWIWRILFLVGAATGAHSFEVQLVESGGGLVQPGGSLRLSCAASGYTFSDYFMSWVRQAPGKGLEWVATISNGGTYTYYPDSVKGRFTISRDNSKNTLYLQMNSLRAEDTAVYYCARFDGYIFDYWGQGTLVTVSSTRIQNPDPAVYQLRDSKSSDKSVCLFTDFDSQTNVSQSKDSDVYITDKCVLDMRSMDFKSNSAVAWSNKSDFACANAFNNSIIPEDTFFPSSDVPCGTLGEPQLCYILDAILFLYGIVLTLLYCRLKIQVRKAAITSYEKSDGVYTGLSTRNQETYETLKHEKPPQ

SEQ ID NO: 9402 - protein, 813 aa, synthetic construct
MALPVTALLLPLALLLHAARPDIQMTQSPSSLSASVGDRVTITCRASQDISNYLNWYQQKPGKAPKLLIYYTSRLHSGVPSRFSGSGSGTDFTLTISSLQPEDFATYYCQQGNTLPYTFGQGTKVEIKRLEDLKNVFPPEVAVFEPSKAEIAHTQKATLVCLATGFYPDHVELSWWVNGKEVHSGVCTDPQPLKEQPALNDSRYCLSSRLRVSATFWQNPRNHFRCQVQFYGLSENDEWTQDRAKPVTQIVSAEAWGRADCGSQSFGLLDPKLCYLLDGILFIYGVILTALFLRVKFSRSADAPAYQQGQNQLYNELNLGRREEYDVLDKRRGRDPEMGGKPQRRKNPQEGLYNELQKDKMAEAYSEIGMKGERRRGKGHDGLYQGLSTATKDTYDALHMQALPPRRAKRSGSGATNFSLLKQAGDVEENPGPTSMDWIWRILFLVGAATGAHSFEVQLVESGGGLVQPGGSLRLSCAASGYTFSDYFMSWVRQAPGKGLEWVATISNGGTYTYYPDSVKGRFTISRDNSKNTLYLQMNSLRAEDTAVYYCARFDGYIFDYWGQGTLVTVSSTRIQNPDPAVYQLRDSKSSDKSVCLFTDFDSQTNVSQSKDSDVYITDKCVLDMRSMDFKSNSAVAWSNKSDFACANAFNNSIIPEDTFFPSSDVPCGTQSFGLLDPKLCYLLDGILFIYGVILTALFLRVKFSRSADAPAYQQGQNQLYNELNLGRREEYDVLDKRRGRDPEMGGKPQRRKNPQEGLYNELQKDKMAEAYSEIGMKGERRRGKGHDGLYQGLSTATKDTYDALHMQALPPR

SEQ ID NO: 9403 - protein, 965 aa, synthetic construct
MALPVTALLLPLALLLHAARPDIQMTQSPSSLSASVGDRVTITCRASQDISNYLNWYQQKPGKAPKLLIYYTSRLHSGVPSRFSGSGSGTDFTLTISSLQPEDFATYYCQQGNTLPYTFGQGTKVEIKRLEDLKNVFPPEVAVFEPSKAEIAHTQKATLVCLATGFYPDHVELSWWVNGKEVHSGVCTDPQPLKEQPALNDSRYCLSSRLRVSATFWQNPRNHFRCQVQFYGLSENDEWTQDRAKPVTQIVSAEAWGRADCGSQSFGLLDPKLCYLLDGILFIYGVILTALFLRVKFSRSADAPAYQQGQNQLYNELNLGRREEYDVLDKRRGRDPEMGGKPQRRKNPQEGLYNELQKDKMAEAYSEIGMKGERRRGKGHDGLYQGLSTATKDTYDALHMQALPPRRAKRSGSGATNFSLLKQAGDVEENPGPTSMDWIWRILFLVGAATGAHSFEVQLVESGGGLVQPGGSLRLSCAASGYTFSDYFMSWVRQAPGKGLEWVATISNGGTYTYYPDSVKGRFTISRDNSKNTLYLQMNSLRAEDTAVYYCARFDGYIFDYWGQGTLVTVSSTRIQNPDPAVYQLRDSKSSDKSVCLFTDFDSQTNVSQSKDSDVYITDKCVLDMRSMDFKSNSAVAWSNKSDFACANAFNNSIIPEDTFFPSSDVPCGTITQGLAVSTISSFFPPGYQVSFCLVMVLLFAVDTGLYFSVKTNIRSSTRDWKDHKFKWRKDPQDKRAKRSGSGATNFSLLKQAGDVEENPGPSRGHMTEYKPTVRLATRDDVPRAVRTLAAAFADYPATRHTVDPDRHIERVTELQELFLTRVGLDIGKVWVADDGAAVAVWTTPESVEAGAVFAEIGPRMAELSGSRLAAQQQMEGLLAPHRPKEPAWFLATVGVSPDHQGKGLGSAVVLPGVEAAERAGVPAFLETSAPRNLPFYERLGFTVTADVEVPEGPRTWCMTRKPGA

SEQ ID NO: 9404 - protein, 1210 aa, synthetic construct
MALPVTALLLPLALLLHAARPDIQMTQSPSSLSASVGDRVTITCKASDHINNWLAWYQQKPGQAPKLLIYGATTLETGVPSRFSGSGSGTDYTLTISSLQPEDFATYYCQQSWNTPWTFGQGTKLEIKRLEGQPKANPTVTLFPPSSEELQANKATLVCLISDFYPGAVTVAWKADGSPVKAGVETTKPSKQSNNKYAASSYLSLTPEQWKSHRSYSCQVTHEGSTVEKTVAPTECSGSQSFGLLDPKLSYLLDGILFIYGVILTALFLWRRKRKEKQSETSPKEFLTIYEDVKDLKTRRNHEQEQTFPGGGSTIYSMIQSQSSAPTSQEPAYTLYSLIQPSRKSGSRKRNHSPSFNSTIYEVIGKSQPKAQNPARLSRKELENFDVYSTSRVKFSRSADAPAYQQGQNQLYNELNLGRREEYDVLDKRRGRDPEMGGKPQRRKNPQEGLYNELQKDKMAEAYSEIGMKGERRRGKGHDGLYQGLSTATKDTYDALHMQALPPRRAKRSGSGATNFSLLKQAGDVEENPGPMDWIWRILFLVGAATGAHSFEQVQLQQPGAELVKPGASVKMSCKASGYAFSSYWINWMKQKPGQGLEWIGQIYPGDGDTNYNGKFKGRATLTADTSSSTAYMQLSSLTSEDSAVYFCARSITTVVGCAMDYWGQGTSVTVSSTRASTKGPSVFPLAPSSKSTSGGTAALGCLVKDYFPEPVTVSWNSGALTSGVHTFPAVLQSSGLYSLSSVVTVPSSSLGTQTYICNVNHKPSNTKVDKRVEPKSCGTSGQVLLESNIKVLPTWSTPVQPMALIVLGGVAGLLLFIGLGIFFCVRCRHRRRQAERMSQIKRLLSEKKTCQCPHRFQKTCSPISRRVKFSRSADAPAYQQGQNQLYNELNLGRREEYDVLDKRRGRDPEMGGKPQRRKNPQEGLYNELQKDKMAEAYSEIGMKGERRRGKGHDGLYQGLSTATKDTYDALHMQALPPRRAKRSGSGVKQTLNFDLLKLAGDVESNPGPGHMTEYKPTVRLATRDDVPRAVRTLAAAFADYPATRHTVDPDRHIERVTELQELFLTRVGLDIGKVWVADDGAAVAVWTTPESVEAGAVFAEIGPRMAELSGSRLAAQQQMEGLLAPHRPKEPAWFLATVGVSPDHQGKGLGSAVVLPGVEAAERAGVPAFLETSAPRNLPFYERLGFTVTADVEVPEGPRTWCMTRKPGA

SEQ ID NO: 9405 - protein, 1188 aa, synthetic construct
MALPVTALLLPLALLLHAARPDIQMTQSPSSLSASVGDRVTITCKASDHINNWLAWYQQKPGQAPKLLIYGATTLETGVPSRFSGSGSGTDYTLTISSLQPEDFATYYCQQSWNTPWTFGQGTKLEIKRLEGQPKANPTVTLFPPSSEELQANKATLVCLISDFYPGAVTVAWKADGSPVKAGVETTKPSKQSNNKYAASSYLSLTPEQWKSHRSYSCQVTHEGSTVEKTVAPTECSGSQSFGLLDPKLSYLLDGILFIYGVILTALFLWRRKRKEKQSETSPKEFLTIYEDVKDLKTRRNHEQEQTFPGGGSTIYSMIQSQSSAPTSQEPAYTLYSLIQPSRKSGSRKRNHSPSFNSTIYEVIGKSQPKAQNPARLSRKELENFDVYSTSRVKFSRSADAPAYQQGQNQLYNELNLGRREEYDVLDKRRGRDPEMGGKPQRRKNPQEGLYNELQKDKMAEAYSEIGMKGERRRGKGHDGLYQGLSTATKDTYDALHMQALPPRRAKRSGSGATNFSLLKQAGDVEENPGPMDWIWRILFLVGAATGAHSFEQVQLQQPGAELVKPGASVKMSCKASGYAFSSYWINWMKQKPGQGLEWIGQIYPGDGDTNYNGKFKGRATLTADTSSSTAYMQLSSLTSEDSAVYFCARSITTVVGCAMDYWGQGTSVTVSSTRASTKGPSVFPLAPSSKSTSGGTAALGCLVKDYFPEPVTVSWNSGALTSGVHTFPAVLQSSGLYSLSSVVTVPSSSLGTQTYICNVNHKPSNTKVDKRVEPKSCGTMALIVLGGVAGLLLFIGLGIFFCVRCRHRRRQAERMSQIKRLLSEKKTCQCPHRFQKTCSPISRRVKFSRSADAPAYQQGQNQLYNELNLGRREEYDVLDKRRGRDPEMGGKPQRRKNPQEGLYNELQKDKMAEAYSEIGMKGERRRGKGHDGLYQGLSTATKDTYDALHMQALPPRRAKRSGSGVKQTLNFDLLKLAGDVESNPGPGHMTEYKPTVRLATRDDVPRAVRTLAAAFADYPATRHTVDPDRHIERVTELQELFLTRVGLDIGKVWVADDGAAVAVWTTPESVEAGAVFAEIGPRMAELSGSRLAAQQQMEGLLAPHRPKEPAWFLATVGVSPDHQGKGLGSAVVLPGVEAAERAGVPAFLETSAPRNLPFYERLGFTVTADVEVPEGPRTWCMTRKPGA

SEQ ID NO: 9406 - protein, 1105 aa, synthetic construct
MALPVTALLLPLALLLHAARPDIQMTQSPSSLSASVGDRVTITCKASDHINNWLAWYQQKPGQAPKLLIYGATTLETGVPSRFSGSGSGTDYTLTISSLQPEDFATYYCQQSWNTPWTFGQGTKLEIKRLEDLKNVFPPEVAVFEPSEAEISHTQKATLVCLATGFYPDHVELSWWVNGKEVHSGVSTDPQPLKEQPALNDSRYCLSSRLRVSATFWQNPRNHFRCQVQFYGLSENDEWTQDRAKPVTQIVSAEAWGRADCGSQSFGLLDPKLCYLLDGILFIYGVILTALFLRVKFSRSADAPAYQQGQNQLYNELNLGRREEYDVLDKRRGRDPEMGGKPQRRKNPQEGLYNELQKDKMAEAYSEIGMKGERRRGKGHDGLYQGLSTATKDTYDALHMQALPPRRAKRSGSGATNFSLLKQAGDVEENPGPTSMDWIWRILFLVGAATGAHSFEQVQLQQPGAELVKPGASVKMSCKASGYAFSSYWINWMKQKPGQGLEWIGQIYPGDGDTNYNGKFKGRATLTADTSSSTAYMQLSSLTSEDSAVYFCARSITTVVGCAMDYWGQGTSVTVSSTRIQNPDPAVYQLRDSKSSDKSVCLFTDFDSQTNVSQSKDSDVYITDKTVLDMRSMDFKSNSAVAWSNKSDFACANAFNNSIIPEDTFFPSPESSCGTSGQVLLESNIKVLPTWSTPVQPMALIVLGGVAGLLLFIGLGIFFCVRCRHRRRQAERMSQIKRLLSEKKTCQCPHRFQKTCSPISRRVKFSRSADAPAYQQGQNQLYNELNLGRREEYDVLDKRRGRDPEMGGKPQRRKNPQEGLYNELQKDKMAEAYSEIGMKGERRRGKGHDGLYQGLSTATKDTYDALHMQALPPRRAKRSGSGVKQTLNFDLLKLAGDVESNPGPGHMTEYKPTVRLATRDDVPRAVRTLAAAFADYPATRHTVDPDRHIERVTELQELFLTRVGLDIGKVWVADDGAAVAVWTTPESVEAGAVFAEIGPRMAELSGSRLAAQQQMEGLLAPHRPKEPAWFLATVGVSPDHQGKGLGSAVVLPGVEAAERAGVPAFLETSAPRNLPFYERLGFTVTADVEVPEGPRTWCMTRKPGA

SEQ ID NO: 9407 - protein, 1083 aa, synthetic construct
MALPVTALLLPLALLLHAARPDIQMTQSPSSLSASVGDRVTITCKASDHINNWLAWYQQKPGQAPKLLIYGATTLETGVPSRFSGSGSGTDYTLTISSLQPEDFATYYCQQSWNTPWTFGQGTKLEIKRLEDLKNVFPPEVAVFEPSEAEISHTQKATLVCLATGFYPDHVELSWWVNGKEVHSGVSTDPQPLKEQPALNDSRYCLSSRLRVSATFWQNPRNHFRCQVQFYGLSENDEWTQDRAKPVTQIVSAEAWGRADCGSQSFGLLDPKLCYLLDGILFIYGVILTALFLRVKFSRSADAPAYQQGQNQLYNELNLGRREEYDVLDKRRGRDPEMGGKPQRRKNPQEGLYNELQKDKMAEAYSEIGMKGERRRGKGHDGLYQGLSTATKDTYDALHMQALPPRRAKRSGSGATNFSLLKQAGDVEENPGPTSMDWIWRILFLVGAATGAHSFEQVQLQQPGAELVKPGASVKMSCKASGYAFSSYWINWMKQKPGQGLEWIGQIYPGDGDTNYNGKFKGRATLTADTSSSTAYMQLSSLTSEDSAVYFCARSITTVVGCAMDYWGQGTSVTVSSTRIQNPDPAVYQLRDSKSSDKSVCLFTDFDSQTNVSQSKDSDVYITDKTVLDMRSMDFKSNSAVAWSNKSDFACANAFNNSIIPEDTFFPSPESSCGTMALIVLGGVAGLLLFIGLGIFFCVRCRHRRRQAERMSQIKRLLSEKKTCQCPHRFQKTCSPISRRVKFSRSADAPAYQQGQNQLYNELNLGRREEYDVLDKRRGRDPEMGGKPQRRKNPQEGLYNELQKDKMAEAYSEIGMKGERRRGKGHDGLYQGLSTATKDTYDALHMQALPPRRAKRSGSGVKQTLNFDLLKLAGDVESNPGPGHMTEYKPTVRLATRDDVPRAVRTLAAAFADYPATRHTVDPDRHIERVTELQELFLTRVGLDIGKVWVADDGAAVAVWTTPESVEAGAVFAEIGPRMAELSGSRLAAQQQMEGLLAPHRPKEPAWFLATVGVSPDHQGKGLGSAVVLPGVEAAERAGVPAFLETSAPRNLPFYERLGFTVTADVEVPEGPRTWCMTRKPGA

SEQ ID NO: 9408 - protein, 1083 aa, synthetic construct
MALPVTALLLPLALLLHAARPDIQMTQSPSSLSASVGDRVTITCKASDHINNWLAWYQQKPGQAPKLLIYGATTLETGVPSRFSGSGSGTDYTLTISSLQPEDFATYYCQQSWNTPWTFGQGTKLEIKRLEDLKNVFPPEVAVFEPSEAEISHTQKATLVCLATGFYPDHVELSWWVNGKEVHSGVSTDPQPLKEQPALNDSRYCLSSRLRVSATFWQNPRNHFRCQVQFYGLSENDEWTQDRAKPVTQIVSAEAWGRADCGSQSFGLLDPKLCYLLDGILFIYGVILTALFLRVKFSRSADAPAYQQGQNQLYNELNLGRREEYDVLDKRRGRDPEMGGKPQRRKNPQEGLYNELQKDKMAEAYSEIGMKGERRRGKGHDGLYQGLSTATKDTYDALHMQALPPRRAKRSGSGATNFSLLKQAGDVEENPGPTSMDWIWRILFLVGAATGAHSFEQVQLQQPGAELVKPGASVKMSCKASGYAFSSYWINWMKQKPGQGLEWIGQIYPGDGDTNYNGKFKGRATLTADTSSSTAYMQLSSLTSEDSAVYFCARSITTVVGCAMDYWGQGTSVTVSSTRIQNPDPAVYQLRDSKSSDKSVCLFTDFDSQTNVSQSKDSDVYITDKTVLDMRSMDFKSNSAVAWSNKSDFACANAFNNSIIPEDTFFPSPESSCGTQSFGLLDPKLCYLLDGILFIYGVILTALFLLYCNHRNRRRVCKCPRPVVKSGDKPSLSARYVRVKFSRSADAPAYQQGQNQLYNELNLGRREEYDVLDKRRGRDPEMGGKPQRRKNPQEGLYNELQKDKMAEAYSEIGMKGERRRGKGHDGLYQGLSTATKDTYDALHMQALPPRRAKRSGSGVKQTLNFDLLKLAGDVESNPGPSRGHMTEYKPTVRLATRDDVPRAVRTLAAAFADYPATRHTVDPDRHIERVTELQELFLTRVGLDIGKVWVADDGAAVAVWTTPESVEAGAVFAEIGPRMAELSGSRLAAQQQMEGLLAPHRPKEPAWFLATVGVSPDHQGKGLGSAVVLPGVEAAERAGVPAFLETSAPRNLPFYERLGFTVTADVEVPEGPRTWCMTRKPGA

SEQ ID NO: 9409 - protein, 1091 aa, synthetic construct
MALPVTALLLPLALLLHAARPDIQMTQSPSSLSASVGDRVTITCKASDHINNWLAWYQQKPGQAPKLLIYGATTLETGVPSRFSGSGSGTDYTLTISSLQPEDFATYYCQQSWNTPWTFGQGTKLEIKRLEDLKNVFPPEVAVFEPSEAEISHTQKATLVCLATGFYPDHVELSWWVNGKEVHSGVSTDPQPLKEQPALNDSRYCLSSRLRVSATFWQNPRNHFRCQVQFYGLSENDEWTQDRAKPVTQIVSAEAWGRADCGSQSFGLLDPKLCYLLDGILFIYGVILTALFLRVKFSRSADAPAYQQGQNQLYNELNLGRREEYDVLDKRRGRDPEMGGKPQRRKNPQEGLYNELQKDKMAEAYSEIGMKGERRRGKGHDGLYQGLSTATKDTYDALHMQALPPRRAKRSGSGATNFSLLKQAGDVEENPGPTSMDWIWRILFLVGAATGAHSFEQVQLQQPGAELVKPGASVKMSCKASGYAFSSYWINWMKQKPGQGLEWIGQIYPGDGDTNYNGKFKGRATLTADTSSSTAYMQLSSLTSEDSAVYFCARSITTVVGCAMDYWGQGTSVTVSSTRIQNPDPAVYQLRDSKSSDKSVCLFTDFDSQTNVSQSKDSDVYITDKTVLDMRSMDFKSNSAVAWSNKSDFACANAFNNSIIPEDTFFPSPESSCGTQSFGLLDPKLCYLLDGILFIYGVILTALFLCVRCRHRRRQAERMSQIKRLLSEKKTCQCPHRFQKTCSPIRVKFSRSADAPAYQQGQNQLYNELNLGRREEYDVLDKRRGRDPEMGGKPQRRKNPQEGLYNELQKDKMAEAYSEIGMKGERRRGKGHDGLYQGLSTATKDTYDALHMQALPPRRAKRSGSGVKQTLNFDLLKLAGDVESNPGPSRGHMTEYKPTVRLATRDDVPRAVRTLAAAFADYPATRHTVDPDRHIERVTELQELFLTRVGLDIGKVWVADDGAAVAVWTTPESVEAGAVFAEIGPRMAELSGSRLAAQQQMEGLLAPHRPKEPAWFLATVGVSPDHQGKGLGSAVVLPGVEAAERAGVPAFLETSAPRNLPFYERLGFTVTADVEVPEGPRTWCMTRKPGA

SEQ ID NO: 9410 - protein, 755 aa, synthetic construct
MALPVTALLLPLALLLHAARPDIQMTQSPSSLSASVGDRVTITCKASDHINNWLAWYQQKPGQAPKLLIYGATTLETGVPSRFSGSGSGTDYTLTISSLQPEDFATYYCQQSWNTPWTFGQGTKLEIKRLEDLKNVFPPEVAVFEPSEAEISHTQKATLVCLATGFYPDHVELSWWVNGKEVHSGVSTDPQPLKEQPALNDSRYCLSSRLRVSATFWQNPRNHFRCQVQFYGLSENDEWTQDRAKPVTQIVSAEAWGRADCGSQSFGLLDPKLCYLLDGILFIYGVILTALFLRVKFSRSADAPAYQQGQNQLYNELNLGRREEYDVLDKRRGRDPEMGGKPQRRKNPQEGLYNELQKDKMAEAYSEIGMKGERRRGKGHDGLYQGLSTATKDTYDALHMQALPPRRAKRSGSGATNFSLLKQAGDVEENPGPTSMDWIWRILFLVGAATGAHSFEQVQLQQPGAELVKPGASVKMSCKASGYAFSSYWINWMKQKPGQGLEWIGQIYPGDGDTNYNGKFKGRATLTADTSSSTAYMQLSSLTSEDSAVYFCARSITTVVGCAMDYWGQGTSVTVSSTRIQNPDPAVYQLRDSKSSDKSVCLFTDFDSQTNVSQSKDSDVYITDKTVLDMRSMDFKSNSAVAWSNKSDFACANAFNNSIIPEDTFFPSPESSCGTMCQNCIELNAATISGFLFAEIVSIFVLAVGVYFIAGQDGVRQSRASDKQTLLPNDQLYQPLKDREDDQYSHLQGNQLRRN

SEQ ID NO: 9411 - protein, 1131 aa, synthetic construct; identical to SEQ ID NO: 9392

SEQ ID NO: 9412 - protein, 1090 aa, synthetic construct
MALPVTALLLPLALLLHAARPDIQMTQSPSSLSASVGDRVTITCKASDHINNWLAWYQQKPGQAPKLLIYGATTLETGVPSRFSGSGSGTDYTLTISSLQPEDFATYYCQQSWNTPWTFGQGTKLEIKRLEGQPKANPTVTLFPPSSEELQANKATLVCLISDFYPGAVTVAWKADGSPVKAGVETTKPSKQSNNKYAASSYLSLTPEQWKSHRSYSCQVTHEGSTVEKTVAPTECSGSQSFGLLDPKLCYLLDGILFIYGVILTALFLRVKFSRSADAPAYQQGQNQLYNELNLGRREEYDVLDKRRGRDPEMGGKPQRRKNPQEGLYNELQKDKMAEAYSEIGMKGERRRGKGHDGLYQGLSTATKDTYDALHMQALPPRRAKRSGSGATNFSLLKQAGDVEENPGPTSMDWIWRILFLVGAATGAHSFEQVQLQQPGAELVKPGASVKMSCKASGYAFSSYWINWMKQKPGQGLEWIGQIYPGDGDTNYNGKFKGRATLTADTSSSTAYMQLSSLTSEDSAVYFCARSITTVVGCAMDYWGQGTSVTVSSTRASTKGPSVFPLAPSSKSTSGGTAALGCLVKDYFPEPVTVSWNSGALTSGVHTFPAVLQSSGLYSLSSVVTVPSSSLGTQTYICNVNHKPSNTKVDKRVEPKSCGTSGQVLLESNIKVLPTWSTPVQPMALIVLGGVAGLLLFIGLGIFFCVRCRHRRRQAERMSQIKRLLSEKKTCQCPHRFQKTCSPISRRVKFSRSADAPAYQQGQNQLYNELNLGRREEYDVLDKRRGRDPEMGGKPQRRKNPQEGLYNELQKDKMAEAYSEIGMKGERRRGKGHDGLYQGLSTATKDTYDALHMQALPPRRAKRSGSGVKQTLNFDLLKLAGDVESNPGPGHMTEYKPTVRLATRDDVPRAVRTLAAAFADYPATRHTVDPDRHIERVTELQELFLTRVGLDIGKVWVADDGAAVAVWTTPESVEAGAVFAEIGPRMAELSGSRLAAQQQMEGLLAPHRPKEPAWFLATVGVSPDHQGKGLGSAVVLPGVEAAERAGVPAFLETSAPRNLPFYERLGFTVTADVEVPEGPRTWCMTRKPGA

SEQ ID NO: 9413 - protein, 1068 aa, synthetic construct
MALPVTALLLPLALLLHAARPDIQMTQSPSSLSASVGDRVTITCKASDHINNWLAWYQQKPGQAPKLLIYGATTLETGVPSRFSGSGSGTDYTLTISSLQPEDFATYYCQQSWNTPWTFGQGTKLEIKRLEGQPKANPTVTLFPPSSEELQANKATLVCLISDFYPGAVTVAWKADGSPVKAGVETTKPSKQSNNKYAASSYLSLTPEQWKSHRSYSCQVTHEGSTVEKTVAPTECSGSQSFGLLDPKLCYLLDGILFIYGVILTALFLRVKFSRSADAPAYQQGQNQLYNELNLGRREEYDVLDKRRGRDPEMGGKPQRRKNPQEGLYNELQKDKMAEAYSEIGMKGERRRGKGHDGLYQGLSTATKDTYDALHMQALPPRRAKRSGSGATNFSLLKQAGDVEENPGPTSMDWIWRILFLVGAATGAHSFEQVQLQQPGAELVKPGASVKMSCKASGYAFSSYWINWMKQKPGQGLEWIGQIYPGDGDTNYNGKFKGRATLTADTSSSTAYMQLSSLTSEDSAVYFCARSITTVVGCAMDYWGQGTSVTVSSTRASTKGPSVFPLAPSSKSTSGGTAALGCLVKDYFPEPVTVSWNSGALTSGVHTFPAVLQSSGLYSLSSVVTVPSSSLGTQTYICNVNHKPSNTKVDKRVEPKSCGTMALIVLGGVAGLLLFIGLGIFFCVRCRHRRRQAERMSQIKRLLSEKKTCQCPHRFQKTCSPISRRVKFSRSADAPAYQQGQNQLYNELNLGRREEYDVLDKRRGRDPEMGGKPQRRKNPQEGLYNELQKDKMAEAYSEIGMKGERRRGKGHDGLYQGLSTATKDTYDALHMQALPPRRAKRSGSGVKQTLNFDLLKLAGDVESNPGPGHMTEYKPTVRLATRDDVPRAVRTLAAAFADYPATRHTVDPDRHIERVTELQELFLTRVGLDIGKVWVADDGAAVAVWTTPESVEAGAVFAEIGPRMAELSGSRLAAQQQMEGLLAPHRPKEPAWFLATVGVSPDHQGKGLGSAVVLPGVEAAERAGVPAFLETSAPRNLPFYERLGFTVTADVEVPEGPRTWCMTRKPGA

SEQ ID NO: 9414 - protein, 1225 aa, synthetic construct
MALPVTALLLPLALLLHAARPDIQMTQSPSSLSASVGDRVTITCKASDHINNWLAWYQQKPGQAPKLLIYGATTLETGVPSRFSGSGSGTDYTLTISSLQPEDFATYYCQQSWNTPWTFGQGTKLEIKRLEDLKNVFPPEVAVFEPSEAEISHTQKATLVCLATGFYPDHVELSWWVNGKEVHSGVSTDPQPLKEQPALNDSRYCLSSRLRVSATFWQNPRNHFRCQVQFYGLSENDEWTQDRAKPVTQIVSAEAWGRADCGSQSFGLLDPKLSYLLDGILFIYGVILTALFLWRRKRKEKQSETSPKEFLTIYEDVKDLKTRRNHEQEQTFPGGGSTIYSMIQSQSSAPTSQEPAYTLYSLIQPSRKSGSRKRNHSPSFNSTIYEVIGKSQPKAQNPARLSRKELENFDVYSTSRVKFSRSADAPAYQQGQNQLYNELNLGRREEYDVLDKRRGRDPEMGGKPQRRKNPQEGLYNELQKDKMAEAYSEIGMKGERRRGKGHDGLYQGLSTATKDTYDALHMQALPPRRAKRSGSGATNFSLLKQAGDVEENPGPMDWIWRILFLVGAATGAHSFEQVQLQQPGAELVKPGASVKMSCKASGYAFSSYWINWMKQKPGQGLEWIGQIYPGDGDTNYNGKFKGRATLTADTSSSTAYMQLSSLTSEDSAVYFCARSITTVVGCAMDYWGQGTSVTVSSTRIQNPDPAVYQLRDSKSSDKSVCLFTDFDSQTNVSQSKDSDVYITDKTVLDMRSMDFKSNSAVAWSNKSDFACANAFNNSIIPEDTFFPSPESSCGTSGQVLLESNIKVLPTWSTPVQPMALIVLGGVAGLLLFIGLGIFFCVRCRHRRRQAERMSQIKRLLSEKKTCQCPHRFQKTCSPISRRVKFSRSADAPAYQQGQNQLYNELNLGRREEYDVLDKRRGRDPEMGGKPQRRKNPQEGLYNELQKDKMAEAYSEIGMKGERRRGKGHDGLYQGLSTATKDTYDALHMQALPPRRAKRSGSGVKQTLNFDLLKLAGDVESNPGPGHMTEYKPTVRLATRDDVPRAVRTLAAAFADYPATRHTVDPDRHIERVTELQELFLTRVGLDIGKVWVADDGAAVAVWTTPESVEAGAVFAEIGPRMAELSGSRLAAQQQMEGLLAPHRPKEPAWFLATVGVSPDHQGKGLGSAVVLPGVEAAERAGVPAFLETSAPRNLPFYERLGFTVTADVEVPEGPRTWCMTRKPGA

SEQ ID NO: 9415 - protein, 818 aa, synthetic construct; identical to SEQ ID NO: 9379

SEQ ID NO: 9416 - protein, 817 aa, synthetic construct; identical to SEQ ID NO: 9380

SEQ ID NO: 9417 - protein, 817 aa, synthetic construct; identical to SEQ ID NO: 9380

SEQ ID NO: 9418 - protein, 898 aa, synthetic construct
MALPVTALLLPLALLLHAARPEVQLVESGGGLVQAGGSLRLSCAASGRTFSMGWFRQAPGKEREFVAAITYSGGSPYYADSVKGRFTISRDNAKNTVYLQMNSLKPEDTAVYYCAANPTYGSDWNAENWGQGTQVTVSSGTGGGGSGGGGSGGGGSEFDIQMTQSPSSLSASVGDRVTITCKASDHINNWLAWYQQKPGQAPKLLIYGATTLETGVPSRFSGSGSGTDYTLTISSLQPEDFATYYCQQSWNTPWTFGQGTKLEIKRLEDLKNVFPPEVAVFEPSEAEISHTQKATLVCLATGFYPDHVELSWWVNGKEVHSGVCTDPQPLKEQPALNDSRYCLSSRLRVSATFWQNPRNHFRCQVQFYGLSENDEWTQDRAKPVTQIVSAEAWGRADCGFTSESYQQGVLSATILYEILLGKATLYAVLVSALVLMAMVKRKDSRGRAKRSGSGATNFSLLKQAGDVEENPGPTSTMDWIWRILFLVGAATGAHSGPQVQLQESGGGLVQAGGSLRLSCAASGSISRIGDMGWYRQAPGKEREFVAAIAAGGTTYYADSVKGRFTISRDNAKNTVYLQMNSLKPEDTAVYYCAASHETQPTQLVYWGAGTQVTVSSGSGGGGSGGGGSGGGGSFEQVQLQQPGAELVKPGASVKMSCKASGYAFSSYWINWMKQKPGQGLEWIGQIYPGDGDTNYNGKFKGRATLTADTSSSTAYMQLSSLTSEDSAVYFCARSITTVVGCAMDYWGQGTSVTVSSTRIQNPDPAVYQLRDSKSSDKSVCLFTDFDSQTNVSQSKDSDVYITDKCVLDMRSMDFKSNSAVAWSNKSDFACANAFNNSIIPEDTFFPSPESSCDVKLVEKSFETDTNLNFQNLSVIGFRILLLKVAGFNLLMTLRLWSS

SEQ ID NO: 9419 - protein, 1134 aa, synthetic construct
MALPVTALLLPLALLLHAARPACEVQLLESGGGLIQPGGSLRLSCAASGFTFSSHAMTWVRQAPGKGLEWVSAISGSGDYTHYADSVKGRFTISRDNSKNTVYLQMNSLRAEDSAVYYCAKDEDGGSLLGHRGQGTLVTVSSGTGGGGSGGGGSGGGGSEFDIQMTQSPSSLSASVGDRVTITCKASDHINNWLAWYQQKPGQAPKLLIYGATTLETGVPSRFSGSGSGTDYTLTISSLQPEDFATYYCQQSWNTPWTFGQGTKLEIKRLEDLKNVFPPEVAVFEPSEAEISHTQKATLVCLATGFYPDHVELSWWVNGKEVHSGVCTDPQPLKEQPALNDSRYCLSSRLRVSATFWQNPRNHFRCQVQFYGLSENDEWTQDRAKPVTQIVSAEAWGRADCGFTSESYQQGVLSATILYEILLGKATLYAVLVSALVLMAMVKRKDSRGRAKRSGSGATNFSLLKQAGDVEENPGPTSTMDWIWRILFLVGAATGAHSGPQVQLQESGGGLVQAGGSLRLSCAASGSISRIGDMGWYRQAPGKEREFVAAIAAGGTTYYADSVKGRFTISRDNAKNTVYLQMNSLKPEDTAVYYCAASHETQPTQLVYWGAGTQVTVSSGSGGGGSGGGGSGGGGSFEQVQLQQPGAELVKPGASVKMSCKASGYAFSSYWINWMKQKPGQGLEWIGQIYPGDGDTNYNGKFKGRATLTADTSSSTAYMQLSSLTSEDSAVYFCARSITTVVGCAMDYWGQGTSVTVSSTRIQNPDPAVYQLRDSKSSDKSVCLFTDFDSQTNVSQSKDSDVYITDKCVLDMRSMDFKSNSAVAWSNKSDFACANAFNNSIIPEDTFFPSPESSCDVKLVEKSFETDTNLNFQNLSVIGFRILLLKVAGFNLLMTLRLWSSRAKRSGSGVKQTLNFDLLKLAGDVESNPGPSRGHMTEYKPTVRLATRDDVPRAVRTLAAAFADYPATRHTVDPDRHIERVTELQELFLTRVGLDIGKVWVADDGAAVAVWTTPESVEAGAVFAEIGPRMAELSGSRLAAQQQMEGLLAPHRPKEPAWFLATVGVSPDHQGKGLGSAVVLPGVEAAERAGVPAFLETSAPRNLPFYERLGFTVTADVEVPEGPRTWCMTRKPGA

SEQ ID NO: 9420 - protein, 1163 aa, synthetic construct
MALPVTALLLPLALLLHAARPDIQMTQSPSSLSASVGDRVTITCKASDHINNWLAWYQQKPGQAPKLLIYGATTLETGVPSRFSGSGSGTDYTLTISSLQPEDFATYYCQQSWNTPWTFGQGTKLEIKRLEDLKNVFPPEVAVFEPSEAEISHTQKATLVCLATGFYPDHVELSWWVNGKEVHSGVSTDPQPLKEQPALNDSRYCLSSRLRVSATFWQNPRNHFRCQVQFYGLSENDEWTQDRAKPVTQIVSAEAWGRADCGSQSFGLLDPKLCYLLDGILFIYGVILTALFLRVKFSRSADAPAYQQGQNQLYNELNLGRREEYDVLDKRRGRDPEMGGKPQRRKNPQEGLYNELQKDKMAEAYSEIGMKGERRRGKGHDGLYQGLSTATKDTYDALHMQALPPRRAKRSGSGATNFSLLKQAGDVEENPGPTSMDWIWRILFLVGAATGAHSFEQVQLQQPGAELVKPGASVKMSCKASGYAFSSYWINWMKQKPGQGLEWIGQIYPGDGDTNYNGKFKGRATLTADTSSSTAYMQLSSLTSEDSAVYFCARSITTVVGCAMDYWGQGTSVTVSSTRIQNPDPAVYQLRDSKSSDKSVCLFTDFDSQTNVSQSKDSDVYITDKTVLDMRSMDFKSNSAVAWSNKSDFACANAFNNSIIPEDTFFPSPESSCGTQSFGLLDPKLCYLLDGILFIYGVILTALFLRVKFSRSADAPAYQQGQNQLYNELNLGRREEYDVLDKRRGRDPEMGGKPQRRKNPQEGLYNELQKDKMAEAYSEIGMKGERRRGKGHDGLYQGLSTATKDTYDALHMQALPPRSRGGSLEGGGVQVETISPGDGRTFPKRGQTCVVHYTGMLEDGKKVDSSRDRNKPFKFMLGKQEVIRGWEEGVAQMSVGQRAKLTISPDYAYGATGHPGIIPPHATLVFDVELLKLGTSRAKRSGSGATNFSLLKQAGDVEENPGPHMTEYKPTVRLATRDDVPRAVRTLAAAFADYPATRHTVDPDRHIERVTELQELFLTRVGLDIGKVWVADDGAAVAVWTTPESVEAGAVFAEIGPRMAELSGSRLAAQQQMEGLLAPHRPKEPAWFLATVGVSPDHQGKGLGSAVVLPGVEAAERAGVPAFLETSAPRNLPFYERLGFTVTADVEVPEGPRTWCMTRKPGA

SEQ ID NO: 9421 - protein, 1162 aa, synthetic construct
MALPVTALLLPLALLLHAARPDIQMTQSPSSLSASVGDRVTITCKASDHINNWLAWYQQKPGQAPKLLIYGATTLETGVPSRFSGSGSGTDYTLTISSLQPEDFATYYCQQSWNTPWTFGQGTKLEIKRLEDLKNVFPPEVAVFEPSEAEISHTQKATLVCLATGFYPDHVELSWWVNGKEVHSGVSTDPQPLKEQPALNDSRYCLSSRLRVSATFWQNPRNHFRCQVQFYGLSENDEWTQDRAKPVTQIVSAEAWGRADCGSQSFGLLDPKLCYLLDGILFIYGVILTALFLRVKFSRSADAPAYQQGQNQLYNELNLGRREEYDVLDKRRGRDPEMGGKPQRRKNPQEGLYNELQKDKMAEAYSEIGMKGERRRGKGHDGLYQGLSTATKDTYDALHMQALPPRRAKRSGSGATNFSLLKQAGDVEENPGPTSMDWIWRILFLVGAATGAHSFEQVQLQQPGAELVKPGASVKMSCKASGYAFSSYWINWMKQKPGQGLEWIGQIYPGDGDTNYNGKFKGRATLTADTSSSTAYMQLSSLTSEDSAVYFCARSITTVVGCAMDYWGQGTSVTVSSTRIQNPDPAVYQLRDSKSSDKSVCLFTDFDSQTNVSQSKDSDVYITDKTVLDMRSMDFKSNSAVAWSNKSDFACANAFNNSIIPEDTFFPSPESSCGTQSFGLLDPKLCYLLDGILFIYGVILTALFLRVKFSRSADAPAYQQGQNQLYNELNLGRREEYDVLDKRRGRDPEMGGKPQRRKNPQEGLYNELQKDKMAEAYSEIGMKGERRRGKGHDGLYQGLSTATKDTYDALHMQALPPRSRGGGSGFQCNQCGASFTQKGNLLRHIKLHSGEKPFKCHLCNYACRRRDALTGHLRTHSVGKPHKCGYCGRSYKQRSSLEEHKERCHNYLESMGLPGTLYPVIKEEGLETDFYDYKDDDDKTSGSGEGRGSLLTCGDVEENPGPHMTEYKPTVRLATRDDVPRAVRTLAAAFADYPATRHTVDPDRHIERVTELQELFLTRVGLDIGKVWVADDGAAVAVWTTPESVEAGAVFAEIGPRMAELSGSRLAAQQQMEGLLAPHRPKEPAWFLATVGVSPDHQGKGLGSAVVLPGVEAAERAGVPAFLETSAPRNLPFYERLGFTVTADVEVPEGPRTWCMTRKPGA

SEQ ID NO: 9422 - protein, 1085 aa, synthetic construct
MALPVTALLLPLALLLHAARPDIQMTQSPSSLSASVGDRVTITCKASDHINNWLAWYQQKPGQAPKLLIYGATTLETGVPSRFSGSGSGTDYTLTISSLQPEDFATYYCQQSWNTPWTFGQGTKLEIKRLEDLKNVFPPEVAVFEPSEAEISHTQKATLVCLATGFYPDHVELSWWVNGKEVHSGVSTDPQPLKEQPALNDSRYCLSSRLRVSATFWQNPRNHFRCQVQFYGLSENDEWTQDRAKPVTQIVSAEAWGRADCGSQSFGLLDPKLCYLLDGILFIYGVILTALFLRVKFSRSADAPAYQQGQNQLYNELNLGRREEYDVLDKRRGRDPEMGGKPQRRKNPQEGLYNELQKDKMAEAYSEIGMKGERRRGKGHDGLYQGLSTATKDTYDALHMQALPPRRAKRSGSGATNFSLLKQAGDVEENPGPTSMDWIWRILFLVGAATGAHSFEQVQLQQPGAELVKPGASVKMSCKASGYAFSSYWINWMKQKPGQGLEWIGQIYPGDGDTNYNGKFKGRATLTADTSSSTAYMQLSSLTSEDSAVYFCARSITTVVGCAMDYWGQGTSVTVSSTRIQNPDPAVYQLRDSKSSDKSVCLFTDFDSQTNVSQSKDSDVYITDKTVLDMRSMDFKSNSAVAWSNKSDFACANAFNNSIIPEDTFFPSPESSCGTQSFGLLDPKLCYLLDGILFIYGVILTALFLRVKFSRSADAPAYQQGQNQLYNELNLGRREEYDVLDKRRGRDPEMGGKPQRRKNPQEGLYNELQKDKMAEAYSEIGMKGERRRGKGHDGLYQGLSTATKDTYDALHMQALPPRSRGGGSGFQCNQCGASFTQKGNLLRHIKLHLETDFYDYKDDDDKTSGSGEGRGSLLTCGDVEENPGPHMTEYKPTVRLATRDDVPRAVRTLAAAFADYPATRHTVDPDRHIERVTELQELFLTRVGLDIGKVWVADDGAAVAVWTTPESVEAGAVFAEIGPRMAELSGSRLAAQQQMEGLLAPHRPKEPAWFLATVGVSPDHQGKGLGSAVVLPGVEAAERAGVPAFLETSAPRNLPFYERLGFTVTADVEVPEGPRTWCMTRKPGA

SEQ ID NO: 9423 - protein, 814 aa, synthetic construct
MALPVTALLLPLALLLHAARPDVVMTQSPSSLSASVGDRVTITCMASEDIYIRLAWYQQKPGNAPKLLIYAATSLETGVPSRFSGSGSGTDFTLTISSLQPEDFATYYCQQYWSSPWTFGGGTKVEIKLEDLKNVFPPEVAVFEPSEAEISHTQKATLVCLATGFYPDHVELSWWVNGKEVHSGVSTDPQPLKEQPALNDSRYCLSSRLRVSATFWQNPRNHFRCQVQFYGLSENDEWTQDRAKPVTQIVSAEAWGRADCGSQSFGLLDPKLCYLLDGILFIYGVILTALFLRVKFSRSADAPAYQQGQNQLYNELNLGRREEYDVLDKRRGRDPEMGGKPQRRKNPQEGLYNELQKDKMAEAYSEIGMKGERRRGKGHDGLYQGLSTATKDTYDALHMQALPPRRAKRSGSGATNFSLLKQAGDVEENPGPTSMDWIWRILFLVGAATGAHSFEQVQLQESGPGLVKPSQTLSLTCTVSGYSITSDYTWNWIRQPPGNGLEWIGYITYSGSTSYNPSLKSRVLISVDTSKNQVSLKLSSVTAADTAVYYCARLGRRYTMDYWGQGTTVTVSSTRIQNPDPAVYQLRDSKSSDKSVCLFTDFDSQTNVSQSKDSDVYITDKTVLDMRSMDFKSNSAVAWSNKSDFACANAFNNSIIPEDTFFPSPESSCGTQSFGLLDPKLCYLLDGILFIYGVILTALFLRVKFSRSADAPAYQQGQNQLYNELNLGRREEYDVLDKRRGRDPEMGGKPQRRKNPQEGLYNELQKDKMAEAYSEIGMKGERRRGKGHDGLYQGLSTATKDTYDALHMQALPPR

SEQ ID NO: 9424 - protein, 821 aa, synthetic construct
MALPVTALLLPLALLLHAARPDFVMTQSPDSLAVSLGERVTMSCKSSQSLLNSGNQKNYLTWYQQKPGQPPKLLIYWASTRESGVPDRFSGSGSGTDFTLTISSLQAEDVAVYYCQNDYSYPYTFGQGTKLEIKLEDLKNVFPPEVAVFEPSEAEISHTQKATLVCLATGFYPDHVELSWWVNGKEVHSGVSTDPQPLKEQPALNDSRYCLSSRLRVSATFWQNPRNHFRCQVQFYGLSENDEWTQDRAKPVTQIVSAEAWGRADCGSQSFGLLDPKLCYLLDGILFIYGVILTALFLRVKFSRSADAPAYQQGQNQLYNELNLGRREEYDVLDKRRGRDPEMGGKPQRRKNPQEGLYNELQKDKMAEAYSEIGMKGERRRGKGHDGLYQGLSTATKDTYDALHMQALPPRRAKRSGSGATNFSLLKQAGDVEENPGPTSMDWIWRILFLVGAATGAHSFEVQLVQSGAELKKPGASVKVSCKASGYTFTDYYMKWVRQAPGQGLEWIGDIIPSNGATFYNQKFKGRVTITVDKSTSTAYMELSSLRSEDTAVYYCARSHLLRASWFAYWGQGTLVTVSSTRIQNPDPAVYQLRDSKSSDKSVCLFTDFDSQTNVSQSKDSDVYITDKTVLDMRSMDFKSNSAVAWSNKSDFACANAFNNSIIPEDTFFPSPESSCGTQSFGLLDPKLCYLLDGILFIYGVILTALFLRVKFSRSADAPAYQQGQNQLYNELNLGRREEYDVLDKRRGRDPEMGGKPQRRKNPQEGLYNELQKDKMAEAYSEIGMKGERRRGKGHDGLYQGLSTATKDTYDALHMQALPPR

SEQ ID NO: 9425 - protein, 823 aa, synthetic construct
MALPVTALLLPLALLLHAARPDIVMTQSPDSLAVSLGERATINCESSQSLLNSGNQKNYLTWYQQKPGQPPKPLIYWASTRESGVPDRFSGSGSGTDFTLTISSLQAEDVAVYYCQNDYSYPYTFGQGTKLEIKRLEDLKNVFPPEVAVFEPSEAEISHTQKATLVCLATGFYPDHVELSWWVNGKEVHSGVSTDPQPLKEQPALNDSRYCLSSRLRVSATFWQNPRNHFRCQVQFYGLSENDEWTQDRAKPVTQIVSAEAWGRADCGSQSFGLLDPKLCYLLDGILFIYGVILTALFLRVKFSRSADAPAYQQGQNQLYNELNLGRREEYDVLDKRRGRDPEMGGKPQRRKNPQEGLYNELQKDKMAEAYSEIGMKGERRRGKGHDGLYQGLSTATKDTYDALHMQALPPRRAKRSGSGATNFSLLKQAGDVEENPGPTSMDWIWRILFLVGAATGAHSFEEVQLVQSGAEVKKPGESLKISCKGSGYSFTDYYMKWARQMPGKGLEWMGDIIPSNGATFYNQKFKGQVTISADKSISTTYLQWSSLKASDTAMYYCARSHLLRASWFAYWGQGTMVTVSSTRIQNPDPAVYQLRDSKSSDKSVCLFTDFDSQTNVSQSKDSDVYITDKTVLDMRSMDFKSNSAVAWSNKSDFACANAFNNSIIPEDTFFPSPESSCGTQSFGLLDPKLCYLLDGILFIYGVILTALFLRVKFSRSADAPAYQQGQNQLYNELNLGRREEYDVLDKRRGRDPEMGGKPQRRKNPQEGLYNELQKDKMAEAYSEIGMKGERRRGKGHDGLYQGLSTATKDTYDALHMQALPPR

SEQ ID NO: 9426 - protein, 1102 aa, synthetic construct
MALPVTALLLPLALLLHAARPDIQMTQSPSSLSASVGDRVTITCKASDHINNWLAWYQQKPGQAPKLLIYGATTLETGVPSRFSGSGSGTDYTLTISSLQPEDFATYYCQQSWNTPWTFGQGTKLEIKRLEDLKNVFPPEVAVFEPSEAEISHTQKATLVCLATGFYPDHVELSWWVNGKEVHSGVSTDPQPLKEQPALNDSRYCLSSRLRVSATFWQNPRNHFRCQVQFYGLSENDEWTQDRAKPVTQIVSAEAWGRADCGSQSFGLLDPKLCYLLDGILFIYGVILTALFLHLCCRRRRARLRFMKQFYKRVKFSRSADAPAYQQGQNQLYNELNLGRREEYDVLDKRRGRDPEMGGKPQRRKNPQEGLYNELQKDKMAEAYSEIGMKGERRRGKGHDGLYQGLSTATKDTYDALHMQALPPRRAKRSGSGATNFSLLKQAGDVEENPGPTSMDWIWRILFLVGAATGAHSFEQVQLQQPGAELVKPGASVKMSCKASGYAFSSYWINWMKQKPGQGLEWIGQIYPGDGDTNYNGKFKGRATLTADTSSSTAYMQLSSLTSEDSAVYFCARSITTVVGCAMDYWGQGTSVTVSSTRIQNPDPAVYQLRDSKSSDKSVCLFTDFDSQTNVSQSKDSDVYITDKTVLDMRSMDFKSNSAVAWSNKSDFACANAFNNSIIPEDTFFPSPESSCGTQSFGLLDPKLCYLLDGILFIYGVILTALFLLYCNHRNRRRVCKCPRPVVKSGDKPSLSARYVRVKFSRSADAPAYQQGQNQLYNELNLGRREEYDVLDKRRGRDPEMGGKPQRRKNPQEGLYNELQKDKMAEAYSEIGMKGERRRGKGHDGLYQGLSTATKDTYDALHMQALPPRRAKRSGSGVKQTLNFDLLKLAGDVESNPGPSRGHMTEYKPTVRLATRDDVPRAVRTLAAAFADYPATRHTVDPDRHIERVTELQELFLTRVGLDIGKVWVADDGAAVAVWTTPESVEAGAVFAEIGPRMAELSGSRLAAQQQMEGLLAPHRPKEPAWFLATVGVSPDHQGKGLGSAVVLPGVEAAERAGVPAFLETSAPRNLPFYERLGFTVTADVEVPEGPRTWCMTRKPGA

SEQ ID NO: 9427 - protein, 1123 aa, synthetic construct
MALPVTALLLPLALLLHAARPDIQMTQSPSSLSASVGDRVTITCKASDHINNWLAWYQQKPGQAPKLLIYGATTLETGVPSRFSGSGSGTDYTLTISSLQPEDFATYYCQQSWNTPWTFGQGTKLEIKRLEDLKNVFPPEVAVFEPSEAEISHTQKATLVCLATGFYPDHVELSWWVNGKEVHSGVSTDPQPLKEQPALNDSRYCLSSRLRVSATFWQNPRNHFRCQVQFYGLSENDEWTQDRAKPVTQIVSAEAWGRADCGSQSFGLLDPKLCYLLDGILFIYGVILTALFLCVRCRHRRRQAERMSQIKRLLSEKKTCQCPHRFQKTCSPIRVKFSRSADAPAYQQGQNQLYNELNLGRREEYDVLDKRRGRDPEMGGKPQRRKNPQEGLYNELQKDKMAEAYSEIGMKGERRRGKGHDGLYQGLSTATKDTYDALHMQALPPRRAKRSGSGATNFSLLKQAGDVEENPGPTSMDWIWRILFLVGAATGAHSFEQVQLQQPGAELVKPGASVKMSCKASGYAFSSYWINWMKQKPGQGLEWIGQIYPGDGDTNYNGKFKGRATLTADTSSSTAYMQLSSLTSEDSAVYFCARSITTVVGCAMDYWGQGTSVTVSSTRIQNPDPAVYQLRDSKSSDKSVCLFTDFDSQTNVSQSKDSDVYITDKTVLDMRSMDFKSNSAVAWSNKSDFACANAFNNSIIPEDTFFPSPESSCGTQSFGLLDPKLCYLLDGILFIYGVILTALFLLYCNHRNRRRVCKCPRPVVKSGDKPSLSARYVRVKFSRSADAPAYQQGQNQLYNELNLGRREEYDVLDKRRGRDPEMGGKPQRRKNPQEGLYNELQKDKMAEAYSEIGMKGERRRGKGHDGLYQGLSTATKDTYDALHMQALPPRRAKRSGSGVKQTLNFDLLKLAGDVESNPGPSRGHMTEYKPTVRLATRDDVPRAVRTLAAAFADYPATRHTVDPDRHIERVTELQELFLTRVGLDIGKVWVADDGAAVAVWTTPESVEAGAVFAEIGPRMAELSGSRLAAQQQMEGLLAPHRPKEPAWFLATVGVSPDHQGKGLGSAVVLPGVEAAERAGVPAFLETSAPRNLPFYERLGFTVTADVEVPEGPRTWCMTRKPGA

SEQ ID NO: 9428 - protein, 778 aa, synthetic construct
MALPVTALLLPLALLLHAARPDIQMTQSPSSLSASVGDRVTITCKASDHINNWLAWYQQKPGQAPKLLIYGATTLETGVPSRFSGSGSGTDYTLTISSLQPEDFATYYCQQSWNTPWTFGQGTKLEIKRLEDLKNVFPPEVAVFEPSEAEISHTQKATLVCLATGFYPDHVELSWWVNGKEVHSGVSTDPQPLKEQPALNDSRYCLSSRLRVSATFWQNPRNHFRCQVQFYGLSENDEWTQDRAKPVTQIVSAEAWGRADCGSQSFGLLDPKLCYLLDGILFIYGVILTALFLHLCCRRRRARLRFMKQFYKRVKFSRSADAPAYQQGQNQLYNELNLGRREEYDVLDKRRGRDPEMGGKPQRRKNPQEGLYNELQKDKMAEAYSEIGMKGERRRGKGHDGLYQGLSTATKDTYDALHMQALPPRRAKRSGSGATNFSLLKQAGDVEENPGPTSMDWIWRILFLVGAATGAHSFEQVQLQQPGAELVKPGASVKMSCKASGYAFSSYWINWMKQKPGQGLEWIGQIYPGDGDTNYNGKFKGRATLTADTSSSTAYMQLSSLTSEDSAVYFCARSITTVVGCAMDYWGQGTSVTVSSTRIQNPDPAVYQLRDSKSSDKSVCLFTDFDSQTNVSQSKDSDVYITDKTVLDMRSMDFKSNSAVAWSNKSDFACANAFNNSIIPEDTFFPSPESSCGTSGQVLLESNIKVLPTWSTPVQPMALIVLGGVAGLLLFIGLGIFFCVRCRHRRRQAERMSQIKRLLSEKKTCQCPHRFQKTCSPI

SEQ ID NO: 9429 - protein, 799 aa, synthetic construct
MALPVTALLLPLALLLHAARPDIQMTQSPSSLSASVGDRVTITCKASDHINNWLAWYQQKPGQAPKLLIYGATTLETGVPSRFSGSGSGTDYTLTISSLQPEDFATYYCQQSWNTPWTFGQGTKLEIKRLEDLKNVFPPEVAVFEPSEAEISHTQKATLVCLATGFYPDHVELSWWVNGKEVHSGVSTDPQPLKEQPALNDSRYCLSSRLRVSATFWQNPRNHFRCQVQFYGLSENDEWTQDRAKPVTQIVSAEAWGRADCGSQSFGLLDPKLCYLLDGILFIYGVILTALFLCVRCRHRRRQAERMSQIKRLLSEKKTCQCPHRFQKTCSPIRVKFSRSADAPAYQQGQNQLYNELNLGRREEYDVLDKRRGRDPEMGGKPQRRKNPQEGLYNELQKDKMAEAYSEIGMKGERRRGKGHDGLYQGLSTATKDTYDALHMQALPPRRAKRSGSGATNFSLLKQAGDVEENPGPTSMDWIWRILFLVGAATGAHSFEQVQLQQPGAELVKPGASVKMSCKASGYAFSSYWINWMKQKPGQGLEWIGQIYPGDGDTNYNGKFKGRATLTADTSSSTAYMQLSSLTSEDSAVYFCARSITTVVGCAMDYWGQGTSVTVSSTRIQNPDPAVYQLRDSKSSDKSVCLFTDFDSQTNVSQSKDSDVYITDKTVLDMRSMDFKSNSAVAWSNKSDFACANAFNNSIIPEDTFFPSPESSCGTSGQVLLESNIKVLPTWSTPVQPMALIVLGGVAGLLLFIGLGIFFCVRCRHRRRQAERMSQIKRLLSEKKTCQCPHRFQKTCSPI

SEQ ID NO: 9430 - protein, 1110 aa, synthetic construct
MALPVTALLLPLALLLHAARPDIQMTQSPSSLSASVGDRVTITCKASDHINNWLAWYQQKPGQAPKLLIYGATTLETGVPSRFSGSGSGTDYTLTISSLQPEDFATYYCQQSWNTPWTFGQGTKLEIKRLEDLKNVFPPEVAVFEPSEAEISHTQKATLVCLATGFYPDHVELSWWVNGKEVHSGVSTDPQPLKEQPALNDSRYCLSSRLRVSATFWQNPRNHFRCQVQFYGLSENDEWTQDRAKPVTQIVSAEAWGRADCGSQSFGLLDPKLCYLLDGILFIYGVILTALFLHLCCRRRRARLRFMKQFYKRVKFSRSADAPAYQQGQNQLYNELNLGRREEYDVLDKRRGRDPEMGGKPQRRKNPQEGLYNELQKDKMAEAYSEIGMKGERRRGKGHDGLYQGLSTATKDTYDALHMQALPPRRAKRSGSGATNFSLLKQAGDVEENPGPTSMDWIWRILFLVGAATGAHSFEQVQLQQPGAELVKPGASVKMSCKASGYAFSSYWINWMKQKPGQGLEWIGQIYPGDGDTNYNGKFKGRATLTADTSSSTAYMQLSSLTSEDSAVYFCARSITTVVGCAMDYWGQGTSVTVSSTRIQNPDPAVYQLRDSKSSDKSVCLFTDFDSQTNVSQSKDSDVYITDKTVLDMRSMDFKSNSAVAWSNKSDFACANAFNNSIIPEDTFFPSPESSCGTQSFGLLDPKLCYLLDGILFIYGVILTALFLCVRCRHRRRQAERMSQIKRLLSEKKTCQCPHRFQKTCSPIRVKFSRSADAPAYQQGQNQLYNELNLGRREEYDVLDKRRGRDPEMGGKPQRRKNPQEGLYNELQKDKMAEAYSEIGMKGERRRGKGHDGLYQGLSTATKDTYDALHMQALPPRRAKRSGSGVKQTLNFDLLKLAGDVESNPGPSRGHMTEYKPTVRLATRDDVPRAVRTLAAAFADYPATRHTVDPDRHIERVTELQELFLTRVGLDIGKVWVADDGAAVAVWTTPESVEAGAVFAEIGPRMAELSGSRLAAQQQMEGLLAPHRPKEPAWFLATVGVSPDHQGKGLGSAVVLPGVEAAERAGVPAFLETSAPRNLPFYERLGFTVTADVEVPEGPRTWCMTRKPGA

SEQ ID NO: 9431 - protein, 1131 aa, synthetic construct
MALPVTALLLPLALLLHAARPDIQMTQSPSSLSASVGDRVTITCKASDHINNWLAWYQQKPGQAPKLLIYGATTLETGVPSRFSGSGSGTDYTLTISSLQPEDFATYYCQQSWNTPWTFGQGTKLEIKRLEDLKNVFPPEVAVFEPSEAEISHTQKATLVCLATGFYPDHVELSWWVNGKEVHSGVSTDPQPLKEQPALNDSRYCLSSRLRVSATFWQNPRNHFRCQVQFYGLSENDEWTQDRAKPVTQIVSAEAWGRADCGSQSFGLLDPKLCYLLDGILFIYGVILTALFLCVRCRHRRRQAERMSQIKRLLSEKKTCQCPHRFQKTCSPIRVKFSRSADAPAYQQGQNQLYNELNLGRREEYDVLDKRRGRDPEMGGKPQRRKNPQEGLYNELQKDKMAEAYSEIGMKGERRRGKGHDGLYQGLSTATKDTYDALHMQALPPRRAKRSGSGATNFSLLKQAGDVEENPGPTSMDWIWRILFLVGAATGAHSFEQVQLQQPGAELVKPGASVKMSCKASGYAFSSYWINWMKQKPGQGLEWIGQIYPGDGDTNYNGKFKGRATLTADTSSSTAYMQLSSLTSEDSAVYFCARSITTVVGCAMDYWGQGTSVTVSSTRIQNPDPAVYQLRDSKSSDKSVCLFTDFDSQTNVSQSKDSDVYITDKTVLDMRSMDFKSNSAVAWSNKSDFACANAFNNSIIPEDTFFPSPESSCGTQSFGLLDPKLCYLLDGILFIYGVILTALFLCVRCRHRRRQAERMSQIKRLLSEKKTCQCPHRFQKTCSPIRVKFSRSADAPAYQQGQNQLYNELNLGRREEYDVLDKRRGRDPEMGGKPQRRKNPQEGLYNELQKDKMAEAYSEIGMKGERRRGKGHDGLYQGLSTATKDTYDALHMQALPPRRAKRSGSGVKQTLNFDLLKLAGDVESNPGPSRGHMTEYKPTVRLATRDDVPRAVRTLAAAFADYPATRHTVDPDRHIERVTELQELFLTRVGLDIGKVWVADDGAAVAVWTTPESVEAGAVFAEIGPRMAELSGSRLAAQQQMEGLLAPHRPKEPAWFLATVGVSPDHQGKGLGSAVVLPGVEAAERAGVPAFLETSAPRNLPFYERLGFTVTADVEVPEGPRTWCMTRKPGA

SEQ ID NO: 9432 - protein, 877 aa, synthetic construct
MALPVTALLLPLALLLHAARPDIQMTQSPSSLSASVGDRVTITCKASDHINNWLAWYQQKPGQAPKLLIYGATTLETGVPSRFSGSGSGTDYTLTISSLQPEDFATYYCQQSWNTPWTFGQGTKLEIKRLEDLKNVFPPEVAVFEPSEAEISHTQKATLVCLATGFYPDHVELSWWVNGKEVHSGVSTDPQPLKEQPALNDSRYCLSSRLRVSATFWQNPRNHFRCQVQFYGLSENDEWTQDRAKPVTQIVSAEAWGRADCGSQSFGLLDPKLCYLLDGILFIYGVILTALFLHLCCRRRRARLRFMKQFYKRVKFSRSADAPAYQQGQNQLYNELNLGRREEYDVLDKRRGRDPEMGGKPQRRKNPQEGLYNELQKDKMAEAYSEIGMKGERRRGKGHDGLYQGLSTATKDTYDALHMQALPPRRAKRSGSGATNFSLLKQAGDVEENPGPTSMDWIWRILFLVGAATGAHSFEQVQLQQPGAELVKPGASVKMSCKASGYAFSSYWINWMKQKPGQGLEWIGQIYPGDGDTNYNGKFKGRATLTADTSSSTAYMQLSSLTSEDSAVYFCARSITTVVGCAMDYWGQGTSVTVSSTRIQNPDPAVYQLRDSKSSDKSVCLFTDFDSQTNVSQSKDSDVYITDKTVLDMRSMDFKSNSAVAWSNKSDFACANAFNNSIIPEDTFFPSPESSCGTQSFGLLDPKLCYLLDGILFIYGVILTALFLCVRCRHRRRQAERMSQIKRLLSEKKTCQCPHRFQKTCSPIRVKFSRSADAPAYQQGQNQLYNELNLGRREEYDVLDKRRGRDPEMGGKPQRRKNPQEGLYNELQKDKMAEAYSEIGMKGERRRGKGHDGLYQGLSTATKDTYDALHMQALPPR

SEQ ID NO: 9433 - protein, 898 aa, synthetic construct
MALPVTALLLPLALLLHAARPDIQMTQSPSSLSASVGDRVTITCKASDHINNWLAWYQQKPGQAPKLLIYGATTLETGVPSRFSGSGSGTDYTLTISSLQPEDFATYYCQQSWNTPWTFGQGTKLEIKRLEDLKNVFPPEVAVFEPSEAEISHTQKATLVCLATGFYPDHVELSWWVNGKEVHSGVSTDPQPLKEQPALNDSRYCLSSRLRVSATFWQNPRNHFRCQVQFYGLSENDEWTQDRAKPVTQIVSAEAWGRADCGSQSFGLLDPKLCYLLDGILFIYGVILTALFLCVRCRHRRRQAERMSQIKRLLSEKKTCQCPHRFQKTCSPIRVKFSRSADAPAYQQGQNQLYNELNLGRREEYDVLDKRRGRDPEMGGKPQRRKNPQEGLYNELQKDKMAEAYSEIGMKGERRRGKGHDGLYQGLSTATKDTYDALHMQALPPRRAKRSGSGATNFSLLKQAGDVEENPGPTSMDWIWRILFLVGAATGAHSFEQVQLQQPGAELVKPGASVKMSCKASGYAFSSYWINWMKQKPGQGLEWIGQIYPGDGDTNYNGKFKGRATLTADTSSSTAYMQLSSLTSEDSAVYFCARSITTVVGCAMDYWGQGTSVTVSSTRIQNPDPAVYQLRDSKSSDKSVCLFTDFDSQTNVSQSKDSDVYITDKTVLDMRSMDFKSNSAVAWSNKSDFACANAFNNSIIPEDTFFPSPESSCGTQSFGLLDPKLCYLLDGILFIYGVILTALFLCVRCRHRRRQAERMSQIKRLLSEKKTCQCPHRFQKTCSPIRVKFSRSADAPAYQQGQNQLYNELNLGRREEYDVLDKRRGRDPEMGGKPQRRKNPQEGLYNELQKDKMAEAYSEIGMKGERRRGKGHDGLYQGLSTATKDTYDALHMQALPPR

SEQ ID NO: 9434 - protein, 869 aa, synthetic construct
MALPVTALLLPLALLLHAARPDIQMTQSPSSLSASVGDRVTITCKASDHINNWLAWYQQKPGQAPKLLIYGATTLETGVPSRFSGSGSGTDYTLTISSLQPEDFATYYCQQSWNTPWTFGQGTKLEIKRLEDLKNVFPPEVAVFEPSEAEISHTQKATLVCLATGFYPDHVELSWWVNGKEVHSGVSTDPQPLKEQPALNDSRYCLSSRLRVSATFWQNPRNHFRCQVQFYGLSENDEWTQDRAKPVTQIVSAEAWGRADCGSQSFGLLDPKLCYLLDGILFIYGVILTALFLHLCCRRRRARLRFMKQFYKRVKFSRSADAPAYQQGQNQLYNELNLGRREEYDVLDKRRGRDPEMGGKPQRRKNPQEGLYNELQKDKMAEAYSEIGMKGERRRGKGHDGLYQGLSTATKDTYDALHMQALPPRRAKRSGSGATNFSLLKQAGDVEENPGPTSMDWIWRILFLVGAATGAHSFEQVQLQQPGAELVKPGASVKMSCKASGYAFSSYWINWMKQKPGQGLEWIGQIYPGDGDTNYNGKFKGRATLTADTSSSTAYMQLSSLTSEDSAVYFCARSITTVVGCAMDYWGQGTSVTVSSTRIQNPDPAVYQLRDSKSSDKSVCLFTDFDSQTNVSQSKDSDVYITDKTVLDMRSMDFKSNSAVAWSNKSDFACANAFNNSIIPEDTFFPSPESSCGTQSFGLLDPKLCYLLDGILFIYGVILTALFLLYCNHRNRRRVCKCPRPVVKSGDKPSLSARYVRVKFSRSADAPAYQQGQNQLYNELNLGRREEYDVLDKRRGRDPEMGGKPQRRKNPQEGLYNELQKDKMAEAYSEIGMKGERRRGKGHDGLYQGLSTATKDTYDALHMQALPPR

SEQ ID NO: 9435 - protein, 890 aa, synthetic construct
MALPVTALLLPLALLLHAARPDIQMTQSPSSLSASVGDRVTITCKASDHINNWLAWYQQKPGQAPKLLIYGATTLETGVPSRFSGSGSGTDYTLTISSLQPEDFATYYCQQSWNTPWTFGQGTKLEIKRLEDLKNVFPPEVAVFEPSEAEISHTQKATLVCLATGFYPDHVELSWWVNGKEVHSGVSTDPQPLKEQPALNDSRYCLSSRLRVSATFWQNPRNHFRCQVQFYGLSENDEWTQDRAKPVTQIVSAEAWGRADCGSQSFGLLDPKLCYLLDGILFIYGVILTALFLCVRCRHRRRQAERMSQIKRLLSEKKTCQCPHRFQKTCSPIRVKFSRSADAPAYQQGQNQLYNELNLGRREEYDVLDKRRGRDPEMGGKPQRRKNPQEGLYNELQKDKMAEAYSEIGMKGERRRGKGHDGLYQGLSTATKDTYDALHMQALPPRRAKRSGSGATNFSLLKQAGDVEENPGPTSMDWIWRILFLVGAATGAHSFEQVQLQQPGAELVKPGASVKMSCKASGYAFSSYWINWMKQKPGQGLEWIGQIYPGDGDTNYNGKFKGRATLTADTSSSTAYMQLSSLTSEDSAVYFCARSITTVVGCAMDYWGQGTSVTVSSTRIQNPDPAVYQLRDSKSSDKSVCLFTDFDSQTNVSQSKDSDVYITDKTVLDMRSMDFKSNSAVAWSNKSDFACANAFNNSIIPEDTFFPSPESSCGTQSFGLLDPKLCYLLDGILFIYGVILTALFLLYCNHRNRRRVCKCPRPVVKSGDKPSLSARYVRVKFSRSADAPAYQQGQNQLYNELNLGRREEYDVLDKRRGRDPEMGGKPQRRKNPQEGLYNELQKDKMAEAYSEIGMKGERRRGKGHDGLYQGLSTATKDTYDALHMQALPPR

SEQ ID NO: 9436 - protein, 877 aa, synthetic construct; identical to SEQ ID NO: 9432

SEQ ID NO: 9437 - protein, 1102 aa, synthetic construct; identical to SEQ ID NO: 9426

SEQ ID NO: 9438 - protein, 1110 aa, synthetic construct; identical to SEQ ID NO: 9430

SEQ ID NO: 9439 - protein, 1123 aa, synthetic construct; identical to SEQ ID NO: 9427

SEQ ID NO: 9440 - protein, 1131 aa, synthetic construct; identical to SEQ ID NO: 9431

SEQ ID NO: 9441 - protein, 615 aa, synthetic construct
MALPVTALLLPLALLLHAARPDIQMTQSPSSLSASVGDRVTITCKASQDVGTAVDWYQQKPGKAPKLLIYWASTRHTGVPSRFSGSGSGTDFTLTISSLQPEDFATYYCQQYNSYPLTFGQGTKVEIKRLEDLKNVFPPEVAVFEPSKAEISRTQKATLVCLATGFYPPHVELSWWVNGKEVHDGVCTDPQPLKEQPALNDSRYCLSSRLRVSATFWQNPRNHFRCQVQFYGLSENDEWTQDRAKPVTQIVSAEAWGRADCGFTSESYQQGVLSATILYEILLGKATLYAVLVSALVLMAMVKRKDSRGRAKRSGSGATNFSLLKQAGDVEENPGPTSMDWIWRILFLVGAATGAHSFEVQLVESGGGLVQPGGSLRLSCAASGYTFTEYTIHWVRQAPGKGLEWVANINPNNGGTTYNQKFEDRFTISRDNSKNTLYLQMNSLRAEDTAVYYCARGWNFDYWGQGTLVTVSSTRIQNPDPAVYQLRDSKSSDKFVCLFTDFDSQINVSQSKDSDVYITDKCVLDMRSMDFKSNSAVAWSNKSDFTCANAFNNSIIPEDTFFPSPESSCDVKLVEKSFETDTNLNFQNLSVIGFRILLLKVAGFNLLMTLRLWSS

SEQ ID NO: 9442 - protein, 622 aa, synthetic construct
MALPVTALLLPLALLLHAARPDIQMTQSPSSLSASVGDRVTITCKASDHINNWLAWYQQKPGQAPKLLIYGATTLETGVPSRFSGSGSGTDYTLTISSLQPEDFATYYCQQSWNTPWTFGQGTKLEIKRLEDLKNVFPPEVAVFEPSEAEISHTQKATLVCLATGFYPDHVELSWWVNGKEVHSGVCTDPQPLKEQPALNDSRYCLSSRLRVSATFWQNPRNHFRCQVQFYGLSENDEWTQDRAKPVTQIVSAEAWGRADCDVKLVEKSFETDTNLNFQNLSVIGFRILLLKVAGFNLLMTLRLWSSRAKRSGSGATNFSLLKQAGDVEENPGPTSMDWIWRILFLVGAATGAHSFEQVQLQQPGAELVKPGASVKMSCKASGYAFSSYWINWMKQKPGQGLEWIGQIYPGDGDTNYNGKFKGRATLTADTSSSTAYMQLSSLTSEDSAVYFCARSITTVVGCAMDYWGQGTSVTVSSTRIQNPDPAVYQLRDSKSSDKSVCLFTDFDSQTNVSQSKDSDVYITDKCVLDMRSMDFKSNSAVAWSNKSDFACANAFNNSIIPEDTFFPSPESSCGFTSESYQQGVLSATILYEILLGKATLYAVLVSALVLMAMVKRKDSRG

SEQ ID NO: 9443 - protein, 622 aa, synthetic construct
MALPVTALLLPLALLLHAARPDIQMTQSPSSLSASVGDRVTITCKASDHINNWLAWYQQKPGQAPKLLIYGATTLETGVPSRFSGSGSGTDYTLTISSLQPEDFATYYCQQSWNTPWTFGQGTKLEIKRLEDLKNVFPPEVAVFEPSEAEISHTQKATLVCLATGFYPDHVELSWWVNGKEVHSGVCTDPQPLKEQPALNDSRYCLSSRLRVSATFWQNPRNHFRCQVQFYGLSENDEWTQDRAKPVTQIVSAEAWGRADCGFTSESYQQGVLSATNLSVIGFRILLLKVAGFNLLMTLRLWSSRAKRSGSGATNFSLLKQAGDVEENPGPTSMDWIWRILFLVGAATGAHSFEQVQLQQPGAELVKPGASVKMSCKASGYAFSSYWINWMKQKPGQGLEWIGQIYPGDGDTNYNGKFKGRATLTADTSSSTAYMQLSSLTSEDSAVYFCARSITTVVGCAMDYWGQGTSVTVSSTRIQNPDPAVYQLRDSKSSDKSVCLFTDFDSQTNVSQSKDSDVYITDKCVLDMRSMDFKSNSAVAWSNKSDFACANAFNNSIIPEDTFFPSPESSCDVKLVEKSFETDTNLNFQILYEILLGKATLYAVLVSALVLMAMVKRKDSRG

SEQ ID NO: 9444 - protein, 622 aa, synthetic construct; identical to SEQ ID NO: 9442

SEQ ID NO: 9445 - protein, 622 aa, synthetic construct; identical to SEQ ID NO: 9443

SEQ ID NO: 9446 - protein, 855 aa, synthetic construct
MALPVTALLLPLALLLHAARPDIQMTQSPSSLSASVGDRVTITCKASDHINNWLAWYQQKPGQAPKLLIYGATTLETGVPSRFSGSGSGTDYTLTISSLQPEDFATYYCQQSWNTPWTFGQGTKLEIKRLEDLKNVFPPEVAVFEPSEAEISHTQKATLVCLATGFYPDHVELSWWVNGKEVHSGVCTDPQPLKEQPALNDSRYCLSSRLRVSATFWQNPRNHFRCQVQFYGLSENDEWTQDRAKPVTQIVSAEAWGRADCDVKLVEKSFETDTNLNFQNLSVIGFRILLLKVAGFNLLMTLRLWSSRAKRSGSGATNFSLLKQAGDVEENPGPTSMDWIWRILFLVGAATGAHSFEQVQLQQPGAELVKPGASVKMSCKASGYAFSSYWINWMKQKPGQGLEWIGQIYPGDGDTNYNGKFKGRATLTADTSSSTAYMQLSSLTSEDSAVYFCARSITTVVGCAMDYWGQGTSVTVSSTRIQNPDPAVYQLRDSKSSDKSVCLFTDFDSQTNVSQSKDSDVYITDKCVLDMRSMDFKSNSAVAWSNKSDFACANAFNNSIIPEDTFFPSPESSCGFTSESYQQGVLSATILYEILLGKATLYAVLVSALVLMAMVKRKDSRGRAKRSGSGVKQTLNFDLLKLAGDVESNPGPSRGHMTEYKPTVRLATRDDVPRAVRTLAAAFADYPATRHTVDPDRHIERVTELQELFLTRVGLDIGKVWVADDGAAVAVWTTPESVEAGAVFAEIGPRMAELSGSRLAAQQQMEGLLAPHRPKEPAWFLATVGVSPDHQGKGLGSAVVLPGVEAAERAGVPAFLETSAPRNLPFYERLGFTVTADVEVPEGPRTWCMTRKPGA

SEQ ID NO: 9447 - protein, 960 aa, synthetic construct
MALPVTALLLPLALLLHAARPDIQMTQSPSSLSASVGDRVTITCKASDHINNWLAWYQQKPGQAPKLLIYGATTLETGVPSRFSGSGSGTDYTLTISSLQPEDFATYYCQQSWNTPWTFGQGTKLEIKRLEGQPKANPTVTLFPPSSEELQANKATLVCLISDFYPGAVTVAWKADGSPVKAGVETTKPSKQSNNKYAASSYLSLTPEQWKSHRSYSCQVTHEGSTVEKTVAPTECSGSITLGLLVAGVLVLLVSLGVAIHLCCRRRRARLRFMKQFYKTSMDWIWRILFLVGAATGAHSFEQVQLQQPGAELVKPGASVKMSCKASGYAFSSYWINWMKQKPGQGLEWIGQIYPGDGDTNYNGKFKGRATLTADTSSSTAYMQLSSLTSEDSAVYFCARSITTVVGCAMDYWGQGTSVTVSSTRASTKGPSVFPLAPSSKSTSGGTAALGCLVKDYFPEPVTVSWNSGALTSGVHTFPAVLQSSGLYSLSSVVTVPSSSLGTQTYICNVNHKPSNTKVDKRVEPKSCGTSGQVLLESNIKVLPTWSTPVQPMALIVLGGVAGLLLFIGLGIFFCVRCRHRRRQAERMSQIKRLLSEKKTCQCPHRFQKTCSPISRRVKFSRSADAPAYQQGQNQLYNELNLGRREEYDVLDKRRGRDPEMGGKPQRRKNPQEGLYNELQKDKMAEAYSEIGMKGERRRGKGHDGLYQGLSTATKDTYDALHMQALPPRRAKRSGSGVKQTLNFDLLKLAGDVESNPGPGHMTEYKPTVRLATRDDVPRAVRTLAAAFADYPATRHTVDPDRHIERVTELQELFLTRVGLDIGKVWVADDGAAVAVWTTPESVEAGAVFAEIGPRMAELSGSRLAAQQQMEGLLAPHRPKEPAWFLATVGVSPDHQGKGLGSAVVLPGVEAAERAGVPAFLETSAPRNLPFYERLGFTVTADVEVPEGPRTWCMTRKPGA

SEQ ID NO: 9448 - protein, 938 aa, synthetic construct
MALPVTALLLPLALLLHAARPDIQMTQSPSSLSASVGDRVTITCKASDHINNWLAWYQQKPGQAPKLLIYGATTLETGVPSRFSGSGSGTDYTLTISSLQPEDFATYYCQQSWNTPWTFGQGTKLEIKRLEGQPKANPTVTLFPPSSEELQANKATLVCLISDFYPGAVTVAWKADGSPVKAGVETTKPSKQSNNKYAASSYLSLTPEQWKSHRSYSCQVTHEGSTVEKTVAPTECSGSITLGLLVAGVLVLLVSLGVAIHLCCRRRRARLRFMKQFYKTSMDWIWRILFLVGAATGAHSFEQVQLQQPGAELVKPGASVKMSCKASGYAFSSYWINWMKQKPGQGLEWIGQIYPGDGDTNYNGKFKGRATLTADTSSSTAYMQLSSLTSEDSAVYFCARSITTVVGCAMDYWGQGTSVTVSSTRASTKGPSVFPLAPSSKSTSGGTAALGCLVKDYFPEPVTVSWNSGALTSGVHTFPAVLQSSGLYSLSSVVTVPSSSLGTQTYICNVNHKPSNTKVDKRVEPKSCGTMALIVLGGVAGLLLFIGLGIFFCVRCRHRRRQAERMSQIKRLLSEKKTCQCPHRFQKTCSPISRRVKFSRSADAPAYQQGQNQLYNELNLGRREEYDVLDKRRGRDPEMGGKPQRRKNPQEGLYNELQKDKMAEAYSEIGMKGERRRGKGHDGLYQGLSTATKDTYDALHMQALPPRRAKRSGSGVKQTLNFDLLKLAGDVESNPGPGHMTEYKPTVRLATRDDVPRAVRTLAAAFADYPATRHTVDPDRHIERVTELQELFLTRVGLDIGKVWVADDGAAVAVWTTPESVEAGAVFAEIGPRMAELSGSRLAAQQQMEGLLAPHRPKEPAWFLATVGVSPDHQGKGLGSAVVLPGVEAAERAGVPAFLETSAPRNLPFYERLGFTVTADVEVPEGPRTWCMTRKPGA

SEQ ID NO: 9449 - protein, 1115 aa, synthetic construct
MALPVTALLLPLALLLHAARPDIQMTQSPSSLSASVGDRVTITCKASDHINNWLAWYQQKPGQAPKLLIYGATTLETGVPSRFSGSGSGTDYTLTISSLQPEDFATYYCQQSWNTPWTFGQGTKLEIKRLEDLKNVFPPEVAVFEPSEAEISHTQKATLVCLATGFYPDHVELSWWVNGKEVHSGVSTDPQPLKEQPALNDSRYCLSSRLRVSATFWQNPRNHFRCQVQFYGLSENDEWTQDRAKPVTQIVSAEAWGRADCGSITLGLLVAGVLVLLVSLGVAIHLCCRRRRARLRFMKQFYKTSRVKFSRSADAPAYQQGQNQLYNELNLGRREEYDVLDKRRGRDPEMGGKPQRRKNPQEGLYNELQKDKMAEAYSEIGMKGERRRGKGHDGLYQGLSTATKDTYDALHMQALPPRRAKRSGSGATNFSLLKQAGDVEENPGPMDWIWRILFLVGAATGAHSFEQVQLQQPGAELVKPGASVKMSCKASGYAFSSYWINWMKQKPGQGLEWIGQIYPGDGDTNYNGKFKGRATLTADTSSSTAYMQLSSLTSEDSAVYFCARSITTVVGCAMDYWGQGTSVTVSSTRIQNPDPAVYQLRDSKSSDKSVCLFTDFDSQTNVSQSKDSDVYITDKTVLDMRSMDFKSNSAVAWSNKSDFACANAFNNSIIPEDTFFPSPESSCGTSGQVLLESNIKVLPTWSTPVQPMALIVLGGVAGLLLFIGLGIFFCVRCRHRRRQAERMSQIKRLLSEKKTCQCPHRFQKTCSPISRRVKFSRSADAPAYQQGQNQLYNELNLGRREEYDVLDKRRGRDPEMGGKPQRRKNPQEGLYNELQKDKMAEAYSEIGMKGERRRGKGHDGLYQGLSTATKDTYDALHMQALPPRRAKRSGSGVKQTLNFDLLKLAGDVESNPGPGHMTEYKPTVRLATRDDVPRAVRTLAAAFADYPATRHTVDPDRHIERVTELQELFLTRVGLDIGKVWVADDGAAVAVWTTPESVEAGAVFAEIGPRMAELSGSRLAAQQQMEGLLAPHRPKEPAWFLATVGVSPDHQGKGLGSAVVLPGVEAAERAGVPAFLETSAPRNLPFYERLGFTVTADVEVPEGPRTWCMTRKPGA

SEQ ID NO: 9450 - protein, 996 aa, synthetic construct
MALPVTALLLPLALLLHAARPQVQLQESGGGLVQAGGSLRLSCAASGTISPIDIMGWYRQAPGKEREFVAAIALGGNTYYADSVKGRFTISRDNAKNTVYLQMNSLKPEDTAVYYCAVGYVDKWDDSDYHTYWGQGTQVTVSSGTGGGGSGGGGSGGGGSEFDIQMTQSPSSLSASVGDRVTITCKASDHINNWLAWYQQKPGQAPKLLIYGATTLETGVPSRFSGSGSGTDYTLTISSLQPEDFATYYCQQSWNTPWTFGQGTKLEIKRLEDLKNVFPPEVAVFEPSEAEISHTQKATLVCLATGFYPDHVELSWWVNGKEVHSGVCTDPQPLKEQPALNDSRYCLSSRLRVSATFWQNPRNHFRCQVQFYGLSENDEWTQDRAKPVTQIVSAEAWGRADCGFTSESYQQGVLSATILYEILLGKATLYAVLVSALVLMAMVKRKDSRGRAKRSGSGATNFSLLKQAGDVEENPGPTSMDWIWRILFLVGAATGAHSFEQVQLQQPGAELVKPGASVKMSCKASGYAFSSYWINWMKQKPGQGLEWIGQIYPGDGDTNYNGKFKGRATLTADTSSSTAYMQLSSLTSEDSAVYFCARSITTVVGCAMDYWGQGTSVTVSSTRIQNPDPAVYQLRDSKSSDKSVCLFTDFDSQTNVSQSKDSDVYITDKCVLDMRSMDFKSNSAVAWSNKSDFACANAFNNSIIPEDTFFPSPESSCDVKLVEKSFETDTNLNFQNLSVIGFRILLLKVAGFNLLMTLRLWSSRAKRSGSGVKQTLNFDLLKLAGDVESNPGPSRGHMTEYKPTVRLATRDDVPRAVRTLAAAFADYPATRHTVDPDRHIERVTELQELFLTRVGLDIGKVWVADDGAAVAVWTTPESVEAGAVFAEIGPRMAELSGSRLAAQQQMEGLLAPHRPKEPAWFLATVGVSPDHQGKGLGSAVVLPGVEAAERAGVPAFLETSAPRNLPFYERLGFTVTADVEVPEGPRTWCMTRKPGA

SEQ ID NO: 9451 - protein, 996 aa, synthetic construct
MALPVTALLLPLALLLHAARPQVQLQESGGGLVQAGGSLRLSCAASGTISPIDIMGWYRQAPGKERELVAAIALGGNTYYADSVKGRFTISRDNAKNTVYLQMNSLKPEDTAVYYCAVGYVDKWDDSDYHTYWGQGTQVTVSSGTGGGGSGGGGSGGGGSEFDIQMTQSPSSLSASVGDRVTITCKASDHINNWLAWYQQKPGQAPKLLIYGATTLETGVPSRFSGSGSGTDYTLTISSLQPEDFATYYCQQSWNTPWTFGQGTKLEIKRLEDLKNVFPPEVAVFEPSEAEISHTQKATLVCLATGFYPDHVELSWWVNGKEVHSGVCTDPQPLKEQPALNDSRYCLSSRLRVSATFWQNPRNHFRCQVQFYGLSENDEWTQDRAKPVTQIVSAEAWGRADCGFTSESYQQGVLSATILYEILLGKATLYAVLVSALVLMAMVKRKDSRGRAKRSGSGATNFSLLKQAGDVEENPGPTSMDWIWRILFLVGAATGAHSFEQVQLQQPGAELVKPGASVKMSCKASGYAFSSYWINWMKQKPGQGLEWIGQIYPGDGDTNYNGKFKGRATLTADTSSSTAYMQLSSLTSEDSAVYFCARSITTVVGCAMDYWGQGTSVTVSSTRIQNPDPAVYQLRDSKSSDKSVCLFTDFDSQTNVSQSKDSDVYITDKCVLDMRSMDFKSNSAVAWSNKSDFACANAFNNSIIPEDTFFPSPESSCDVKLVEKSFETDTNLNFQNLSVIGFRILLLKVAGFNLLMTLRLWSSRAKRSGSGVKQTLNFDLLKLAGDVESNPGPSRGHMTEYKPTVRLATRDDVPRAVRTLAAAFADYPATRHTVDPDRHIERVTELQELFLTRVGLDIGKVWVADDGAAVAVWTTPESVEAGAVFAEIGPRMAELSGSRLAAQQQMEGLLAPHRPKEPAWFLATVGVSPDHQGKGLGSAVVLPGVEAAERAGVPAFLETSAPRNLPFYERLGFTVTADVEVPEGPRTWCMTRKPGA

SEQ ID NO: 9452 - protein, 856 aa, synthetic construct
MALPVTALLLPLALLLHAARPDIQMTQSPSSLSASVGDRVTITCRASQDVNTAVAWYQQKPGKAPKLLIYSAYFLYSGVPSRFSGSRSGTDFTLTISSLQPEDFATYYCQQYSRYSPVTFGQGTKVEIKRLEADVSPKPTIFLPSIAETKLQKAGTYLCLLEKFFPDVIKIHWQEKKSNTILGSQEGNTMKTNDTYMKFSWLTVPEKSLDKEHRCIVRHENNKNGVDQEIIFPPIKTDVITMDPKDNCSKDANDTLLLQLTNTSAYYMYLLLLLKSVVYFAIITCCLLRRTAFCCNGEKSRAKRSGSGATNFSLLKQAGDVEENPGPTSMDWIWRILFLVGAATGAHSFEVQLVESGGGLVQPGGSLRLSCAASGFNVYASGMHWVRQAPGKGLEWVAKIYPDSDYTYYADSVKGRFTISADTSKNTAYLQMNSLRAEDTAVYYCSRDSSFYYVYAMDYWGQGTLVTVSSTRPHTKPSVFVMKNGTNVACLVKEFYPKDIRINLVSSKKITEFDPAIVISPSGKYNAVKLGKYEDSNSVTCSVQHDNKTVHSTDFEVKTDSTDHVKPKETENTKQPSKSCHKPKAIVHTEKVNMMSLTVLGLRMLFAKTVAVNFLLTAKLFFLRAKRSGSGVKQTLNFDLLKLAGDVESNPGPSRGHMTEYKPTVRLATRDDVPRAVRTLAAAFADYPATRHTVDPDRHIERVTELQELFLTRVGLDIGKVWVADDGAAVAVWTTPESVEAGAVFAEIGPRMAELSGSRLAAQQQMEGLLAPHRPKEPAWFLATVGVSPDHQGKGLGSAVVLPGVEAAERAGVPAFLETSAPRNLPFYERLGFTVTADVEVPEGPRTWCMTRKPGA

SEQ ID NO: 9453 - protein, 628 aa, synthetic construct
MALPVTALLLPLALLLHAARPEVQLVQSGAEVKKPGESLKISCKGSGYGFTSYWIGWVRQMPGKGLEWMGIIHPDDSDTKYSPSFQGQVTISADKSISTAYLQWSSLKASDTAMYYCASSYLRGLWGGYFDFWGQGTLVTVSSLEDLKNVFPPEVAVFEPSEAEISHTQKATLVCLATGFYPDHVELSWWVNGKEVHSGVCTDPQPLKEQPALNDSRYCLSSRLRVSATFWQNPRNHFRCQVQFYGLSENDEWTQDRAKPVTQIVSAEAWGRADCGFTSESYQQGVLSATILYEILLGKATLYAVLVSALVLMAMVKRKDSRGRAKRSGSGATNFSLLKQAGDVEENPGPTSMDWIWRILFLVGAATGAHSFELQSVLTQPPSASGTPGQRVTISCSGSSSNIGSNYVNWYQQLPGTAPKLLIYGDYQRPSGVPDRFSGSKSGTSASLAISGLRSEDEADYYCATRDDSLSGSVVFGTGTKLTVLGTRIQNPDPAVYQLRDSKSSDKSVCLFTDFDSQTNVSQSKDSDVYITDKCVLDMRSMDFKSNSAVAWSNKSDFACANAFNNSIIPEDTFFPSPESSCDVKLVEKSFETDTNLNFQNLSVIGFRILLLKVAGFNLLMTLRLWSS

SEQ ID NO: 9454 - protein, 816 aa, synthetic construct
MALPVTALLLPLALLLHAARPEVQLLESGGGMVQPGGSLRLSCAASGFTFSSYAMSWVRQAPGKGLEWVSAISGSGGRTFYADSVEGRFTISRDNSKNTLYLQMNSLRAEDTAVYYCAKHDYSNYPYFDYWGQGTLVTVSSLEDLKNVFPPEVAVFEPSEAEISHTQKATLVCLATGFYPDHVELSWWVNGKEVHSGVSTDPQPLKEQPALNDSRYCLSSRLRVSATFWQNPRNHFRCQVQFYGLSENDEWTQDRAKPVTQIVSAEAWGRADCGSQSFGLLDPKLCYLLDGILFIYGVILTALFLRVKFSRSADAPAYQQGQNQLYNELNLGRREEYDVLDKRRGRDPEMGGKPQRRKNPQEGLYNELQKDKMAEAYSEIGMKGERRRGKGHDGLYQGLSTATKDTYDALHMQALPPRRAKRSGSGATNFSLLKQAGDVEENPGPTSMDWIWRILFLVGAATGAHSFEIVLTQSPGTLSLSPGEGATLSCRAGQSVRSSYLGWYQQKPGQAPRLLIYGASSRATGIPDRFSGSGSGTDFTLTISRLEPEDFAVYYCQQYGYSPPTFGGGTKLEIKTRIQNPDPAVYQLRDSKSSDKSVCLFTDFDSQTNVSQSKDSDVYITDKTVLDMRSMDFKSNSAVAWSNKSDFACANAFNNSIIPEDTFFPSPESSCGTQSFGLLDPKLCYLLDGILFIYGVILTALFLRVKFSRSADAPAYQQGQNQLYNELNLGRREEYDVLDKRRGRDPEMGGKPQRRKNPQEGLYNELQKDKMAEAYSEIGMKGERRRGKGHDGLYQGLSTATKDTYDALHMQALPPR

SEQ ID NO: 9455 - protein, 816 aa, synthetic construct
MALPVTALLLPLALLLHAARPEVQLLESGGGLVQPGGSLRLSCAASGFTFSSYAMSWVRQAPGKGLEWVSVISGSGGRPNYADSVKGRFTISRDNSKNTLYLQMNSLRDEDTAVYYCAKVDYSNYLFFDYWGQGTLVTVSSLEDLKNVFPPEVAVFEPSEAEISHTQKATLVCLATGFYPDHVELSWWVNGKEVHSGVSTDPQPLKEQPALNDSRYCLSSRLRVSATFWQNPRNHFRCQVQFYGLSENDEWTQDRAKPVTQIVSAEAWGRADCGSQSFGLLDPKLCYLLDGILFIYGVILTALFLRVKFSRSADAPAYQQGQNQLYNELNLGRREEYDVLDKRRGRDPEMGGKPQRRKNPQEGLYNELQKDKMAEAYSEIGMKGERRRGKGHDGLYQGLSTATKDTYDALHMQALPPRRAKRSGSGATNFSLLKQAGDVEENPGPTSMDWIWRILFLVGAATGAHSFEIVLTQSPGTLSLSPGEGATLSCRAGQSVRSSYLGWYQQKPGQAPRLLIYGASSRATGIPDRFSGSGSGTDFTLTISRLEPEDFAVYYCQQYGYSPPTFGGGTKLEIKTRIQNPDPAVYQLRDSKSSDKSVCLFTDFDSQTNVSQSKDSDVYITDKTVLDMRSMDFKSNSAVAWSNKSDFACANAFNNSIIPEDTFFPSPESSCGTQSFGLLDPKLCYLLDGILFIYGVILTALFLRVKFSRSADAPAYQQGQNQLYNELNLGRREEYDVLDKRRGRDPEMGGKPQRRKNPQEGLYNELQKDKMAEAYSEIGMKGERRRGKGHDGLYQGLSTATKDTYDALHMQALPPR

SEQ ID NO: 9456 - protein, 814 aa, synthetic construct
MALPVTALLLPLALLLHAARPDIQMTQSPSSLSASVGDRVTITCRASQGISSWLAWYQQKPGKAPKLLIYAASSLQSGVPSRFSGSGSGTDFTLTISSLQPEDFATYYCQQYNSYPLTFGQGTKVEIKRLEDLKNVFPPEVAVFEPSEAEISHTQKATLVCLATGFYPDHVELSWWVNGKEVHSGVSTDPQPLKEQPALNDSRYCLSSRLRVSATFWQNPRNHFRCQVQFYGLSENDEWTQDRAKPVTQIVSAEAWGRADCGSQSFGLLDPKLCYLLDGILFIYGVILTALFLRVKFSRSADAPAYQQGQNQLYNELNLGRREEYDVLDKRRGRDPEMGGKPQRRKNPQEGLYNELQKDKMAEAYSEIGMKGERRRGKGHDGLYQGLSTATKDTYDALHMQALPPRRAKRSGSGATNFSLLKQAGDVEENPGPTSMDWIWRILFLVGAATGAHSFEVQLVESGGGLVQPGGSLRLSCAASGFTFSDHGMHWVRQAPGKGLEWVAVIWYDGSNKYYADSVKGRFTISRDNSKNTLYLQMNSLRAEDTAVYYCARDSIMVRGDYWGQGTLVTVSSTRIQNPDPAVYQLRDSKSSDKSVCLFTDFDSQTNVSQSKDSDVYITDKTVLDMRSMDFKSNSAVAWSNKSDFACANAFNNSIIPEDTFFPSPESSCGTQSFGLLDPKLCYLLDGILFIYGVILTALFLRVKFSRSADAPAYQQGQNQLYNELNLGRREEYDVLDKRRGRDPEMGGKPQRRKNPQEGLYNELQKDKMAEAYSEIGMKGERRRGKGHDGLYQGLSTATKDTYDALHMQALPPR

SEQ ID NO: 9457 - protein, 819 aa, synthetic construct
MALPVTALLLPLALLLHAARPDIVMTQSPDSLAVSLGERATINCRASKSVSTSGYSFMHWYQQKPGQPPKLLIYLASNLESGVPDRFSGSGSGTDFTLTISSLQAEDVAVYYCQHSREVPWTFGQGTKVEIKRLEDLKNVFPPEVAVFEPSEAEISHTQKATLVCLATGFYPDHVELSWWVNGKEVHSGVSTDPQPLKEQPALNDSRYCLSSRLRVSATFWQNPRNHFRCQVQFYGLSENDEWTQDRAKPVTQIVSAEAWGRADCGSQSFGLLDPKLCYLLDGILFIYGVILTALFLRVKFSRSADAPAYQQGQNQLYNELNLGRREEYDVLDKRRGRDPEMGGKPQRRKNPQEGLYNELQKDKMAEAYSEIGMKGERRRGKGHDGLYQGLSTATKDTYDALHMQALPPRRAKRSGSGATNFSLLKQAGDVEENPGPTSMDWIWRILFLVGAATGAHSFEQVQLVQSGAEVKKPGASVKVSCKASGYTFTNYGMNWVRQAPGQGLEWMGWINTYTGEPTYADAFKGRFAFSLDTSTSTAYLQINSLRSDDTAVYYCARDYGDYGMDYWGQGTTVTVSSTRIQNPDPAVYQLRDSKSSDKSVCLFTDFDSQTNVSQSKDSDVYITDKTVLDMRSMDFKSNSAVAWSNKSDFACANAFNNSIIPEDTFFPSPESSCGTQSFGLLDPKLCYLLDGILFIYGVILTALFLRVKFSRSADAPAYQQGQNQLYNELNLGRREEYDVLDKRRGRDPEMGGKPQRRKNPQEGLYNELQKDKMAEAYSEIGMKGERRRGKGHDGLYQGLSTATKDTYDALHMQALPPR

SEQ ID NO: 9458 - protein, 1004 aa, synthetic construct
MALPVTALLLPLALLLHAARPDIQMTQSPSSLSASVGDRVTITCKASDHINNWLAWYQQKPGQAPKLLIYGATTLETGVPSRFSGSGSGTDYTLTISSLQPEDFATYYCQQSWNTPWTFGQGTKLEIKRLEGQPKANPTVTLFPPSSEELQANKATLVCLISDFYPGAVTVAWKADGSPVKAGVETTKPSKQSNNKYAASSYLSLTPEQWKSHRSYSCQVTHEGSTVEKTVAPTECSGSGKGTQLSVVDFLPTTAQPTKKSTLKKRVCRLPRPETQKGPLCSPITLGLLVAGVLVLLVSLGVAIHLCCRRRRARLRFMKQFYKTSMDWIWRILFLVGAATGAHSFEQVQLQQPGAELVKPGASVKMSCKASGYAFSSYWINWMKQKPGQGLEWIGQIYPGDGDTNYNGKFKGRATLTADTSSSTAYMQLSSLTSEDSAVYFCARSITTVVGCAMDYWGQGTSVTVSSTRASTKGPSVFPLAPSSKSTSGGTAALGCLVKDYFPEPVTVSWNSGALTSGVHTFPAVLQSSGLYSLSSVVTVPSSSLGTQTYICNVNHKPSNTKVDKRVEPKSCGTSGQVLLESNIKVLPTWSTPVQPMALIVLGGVAGLLLFIGLGIFFCVRCRHRRRQAERMSQIKRLLSEKKTCQCPHRFQKTCSPISRRVKFSRSADAPAYQQGQNQLYNELNLGRREEYDVLDKRRGRDPEMGGKPQRRKNPQEGLYNELQKDKMAEAYSEIGMKGERRRGKGHDGLYQGLSTATKDTYDALHMQALPPRRAKRSGSGVKQTLNFDLLKLAGDVESNPGPGHMTEYKPTVRLATRDDVPRAVRTLAAAFADYPATRHTVDPDRHIERVTELQELFLTRVGLDIGKVWVADDGAAVAVWTTPESVEAGAVFAEIGPRMAELSGSRLAAQQQMEGLLAPHRPKEPAWFLATVGVSPDHQGKGLGSAVVLPGVEAAERAGVPAFLETSAPRNLPFYERLGFTVTADVEVPEGPRTWCMTRKPGA

SEQ ID NO: 9459 - protein, 982 aa, synthetic construct
MALPVTALLLPLALLLHAARPDIQMTQSPSSLSASVGDRVTITCKASDHINNWLAWYQQKPGQAPKLLIYGATTLETGVPSRFSGSGSGTDYTLTISSLQPEDFATYYCQQSWNTPWTFGQGTKLEIKRLEGQPKANPTVTLFPPSSEELQANKATLVCLISDFYPGAVTVAWKADGSPVKAGVETTKPSKQSNNKYAASSYLSLTPEQWKSHRSYSCQVTHEGSTVEKTVAPTECSGSGKGTQLSVVDFLPTTAQPTKKSTLKKRVCRLPRPETQKGPLCSPITLGLLVAGVLVLLVSLGVAIHLCCRRRRARLRFMKQFYKTSMDWIWRILFLVGAATGAHSFEQVQLQQPGAELVKPGASVKMSCKASGYAFSSYWINWMKQKPGQGLEWIGQIYPGDGDTNYNGKFKGRATLTADTSSSTAYMQLSSLTSEDSAVYFCARSITTVVGCAMDYWGQGTSVTVSSTRASTKGPSVFPLAPSSKSTSGGTAALGCLVKDYFPEPVTVSWNSGALTSGVHTFPAVLQSSGLYSLSSVVTVPSSSLGTQTYICNVNHKPSNTKVDKRVEPKSCGTMALIVLGGVAGLLLFIGLGIFFCVRCRHRRRQAERMSQIKRLLSEKKTCQCPHRFQKTCSPISRRVKFSRSADAPAYQQGQNQLYNELNLGRREEYDVLDKRRGRDPEMGGKPQRRKNPQEGLYNELQKDKMAEAYSEIGMKGERRRGKGHDGLYQGLSTATKDTYDALHMQALPPRRAKRSGSGVKQTLNFDLLKLAGDVESNPGPGHMTEYKPTVRLATRDDVPRAVRTLAAAFADYPATRHTVDPDRHIERVTELQELFLTRVGLDIGKVWVADDGAAVAVWTTPESVEAGAVFAEIGPRMAELSGSRLAAQQQMEGLLAPHRPKEPAWFLATVGVSPDHQGKGLGSAVVLPGVEAAERAGVPAFLETSAPRNLPFYERLGFTVTADVEVPEGPRTWCMTRKPGA

SEQ ID NO: 9460 - protein, 1159 aa, synthetic construct
MALPVTALLLPLALLLHAARPDIQMTQSPSSLSASVGDRVTITCKASDHINNWLAWYQQKPGQAPKLLIYGATTLETGVPSRFSGSGSGTDYTLTISSLQPEDFATYYCQQSWNTPWTFGQGTKLEIKRLEDLKNVFPPEVAVFEPSEAEISHTQKATLVCLATGFYPDHVELSWWVNGKEVHSGVSTDPQPLKEQPALNDSRYCLSSRLRVSATFWQNPRNHFRCQVQFYGLSENDEWTQDRAKPVTQIVSAEAWGRADCGSGKGTQLSVVDFLPTTAQPTKKSTLKKRVCRLPRPETQKGPLCSPITLGLLVAGVLVLLVSLGVAIHLCCRRRRARLRFMKQFYKTSRVKFSRSADAPAYQQGQNQLYNELNLGRREEYDVLDKRRGRDPEMGGKPQRRKNPQEGLYNELQKDKMAEAYSEIGMKGERRRGKGHDGLYQGLSTATKDTYDALHMQALPPRRAKRSGSGATNFSLLKQAGDVEENPGPMDWIWRILFLVGAATGAHSFEQVQLQQPGAELVKPGASVKMSCKASGYAFSSYWINWMKQKPGQGLEWIGQIYPGDGDTNYNGKFKGRATLTADTSSSTAYMQLSSLTSEDSAVYFCARSITTVVGCAMDYWGQGTSVTVSSTRIQNPDPAVYQLRDSKSSDKSVCLFTDFDSQTNVSQSKDSDVYITDKTVLDMRSMDFKSNSAVAWSNKSDFACANAFNNSIIPEDTFFPSPESSCGTSGQVLLESNIKVLPTWSTPVQPMALIVLGGVAGLLLFIGLGIFFCVRCRHRRRQAERMSQIKRLLSEKKTCQCPHRFQKTCSPISRRVKFSRSADAPAYQQGQNQLYNELNLGRREEYDVLDKRRGRDPEMGGKPQRRKNPQEGLYNELQKDKMAEAYSEIGMKGERRRGKGHDGLYQGLSTATKDTYDALHMQALPPRRAKRSGSGVKQTLNFDLLKLAGDVESNPGPGHMTEYKPTVRLATRDDVPRAVRTLAAAFADYPATRHTVDPDRHIERVTELQELFLTRVGLDIGKVWVADDGAAVAVWTTPESVEAGAVFAEIGPRMAELSGSRLAAQQQMEGLLAPHRPKEPAWFLATVGVSPDHQGKGLGSAVVLPGVEAAERAGVPAFLETSAPRNLPFYERLGFTVTADVEVPEGPRTWCMTRKPGA

SEQ ID NO: 9461 - protein, 757 aa, synthetic construct
MALPVTALLLPLALLLHAARPDIQMTQSPSSLSASVGDRVTITCKASDHINNWLAWYQQKPGQAPKLLIYGATTLETGVPSRFSGSGSGTDYTLTISSLQPEDFATYYCQQSWNTPWTFGQGTKLEIKRLEGQPKANPTVTLFPPSSEELQANKATLVCLISDFYPGAVTVAWKADGSPVKAGVETTKPSKQSNNKYAASSYLSLTPEQWKSHRSYSCQVTHEGSTVEKTVAPTECSGSLGEPQLCYILDAILFLYGIVLTLLYCRLKIQVRKAAITSYEKSDGVYTGLSTRNQETYETLKHEKPPQRAKRSGSGATNFSLLKQAGDVEENPGPTSMDWIWRILFLVGAATGAHSFEQVQLQQPGAELVKPGASVKMSCKASGYAFSSYWINWMKQKPGQGLEWIGQIYPGDGDTNYNGKFKGRATLTADTSSSTAYMQLSSLTSEDSAVYFCARSITTVVGCAMDYWGQGTSVTVSSTRASTKGPSVFPLAPSSKSTSGGTAALGCLVKDYFPEPVTVSWNSGALTSGVHTFPAVLQSSGLYSLSSVVTVPSSSLGTQTYICNVNHKPSNTKVDKRVEPKSCGTDQCTDLLALGIPSITQAWGLWVLLGAVTLLFLISLAAHLSQWTRGRSRSHPGQGRSGESVEEVPLYGNLHYLQTGRLSQDPEPDQQDPTLGGPARAAEEVMCYTSLQLRPPQGRIPGPGTPVKYSEVVLDSEPKSQASGPEPELYASVCAQTRRARASFPDQAYANSQPAAS

SEQ ID NO: 9462 - protein, 709 aa, synthetic construct
MALPVTALLLPLALLLHAARPEFNAGVTQTPKFQVLKTGQSMTLQCAQDMNHEYMSWYRQDPGMGLRLIHYSVAIQTTDQGEVPNGYNVSRSTIEDFPLRLLSAAPSQTSVYFCASSYLGNTGELFFGEGSRLTVLEDLKNVFPPEVAVFEPSEAEISHTQKATLVCLATGFYPDHVELSWWVNGKEVHSGVSTDPQPLKEQPALNDSRYCLSSRLRVSATFWQNPRNHFRCQVQFYGLSENDEWTQDRAKPVTQIVSAEAWGRADCGSLGEPQLCYILDAILFLYGIVLTLLYCKRGRKKLLYIFKQPFMRPVQTTQEEDGCSCRFPEEEEGGCELRLKIQVRKAAITSYEKSDGVYTGLSTRNQETYETLKHEKPPQRAKRSGSGATNFSLLKQAGDVEENPGPTSMDWIWRILFLVGAATGAHSFEQEVTQIPAALSVPEGENLVLNCSFTDSAIYNLQWFRQDPGKGLTSLLLIQSSQREQTSGRLNASLDKSSGRSTLYIAASQPGDSATYLCAVRPTSGGSYIPTFGRGTSLIVHPYTRIQNPDPAVYQLRDSKSSDKSVCLFTDFDSQTNVSQSKDSDVYITDKTVLDMRSMDFKSNSAVAWSNKSDFACANAFNNSIIPEDTFFPSPESSCGTLGEPQLCYILDAILFLYGIVLTLLYCRLKIQVRKAAITSYEKSDGVYTGLSTRNQETYETLKHEKPPQ

SEQ ID NO: 9463 - protein, 784 aa, synthetic construct
MALPVTALLLPLALLLHAARPEFNAGVTQTPKFQVLKTGQSMTLQCAQDMNHEYMSWYRQDPGMGLRLIHYSVAIQTTDQGEVPNGYNVSRSTIEDFPLRLLSAAPSQTSVYFCASSYLGNTGELFFGEGSRLTVLEDLKNVFPPEVAVFEPSEAEISHTQKATLVCLATGFYPDHVELSWWVNGKEVHSGVSTDPQPLKEQPALNDSRYCLSSRLRVSATFWQNPRNHFRCQVQFYGLSENDEWTQDRAKPVTQIVSAEAWGRADCGSLGEPQLCYILDAILFLYGIVLTLLYCKRGRKKLLYIFKQPFMRPVQTTQEEDGCSCRFPEEEEGGCELRLKIQVRKAAITSYEKSDGVYTGLSTRNQETYETLKHEKPPQRAKRSGSGATNFSLLKQAGDVEENPGPTSMDWIWRILFLVGAATGAHSFEQEVTQIPAALSVPEGENLVLNCSFTDSAIYNLQWFRQDPGKGLTSLLLIQSSQREQTSGRLNASLDKSSGRSTLYIAASQPGDSATYLCAVRPTSGGSYIPTFGRGTSLIVHPYTRIQNPDPAVYQLRDSKSSDKSVCLFTDFDSQTNVSQSKDSDVYITDKTVLDMRSMDFKSNSAVAWSNKSDFACANAFNNSIIPEDTFFPSPESSCGTQSFGLLDPKLCYLLDGILFIYGVILTALFLRVKFSRSADAPAYQQGQNQLYNELNLGRREEYDVLDKRRGRDPEMGGKPQRRKNPQEGLYNELQKDKMAEAYSEIGMKGERRRGKGHDGLYQGLSTATKDTYDALHMQALPPR

SEQ ID NO: 9464 - protein, 861 aa, synthetic construct
MALPVTALLLPLALLLHAARPDIQMTQSPSSLSASVGDRVTITCKASDHINNWLAWYQQKPGQAPKLLIYGATTLETGVPSRFSGSGSGTDYTLTISSLQPEDFATYYCQQSWNTPWTFGQGTKLEIKRLEDLKNVFPPEVAVFEPSEAEISHTQKATLVCLATGFYPDHVELSWWVNGKEVHSGVSTDPQPLKEQPALNDSRYCLSSRLRVSATFWQNPRNHFRCQVQFYGLSENDEWTQDRAKPVTQIVSAEAWGRADCGSMSGISGCPFFLWGLLALLGLALVISLIFNISHYVEKQRQDKMYSYSSDHTRVDEYYIEDTPIYGNLDDMISEPMDENCYEQMKARPEKSVNKMQEATPSAQATNETQMCYASLDHSVKGKRRKPRKQNTHFSDKDGDEQLHAIDASVSKTTLVDSFSPESQAVEENIHDDPIRLFGLIRAKREPINRAKRSGSGATNFSLLKQAGDVEENPGPTSMDWIWRILFLVGAATGAHSFEQVQLQQPGAELVKPGASVKMSCKASGYAFSSYWINWMKQKPGQGLEWIGQIYPGDGDTNYNGKFKGRATLTADTSSSTAYMQLSSLTSEDSAVYFCARSITTVVGCAMDYWGQGTSVTVSSTRIQNPDPAVYQLRDSKSSDKSVCLFTDFDSQTNVSQSKDSDVYITDKTVLDMRSMDFKSNSAVAWSNKSDFACANAFNNSIIPEDTFFPSPESSCGTQSFGLLDPKLCYLLDGILFIYGVILTALFLRVKFSRSADAPAYQQGQNQLYNELNLGRREEYDVLDKRRGRDPEMGGKPQRRKNPQEGLYNELQKDKMAEAYSEIGMKGERRRGKGHDGLYQGLSTATKDTYDALHMQALPPR

SEQ ID NO: 9465 - protein, 783 aa, synthetic construct
MALPVTALLLPLALLLHAARPEFNAGVTQTPKFQVLKTGQSMTLQCAQDMNHEYMSWYRQDPGMGLRLIHYSVAIQTTDQGEVPNGYNVSRSTIEDFPLRLLSAAPSQTSVYFCASSYLGNTGELFFGEGSRLTVLEDLKNVFPPEVAVFEPSEAEISHTQKATLVCLATGFYPDHVELSWWVNGKEVHSGVSTDPQPLKEQPALNDSRYCLSSRLRVSATFWQNPRNHFRCQVQFYGLSENDEWTQDRAKPVTQIVSAEAWGRADCGSLGEPQLCYILDAILFLYGIVLTLLYCKRGRKKLLYIFKQPFMRPVQTTQEEDGCSCRFPEEEEGGCELRLKIQVRKAAITSYEKSDGVYTGLSTRNQETYETLKHEKPPQRAKRSGSGATNFSLLKQAGDVEENPGPTSMDWIWRILFLVGAATGAHSFEQEVTQIPAALSVPEGENLVLNCSFTDSAIYNLQWFRQDPGKGLTSLLLIQSSQREQTSGRLNASLDKSSGRSTLYIAASQPGDSATYLCAVRPTSGGSYIPTFGRGTSLIVHPYTRIQNPDPAVYQLRDSKSSDKSVCLFTDFDSQTNVSQSKDSDVYITDKTVLDMRSMDFKSNSAVAWSNKSDFACANAFNNSIIPEDTFFPSPESSCGTLGEPQLCYILDAILFLYGIVLTLLYCKRGRKKLLYIFKQPFMRPVQTTQEEDGCSCRFPEEEEGGCELRLKIQVRKAAITSYEKSDGVYTGLSTRNQETYETLKHEKPPQRAKRSGSGVKQTLNFDLLKLAGDVESNPGPSR

SEQ ID NO: 9466 - protein, 784 aa, synthetic construct
MALPVTALLLPLALLLHAARPDIQMTQSPSSLSASVGDRVTITCKASDHINNWLAWYQQKPGQAPKLLIYGATTLETGVPSRFSGSGSGTDYTLTISSLQPEDFATYYCQQSWNTPWTFGQGTKLEIKRLEDLKNVFPPEVAVFEPSEAEISHTQKATLVCLATGFYPDHVELSWWVNGKEVHSGVSTDPQPLKEQPALNDSRYCLSSRLRVSATFWQNPRNHFRCQVQFYGLSENDEWTQDRAKPVTQIVSAEAWGRADCGSLGEPQLCYILDAILFLYGIVLTLLYCKRGRKKLLYIFKQPFMRPVQTTQEEDGCSCRFPEEEEGGCELRLKIQVRKAAITSYEKSDGVYTGLSTRNQETYETLKHEKPPQRAKRSGSGATNFSLLKQAGDVEENPGPTSMDWIWRILFLVGAATGAHSFEQVQLQQPGAELVKPGASVKMSCKASGYAFSSYWINWMKQKPGQGLEWIGQIYPGDGDTNYNGKFKGRATLTADTSSSTAYMQLSSLTSEDSAVYFCARSITTVVGCAMDYWGQGTSVTVSSTRIQNPDPAVYQLRDSKSSDKSVCLFTDFDSQTNVSQSKDSDVYITDKTVLDMRSMDFKSNSAVAWSNKSDFACANAFNNSIIPEDTFFPSPESSCGTLGEPQLCYILDAILFLYGIVLTLLYCKRGRKKLLYIFKQPFMRPVQTTQEEDGCSCRFPEEEEGGCELRLKIQVRKAAITSYEKSDGVYTGLSTRNQETYETLKHEKPPQRAKRSGSGVKQTLNFDLLKLAGDVESNPGPSR

SEQ ID NO: 9467 - protein, 784 aa, synthetic construct
MALPVTALLLPLALLLHAARPDIQMTQSPSSLSASVGDRVTITCKASDHINNWLAWYQQKPGQAPKLLIYGATTLETGVPSRFSGSGSGTDYTLTISSLQPEDFATYYCQQSWNTPWTFGQGTKLEIKRLEDLKNVFPPEVAVFEPSEAEISHTQKATLVCLATGFYPDHVELSWWVNGKEVHSGVSTDPQPLKEQPALNDSRYCLSSRLRVSATFWQNPRNHFRCQVQFYGLSENDEWTQDRAKPVTQIVSAEAWGRADCGSLGEPQLCYILDAILFLYGIVLTLLYCRLKIQVRKAAITSYEKSDGVYTGLSTRNQETYETLKHEKPPQKRGRKKLLYIFKQPFMRPVQTTQEEDGCSCRFPEEEEGGCELRAKRSGSGATNFSLLKQAGDVEENPGPTSMDWIWRILFLVGAATGAHSFEQVQLQQPGAELVKPGASVKMSCKASGYAFSSYWINWMKQKPGQGLEWIGQIYPGDGDTNYNGKFKGRATLTADTSSSTAYMQLSSLTSEDSAVYFCARSITTVVGCAMDYWGQGTSVTVSSTRIQNPDPAVYQLRDSKSSDKSVCLFTDFDSQTNVSQSKDSDVYITDKTVLDMRSMDFKSNSAVAWSNKSDFACANAFNNSIIPEDTFFPSPESSCGTLGEPQLCYILDAILFLYGIVLTLLYCRLKIQVRKAAITSYEKSDGVYTGLSTRNQETYETLKHEKPPQKRGRKKLLYIFKQPFMRPVQTTQEEDGCSCRFPEEEEGGCELRAKRSGSGVKQTLNFDLLKLAGDVESNPGPSR

SEQ ID NO: 9468 - protein, 963 aa, synthetic construct; identical to SEQ ID NO: 9399

SEQ ID NO: 9469 - protein, 736 aa, synthetic construct; identical to SEQ ID NO: 9398

SEQ ID NO: 9470 - protein, 957 aa, synthetic construct
MALPVTALLLPLALLLHAARPDEIVLTQSPGSLAVSPGERVTMSCKSSQSVFFSSSQKNYLAWYQQIPGQSPRLLIYWASTRESGVPDRFTGSGSGTDFTLTISSVQPEDLAIYYCHQYLSSRTFGQGTKLEIKRLEDLKNVFPPEVAVFEPSEAEISHTQKATLVCLATGFYPDHVELSWWVNGKEVHSGVSTDPQPLKEQPALNDSRYCLSSRLRVSATFWQNPRNHFRCQVQFYGLSENDEWTQDRAKPVTQIVSAEAWGRADCGSQSFGLLDPKLCYLLDGILFIYGVILTALFLRVKFSRSADAPAYQQGQNQLYNELNLGRREEYDVLDKRRGRDPEMGGKPQRRKNPQEGLYNELQKDKMAEAYSEIGMKGERRRGKGHDGLYQGLSTATKDTYDALHMQALPPRRAKRSGSGATNFSLLKQAGDVEENPGPTSATMDWIWRILFLVGAATGAHSGPEVQLVESGGGLVQAGGSLRLSCAASGSVFSGNVMGWYRQAPGKEREWVAAIASGGSIYYRDSVKGRFTISRDNAKNTVYLQMNSLKPEDTAVYYCNSHPPTLPYWGLGTQVTVSSGSGGGGSGGGGSGGGGSFEQVQLQQPGAEVVKPGASVKMSCKASGYTFTSYYIHWIKQTPGQGLEWVGVIYPGNDDISYNQKFQGKATLTADKSSTTAYMQLSSLTSEDSAVYYCAREVRLRYFDVWGQGTTVTVSSTRIQNPDPAVYQLRDSKSSDKSVCLFTDFDSQTNVSQSKDSDVYITDKTVLDMRSMDFKSNSAVAWSNKSDFACANAFNNSIIPEDTFFPSPESSCGTQSFGLLDPKLCYLLDGILFIYGVILTALFLRVKFSRSADAPAYQQGQNQLYNELNLGRREEYDVLDKRRGRDPEMGGKPQRRKNPQEGLYNELQKDKMAEAYSEIGMKGERRRGKGHDGLYQGLSTATKDTYDALHMQALPPR

SEQ ID NO: 9471 - protein, 847 aa, synthetic construct
MALPVTALLLPLALLLHAARPDIQMTQSPSSLSASVGDRVTITCKASDHINNWLAWYQQKPGQAPKLLIYGATTLETGVPSRFSGSGSGTDYTLTISSLQPEDFATYYCQQSWNTPWTFGQGTKLEIKRLEDLKNVFPPEVAVFEPSEAEISHTQKATLVCLATGFYPDHVELSWWVNGKEVHSGVSTDPQPLKEQPALNDSRYCLSSRLRVSATFWQNPRNHFRCQVQFYGLSENDEWTQDRAKPVTQIVSAEAWGRADCGSDQCTDLLALGIPSITQAWGLWVLLGAVTLLFLISLAAHLSQWTRGRSRSHPGQGRSGESVEEVPLYGNLHYLQTGRLSQDPEPDQQDPTLGGPARAAEEVMCYTSLQLRPPQGRIPGPGTPVKYSEVVLDSEPKSQASGPEPELYASVCAQTRRARASFPDQAYANSQPAASRAKRSGSGATNFSLLKQAGDVEENPGPTSMDWIWRILFLVGAATGAHSFEQVQLQQPGAELVKPGASVKMSCKASGYAFSSYWINWMKQKPGQGLEWIGQIYPGDGDTNYNGKFKGRATLTADTSSSTAYMQLSSLTSEDSAVYFCARSITTVVGCAMDYWGQGTSVTVSSTRIQNPDPAVYQLRDSKSSDKSVCLFTDFDSQTNVSQSKDSDVYITDKTVLDMRSMDFKSNSAVAWSNKSDFACANAFNNSIIPEDTFFPSPESSCGTQSFGLLDPKLCYLLDGILFIYGVILTALFLRVKFSRSADAPAYQQGQNQLYNELNLGRREEYDVLDKRRGRDPEMGGKPQRRKNPQEGLYNELQKDKMAEAYSEIGMKGERRRGKGHDGLYQGLSTATKDTYDALHMQALPPR

SEQ ID NO: 9472 - protein, 785 aa, synthetic construct
MALPVTALLLPLALLLHAARPDIQMTQSPSSLSASVGDRVTITCKASDHINNWLAWYQQKPGQAPKLLIYGATTLETGVPSRFSGSGSGTDYTLTISSLQPEDFATYYCQQSWNTPWTFGQGTKLEIKRLEDLKNVFPPEVAVFEPSEAEISHTQKATLVCLATGFYPDHVELSWWVNGKEVHSGVSTDPQPLKEQPALNDSRYCLSSRLRVSATFWQNPRNHFRCQVQFYGLSENDEWTQDRAKPVTQIVSAEAWGRADCGSLGEPQLCYILDAILFLYGIVLTLLYCKRGRKKLLYIFKQPFMRPVQTTQEEDGCSCRFPEEEEGGCELRLKIQVRKAAITSYEKSDGVYTGLSTRNQETYETLKHEKPPQRAKRSGSGATNFSLLKQAGDVEENPGPTSMDWIWRILFLVGAATGAHSFEQVQLQQPGAELVKPGASVKMSCKASGYAFSSYWINWMKQKPGQGLEWIGQIYPGDGDTNYNGKFKGRATLTADTSSSTAYMQLSSLTSEDSAVYFCARSITTVVGCAMDYWGQGTSVTVSSTRIQNPDPAVYQLRDSKSSDKSVCLFTDFDSQTNVSQSKDSDVYITDKTVLDMRSMDFKSNSAVAWSNKSDFACANAFNNSIIPEDTFFPSPESSCGTQSFGLLDPKLCYLLDGILFIYGVILTALFLRVKFSRSADAPAYQQGQNQLYNELNLGRREEYDVLDKRRGRDPEMGGKPQRRKNPQEGLYNELQKDKMAEAYSEIGMKGERRRGKGHDGLYQGLSTATKDTYDALHMQALPPR

SEQ ID NO: 9473 - protein, 936 aa, synthetic construct
MALPVTALLLPLALLLHAARPDIQMTQSPSSLSASVGDRVTITCKASDHINNWLAWYQQKPGQAPKLLIYGATTLETGVPSRFSGSGSGTDYTLTISSLQPEDFATYYCQQSWNTPWTFGQGTKLEIKRLEDLKNVFPPEVAVFEPSEAEISHTQKATLVCLATGFYPDHVELSWWVNGKEVHSGVCTDPQPLKEQPALNDSRYCLSSRLRVSATFWQNPRNHFRCQVQFYGLSENDEWTQDRAKPVTQIVSAEAWGRADCGFTSESYQQGVLSATILYEILLGKATLYAVLVSALVLMAMVKRKDSRGRAKRSGSGATNFSLLKQAGDVEENPGPTSATMDWIWRILFLVGAATGAHSGPGGSFNVLMVHRRSHTGERPFQCNQCGASFTQRGNLLRHIRLHTGERPFRCHLCNYACQRRDALTASAEARHIRAEMGFEQVQLQQPGAELVKPGASVKMSCKASGYAFSSYWINWMKQKPGQGLEWIGQIYPGDGDTNYNGKFKGRATLTADTSSSTAYMQLSSLTSEDSAVYFCARSITTVVGCAMDYWGQGTSVTVSSTRIQNPDPAVYQLRDSKSSDKSVCLFTDFDSQTNVSQSKDSDVYITDKCVLDMRSMDFKSNSAVAWSNKSDFACANAFNNSIIPEDTFFPSPESSCDVKLVEKSFETDTNLNFQNLSVIGFRILLLKVAGFNLLMTLRLWSSRAKRSGSGVKQTLNFDLLKLAGDVESNPGPSRGHMTEYKPTVRLATRDDVPRAVRTLAAAFADYPATRHTVDPDRHIERVTELQELFLTRVGLDIGKVWVADDGAAVAVWTTPESVEAGAVFAEIGPRMAELSGSRLAAQQQMEGLLAPHRPKEPAWFLATVGVSPDHQGKGLGSAVVLPGVEAAERAGVPAFLETSAPRNLPFYERLGFTVTADVEVPEGPRTWCMTRKPGA

SEQ ID NO: 9474 - protein, 973 aa, synthetic construct
MALPVTALLLPLALLLHAARPDIQMTQSPSSLSASVGDRVTITCKASDHINNWLAWYQQKPGQAPKLLIYGATTLETGVPSRFSGSGSGTDYTLTISSLQPEDFATYYCQQSWNTPWTFGQGTKLEIKRLEDLKNVFPPEVAVFEPSEAEISHTQKATLVCLATGFYPDHVELSWWVNGKEVHSGVCTDPQPLKEQPALNDSRYCLSSRLRVSATFWQNPRNHFRCQVQFYGLSENDEWTQDRAKPVTQIVSAEAWGRADCGFTSESYQQGVLSATILYEILLGKATLYAVLVSALVLMAMVKRKDSRGRAKRSGSGATNFSLLKQAGDVEENPGPTSATMDWIWRILFLVGAATGAHSGPSGGGSLEGVQVETISPGDGRTFPKRGQTCVVHYTGMLEDGKKVDSSRDRNKPFKFMLGKQEVIRGWEEGVAQMSVGQRAKLTISPDYAYGATGHPGIIPPHATLVFDVELLKLEFEQVQLQQPGAELVKPGASVKMSCKASGYAFSSYWINWMKQKPGQGLEWIGQIYPGDGDTNYNGKFKGRATLTADTSSSTAYMQLSSLTSEDSAVYFCARSITTVVGCAMDYWGQGTSVTVSSTRIQNPDPAVYQLRDSKSSDKSVCLFTDFDSQTNVSQSKDSDVYITDKCVLDMRSMDFKSNSAVAWSNKSDFACANAFNNSIIPEDTFFPSPESSCDVKLVEKSFETDTNLNFQNLSVIGFRILLLKVAGFNLLMTLRLWSSRAKRSGSGVKQTLNFDLLKLAGDVESNPGPSRGHMTEYKPTVRLATRDDVPRAVRTLAAAFADYPATRHTVDPDRHIERVTELQELFLTRVGLDIGKVWVADDGAAVAVWTTPESVEAGAVFAEIGPRMAELSGSRLAAQQQMEGLLAPHRPKEPAWFLATVGVSPDHQGKGLGSAVVLPGVEAAERAGVPAFLETSAPRNLPFYERLGFTVTADVEVPEGPRTWCMTRKPGA

SEQ ID NO: 9475 - protein, 990 aa, synthetic construct
MALPVTALLLPLALLLHAARPDIQMTQSPSSLSASVGDRVTITCKASDHINNWLAWYQQKPGQAPKLLIYGATTLETGVPSRFSGSGSGTDYTLTISSLQPEDFATYYCQQSWNTPWTFGQGTKLEIKRLEDLKNVFPPEVAVFEPSEAEISHTQKATLVCLATGFYPDHVELSWWVNGKEVHSGVCTDPQPLKEQPALNDSRYCLSSRLRVSATFWQNPRNHFRCQVQFYGLSENDEWTQDRAKPVTQIVSAEAWGRADCGFTSESYQQGVLSATILYEILLGKATLYAVLVSALVLMAMVKRKDSRGRAKRSGSGATNFSLLKQAGDVEENPGPTSATMDWIWRILFLVGAATGAHSGPSGGGSLEGVQVETISPGDGRTFPKRGQTCVVHYTGMLEDGKKVDSSRDRNKPFKFMLGKQEVIRGWEEGVAQMSVGQRAKLTISPDYAYGATGHPGIIPPHATLVFDVELLKLEGSGGGGSGGGGSGGGGSFEQVQLQQPGAELVKPGASVKMSCKASGYAFSSYWINWMKQKPGQGLEWIGQIYPGDGDTNYNGKFKGRATLTADTSSSTAYMQLSSLTSEDSAVYFCARSITTVVGCAMDYWGQGTSVTVSSTRIQNPDPAVYQLRDSKSSDKSVCLFTDFDSQTNVSQSKDSDVYITDKCVLDMRSMDFKSNSAVAWSNKSDFACANAFNNSIIPEDTFFPSPESSCDVKLVEKSFETDTNLNFQNLSVIGFRILLLKVAGFNLLMTLRLWSSRAKRSGSGVKQTLNFDLLKLAGDVESNPGPSRGHMTEYKPTVRLATRDDVPRAVRTLAAAFADYPATRHTVDPDRHIERVTELQELFLTRVGLDIGKVWVADDGAAVAVWTTPESVEAGAVFAEIGPRMAELSGSRLAAQQQMEGLLAPHRPKEPAWFLATVGVSPDHQGKGLGSAVVLPGVEAAERAGVPAFLETSAPRNLPFYERLGFTVTADVEVPEGPRTWCMTRKPGA

SEQ ID NO: 9476 - protein, 1135 aa, synthetic construct
MALPVTALLLPLALLLHAARPDIQMTQSPSSLSASVGDRVTITCKASDHINNWLAWYQQKPGQAPKLLIYGATTLETGVPSRFSGSGSGTDYTLTISSLQPEDFATYYCQQSWNTPWTFGQGTKLEIKRLEDLKNVFPPEVAVFEPSEAEISHTQKATLVCLATGFYPDHVELSWWVNGKEVHSGVSTDPQPLKEQPALNDSRYCLSSRLRVSATFWQNPRNHFRCQVQFYGLSENDEWTQDRAKPVTQIVSAEAWGRADCGSQSFGLLDPKLCYLLDGILFIYGVILTALFLRVRFSRSADAPAYQQGQNQLYNELNLGRREEYDVLDRRRGRDPEMGGKPQRRRNPQEGLYNELQRDRMAEAYSEIGMRGERRRGKGHDGLYQGLSTATRDTYDALHMQALPPREFGGSGFNVLMVHRRSHTGERPFQCNQCGASFTQRGNLLRHIRLHTGERPFRCHLCNYACQRRDALTASAEARHIRAEMGRAKRSGSGATNFSLLKQAGDVEENPGPTSMDWIWRILFLVGAATGAHSFEQVQLQQPGAELVKPGASVKMSCKASGYAFSSYWINWMKQKPGQGLEWIGQIYPGDGDTNYNGKFKGRATLTADTSSSTAYMQLSSLTSEDSAVYFCARSITTVVGCAMDYWGQGTSVTVSSTRIQNPDPAVYQLRDSKSSDKSVCLFTDFDSQTNVSQSKDSDVYITDKTVLDMRSMDFKSNSAVAWSNKSDFACANAFNNSIIPEDTFFPSPESSCGTLGEPQLCYILDAILFLYGIVLTLLYCRLKIQVRKAAITSYEKSDGVYTGLSTRNQETYETLKHEKPPQGPGGSFNVLMVHRRSHTGERPFQCNQCGASFTQRGNLLRHIRLHTGERPFRCHLCNYACQRRDALTASAEARHIRAEMGRAKRSGSGVKQTLNFDLLKLAGDVESNPGPSRGHMTEYKPTVRLATRDDVPRAVRTLAAAFADYPATRHTVDPDRHIERVTELQELFLTRVGLDIGKVWVADDGAAVAVWTTPESVEAGAVFAEIGPRMAELSGSRLAAQQQMEGLLAPHRPKEPAWFLATVGVSPDHQGKGLGSAVVLPGVEAAERAGVPAFLETSAPRNLPFYERLGFTVTADVEVPEGPRTWCMTRKPGA

SEQ ID NO: 9477 - protein, 492 aa, synthetic construct
MALPVTALLLPLALLLHAARPDIVMTQSPSSLTVTAGEKVTMSCKSSQSLLNSGNQKNYLTWYQQKPGQPPKLLIYWASTRESGVPDRFTGSGSGTDFTLTISSVQAEDLAVYYCQNDYSYPLTFGAGTKLELKGGGGSGGGGSGGGGSQIQLVQSGPELKKPGETVKISCKASGYTFTNYGMNWVKQAPGKGLKWMGWINTNTGEPTYAEEFKGRFAFSLETSASTAYLQINNLKNEDTATYFCARLGFGNAMDYWGQGTSVTVSSTRTTTPAPRPPTPAPTIASQPLSLRPEACRPAAGGAVHTRGLDFACDIYIWAPLAGTCGVLLLSLVITLYCKRGRKKLLYIFKQPFMRPVQTTQEEDGCSCRFPEEEEGGCELRVKFSRSADAPAYQQGQNQLYNELNLGRREEYDVLDKRRGRDPEMGGKPRRKNPQEGLYNELQKDKMAEAYSEIGMKGERRRGKGHDGLYQGLSTATKDTYDALHMQALPPR

SEQ ID NO: 9478 - protein, 1140 aa, synthetic construct
MALPVTALLLPLALLLHAARPACEVQLVESGGGLVQPGGSLRLSCAASGNTYSTNYMAWFRQAPGKGLEEVAVIYTRGGHTYYVDSVRGRFTISQDNAKNSLYLQMNSLRAEDTAVYYCAASSRHRLGLNNPRDYDYWGQGTLVTVSSGTGGGGSGGGGSGGGGSEFDIQMTQSPSSLSASVGDRVTITCKASDHINNWLAWYQQKPGQAPKLLIYGATTLETGVPSRFSGSGSGTDYTLTISSLQPEDFATYYCQQSWNTPWTFGQGTKLEIKRLEDLKNVFPPEVAVFEPSEAEISHTQKATLVCLATGFYPDHVELSWWVNGKEVHSGVCTDPQPLKEQPALNDSRYCLSSRLRVSATFWQNPRNHFRCQVQFYGLSENDEWTQDRAKPVTQIVSAEAWGRADCGFTSESYQQGVLSATILYEILLGKATLYAVLVSALVLMAMVKRKDSRGRAKRSGSGATNFSLLKQAGDVEENPGPTSATMDWIWRILFLVGAATGAHSGPEVQLVESGGGLVQAGGSLRLSCAASGRTFSMGWFRQAPGKEREFVAAITYSGGSPYYADSVKGRFTISRDNAKNTVYLQMNSLKPEDTAVYYCAANPTYGSDWNAENWGQGTQVTVSSGSGGGGSGGGGSGGGGSFEQVQLQQPGAELVKPGASVKMSCKASGYAFSSYWINWMKQKPGQGLEWIGQIYPGDGDTNYNGKFKGRATLTADTSSSTAYMQLSSLTSEDSAVYFCARSITTVVGCAMDYWGQGTSVTVSSTRIQNPDPAVYQLRDSKSSDKSVCLFTDFDSQTNVSQSKDSDVYITDKCVLDMRSMDFKSNSAVAWSNKSDFACANAFNNSIIPEDTFFPSPESSCDVKLVEKSFETDTNLNFQNLSVIGFRILLLKVAGFNLLMTLRLWSSRAKRSGSGVKQTLNFDLLKLAGDVESNPGPSRGHMTEYKPTVRLATRDDVPRAVRTLAAAFADYPATRHTVDPDRHIERVTELQELFLTRVGLDIGKVWVADDGAAVAVWTTPESVEAGAVFAEIGPRMAELSGSRLAAQQQMEGLLAPHRPKEPAWFLATVGVSPDHQGKGLGSAVVLPGVEAAERAGVPAFLETSAPRNLPFYERLGFTVTADVEVPEGPRTWCMTRKPGA

SEQ ID NO: 9479 - protein, 1133 aa, synthetic construct
MALPVTALLLPLALLLHAARPACEVQLLESGGGLIQPGGSLRLSCAASGFTFSSHAMTWVRQAPGKGLEWVSAISGSGDYTHYADSVKGRFTISRDNSKNTVYLQMNSLRAEDSAVYYCAKDEDGGSLLGHRGQGTLVTVSSGTGGGGSGGGGSGGGGSEFDIQMTQSPSSLSASVGDRVTITCKASDHINNWLAWYQQKPGQAPKLLIYGATTLETGVPSRFSGSGSGTDYTLTISSLQPEDFATYYCQQSWNTPWTFGQGTKLEIKRLEDLKNVFPPEVAVFEPSEAEISHTQKATLVCLATGFYPDHVELSWWVNGKEVHSGVCTDPQPLKEQPALNDSRYCLSSRLRVSATFWQNPRNHFRCQVQFYGLSENDEWTQDRAKPVTQIVSAEAWGRADCGFTSESYQQGVLSATILYEILLGKATLYAVLVSALVLMAMVKRKDSRGRAKRSGSGATNFSLLKQAGDVEENPGPTSTMDWIWRILFLVGAATGAHSGPQVQLVESGGGVVQPGRSLRLSCAASGYRSSVCMGWFRQAPGKGLERVALIGRDGSTTYIDSVKGRFTISRDNSKNTLYLQMNSLRAEDTAVYYCARGLGYWACEYNYWGQGTLVTVSSGSGGGGSGGGGSGGGGSFEQVQLQQPGAELVKPGASVKMSCKASGYAFSSYWINWMKQKPGQGLEWIGQIYPGDGDTNYNGKFKGRATLTADTSSSTAYMQLSSLTSEDSAVYFCARSITTVVGCAMDYWGQGTSVTVSSTRIQNPDPAVYQLRDSKSSDKSVCLFTDFDSQTNVSQSKDSDVYITDKCVLDMRSMDFKSNSAVAWSNKSDFACANAFNNSIIPEDTFFPSPESSCDVKLVEKSFETDTNLNFQNLSVIGFRILLLKVAGFNLLMTLRLWSSRAKRSGSGVKQTLNFDLLKLAGDVESNPGPSRGHMTEYKPTVRLATRDDVPRAVRTLAAAFADYPATRHTVDPDRHIERVTELQELFLTRVGLDIGKVWVADDGAAVAVWTTPESVEAGAVFAEIGPRMAELSGSRLAAQQQMEGLLAPHRPKEPAWFLATVGVSPDHQGKGLGSAVVLPGVEAAERAGVPAFLETSAPRNLPFYERLGFTVTADVEVPEGPRTWCMTRKPGA

SEQ ID NO: 9480 - protein, 1137 aa, synthetic construct
MALPVTALLLPLALLLHAARPACEVQLLESGGGLIQPGGSLRLSCAASGFTFSSHAMTWVRQAPGKGLEWVSAISGSGDYTHYADSVKGRFTISRDNSKNTVYLQMNSLRAEDSAVYYCAKDEDGGSLLGHRGQGTLVTVSSGTGGGGSGGGGSGGGGSEFDIQMTQSPSSLSASVGDRVTITCKASDHINNWLAWYQQKPGQAPKLLIYGATTLETGVPSRFSGSGSGTDYTLTISSLQPEDFATYYCQQSWNTPWTFGQGTKLEIKRLEDLKNVFPPEVAVFEPSEAEISHTQKATLVCLATGFYPDHVELSWWVNGKEVHSGVCTDPQPLKEQPALNDSRYCLSSRLRVSATFWQNPRNHFRCQVQFYGLSENDEWTQDRAKPVTQIVSAEAWGRADCGFTSESYQQGVLSATILYEILLGKATLYAVLVSALVLMAMVKRKDSRGRAKRSGSGATNFSLLKQAGDVEENPGPTSTMDWIWRILFLVGAATGAHSGPQVQLQESGPGLVKPSQTLSLTCTVSGASITTGEYYWNWFRQPPGKGLEWMGAIAASGSTTYSPSFESRTSISRDTSKNQFSLKLSSVTAADTAVYYCGRSFGVAAVTTGQNRGQGTLVTVSSGSGGGGSGGGGSGGGGSFEQVQLQQPGAELVKPGASVKMSCKASGYAFSSYWINWMKQKPGQGLEWIGQIYPGDGDTNYNGKFKGRATLTADTSSSTAYMQLSSLTSEDSAVYFCARSITTVVGCAMDYWGQGTSVTVSSTRIQNPDPAVYQLRDSKSSDKSVCLFTDFDSQTNVSQSKDSDVYITDKCVLDMRSMDFKSNSAVAWSNKSDFACANAFNNSIIPEDTFFPSPESSCDVKLVEKSFETDTNLNFQNLSVIGFRILLLKVAGFNLLMTLRLWSSRAKRSGSGVKQTLNFDLLKLAGDVESNPGPSRGHMTEYKPTVRLATRDDVPRAVRTLAAAFADYPATRHTVDPDRHIERVTELQELFLTRVGLDIGKVWVADDGAAVAVWTTPESVEAGAVFAEIGPRMAELSGSRLAAQQQMEGLLAPHRPKEPAWFLATVGVSPDHQGKGLGSAVVLPGVEAAERAGVPAFLETSAPRNLPFYERLGFTVTADVEVPEGPRTWCMTRKPGA

SEQ ID NO: 9481 - protein, 1133 aa, synthetic construct
MALPVTALLLPLALLLHAARPACQVQLVESGGGVVQPGRSLRLSCAASGYRSSVCMGWFRQAPGKGLERVAVIGRDGSTTYIDSVKGRFTISRDNSKNTLYLQMNSLRAEDTAVYYCARGLGYWACEYDYWGQGTLVTVSSGTGGGGSGGGGSGGGGSEFDIQMTQSPSSLSASVGDRVTITCKASDHINNWLAWYQQKPGQAPKLLIYGATTLETGVPSRFSGSGSGTDYTLTISSLQPEDFATYYCQQSWNTPWTFGQGTKLEIKRLEDLKNVFPPEVAVFEPSEAEISHTQKATLVCLATGFYPDHVELSWWVNGKEVHSGVCTDPQPLKEQPALNDSRYCLSSRLRVSATFWQNPRNHFRCQVQFYGLSENDEWTQDRAKPVTQIVSAEAWGRADCGFTSESYQQGVLSATILYEILLGKATLYAVLVSALVLMAMVKRKDSRGRAKRSGSGATNFSLLKQAGDVEENPGPTSATMDWIWRILFLVGAATGAHSGPEVQLVESGGGLVQAGGSLRLSCAASGRTFSMGWFRQAPGKEREFVAAITYSGGSPYYADSVKGRFTISRDNAKNTVYLQMNSLKPEDTAVYYCAANPTYGSDWNAENWGQGTQVTVSSGSGGGGSGGGGSGGGGSFEQVQLQQPGAELVKPGASVKMSCKASGYAFSSYWINWMKQKPGQGLEWIGQIYPGDGDTNYNGKFKGRATLTADTSSSTAYMQLSSLTSEDSAVYFCARSITTVVGCAMDYWGQGTSVTVSSTRIQNPDPAVYQLRDSKSSDKSVCLFTDFDSQTNVSQSKDSDVYITDKCVLDMRSMDFKSNSAVAWSNKSDFACANAFNNSIIPEDTFFPSPESSCDVKLVEKSFETDTNLNFQNLSVIGFRILLLKVAGFNLLMTLRLWSSRAKRSGSGVKQTLNFDLLKLAGDVESNPGPSRGHMTEYKPTVRLATRDDVPRAVRTLAAAFADYPATRHTVDPDRHIERVTELQELFLTRVGLDIGKVWVADDGAAVAVWTTPESVEAGAVFAEIGPRMAELSGSRLAAQQQMEGLLAPHRPKEPAWFLATVGVSPDHQGKGLGSAVVLPGVEAAERAGVPAFLETSAPRNLPFYERLGFTVTADVEVPEGPRTWCMTRKPGA

SEQ ID NO: 9482 - protein, 1137 aa, synthetic construct
MALPVTALLLPLALLLHAARPACQVQLQESGPGLVKPSQTLSLTCTVSGGSITTGEFYWNWFRQPPGKGLEWMGAIAASGSTTYSPSFESRTSISRDTSKNQFSLKLSSVTAADTAVYYCGRSFGVAAVTTGQNRGQGTLVTVSSGTGGGGSGGGGSGGGGSEFDIQMTQSPSSLSASVGDRVTITCKASDHINNWLAWYQQKPGQAPKLLIYGATTLETGVPSRFSGSGSGTDYTLTISSLQPEDFATYYCQQSWNTPWTFGQGTKLEIKRLEDLKNVFPPEVAVFEPSEAEISHTQKATLVCLATGFYPDHVELSWWVNGKEVHSGVCTDPQPLKEQPALNDSRYCLSSRLRVSATFWQNPRNHFRCQVQFYGLSENDEWTQDRAKPVTQIVSAEAWGRADCGFTSESYQQGVLSATILYEILLGKATLYAVLVSALVLMAMVKRKDSRGRAKRSGSGATNFSLLKQAGDVEENPGPTSATMDWIWRILFLVGAATGAHSGPEVQLVESGGGLVQAGGSLRLSCAASGRTFSMGWFRQAPGKEREFVAAITYSGGSPYYADSVKGRFTISRDNAKNTVYLQMNSLKPEDTAVYYCAANPTYGSDWNAENWGQGTQVTVSSGSGGGGSGGGGSGGGGSFEQVQLQQPGAELVKPGASVKMSCKASGYAFSSYWINWMKQKPGQGLEWIGQIYPGDGDTNYNGKFKGRATLTADTSSSTAYMQLSSLTSEDSAVYFCARSITTVVGCAMDYWGQGTSVTVSSTRIQNPDPAVYQLRDSKSSDKSVCLFTDFDSQTNVSQSKDSDVYITDKCVLDMRSMDFKSNSAVAWSNKSDFACANAFNNSIIPEDTFFPSPESSCDVKLVEKSFETDTNLNFQNLSVIGFRILLLKVAGFNLLMTLRLWSSRAKRSGSGVKQTLNFDLLKLAGDVESNPGPSRGHMTEYKPTVRLATRDDVPRAVRTLAAAFADYPATRHTVDPDRHIERVTELQELFLTRVGLDIGKVWVADDGAAVAVWTTPESVEAGAVFAEIGPRMAELSGSRLAAQQQMEGLLAPHRPKEPAWFLATVGVSPDHQGKGLGSAVVLPGVEAAERAGVPAFLETSAPRNLPFYERLGFTVTADVEVPEGPRTWCMTRKPGA

SEQ ID NO: 9483 - protein, 1490 aa, synthetic construct
MALPVTALLLPLALLLHAARPEFNAGVTQTPKFQVLKTGQSMTLQCAQDMNHEYMSWYRQDPGMGLRLIHYSVAIQTTDQGEVPNGYNVSRSTIEDFPLRLLSAAPSQTSVYFCASSYLGNTGELFFGEGSRLTVLEDLKNVFPPEVAVFEPSEAEISHTQKATLVCLATGFYPDHVELSWWVNGKEVHSGVSTDPQPLKEQPALNDSRYCLSSRLRVSATFWQNPRNHFRCQVQFYGLSENDEWTQDRAKPVTQIVSAEAWGRADCGSQSFGLLDPKLCYLLDGILFIYGVILTALFLRVKFSRSADAPAYQQGQNQLYNELNLGRREEYDVLDKRRGRDPEMGGKPQRRKNPQEGLYNELQKDKMAEAYSEIGMKGERRRGKGHDGLYQGLSTATKDTYDALHMQALPPRRAKRSGSGATNFSLLKQAGDVEENPGPTSMDWIWRILFLVGAATGAHSFEQEVTQIPAALSVPEGENLVLNCSFTDSAIYNLQWFRQDPGKGLTSLLLIQSSQREQTSGRLNASLDKSSGRSTLYIAASQPGDSATYLCAVRPTSGGSYIPTFGRGTSLIVHPYTRIQNPDPAVYQLRDSKSSDKSVCLFTDFDSQTNVSQSKDSDVYITDKTVLDMRSMDFKSNSAVAWSNKSDFACANAFNNSIIPEDTFFPSPESSCGTQSFGLLDPKLCYLLDGILFIYGVILTALFLRVKFSRSADAPAYQQGQNQLYNELNLGRREEYDVLDKRRGRDPEMGGKPQRRKNPQEGLYNELQKDKMAEAYSEIGMKGERRRGKGHDGLYQGLSTATKDTYDALHMQALPPRRAKRSGSGVKQTLNFDLLKLAGDVESNPGPSSTMRPRLWLLLAAQLTVLHGNSVLQQTPAYIKVQTNKMVMLSCEAKISLSNMRIYWLRQRQAPSSDSHHEFLALWDSAKGTIHGEEVEQEKIAVFRDASRFILNLTSVKPEDSGIYFCMIVGSPELTFGKGTQLSVVDFLPTTAQPTKKSTLKKRVCRLPRPETQKGPLCSPITLGLLVAGVLVLLVSLGVAIHLCCRRRRARLRFMKQFYKRAKRSGSGATNFSLLKQAGDVEENPGPTSMALPVTALLLPLALLLHAARPSQFRVSPLDRTWNLGETVELKCQVLLSNPTSGCSWLFQPRGAAASPTFLLYLSQNKPKAAEGLDTQRFSGKRLGDTFVLTLSDFRRENEGYYFCSALSNSIMYFSHFVPVFLPAKPTTTPAPRPPTPAPTIASQPLSLRPEACRPAAGGAVHTRGLDFACDIYIWAPLAGTCGVLLLSLVITLYCNHRNRRRVCKCPRPVVKSGDKPSLSARYVSAKRSGSGVKQTLNFDLLKLAGDVESNPGPSRGHMAKPLSQEESTLIERATATINSIPISEDYSVASAALSSDGRIFTGVNVYHFTGGPCAELVVLGTAAAAAAGNLTCIVAIGNENRGILSPCGRCRQVLLDLHPGIKAIVKDSDGQPTAVGIRELLPSGYVWEG

SEQ ID NO: 9484 - protein, 1251 aa, synthetic construct
MALPVTALLLPLALLLHAARPEFNAGVTQTPKFQVLKTGQSMTLQCAQDMNHEYMSWYRQDPGMGLRLIHYSVAIQTTDQGEVPNGYNVSRSTIEDFPLRLLSAAPSQTSVYFCASSYLGNTGELFFGEGSRLTVLEDLKNVFPPEVAVFEPSEAEISHTQKATLVCLATGFYPDHVELSWWVNGKEVHSGVSTDPQPLKEQPALNDSRYCLSSRLRVSATFWQNPRNHFRCQVQFYGLSENDEWTQDRAKPVTQIVSAEAWGRADCGSQSFGLLDPKLCYLLDGILFIYGVILTALFLRVKFSRSADAPAYQQGQNQLYNELNLGRREEYDVLDKRRGRDPEMGGKPQRRKNPQEGLYNELQKDKMAEAYSEIGMKGERRRGKGHDGLYQGLSTATKDTYDALHMQALPPRRAKRSGSGATNFSLLKQAGDVEENPGPTSMDWIWRILFLVGAATGAHSFEQEVTQIPAALSVPEGENLVLNCSFTDSAIYNLQWFRQDPGKGLTSLLLIQSSQREQTSGRLNASLDKSSGRSTLYIAASQPGDSATYLCAVRPTSGGSYIPTFGRGTSLIVHPYTRIQNPDPAVYQLRDSKSSDKSVCLFTDFDSQTNVSQSKDSDVYITDKTVLDMRSMDFKSNSAVAWSNKSDFACANAFNNSIIPEDTFFPSPESSCGTQSFGLLDPKLCYLLDGILFIYGVILTALFLRVKFSRSADAPAYQQGQNQLYNELNLGRREEYDVLDKRRGRDPEMGGKPQRRKNPQEGLYNELQKDKMAEAYSEIGMKGERRRGKGHDGLYQGLSTATKDTYDALHMQALPPRRAKRSGSGVKQTLNFDLLKLAGDVESNPGPSSTMALPVTALLLPLALLLHAARPSQFRVSPLDRTWNLGETVELKCQVLLSNPTSGCSWLFQPRGAAASPTFLLYLSQNKPKAAEGLDTQRFSGKRLGDTFVLTLSDFRRENEGYYFCSALSNSIMYFSHFVPVFLPAKPTTTPAPRPPTPAPTIASQPLSLRPEACRPAAGGAVHTRGLDFACDIYIWAPLAGTCGVLLLSLVITLYCNHRNRRRVCKCPRPVVKSGDKPSLSARYVSAKRSGSGVKQTLNFDLLKLAGDVESNPGPSRGHMAKPLSQEESTLIERATATINSIPISEDYSVASAALSSDGRIFTGVNVYHFTGGPCAELVVLGTAAAAAAGNLTCIVAIGNENRGILSPCGRCRQVLLDLHPGIKAIVKDSDGQPTAVGIRELLPSGYVWEG

SEQ ID NO: 9485 - protein, 957 aa, synthetic construct
MALPVTALLLPLALLLHAARPDIQMTQSPSSLSASVGDRVTITCKASDHINNWLAWYQQKPGQAPKLLIYGATTLETGVPSRFSGSGSGTDYTLTISSLQPEDFATYYCQQSWNTPWTFGQGTKLEIKRLEDLKNVFPPEVAVFEPSEAEISHTQKATLVCLATGFYPDHVELSWWVNGKEVHSGVSTDPQPLKEQPALNDSRYCLSSRLRVSATFWQNPRNHFRCQVQFYGLSENDEWTQDRAKPVTQIVSAEAWGRADCGSQSFGLLDPKLCYLLDGILFIYGVILTALFLRVKFSRSADAPAYQQGQNQLYNELNLGRREEYDVLDKRRGRDPEMGGKPRRKNPQEGLYNELQKDKMAEAYSEIGMKGERRRGKGHDGLYQGLSTATKDTYDALHMQALPPRRAKRSGSGATNFSLLKQAGDVEENPGPTSTSATMDWIWRILFLVGAATGAHSGPEVQLVESGGGLVQAGGSLRLSCAASGRTFSMGWFRQAPGKEREFVAAITYSGGSPYYADSVKGRFTISRDNAKNTVYLQMNSLKPEDTAVYYCAANPTYGSDWNAENWGQGTQVTVSSGSGGGGSGGGGSGGGGSFEQVQLQQPGAELVKPGASVKMSCKASGYAFSSYWINWMKQKPGQGLEWIGQIYPGDGDTNYNGKFKGRATLTADTSSSTAYMQLSSLTSEDSAVYFCARSITTVVGCAMDYWGQGTSVTVSSTRIQNPDPAVYQLRDSKSSDKSVCLFTDFDSQTNVSQSKDSDVYITDKTVLDMRSMDFKSNSAVAWSNKSDFACANAFNNSIIPEDTFFPSPESSCGTQSFGLLDPKLCYLLDGILFIYGVILTALFLRVKFSRSADAPAYQQGQNQLYNELNLGRREEYDVLDKRRGRDPEMGGKPRRKNPQEGLYNELQKDKMAEAYSEIGMKGERRRGKGHDGLYQGLSTATKDTYDALHMQALPPR

SEQ ID NO: 9486 - protein, 855 aa, synthetic construct
MALPVTALLLPLALLLHAARPDIQMTQSPSSLSASVGDRVTITCKASDHINNWLAWYQQKPGQAPKLLIYGATTLETGVPSRFSGSGSGTDYTLTISSLQPEDFATYYCQQSWNTPWTFGQGTKLEIKRLEDLKNVFPPEVAVFEPSEAEISHTQKATLVCLATGFYPDHVELSWWVNGKEVHSGVSTDPQPLKEQPALNDSRYCLSSRLRVSATFWQNPRNHFRCQVQFYGLSENDEWTQDRAKPVTQIVSAEAWGRADCGSQSFGLLDPKLCYLLDGILFIYGVILTALFLRVKFSRSADAPAYQQGQNQLYNELNLGRREEYDVLDKRRGRDPEMGGKPRRKNPQEGLYNELQKDKMAEAYSEIGMKGERRRGKGHDGLYQGLSTATKDTYDALHMQALPPRRAKRSGSGATNFSLLKQAGDVEENPGPTSTSATMDWIWRILFLVGAATGAHSGPEVQLVESGGGLVQAGGSLRLSCAASGRTFSMGWFRQAPGKEREFVAAITYSGGSPYYADSVKGRFTISRDNAKNTVYLQMNSLKPEDTAVYYCAANPTYGSDWNAENWGQGTQVTVSSGSGGGGSGGGGSGGGGSFEQVQLQQPGAELVKPGASVKMSCKASGYAFSSYWINWMKQKPGQGLEWIGQIYPGDGDTNYNGKFKGRATLTADTSSSTAYMQLSSLTSEDSAVYFCARSITTVVGCAMDYWGQGTSVTVSSTRIQNPDPAVYQLRDSKSSDKSVCLFTDFDSQTNVSQSKDSDVYITDKTVLDMRSMDFKSNSAVAWSNKSDFACANAFNNSIIPEDTFFPSPESSCGTITQGLAVPTISSFFPPGYQVSFCLVMVLLFAVDTGLYFSV

SEQ ID NO: 9487 - protein, 880 aa, synthetic construct
MALPVTALLLPLALLLHAARPDIQMTQSPSSLSASVGDRVTITCKASDHINNWLAWYQQKPGQAPKLLIYGATTLETGVPSRFSGSGSGTDYTLTISSLQPEDFATYYCQQSWNTPWTFGQGTKLEIKRLEDLKNVFPPEVAVFEPSEAEISHTQKATLVCLATGFYPDHVELSWWVNGKEVHSGVSTDPQPLKEQPALNDSRYCLSSRLRVSATFWQNPRNHFRCQVQFYGLSENDEWTQDRAKPVTQIVSAEAWGRADCGSQSFGLLDPKLCYLLDGILFIYGVILTALFLRVKFSRSADAPAYQQGQNQLYNELNLGRREEYDVLDKRRGRDPEMGGKPRRKNPQEGLYNELQKDKMAEAYSEIGMKGERRRGKGHDGLYQGLSTATKDTYDALHMQALPPRRAKRSGSGATNFSLLKQAGDVEENPGPTSTSATMDWIWRILFLVGAATGAHSGPEVQLVESGGGLVQAGGSLRLSCAASGRTFSMGWFRQAPGKEREFVAAITYSGGSPYYADSVKGRFTISRDNAKNTVYLQMNSLKPEDTAVYYCAANPTYGSDWNAENWGQGTQVTVSSGSGGGGSGGGGSGGGGSFEQVQLQQPGAELVKPGASVKMSCKASGYAFSSYWINWMKQKPGQGLEWIGQIYPGDGDTNYNGKFKGRATLTADTSSSTAYMQLSSLTSEDSAVYFCARSITTVVGCAMDYWGQGTSVTVSSTRIQNPDPAVYQLRDSKSSDKSVCLFTDFDSQTNVSQSKDSDVYITDKTVLDMRSMDFKSNSAVAWSNKSDFACANAFNNSIIPEDTFFPSPESSCGTITQGLAVSTISSFFPPGYQVSFCLVMVLLFAVDTGLYFSVKTNIRSSTRDWKDHKFKWRKDPQDK

SEQ ID NO: 9488 - protein, 810 aa, synthetic construct
MALPVTALLLPLALLLHAARPDIQMTQSPSSLSASVGDRVTITCKASQDVGTAVDWYQQKPGKAPKLLIYWASTRHTGVPSRFSGSGSGTDFTLTISSLQPEDFATYYCQQYNSYPLTFGQGTKVEIKRLEDLKNVFPPEVAVFEPSEAEISHTQKATLVCLATGFYPDHVELSWWVNGKEVHSGVSTDPQPLKEQPALNDSRYCLSSRLRVSATFWQNPRNHFRCQVQFYGLSENDEWTQDRAKPVTQIVSAEAWGRADCGSQSFGLLDPKLCYLLDGILFIYGVILTALFLRVKFSRSADAPAYQQGQNQLYNELNLGRREEYDVLDKRRGRDPEMGGKPQRRKNPQEGLYNELQKDKMAEAYSEIGMKGERRRGKGHDGLYQGLSTATKDTYDALHMQALPPRRAKRSGSGATNFSLLKQAGDVEENPGPTSMDWIWRILFLVGAATGAHSFEVQLVESGGGLVQPGGSLRLSCAASGYTFTEYTIHWVRQAPGKGLEWVANINPNNGGTTYNQKFEDRFTISRDNSKNTLYLQMNSLRAEDTAVYYCARGWNFDYWGQGTLVTVSSTRIQNPDPAVYQLRDSKSSDKSVCLFTDFDSQTNVSQSKDSDVYITDKTVLDMRSMDFKSNSAVAWSNKSDFACANAFNNSIIPEDTFFPSPESSCGTQSFGLLDPKLCYLLDGILFIYGVILTALFLRVKFSRSADAPAYQQGQNQLYNELNLGRREEYDVLDKRRGRDPEMGGKPRRKNPQEGLYNELQKDKMAEAYSEIGMKGERRRGKGHDGLYQGLSTATKDTYDALHMQALPPR

SEQ ID NO: 9489 - protein, 809 aa, synthetic construct
MALPVTALLLPLALLLHAARPDIQMTQSPSSLSASVGDRVTITCKASQDVGTAVDWYQQKPGKAPKLLIYWASTRHTGVPSRFSGSGSGTDFTLTISSLQPEDFATYYCQQYNSYPLTFGQGTKVEIKRLEDLKNVFPPEVAVFEPSEAEISHTQKATLVCLATGFYPDHVELSWWVNGKEVHSGVSTDPQPLKEQPALNDSRYCLSSRLRVSATFWQNPRNHFRCQVQFYGLSENDEWTQDRAKPVTQIVSAEAWGRADCGSQSFGLLDPKLCYLLDGILFIYGVILTALFLRVKFSRSADAPAYQQGQNQLYNELNLGRREEYDVLDKRRGRDPEMGGKPRRKNPQEGLYNELQKDKMAEAYSEIGMKGERRRGKGHDGLYQGLSTATKDTYDALHMQALPPRRAKRSGSGATNFSLLKQAGDVEENPGPTSMDWIWRILFLVGAATGAHSFEVQLVESGGGLVQPGGSLRLSCAASGYTFTEYTIHWVRQAPGKGLEWVANINPNNGGTTYNQKFEDRFTISRDNSKNTLYLQMNSLRAEDTAVYYCARGWNFDYWGQGTLVTVSSTRIQNPDPAVYQLRDSKSSDKSVCLFTDFDSQTNVSQSKDSDVYITDKTVLDMRSMDFKSNSAVAWSNKSDFACANAFNNSIIPEDTFFPSPESSCGTQSFGLLDPKLCYLLDGILFIYGVILTALFLRVKFSRSADAPAYQQGQNQLYNELNLGRREEYDVLDKRRGRDPEMGGKPRRKNPQEGLYNELQKDKMAEAYSEIGMKGERRRGKGHDGLYQGLSTATKDTYDALHMQALPPR

SEQ ID NO: 9490 - protein, 732 aa, synthetic construct
MALPVTALLLPLALLLHAARPDIQMTQSPSSLSASVGDRVTITCKASQDVGTAVDWYQQKPGKAPKLLIYWASTRHTGVPSRFSGSGSGTDFTLTISSLQPEDFATYYCQQYNSYPLTFGQGTKVEIKRLEDLKNVFPPEVAVFEPSEAEISHTQKATLVCLATGFYPDHVELSWWVNGKEVHSGVSTDPQPLKEQPALNDSRYCLSSRLRVSATFWQNPRNHFRCQVQFYGLSENDEWTQDRAKPVTQIVSAEAWGRADCGSQSFGLLDPKLCYLLDGILFIYGVILTALFLRVKFSRSADAPAYQQGQNQLYNELNLGRREEYDVLDKRRGRDPEMGGKPRRKNPQEGLYNELQKDKMAEAYSEIGMKGERRRGKGHDGLYQGLSTATKDTYDALHMQALPPRRAKRSGSGATNFSLLKQAGDVEENPGPTSMDWIWRILFLVGAATGAHSFEVQLVESGGGLVQPGGSLRLSCAASGYTFTEYTIHWVRQAPGKGLEWVANINPNNGGTTYNQKFEDRFTISRDNSKNTLYLQMNSLRAEDTAVYYCARGWNFDYWGQGTLVTVSSTRIQNPDPAVYQLRDSKSSDKSVCLFTDFDSQTNVSQSKDSDVYITDKTVLDMRSMDFKSNSAVAWSNKSDFACANAFNNSIIPEDTFFPSPESSCGTITQGLAVSTISSFFPPGYQVSFCLVMVLLFAVDTGLYFSVKTNIRSSTRDWKDHKFKWRKDPQDK

SEQ ID NO: 9491 - protein, 488 aa, synthetic construct
MALPVTALLLPLALLLHAARPDVQMIQTPDSLAVSLGQRATISCRASESVDNYGISFMHWYQQKPGQSPKLLIYRASNLESGIPARFSGSGSRTDFTLTINPVETDDVATYYCQQNNKDPPTFGGGTKLEIKGGGGSGGGGSGGGGSGGGGSQVQLQQSGAELVKPGASVKISCKASGYAFSSYWMNWVKQRPGKGLEWIGQIYPGDGDTTYNGKFKGKATLTADKSSSTVYMQLNSLTSEDSAVYFCVRYYYGSSGYFDYWGQGTTLTVSSTRGMRTEDLPKAVVFLEPQWYRVLEKDSVTLKCQGAYSPEDNSTQWFHNESLISSQASSYFIDAATVDDSGEYRCQTNLSTLSDPVQLEVHIGWLLLQAPRWVFKEEDPIHLRCHSWKNTALHKVTYLQNGKGRKYFHHNSDFYIPKATLKDSGSYFCRGLVGSKNVSSETVNITITQGLAVPTISSFFPPGYQVSFCLVMVLLFAVDTGLYFSVK

SEQ ID NO: 9492 - protein, 479 aa, synthetic construct
MALPVTALLLPLALLLHAARPDVQMIQTPSSLSASLGDRVTISCRASQDIGNYLNWYQQKPDGTVKLLIYYTSRLHSGVPSRFSGSGSGTEYSLTISNLEQEDIATYFCQQGSALPPTFGGGTKLEINGGGGSGGGGSGGGGSALQLQQSGAELVRPGASVTLSCKASGYTFTDYEMHWVKQTPVHGLEWIGAIDPETGGTAYNQKFEGKAILTADKSSSTAYMELRSLTSEDSPVYYCARRRYYGSSSFDYWGQGTTLTVSSTRGMRTEDLPKAVVFLEPQWYRVLEKDSVTLKCQGAYSPEDNSTQWFHNESLISSQASSYFIDAATVDDSGEYRCQTNLSTLSDPVQLEVHIGWLLLQAPRWVFKEEDPIHLRCHSWKNTALHKVTYLQNGKGRKYFHHNSDFYIPKATLKDSGSYFCRGLVGSKNVSSETVNITITQGLAVPTISSFFPPGYQVSFCLVMVLLFAVDTGLYFSVK

SEQ ID NO: 9493 - protein, 481 aa, synthetic construct
MALPVTALLLPLALLLHAARPDIVLTQSPATLSLSPGDRATISCRASESVTILGSHLIYWYQQKPGQPPRLLIQLASNVQTGVPARFSGSGSRTDFTLTISSVEPEDFAVYYCLQSRTIPRTFGQGTKLEIKRGGGGSGGGGSGGGGSQVQLVQSGPEVKKPGESVKISCKASGYTFRHYSMNWVKQAPGQGLKWMGRINTESGVPIYADDFKGRFSFTVDTSASTAYLEISSLTSEDTAVYFCSNDYLYSLDFWGQGTTLTVSSTRGMRTEDLPKAVVFLEPQWYRVLEKDSVTLKCQGAYSPEDNSTQWFHNESLISSQASSYFIDAATVDDSGEYRCQTNLSTLSDPVQLEVHIGWLLLQAPRWVFKEEDPIHLRCHSWKNTALHKVTYLQNGKGRKYFHHNSDFYIPKATLKDSGSYFCRGLVGSKNVSSETVNITITQGLAVPTISSFFPPGYQVSFCLVMVLLFAVDTGLYFSVK

SEQ ID NO: 9494 - protein, 481 aa, synthetic construct
MALPVTALLLPLALLLHAARPDIQMTQSPSSLSASVGDRVTITCSASQDISNYLNWYQQKPGKAPKLLIYYTSNLHSGVPSRFSGSGSGTDFTLTISSLQPEDFATYYCQQYRKLPWTFGQGTKLEIKRGGGGSGGGGSGGGGSQVQLVQSGAEVKKPGSSVKVSCKASGGTFSNYWMHWVRQAPGQGLEWMGATYRGHSDTYYNQKFKGRVTITADKSTSTAYMELSSLRSEDTAVYYCARGAIYDGYDVLDNWGQGTLVTVSSTRGMRTEDLPKAVVFLEPQWYRVLEKDSVTLKCQGAYSPEDNSTQWFHNESLISSQASSYFIDAATVDDSGEYRCQTNLSTLSDPVQLEVHIGWLLLQAPRWVFKEEDPIHLRCHSWKNTALHKVTYLQNGKGRKYFHHNSDFYIPKATLKDSGSYFCRGLVGSKNVSSETVNITITQGLAVPTISSFFPPGYQVSFCLVMVLLFAVDTGLYFSVK

SEQ ID NO: 9495 - protein, 486 aa, synthetic construct
MALPVTALLLPLALLLHAARPDIVMTQSPDSLAVSLGERATINCESSQSLLNSGNQKNYLTWYQQKPGQPPKPLIYWASTRESGVPDRFSGSGSGTDFTLTISSLQAEDVAVYYCQNDYSYPYTFGQGTKLEIKRGGGGSGGGGSGGGGSEVQLVQSGAEVKKPGESLKISCKGSGYSFTDYYMKWARQMPGKGLEWMGDIIPSNGATFYNQKFKGQVTISADKSISTTYLQWSSLKASDTAMYYCARSHLLRASWFAYWGQGTMVTVSSTRGMRTEDLPKAVVFLEPQWYRVLEKDSVTLKCQGAYSPEDNSTQWFHNESLISSQASSYFIDAATVDDSGEYRCQTNLSTLSDPVQLEVHIGWLLLQAPRWVFKEEDPIHLRCHSWKNTALHKVTYLQNGKGRKYFHHNSDFYIPKATLKDSGSYFCRGLVGSKNVSSETVNITITQGLAVPTISSFFPPGYQVSFCLVMVLLFAVDTGLYFSVK

SEQ ID NO: 9496 - protein, 481 aa, synthetic construct
MALPVTALLLPLALLLHAARPDIQMTQSTSSLSASLGDRVTISCSASQGINNYLNWYQQKPDGTVELLIYYTSTLQSGVPSRFSGSGSGTDYSLTISNLEPEDIGTYYCQQYSKLPRTFGGGTKLEIKGGGGSGGGGSGGGGSQVQLQQSGSELMMPGASVKISCKATGYTFSNYWIEWVKQRPGHGLEWIGEILPGTGRTIYNEKFKGKATFTADISSNTVQMQLSSLTSEDSAVYYCARRDYYGNFYYAMDYWGQGTSVTVSSTRGMRTEDLPKAVVFLEPQWYRVLEKDSVTLKCQGAYSPEDNSTQWFHNESLISSQASSYFIDAATVDDSGEYRCQTNLSTLSDPVQLEVHIGWLLLQAPRWVFKEEDPIHLRCHSWKNTALHKVTYLQNGKGRKYFHHNSDFYIPKATLKDSGSYFCRGLVGSKNVSSETVNITITQGLAVPTISSFFPPGYQVSFCLVMVLLFAVDTGLYFSVK

SEQ ID NO: 9497 - protein, 476 aa, synthetic construct
MALPVTALLLPLALLLHAARPDIQMTQSPASLSVSVGETVTITCRASENIYSNLAWYQQKQGKSPQLLVYAATNLADGVPSRFSGSGSGTQYSLKINSLQSEDFGSYYCQHFWGTWTFGGGTTLEIKGGGGSGGGGSGGGGSEVQLQQSGPELVKPGASVKMSCKASGYTFTDYYMKWMKQSHGKSLEWIGDINPNNGGTTYNQKFKGKATLTVDKSSSTAYMQLNSLTSEDSAVYYCARDYGYGYFDYWGQGTTLTVSSTRGMRTEDLPKAVVFLEPQWYRVLEKDSVTLKCQGAYSPEDNSTQWFHNESLISSQASSYFIDAATVDDSGEYRCQTNLSTLSDPVQLEVHIGWLLLQAPRWVFKEEDPIHLRCHSWKNTALHKVTYLQNGKGRKYFHHNSDFYIPKATLKDSGSYFCRGLVGSKNVSSETVNITITQGLAVPTISSFFPPGYQVSFCLVMVLLFAVDTGLYFSVK

SEQ ID NO: 9498 - protein, 480 aa, synthetic construct
MALPVTALLLPLALLLHAARPDEIVLTQSPATLSLSPGERATLSCSASSSVSYMHWYQQKPGQAPRLLIYDTSKLASGIPARFSGSGSGTDFTLTISSLEPEDVAVYYCFQGSVYPFTFGQGTKLEIKRGGGGSGGGGSGGGGSQVQLQESGPGLVKPSQTLSLTCTVSGGSISTSGMGVGWIRQHPGKGLEWIGHIWWDDDKRYNPALKSRVTISVDTSKNQFSLKLSSVTAADTAVYYCARMELWSYYFDYWGQGTLVTVSSTRGMRTEDLPKAVVFLEPQWYRVLEKDSVTLKCQGAYSPEDNSTQWFHNESLISSQASSYFIDAATVDDSGEYRCQTNLSTLSDPVQLEVHIGWLLLQAPRWVFKEEDPIHLRCHSWKNTALHKVTYLQNGKGRKYFHHNSDFYIPKATLKDSGSYFCRGLVGSKNVSSETVNITITQGLAVPTISSFFPPGYQVSFCLVMVLLFAVDTGLYFSVK

SEQ ID NO: 9499 - protein, 479 aa, synthetic construct
MALPVTALLLPLALLLHAARPDIQMTQTTSSLSASLGDRVTISCRASQDISKYLNWYQQKPDGTVKLLIYHTSRLHSGVPSRFSGSGSGTDYSLTISNLEQEDIATYFCQQGNTLPYTFGGGTKLEITGGGGSGGGGSGGGGSEVKLQESGPGLVAPSQSLSVTCTVSGVSLPDYGVSWIRQPPRKGLEWLGVIWGSETTYYNSALKSRLTIIKDNSKSQVFLKMNSLQTDDTAIYYCAKHYYYGGSYAMDYWGQGTSVTVSSTRGMRTEDLPKAVVFLEPQWYRVLEKDSVTLKCQGAYSPEDNSTQWFHNESLISSQASSYFIDAATVDDSGEYRCQTNLSTLSDPVQLEVHIGWLLLQAPRWVFKEEDPIHLRCHSWKNTALHKVTYLQNGKGRKYFHHNSDFYIPKATLKDSGSYFCRGLVGSKNVSSETVNITITQGLAVPTISSFFPPGYQVSFCLVMVLLFAVDTGLYFSVK

SEQ ID NO: 9500 - protein, 479 aa, synthetic construct
MALPVTALLLPLALLLHAARPEIVMTQSPATLSLSPGERATLSCRASQDISKYLNWYQQKPGQAPRLLIYHTSRLHSGIPARFSGSGSGTDYTLTISSLQPEDFAVYFCQQGNTLPYTFGQGTKLEIKGGGGSGGGGSGGGGSQVQLQESGPGLVKPSETLSLTCTVSGVSLPDYGVSWIRQPPGKGLEWIGVIWGSETTYYNSSLKSRVTISKDNSKNQVSLKLSSVTAADTAVYYCAKHYYYGGSYAMDYWGQGTLVTVSSTRGMRTEDLPKAVVFLEPQWYRVLEKDSVTLKCQGAYSPEDNSTQWFHNESLISSQASSYFIDAATVDDSGEYRCQTNLSTLSDPVQLEVHIGWLLLQAPRWVFKEEDPIHLRCHSWKNTALHKVTYLQNGKGRKYFHHNSDFYIPKATLKDSGSYFCRGLVGSKNVSSETVNITITQGLAVPTISSFFPPGYQVSFCLVMVLLFAVDTGLYFSVK

SEQ ID NO: 9501 - protein, 481 aa, synthetic construct
MALPVTALLLPLALLLHAARPEIVLTQSPATLSLSPGERATLSCRASQSVSSYLAWYQQKPGQAPRLLIYDASNRATGIPARFSGSGSGTDFTLTISSLEPEDFAVYYCQQRSNWPITFGQGTRLEIKGGGGSGGGGSGGGGSEVQLVESGGGLVQPGRSLRLSCAASGFTFNDYAMHWVRQAPGKGLEWVSTISWNSGSIGYADSVKGRFTISRDNAKKSLYLQMNSLRAEDTALYYCAKDIQYGNYYYGMDVWGQGTTVTVSSTRGMRTEDLPKAVVFLEPQWYRVLEKDSVTLKCQGAYSPEDNSTQWFHNESLISSQASSYFIDAATVDDSGEYRCQTNLSTLSDPVQLEVHIGWLLLQAPRWVFKEEDPIHLRCHSWKNTALHKVTYLQNGKGRKYFHHNSDFYIPKATLKDSGSYFCRGLVGSKNVSSETVNITITQGLAVPTISSFFPPGYQVSFCLVMVLLFAVDTGLYFSVK

SEQ ID NO: 9502 - protein, 484 aa, synthetic construct
MALPVTALLLPLALLLHAARPDIVMTQTPLSLPVTPGEPASISCRSSKSLLHSNGITYLYWYLQKPGQSPQLLIYQMSNLVSGVPDRFSGSGSGTDFTLKISRVEAEDVGVYYCAQNLELPYTFGGGTKVEIKRGGGGSGGGGSGGGGSQVQLVQSGAEVKKPGSSVKVSCKASGYAFSYSWINWVRQAPGQGLEWMGRIFPGDGDTDYNGKFKGRVTITADKSTSTAYMELSSLRSEDTAVYYCARNVFDGYWLVYWGQGTLVTVSSTRGMRTEDLPKAVVFLEPQWYRVLEKDSVTLKCQGAYSPEDNSTQWFHNESLISSQASSYFIDAATVDDSGEYRCQTNLSTLSDPVQLEVHIGWLLLQAPRWVFKEEDPIHLRCHSWKNTALHKVTYLQNGKGRKYFHHNSDFYIPKATLKDSGSYFCRGLVGSKNVSSETVNITITQGLAVPTISSFFPPGYQVSFCLVMVLLFAVDTGLYFSVK

SEQ ID NO: 9503 - protein, 485 aa, synthetic construct
MALPVTALLLPLALLLHAARPDIQMTQSPSSLSASVGDRVTITCRSSQSIVHSVGNTFLEWYQQKPGKAPKLLIYKVSNRFSGVPSRFSGSGSGTDFTLTISSLQPEDFATYYCFQGSQFPYTFGQGTKVEIKRGGGGSGGGGSGGGGSEVQLVESGGGLVQPGGSLRLSCAASGYEFSRSWMNWVRQAPGKGLEWVGRIYPGDGDTNYSGKFKGRFTISADTSKNTAYLQMNSLRAEDTAVYYCARDGSSWDWYFDVWGQGTLVTVSSTRGMRTEDLPKAVVFLEPQWYRVLEKDSVTLKCQGAYSPEDNSTQWFHNESLISSQASSYFIDAATVDDSGEYRCQTNLSTLSDPVQLEVHIGWLLLQAPRWVFKEEDPIHLRCHSWKNTALHKVTYLQNGKGRKYFHHNSDFYIPKATLKDSGSYFCRGLVGSKNVSSETVNITITQGLAVPTISSFFPPGYQVSFCLVMVLLFAVDTGLYFSVK

SEQ ID NO: 9504 - protein, 479 aa, synthetic construct
MALPVTALLLPLALLLHAARPEIVLTQSPGTLSLSPGERATLSCRASQSVGGYLAWYQQKPGQAPRLLIYDASNRATGIPARFSGSGSGTDFTLTISSLEPEDFAVYYCQQRNNWPPMYTFGQGTKLEIKRGGGGSGGGGSGGGGSQVQLVQSGAEVKKPGSSVKVSCKASGGTFSSYAISWVRQAPGQGLEWMGGIIPILGTANYAQKFQGRVTITADESTSTAYMELSSLRSEDTAVYYCARWGGGAFDIWGQGTMVTVSSTRGMRTEDLPKAVVFLEPQWYRVLEKDSVTLKCQGAYSPEDNSTQWFHNESLISSQASSYFIDAATVDDSGEYRCQTNLSTLSDPVQLEVHIGWLLLQAPRWVFKEEDPIHLRCHSWKNTALHKVTYLQNGKGRKYFHHNSDFYIPKATLKDSGSYFCRGLVGSKNVSSETVNITITQGLAVPTISSFFPPGYQVSFCLVMVLLFAVDTGLYFSVK

SEQ ID NO: 9505 - protein, 476 aa, synthetic construct
MALPVTALLLPLALLLHAARPDIQMTQSPATIENTSLSASVGDRVTITCRASQGISSWLTWYQQKPEKAPKSLIYAASSLQSGVPSRFSGSGSGTDFTLTISSLQPEDFATYYCQQYDSYPITFGQGTRLEIKGGGGSGGGGSGGGGSQVQLQQWGAGLLKPSETLSLTCAVYGGSFSAYYWSWIRQPPGKGLEWIGDINHGGGTNYNPSLKSRVTISVDTSKNQFSLKLNSVTAADTAVYYCASLTAYWGQGSLVTVSSTRGMRTEDLPKAVVFLEPQWYRVLEKDSVTLKCQGAYSPEDNSTQWFHNESLISSQASSYFIDAATVDDSGEYRCQTNLSTLSDPVQLEVHIGWLLLQAPRWVFKEEDPIHLRCHSWKNTALHKVTYLQNGKGRKYFHHNSDFYIPKATLKDSGSYFCRGLVGSKNVSSETVNITITQGLAVPTISSFFPPGYQVSFCLVMVLLFAVDTGLYFSVK

SEQ ID NO: 9506 - protein, 480 aa, synthetic construct
MALPVTALLLPLALLLHAARPEIVLTQSPDSLAVSLGERATINCKASQSVDFDGDSYLNWYQQKPGQPPKVLIYAASTLQSGVPSRFSGSGSGTDFTLTINSLEAEDAATYYCQQSNEDPWTFGGGTKVEIKGGGGSGGGGSGGGGSQVQLVQSGAEVKKPGASVKVSCKVSGYTFTDYYITWVRQAPGQALEWMGWIYPGSGNTKYSQKFQGRFVFSVDTSASTAYLQLSSLKAEDTAVYYCANYGNYWFAYWGQGTLVTVSSTRGMRTEDLPKAVVFLEPQWYRVLEKDSVTLKCQGAYSPEDNSTQWFHNESLISSQASSYFIDAATVDDSGEYRCQTNLSTLSDPVQLEVHIGWLLLQAPRWVFKEEDPIHLRCHSWKNTALHKVTYLQNGKGRKYFHHNSDFYIPKATLKDSGSYFCRGLVGSKNVSSETVNITITQGLAVPTISSFFPPGYQVSFCLVMVLLFAVDTGLYFSVK

SEQ ID NO: 9507 - protein, 478 aa, synthetic construct
MALPVTALLLPLALLLHAARPDIQMTQSPSSLSASVGDRVTITCRASQGISSWLAWYQQKPEKAPKSLIYAASSLQSGVPSRFSGSGSGTDFTLTISSLQPEDFATYYCQQYNSYPPTFGGGTKVEIKGGGGSGGGGSGGGGSEVQLVQSGGGLVHPGGSLRLSCAGSGFAFSSSTMHWIRQAPGKGLEWISLIGSGGGIYYGDSVKGRFTISRDNAKNSLYLQMNSLRAEDMAVYYCVRGYFDWVDYFDYWGQGTLVTVSSTRGMRTEDLPKAVVFLEPQWYRVLEKDSVTLKCQGAYSPEDNSTQWFHNESLISSQASSYFIDAATVDDSGEYRCQTNLSTLSDPVQLEVHIGWLLLQAPRWVFKEEDPIHLRCHSWKNTALHKVTYLQNGKGRKYFHHNSDFYIPKATLKDSGSYFCRGLVGSKNVSSETVNITITQGLAVPTISSFFPPGYQVSFCLVMVLLFAVDTGLYFSVK

SEQ ID NO: 9508 - protein, 484 aa, synthetic construct
MALPVTALLLPLALLLHAARPDVVMTQSPLSLPVTLGQPASISCRSSQSIVHSDGNTYLEWYQQRPGQSPRRLIYKVSNRFSGVPDRFSGSGSGTDFTLKISRVEAEDVGVYYCFQGSHAPWTFGGGTKVEIKGGGGSGGGGSGGGGSEVQLVESGGGLVQPGGSLRLSCAASGFTFSSYGMHWVRQAPGKGLEWVAYITTRSSTIYYADSVKGRFTISRDNAKNSLYLQMNSLRAEDTAVYYCTREPLTGYYAMDYWGQGTSVTVSSTRGMRTEDLPKAVVFLEPQWYRVLEKDSVTLKCQGAYSPEDNSTQWFHNESLISSQASSYFIDAATVDDSGEYRCQTNLSTLSDPVQLEVHIGWLLLQAPRWVFKEEDPIHLRCHSWKNTALHKVTYLQNGKGRKYFHHNSDFYIPKATLKDSGSYFCRGLVGSKNVSSETVNITITQGLAVPTISSFFPPGYQVSFCLVMVLLFAVDTGLYFSVK

SEQ ID NO: 9509 - protein, 474 aa, synthetic construct
MALPVTALLLPLALLLHAARPQIVLTQSPALMSASPGEKVTMTCSASSSVRYMYWYQQKPRSSPKPWIHLTSNLASGVPARFSGSGSGTSYSLTISSMEAEDAATYYCQQWSSHPFTFGSGTKLEIKGGGGSGGGGSGGGGSDVQLQESGPGLVKPSQSLSLTCTVTGFSITSDYSWNWIRQFPGNKLEWMGYISYSGHTSYNPSLESRISITRDTSKNQFFLQLNSVTTEDTATYYCTRGNWDVVYWGQGTLVTVSATRGMRTEDLPKAVVFLEPQWYRVLEKDSVTLKCQGAYSPEDNSTQWFHNESLISSQASSYFIDAATVDDSGEYRCQTNLSTLSDPVQLEVHIGWLLLQAPRWVFKEEDPIHLRCHSWKNTALHKVTYLQNGKGRKYFHHNSDFYIPKATLKDSGSYFCRGLVGSKNVSSETVNITITQGLAVPTISSFFPPGYQVSFCLVMVLLFAVDTGLYFSVK

SEQ ID NO: 9510 - protein, 483 aa, synthetic construct
MALPVTALLLPLALLLHAARPEIVLTQSPGSLAVSPGERVTMSCKSSQSVFFSSSQKNYLAWYQQIPGQSPRLLIYWASTRESGVPDRFTGSGSGTDFTLTISSVQPEDLAIYYCHQYLSSRTFGQGTKLEIKRGGGGSGGGGSGGGGSQVQLQQPGAEVVKPGASVKMSCKASGYTFTSYYIHWIKQTPGQGLEWVGVIYPGNDDISYNQKFQGKATLTADKSSTTAYMQLSSLTSEDSAVYYCAREVRLRYFDVWGQGTTVTVSSTRGMRTEDLPKAVVFLEPQWYRVLEKDSVTLKCQGAYSPEDNSTQWFHNESLISSQASSYFIDAATVDDSGEYRCQTNLSTLSDPVQLEVHIGWLLLQAPRWVFKEEDPIHLRCHSWKNTALHKVTYLQNGKGRKYFHHNSDFYIPKATLKDSGSYFCRGLVGSKNVSSETVNITITQGLAVPTISSFFPPGYQVSFCLVMVLLFAVDTGLYFSVK

SEQ ID NO: 9511 - protein, 487 aa, synthetic construct
MALPVTALLLPLALLLHAARPDIVMTQSPDSLTVSLGERTTINCKSSQSVLDSSKNKNSLAWYQQKPGQPPKLLLSWASTRESGIPDRFSGSGSGTDFTLTIDSLQPEDSATYYCQQSAHFPITFGQGTRLEIKGGGGSGGGGSGGGGSQVQLVQSGAEVKKPGASVKVSCKASGYTFTNYGMNWVKQAPGQGLKWMGWINTYTGEPTYADDFKGRVTMTSDTSTSTAYLELHNLRSDDTAVYYCARWSWSDGYYVYFDYWGQGTTVTVSSTRGMRTEDLPKAVVFLEPQWYRVLEKDSVTLKCQGAYSPEDNSTQWFHNESLISSQASSYFIDAATVDDSGEYRCQTNLSTLSDPVQLEVHIGWLLLQAPRWVFKEEDPIHLRCHSWKNTALHKVTYLQNGKGRKYFHHNSDFYIPKATLKDSGSYFCRGLVGSKNVSSETVNITITQGLAVPTISSFFPPGYQVSFCLVMVLLFAVDTGLYFSVK

SEQ ID NO: 9512 - protein, 487 aa, synthetic construct
MALPVTALLLPLALLLHAARPDVLLTQSPLSLPVTLGQPASISCRSSQTIVHSNGNTYLEWFQQRPGQSPRLLIYQVSNRFSGVPDRFSGSGSGTDFTLKISRVEAEDVGVYYCFQGSHVPRTFGGGTKVEIKRGGGGSGGGGSGGGGSQIQLVQSGSELKKPGASVKVSCKASGYTFTNYGMNWVRQAPGQGLKWMGWINTNTGEPKYAEEFKGRFALSLDTSVSTAYLQINSLKAEDTAVYFCARGYGNYARGAWLAYWGQGTLVTVSSTRGMRTEDLPKAVVFLEPQWYRVLEKDSVTLKCQGAYSPEDNSTQWFHNESLISSQASSYFIDAATVDDSGEYRCQTNLSTLSDPVQLEVHIGWLLLQAPRWVFKEEDPIHLRCHSWKNTALHKVTYLQNGKGRKYFHHNSDFYIPKATLKDSGSYFCRGLVGSKNVSSETVNITITQGLAVPTISSFFPPGYQVSFCLVMVLLFAVDTGLYFSVK

SEQ ID NO: 9513 - protein, 482 aa, synthetic construct
MALPVTALLLPLALLLHAARPDHIVLTQSPSSLSASLGDRVTISCRASQDISTYLNWYQQKPDGTVKLLIFYTSRLHAGVPSRFSGSGSGTHHSLTISNLEQEDIATYFCQQGNSLPFTFGSGTKLEIKRGGGGSGGGGSGGGGSQVQLKESGPELEKPGASVKISCKASGYSFTAYSMNWVKQNNGMSLEWIGSIDPYYGDTKYAQKFKGKATLTVDKASSTAYLQLKSLTSEDSAVYYCARRMITTGDWYFDVWGAGTTVTVSSTRGMRTEDLPKAVVFLEPQWYRVLEKDSVTLKCQGAYSPEDNSTQWFHNESLISSQASSYFIDAATVDDSGEYRCQTNLSTLSDPVQLEVHIGWLLLQAPRWVFKEEDPIHLRCHSWKNTALHKVTYLQNGKGRKYFHHNSDFYIPKATLKDSGSYFCRGLVGSKNVSSETVNITITQGLAVPTISSFFPPGYQVSFCLVMVLLFAVDTGLYFSVK

SEQ ID NO: 9514 - protein, 482 aa, synthetic construct; identical to SEQ ID NO: 9513

SEQ ID NO: 9515 - protein, 482 aa, synthetic construct
MALPVTALLLPLALLLHAARPDIVMTQSPDSLAVSLGERATINCRASKSVSTSGYSFMHWYQQKPGQPPKLLIYLASNLESGVPDRFSGSGSGTDFTLTISSLQAEDVAVYYCQHSREVPWTFGQGTKVEIKRGGGGSGGGGSGGGGSQVQLVQSGAEVKKPGASVKVSCKASGYTFTNYGMNWVRQAPGQGLEWMGWINTYTGEPTYADAFKGRFAFSLDTSTSTAYLQINSLRSDDTAVYYCARDYGDYGMDYWGQGTTVTVSSTRGMRTEDLPKAVVFLEPQWYRVLEKDSVTLKCQGAYSPEDNSTQWFHNESLISSQASSYFIDAATVDDSGEYRCQTNLSTLSDPVQLEVHIGWLLLQAPRWVFKEEDPIHLRCHSWKNTALHKVTYLQNGKGRKYFHHNSDFYIPKATLKDSGSYFCRGLVGSKNVSSETVNITITQGLAVPTISSFFPPGYQVSFCLVMVLLFAVDTGLYFSVK

SEQ ID NO: 9516 - protein, 478 aa, synthetic construct
MALPVTALLLPLALLLHAARPDIVMTQTPLTLSVTIGQPASISCKSSQSLLDSDGKTYLNWLLQRPGQSPERLIYLVSKLDSGVPDRFTGSGSGTDFTLKISRVEAEDLGVYCCWQGTHFPYTFGGGTKVEIKGGGGGSGGGGSGGGGSQVQLQQPGAELVRPGASVKLSCKASGYTFTSYWMNWVKQRPGQGLEWIGMIDPSDSETHYNHIFKDKATLTVDKSSSTAYLQLSSLTSEDSAVYYCARNLYLWGQGTSVTVSSTRGMRTEDLPKAVVFLEPQWYRVLEKDSVTLKCQGAYSPEDNSTQWFHNESLISSQASSYFIDAATVDDSGEYRCQTNLSTLSDPVQLEVHIGWLLLQAPRWVFKEEDPIHLRCHSWKNTALHKVTYLQNGKGRKYFHHNSDFYIPKATLKDSGSYFCRGLVGSKNVSSETVNITITQGLAVPTISSFFPPGYQVSFCLVMVLLFAVDTGLYFSVK

SEQ ID NO: 9517 - protein, 481 aa, synthetic construct
MALPVTALLLPLALLLHAARPDIQLTQSPSSLSASVGDRVTITCKASQSVDYEGDSFLNWYQQKPGKAPKLLIYAASNLESGVPSRFSGSGSGTDFTLTISSLQPEDFATYYCQQSNEDPLTFGQGTKVEIKRGGGGSGGGGSGGGGSEVQLVESGGGLVQPGGSLRLSCAASGYTFSSYWIEWVRQAPGKGLEWIGEILPGGGDTNYNEIFKGRATFSADTSKNTAYLQMNSLRAEDTAVYYCTRRVPIRLDYWGQGTLVTVSSTRGMRTEDLPKAVVFLEPQWYRVLEKDSVTLKCQGAYSPEDNSTQWFHNESLISSQASSYFIDAATVDDSGEYRCQTNLSTLSDPVQLEVHIGWLLLQAPRWVFKEEDPIHLRCHSWKNTALHKVTYLQNGKGRKYFHHNSDFYIPKATLKDSGSYFCRGLVGSKNVSSETVNITITQGLAVPTISSFFPPGYQVSFCLVMVLLFAVDTGLYFSVK

SEQ ID NO: 9518 - protein, 489 aa, synthetic construct
MALPVTALLLPLALLLHAARPDIVMSQSPSSLAVSVGEKVTMSCKSSQSLLHSSNQKNYLAWYQQKPGQSPKVLIYWASTRESGVPDRFTGSGSGTDFTLTITSVKSEDLAVYYCQQYYSYPWTFGGGTRLEIKRGGGGSGGGGSGGGGSEVQLQQSVAELVKPGASVKMSCKVSGYTLTDHTIHWMKQRPEQGLEWIGYIYPRDGITGYNEKFKGKATLTADTSSSTAYMQLNSLTSEDSAVYFCARWGYSYRNYAYYYDYWGQGTTLTVSSTRGMRTEDLPKAVVFLEPQWYRVLEKDSVTLKCQGAYSPEDNSTQWFHNESLISSQASSYFIDAATVDDSGEYRCQTNLSTLSDPVQLEVHIGWLLLQAPRWVFKEEDPIHLRCHSWKNTALHKVTYLQNGKGRKYFHHNSDFYIPKATLKDSGSYFCRGLVGSKNVSSETVNITITQGLAVPTISSFFPPGYQVSFCLVMVLLFAVDTGLYFSVK

SEQ ID NO: 9519 - protein, 486 aa, synthetic construct
MALPVTALLLPLALLLHAARPEIVLTQSPGTLSLSPGERATLSCRASQSVSSSYLAWYQQKPGQAPRLLIYGTSSRATGIPDRFSGSGSGTDFTLTISRLEPEDFAVYYCQQYGSSPFTFGGGTKVEIKRGGGGSGGGGSGGGGSQVQLQESGPGLAKPSETLSLTCTVSGDSITSYYWSWIRQPPGKGLEWIGYIYYSGSTNYNPSLKSRVTISVDTSKNQFSLKLSSVTAADTAVYYCARDQRRIAAAGTHFYGMDVWGQGTTVTVSSTRGMRTEDLPKAVVFLEPQWYRVLEKDSVTLKCQGAYSPEDNSTQWFHNESLISSQASSYFIDAATVDDSGEYRCQTNLSTLSDPVQLEVHIGWLLLQAPRWVFKEEDPIHLRCHSWKNTALHKVTYLQNGKGRKYFHHNSDFYIPKATLKDSGSYFCRGLVGSKNVSSETVNITITQGLAVPTISSFFPPGYQVSFCLVMVLLFAVDTGLYFSVK

SEQ ID NO: 9520 - protein, 476 aa, synthetic construct
MALPVTALLLPLALLLHAARPDIQMTQSPSSLSASVGDRVTITCRASQSISLWLNWYQQKPGKAPKLLIYAASTLQSGVPSRFSGSGSGTDFTLTISSLQPEDFATYYCQQYYTSPYTFGQGTKVEIKRGGGGSGGGGSGGGGSQVQLLESGGGLVQPGGSLRLSCAASGFTFSSYAMSWVRQAPGKGLEWVSVIRSSGSSTYYADSVKGRFTISRDNSKNTLYLQMNSLRAEDTAVYYCARGGGYFDYWGQGTLVTVSSTRGMRTEDLPKAVVFLEPQWYRVLEKDSVTLKCQGAYSPEDNSTQWFHNESLISSQASSYFIDAATVDDSGEYRCQTNLSTLSDPVQLEVHIGWLLLQAPRWVFKEEDPIHLRCHSWKNTALHKVTYLQNGKGRKYFHHNSDFYIPKATLKDSGSYFCRGLVGSKNVSSETVNITITQGLAVPTISSFFPPGYQVSFCLVMVLLFAVDTGLYFSVK

SEQ ID NO: 9521 - protein, 479 aa, synthetic construct
MALPVTALLLPLALLLHAARPDIQMTQSPSSLSASVGDRVTITCRASQSISSYLNWYQQKPGKAPKLLIYAVSTLQSGVPSRFSGSGSGTDFTLTISSLQPEDFATYYCQQSGTFPPTTFGQGTKVEIKRGGGGSGGGGSGGGGSQVQLLESGGGLVQPGGSLRLSCAASGFTFSSHGMHWVRQAPGKGLEWVSVISGSGSNTGYADSVKGRFTISRDNSKNTLYLQMNSLRAEDTAVYYCARQWGSYAFDSWGQGTLVTVSSTRGMRTEDLPKAVVFLEPQWYRVLEKDSVTLKCQGAYSPEDNSTQWFHNESLISSQASSYFIDAATVDDSGEYRCQTNLSTLSDPVQLEVHIGWLLLQAPRWVFKEEDPIHLRCHSWKNTALHKVTYLQNGKGRKYFHHNSDFYIPKATLKDSGSYFCRGLVGSKNVSSETVNITITQGLAVPTISSFFPPGYQVSFCLVMVLLFAVDTGLYFSVK

SEQ ID NO: 9522 - protein, 471 aa, synthetic construct
MALPVTALLLPLALLLHAARPMTQSPKFLLVSAGDRVTLTCKASQSVNNDVYWYQQEPGQSPKLLIYWASTRESGVPDRFTGSGSGTDFTLTISSVQAEDLAVYYCKQSYNLYTFGGGTKLEIKRGGGGSGGGGSGGGGSESGRGLVQPGGSRKLSCAASGFTFSTSGMHWVRQAPEKGLEWVAYISSGSTTIYHADTVKGRFTISRDNPKNTLFLQMTSLRSEDTAMYYCCARSGQFGNYFDYWGQGTTLTVSSTRGMRTEDLPKAVVFLEPQWYRVLEKDSVTLKCQGAYSPEDNSTQWFHNESLISSQASSYFIDAATVDDSGEYRCQTNLSTLSDPVQLEVHIGWLLLQAPRWVFKEEDPIHLRCHSWKNTALHKVTYLQNGKGRKYFHHNSDFYIPKATLKDSGSYFCRGLVGSKNVSSETVNITITQGLAVPTISSFFPPGYQVSFCLVMVLLFAVDTGLYFSVK

SEQ ID NO: 9523 - protein, 476 aa, synthetic construct
MALPVTALLLPLALLLHAARPQSPSSLAVSAGEKVTMSCKSSQSLLNSRTRKNYLAWYQQKPGQSPKLLIYWASTRESGVPDRFTGSGSGTDFTLTISSVQAEDLAVYYCKQSNLYTFGGGTKLEIKGGGGSGGGGSGGGGSQVQLEESGPELVKPGASVKLSCKASGYTFTEYIIHWVKQRSGQGLEWIGWFYPGSGSIKYNEKFKDKATLTADKSSSTVYMELSGLTSEDSAVYFCARHDGYSYFDYWGQGTTLTVSSTRGMRTEDLPKAVVFLEPQWYRVLEKDSVTLKCQGAYSPEDNSTQWFHNESLISSQASSYFIDAATVDDSGEYRCQTNLSTLSDPVQLEVHIGWLLLQAPRWVFKEEDPIHLRCHSWKNTALHKVTYLQNGKGRKYFHHNSDFYIPKATLKDSGSYFCRGLVGSKNVSSETVNITITQGLAVPTISSFFPPGYQVSFCLVMVLLFAVDTGLYFSVK

SEQ ID NO: 9524 - protein, 479 aa, synthetic construct
MALPVTALLLPLALLLHAARPDIQMTQSPSSLSASLGERVSLTCRATQELSGYLSWLQQKPDGTIKRLIYAASTLDSGVPKRFSGNRSGSDYSLTISSLESEDFADYYCLQYAIYPYTFGGGTKLEIKGGGGSGGGGSGGGGSEVQLQQSGPELVKPGASVKMSCKASGYTFTSYFIHWVKQKPGQGLEWIGFINPYNDGSKYNEKFKGKATLTSDKSSSTAYMELSSLTSEDSAVYYCTRDDGYYGYAMDYWGQGTSVTVSSTRGMRTEDLPKAVVFLEPQWYRVLEKDSVTLKCQGAYSPEDNSTQWFHNESLISSQASSYFIDAATVDDSGEYRCQTNLSTLSDPVQLEVHIGWLLLQAPRWVFKEEDPIHLRCHSWKNTALHKVTYLQNGKGRKYFHHNSDFYIPKATLKDSGSYFCRGLVGSKNVSSETVNITITQGLAVPTISSFFPPGYQVSFCLVMVLLFAVDTGLYFSVK

SEQ ID NO: 9525 - protein, 484 aa, synthetic construct
MALPVTALLLPLALLLHAARPDTIVLTQSPASLAVSLGQRATISCRASESVDSYGNSFMHWYQQKPGQPPKLLIYLASNLESGVPARFSGSGSRTDFTLTIDPVEADDAATYYCQQNNYDPWTFGGGTKLEIKGGGGSGGGGSGGGGSEVQLQQSGPELVKPGASVKMSCKASGYTFTSYVMHWVKQKPGQGLEWIGYINPYNDGTKYNEKFKGKATLTSDTSSSTAYMELNSLTSEDSAVYFCARPIYFDNDYFDYWGQGTTLKVSSTRGMRTEDLPKAVVFLEPQWYRVLEKDSVTLKCQGAYSPEDNSTQWFHNESLISSQASSYFIDAATVDDSGEYRCQTNLSTLSDPVQLEVHIGWLLLQAPRWVFKEEDPIHLRCHSWKNTALHKVTYLQNGKGRKYFHHNSDFYIPKATLKDSGSYFCRGLVGSKNVSSETVNITITQGLAVPTISSFFPPGYQVSFCLVMVLLFAVDTGLYFSVK

SEQ ID NO: 9526 - protein, 478 aa, synthetic construct
MALPVTALLLPLALLLHAARPDIQMTQSPSSLSASVGDRVTITCKASQDVGIAVAWYQQKPGKVPKLLIYWASTRHTGVPDRFSGSGSGTDFTLTISSLQPEDVATYYCQQYSSYPYTFGQGTKVEIKGGGGSGGGGSGGGGSEVQLVESGGGLVQPGGSLRLSCAASGFDFSRYWMSWVRQAPGKGLEWIGEINPDSSTINYAPSLKDKFIISRDNAKNSLYLQMNSLRAEDTAVYYCARPDGNYWYFDVWGQGTLVTVSSTRGMRTEDLPKAVVFLEPQWYRVLEKDSVTLKCQGAYSPEDNSTQWFHNESLISSQASSYFIDAATVDDSGEYRCQTNLSTLSDPVQLEVHIGWLLLQAPRWVFKEEDPIHLRCHSWKNTALHKVTYLQNGKGRKYFHHNSDFYIPKATLKDSGSYFCRGLVGSKNVSSETVNITITQGLAVPTISSFFPPGYQVSFCLVMVLLFAVDTGLYFSVK

SEQ ID NO: 9527 - protein, 479 aa, synthetic construct
MALPVTALLLPLALLLHAARPDIVMTQSQKSMSTSVGDRVSITCKASQDVITGVAWYQQKPGQSPKLLIYSASYRYTGVPDRFTGSGSGTDFTFTISNVQAEDLAVYYCQQHYSTPLTFGAGTKLELKGGGGSGGGGSGGGGSQVQLQQPGAELVRPGASVKLSCKASGYSFTTYWMNWVKQRPGQGLEWIGMIHPSDSETRLNQKFKDKATLTVDKSSSTAYMQLSSPTSEDSAVYYCARSTMIATRAMDYWGQGTSVTVSSTRGMRTEDLPKAVVFLEPQWYRVLEKDSVTLKCQGAYSPEDNSTQWFHNESLISSQASSYFIDAATVDDSGEYRCQTNLSTLSDPVQLEVHIGWLLLQAPRWVFKEEDPIHLRCHSWKNTALHKVTYLQNGKGRKYFHHNSDFYIPKATLKDSGSYFCRGLVGSKNVSSETVNITITQGLAVPTISSFFPPGYQVSFCLVMVLLFAVDTGLYFSVK

SEQ ID NO: 9528 - protein, 485 aa, synthetic construct
MALPVTALLLPLALLLHAARPQSVLTQPPSVSGAPGQRVTISCTGSGSNIGAPYDVSWYQQLPGTAPKLLIYHNNKRPSGVPDRFSGSKSGTSASLAITGLQAEDEADYYCATVEAGLSGSVFGGGTKLTVLGAGGGGSGGGGSGGGGSQVQLVQSGAEVKKPGASVKVSCKVSGYTLTELSIHWVRQAPGKGLEWMGGFDPEENEIVYAQRFQGRVTMTEDTSTDTAYMELSSLRSEDTAVYYCAIVGSFSPLTLGLWGQGTMVTVSSTRGMRTEDLPKAVVFLEPQWYRVLEKDSVTLKCQGAYSPEDNSTQWFHNESLISSQASSYFIDAATVDDSGEYRCQTNLSTLSDPVQLEVHIGWLLLQAPRWVFKEEDPIHLRCHSWKNTALHKVTYLQNGKGRKYFHHNSDFYIPKATLKDSGSYFCRGLVGSKNVSSETVNITITQGLAVPTISSFFPPGYQVSFCLVMVLLFAVDTGLYFSVK

SEQ ID NO: 9529 - protein, 485 aa, synthetic construct
MALPVTALLLPLALLLHAARPQSVLTQPPSVSGAPGQRVTISCTGSGSNIGAPYDVSWYQQLPGTAPKLLIYHNNKRPSGVPDRFSGSKSGTSASLAITGLQAEDEADYYCQSYDSSSISTIFGGGTKLTVLGAGGGGSGGGGSGGGGSQVQLVQSGAEVKKPGASVKVSCKVSGYTLTELSIHWVRQAPGKGLEWMGGFDPEENEIVYAQRFQGRVTMTEDTSTDTAYMELSSLRSEDTAVYYCAIVGSFSGIAYRPWGQGTMVTVSSTRGMRTEDLPKAVVFLEPQWYRVLEKDSVTLKCQGAYSPEDNSTQWFHNESLISSQASSYFIDAATVDDSGEYRCQTNLSTLSDPVQLEVHIGWLLLQAPRWVFKEEDPIHLRCHSWKNTALHKVTYLQNGKGRKYFHHNSDFYIPKATLKDSGSYFCRGLVGSKNVSSETVNITITQGLAVPTISSFFPPGYQVSFCLVMVLLFAVDTGLYFSVK

SEQ ID NO: 9530 - protein, 483 aa, synthetic construct
MALPVTALLLPLALLLHAARPDIQMTQSPSSLSASVGDRVTITCSASSSVSYMYWYQQKPGKAPKLLIYLTSNLASGVPSRFSGSGSGTDFTLTISSLQPEDFATYYCQQWRSNPFTFGQGTKLEIKRGGGGSGGGGSGGGGSQITLKESGPTLVKPTQTLTLTCTFSGFSLSTSGMGVGWIRQPPGKALEWLAHIWWDDVKRYSPSLKSRLTITKDTSKNQVVLTMTNMDPVDTATYYCARIVSFDNDVVSAMDYWGQGTLVTVSSTRGMRTEDLPKAVVFLEPQWYRVLEKDSVTLKCQGAYSPEDNSTQWFHNESLISSQASSYFIDAATVDDSGEYRCQTNLSTLSDPVQLEVHIGWLLLQAPRWVFKEEDPIHLRCHSWKNTALHKVTYLQNGKGRKYFHHNSDFYIPKATLKDSGSYFCRGLVGSKNVSSETVNITITQGLAVPTISSFFPPGYQVSFCLVMVLLFAVDTGLYFSVK

SEQ ID NO: 9531 - protein, 478 aa, synthetic construct
MALPVTALLLPLALLLHAARPEIVMTQSPATLSVSPGERATLSCKASQSVSNDVVWYQQKPGQAPRLLIYYASNRYTGIPARFSGSGSGTEFTLTISSLQSEDFAVYYCQQDYTSPWTFGQGTKLEIKRGGGGSGGGGSGGGGSQVQLVQSGAEVKKPGASVKVSCKASGYTFTNYGMNWVRQAPGQGLEWMGWINTYTGEPTYADDFKGRVTMTTDTSTSTAYMELRSLRSDDTAVYYCARIGDSSPSDYWGQGTLVTVSSTRGMRTEDLPKAVVFLEPQWYRVLEKDSVTLKCQGAYSPEDNSTQWFHNESLISSQASSYFIDAATVDDSGEYRCQTNLSTLSDPVQLEVHIGWLLLQAPRWVFKEEDPIHLRCHSWKNTALHKVTYLQNGKGRKYFHHNSDFYIPKATLKDSGSYFCRGLVGSKNVSSETVNITITQGLAVPTISSFFPPGYQVSFCLVMVLLFAVDTGLYFSVK

SEQ ID NO: 9532 - protein, 478 aa, synthetic construct
MALPVTALLLPLALLLHAARPDILLTQSPVILSVSPGERVSFSCRASQSIGTNIHWYQQRTNGSPRLLIKYASESISGIPSRFSGSGSGTDFTLSINSVESEDIADYYCQQNNNWPTTFGAGTKLELKGGGGSGGGGSGGGGSQVQLKQSGPGLVQPSQSLSITCTVSGFSLTNYGVHWVRQSPGKGLEWLGVIWSGGNTDYNTPFTSRLSINKDNSKSQVFFKMNSLQSNDTAIYYCARALTYYDYEFAYWGQGTLVTVSATRGMRTEDLPKAVVFLEPQWYRVLEKDSVTLKCQGAYSPEDNSTQWFHNESLISSQASSYFIDAATVDDSGEYRCQTNLSTLSDPVQLEVHIGWLLLQAPRWVFKEEDPIHLRCHSWKNTALHKVTYLQNGKGRKYFHHNSDFYIPKATLKDSGSYFCRGLVGSKNVSSETVNITITQGLAVPTISSFFPPGYQVSFCLVMVLLFAVDTGLYFSVK

SEQ ID NO: 9533 - protein, 478 aa, synthetic construct
MALPVTALLLPLALLLHAARPEIQLVQSGAEVKKPGESLRISCKGSGFNIEDYYIHWVRQMPGKGLEWMGRIDPENDETKYGPIFQGHVTISADTSINTVYLQWSSLKASDTAMYYCAFRGGVYWGQGTTVTVSSGGGGSGGGGSGGGGSDVVMTQSPDSLAVSLGERATINCKSSQSLLDSDGKTYLNWLQQKPGQPPKRLISLVSKLDSGVPDRFSGSGSGTDFTLTISSLQAEDVAVYYCWQGTHFPGTFGGGTKVEIKTRGMRTEDLPKAVVFLEPQWYRVLEKDSVTLKCQGAYSPEDNSTQWFHNESLISSQASSYFIDAATVDDSGEYRCQTNLSTLSDPVQLEVHIGWLLLQAPRWVFKEEDPIHLRCHSWKNTALHKVTYLQNGKGRKYFHHNSDFYIPKATLKDSGSYFCRGLVGSKNVSSETVNITITQGLAVPTISSFFPPGYQVSFCLVMVLLFAVDTGLYFSVK

SEQ ID NO: 9534 - protein, 486 aa, synthetic construct
MALPVTALLLPLALLLHAARPELQMTQSPSSLSASVGDRVTITCRASQSISSYLNWYQQKPGQPPKLLIYWASTRESGVPDRFSGSESGTNYTLTISSLQPEDFATYFCQQSDSLPITFGQGTRLDIQGGGGSGGGGSGGGGSEVQLLESGGGVVQPGRSLRLSCAASGFTFSSYGMHWVRQAPGKGLEWVAVISYDGSNKYYADSVKGRFTISRDNSKNTLYLQMNSLRAEDTAVYYCAKDMGWGSGWRPYYYYGMDVWGQGTTVTVSSTRGMRTEDLPKAVVFLEPQWYRVLEKDSVTLKCQGAYSPEDNSTQWFHNESLISSQASSYFIDAATVDDSGEYRCQTNLSTLSDPVQLEVHIGWLLLQAPRWVFKEEDPIHLRCHSWKNTALHKVTYLQNGKGRKYFHHNSDFYIPKATLKDSGSYFCRGLVGSKNVSSETVNITITQGLAVPTISSFFPPGYQVSFCLVMVLLFAVDTGLYFSVK

SEQ ID NO: 9535 - protein, 485 aa, synthetic construct
MALPVTALLLPLALLLHAARPELVMTQSPSSLTVTAGEKVTMSCKSSQSLLNSGNQKNYLTWYQQKPGQPPKLLIYWASTRESGVPDRFTGSGSGTDFTLTISSVQAEDLAVYYCQNDYSYPLTFGAGTKLEIKGGGGSGGGGSGGGGSEVQLLEQSGAELVRPGTSVKISCKASGYAFTNYWLGWVKQRPGHGLEWIGDIFPGSGNIHYNEKFKGKATLTADKSSSTAYMQLSSLTFEDSAVYFCARLRNWDEPMDYWGQGTTVTVSSTRGMRTEDLPKAVVFLEPQWYRVLEKDSVTLKCQGAYSPEDNSTQWFHNESLISSQASSYFIDAATVDDSGEYRCQTNLSTLSDPVQLEVHIGWLLLQAPRWVFKEEDPIHLRCHSWKNTALHKVTYLQNGKGRKYFHHNSDFYIPKATLKDSGSYFCRGLVGSKNVSSETVNITITQGLAVPTISSFFPPGYQVSFCLVMVLLFAVDTGLYFSVK

SEQ ID NO: 9536 - protein, 483 aa, synthetic construct
MALPVTALLLPLALLLHAARPDIQMTQSPSSLSASVGDRVTITCRASQSISSYLNWYQQKPGKAPKLLIYAASSLQSGVPSRFSGSGSGTDFTLTISSLQPEDLATYYCQQSYSTPFTFGPGTKVDIKGGGGSGGGGSGGGGSVHEVQLVQSGAEVKKPGSSVKVSCKASGGTFSSYAISWVRQAPGQGLEWMGGIIPIFGTANYAQKFQGRVTITADKSTSTAYMELSSLRSEDTAVYYCATFALFGFREQAFDIWGQGTTVTVSSTRGMRTEDLPKAVVFLEPQWYRVLEKDSVTLKCQGAYSPEDNSTQWFHNESLISSQASSYFIDAATVDDSGEYRCQTNLSTLSDPVQLEVHIGWLLLQAPRWVFKEEDPIHLRCHSWKNTALHKVTYLQNGKGRKYFHHNSDFYIPKATLKDSGSYFCRGLVGSKNVSSETVNITITQGLAVPTISSFFPPGYQVSFCLVMVLLFAVDTGLYFSVK

SEQ ID NO: 9537 - protein, 477 aa, synthetic construct
MALPVTALLLPLALLLHAARPYIHVTQSPSSLSVSIGDRVTINCQTSQGVGSDLHWYQHKPGRAPKLLIHHASSVEDGVPSRFSGTGFHTSFNLTINDLQADDIGTYYCQVLQSFGRGSRLDTKGGGGSGGGGSGGGGSRAHLVQSGTAMKKPGASVRVSCQTSGYTFTAHILFWFRQAPGRGLEWVGWIKPQYGAVNFGGGFRDRVTLTRDVYREIAYMDIRGLKPDDTAVYYCARDRSYGDSSWALDAWGQGTTVVVSATRGMRTEDLPKAVVFLEPQWYRVLEKDSVTLKCQGAYSPEDNSTQWFHNESLISSQASSYFIDAATVDDSGEYRCQTNLSTLSDPVQLEVHIGWLLLQAPRWVFKEEDPIHLRCHSWKNTALHKVTYLQNGKGRKYFHHNSDFYIPKATLKDSGSYFCRGLVGSKNVSSETVNITITQGLAVPTISSFFPPGYQVSFCLVMVLLFAVDTGLYFSVK

SEQ ID NO: 9538 - protein, 482 aa, synthetic construct
MALPVTALLLPLALLLHAARPDIVLTQSPLSLAVSLGQPAIISCKASQSVSFAGTSLMHWYHQKPGQQPRLLIYRASNLEAGVPDRFSGSGSKTDFTLTISPVEAEDAATYYCQQSREYPYTFGGGTKLEIKRGGGGSGGGGSGGGGSQVQLVQSGAEVVKPGASVKISCKASGYTFTGYFMNWVKQSPGQSLEWIGRIHPYDGDTFYNQKFQGKATLTVDKSSNTAHMELLSLTSEDFAVYYCTRYDGSRAMDYWGQGTTVTVSSTRGMRTEDLPKAVVFLEPQWYRVLEKDSVTLKCQGAYSPEDNSTQWFHNESLISSQASSYFIDAATVDDSGEYRCQTNLSTLSDPVQLEVHIGWLLLQAPRWVFKEEDPIHLRCHSWKNTALHKVTYLQNGKGRKYFHHNSDFYIPKATLKDSGSYFCRGLVGSKNVSSETVNITITQGLAVPTISSFFPPGYQVSFCLVMVLLFAVDTGLYFSVK

SEQ ID NO: 9539 - protein, 478 aa, synthetic construct
MALPVTALLLPLALLLHAARPDVVMTQTPLSLPVTPGEPASISCRSSQSLVHRNGNTYLHWYLQKPGQSPKLLIHKVSNRFSGVPDRFSGSGSGTDFTLKISRVEAEDLGVYFCSQSTHVPPLTFGAGTKLELKGGGGSGGGGSGGGGSEVQLVQSGAEVEKPGASVKISCKASGSSFTGYNMNWVRQNIGKSLEWIGAIDPYYGGTSYNQKFKGRATLTVDKSTSTAYMHLKSLRSEDTAVYYCVSGMEYWGQGTSVTVSSTRGMRTEDLPKAVVFLEPQWYRVLEKDSVTLKCQGAYSPEDNSTQWFHNESLISSQASSYFIDAATVDDSGEYRCQTNLSTLSDPVQLEVHIGWLLLQAPRWVFKEEDPIHLRCHSWKNTALHKVTYLQNGKGRKYFHHNSDFYIPKATLKDSGSYFCRGLVGSKNVSSETVNITITQGLAVPTISSFFPPGYQVSFCLVMVLLFAVDTGLYFSVK

SEQ ID NO: 9540 - protein, 476 aa, synthetic construct
MALPVTALLLPLALLLHAARPEIVMTQTPATLSVSAGERVTITCKASQSVSNDVTWYQQKPGQAPRLLIYSASNRYSGVPARFSGSGYGTEFTFTISSVQSEDFAVYFCQQDYSSFGQGTKLEIKRGGGGSGGGGSGGGGSQVQLVESGPGVVQPGRSLRISCAVSGFSVTNYGVHWVRQPPGKGLEWLGVIWAGGITNYNSAFMSRLTISKDNSKNTVYLQMNSLRAEDTAMYYCASRGGHYGYALDYWGQGTLVTVSSTRGMRTEDLPKAVVFLEPQWYRVLEKDSVTLKCQGAYSPEDNSTQWFHNESLISSQASSYFIDAATVDDSGEYRCQTNLSTLSDPVQLEVHIGWLLLQAPRWVFKEEDPIHLRCHSWKNTALHKVTYLQNGKGRKYFHHNSDFYIPKATLKDSGSYFCRGLVGSKNVSSETVNITITQGLAVPTISSFFPPGYQVSFCLVMVLLFAVDTGLYFSVK

SEQ ID NO: 9541 - protein, 479 aa, synthetic construct
MALPVTALLLPLALLLHAARPDIQMTQTASSLPASLGDRVTISCSASQDISNYLNWYQQKPDGTVKLLIFYSSNLHSGVPSRFSGGGSGTDYSLTISNLEPEDIATYFCHQYSKLPWTFGGGTKLEIKRGGGGSGGGGSGGGGSEVTLVESGGDFVKPGGSLKVSCAASGFAFSHYAMSWVRQTPAKRLEWVAYISSGGSGTYYSDSVKGRFTISRDNAKNTLYLQMRSLRSEDSAMYFCTRVKLGTYYFDSWGQGTTLTVSSTRGMRTEDLPKAVVFLEPQWYRVLEKDSVTLKCQGAYSPEDNSTQWFHNESLISSQASSYFIDAATVDDSGEYRCQTNLSTLSDPVQLEVHIGWLLLQAPRWVFKEEDPIHLRCHSWKNTALHKVTYLQNGKGRKYFHHNSDFYIPKATLKDSGSYFCRGLVGSKNVSSETVNITITQGLAVPTISSFFPPGYQVSFCLVMVLLFAVDTGLYFSVK

SEQ ID NO: 9542 - protein, 481 aa, synthetic construct
MALPVTALLLPLALLLHAARPQFVLTQSPSASAALGASAKLTCTLSSAHKTYTIDWYQQQKGKAPRYLIQVKSDGTYTKATGVPDRFSGSSSGADRYLIIPSVQADDEADYYCGTDYTGGYVFGGGTQLTVTGGGGSGGGGSGGGGSEQLKESGGGLFKPTDTLTLTCTVSGFSLSYYGVNWVRQAPGNGLEWIGTIGGSGDTYYASWAKSRSTIIRNTNENTVTLKMTSLTAADTATYFCVRYANIGYEYFNVWGPGTLVTVSSTRGMRTEDLPKAVVFLEPQWYRVLEKDSVTLKCQGAYSPEDNSTQWFHNESLISSQASSYFIDAATVDDSGEYRCQTNLSTLSDPVQLEVHIGWLLLQAPRWVFKEEDPIHLRCHSWKNTALHKVTYLQNGKGRKYFHHNSDFYIPKATLKDSGSYFCRGLVGSKNVSSETVNITITQGLAVPTISSFFPPGYQVSFCLVMVLLFAVDTGLYFSVK

SEQ ID NO: 9543 - protein, 480 aa, synthetic construct
MALPVTALLLPLALLLHAARPDIQMTQSPSSLSASVGDRVTITCRASQGISSWLAWYQQKPEKAPKSLIYAASSLQSGVPSRFSGSGSGTDFTLTISSLQPEDFATYYCQQYNSYPPTFGGGTKVEIKGGGGSGGGGSGGGGSEVQLVESGGGLVQPGESLRLSCVASGFTFSRYKMNWVRQAPGKGLEWVSYISRSGRDIYYADSVKGRFTISRDNAKNSLYLQMNSLRDEDTAVYYCAGTVTTYYYFGMDVWGHGTTVTVSSTRGMRTEDLPKAVVFLEPQWYRVLEKDSVTLKCQGAYSPEDNSTQWFHNESLISSQASSYFIDAATVDDSGEYRCQTNLSTLSDPVQLEVHIGWLLLQAPRWVFKEEDPIHLRCHSWKNTALHKVTYLQNGKGRKYFHHNSDFYIPKATLKDSGSYFCRGLVGSKNVSSETVNITITQGLAVPTISSFFPPGYQVSFCLVMVLLFAVDTGLYFSVK

SEQ ID NO: 9544 - protein, 479 aa, synthetic construct
MALPVTALLLPLALLLHAARPQSVVTQPPSMSAAPGQQVTISCSGGNSNIERNYVSWYLQLPGTAPKLVIFDNDRRPSGIPDRFSGSKSGTSATLGITGLQTGDEADYYCGTWDSSLRGWVFGGGTKLTVLGGGGGSGGGGSGGGGSEVQLVESGGGLIQPGGSLRLSCAASGFTFSNYAMNWVRQAPGKGLEWVSTINGRGSSTIYADSVKGRFTISRDNSKNTLYLQMNSLRAEDTATYYCARYISRGLGDSWGQGTLVTVTRGMRTEDLPKAVVFLEPQWYRVLEKDSVTLKCQGAYSPEDNSTQWFHNESLISSQASSYFIDAATVDDSGEYRCQTNLSTLSDPVQLEVHIGWLLLQAPRWVFKEEDPIHLRCHSWKNTALHKVTYLQNGKGRKYFHHNSDFYIPKATLKDSGSYFCRGLVGSKNVSSETVNITITQGLAVPTISSFFPPGYQVSFCLVMVLLFAVDTGLYFSVK

SEQ ID NO: 9545 - protein, 480 aa, synthetic construct
MALPVTALLLPLALLLHAARPQSVLTQPPSASGTPGQRVTISCSGSRSNVGGNYVFWYQQVPGATPKLLIYRSNQRPSGVPDRFAGSKSGSSASLAISGLRSEDEADYYCATWDDSLSGFVFGTGTKVTVLGGGGGSGGGGSGGGGSEVQLVESGGGLVKPGGSLRLSCAASGFTFSDYYMSWIRQAPGKGLEWVSYISSSGSTIYYADSVKGRFTISRDNAKNSLYLQMNSLRAEDTAVYYCARGYGKAYDQWGQGTLVTVSSTRGMRTEDLPKAVVFLEPQWYRVLEKDSVTLKCQGAYSPEDNSTQWFHNESLISSQASSYFIDAATVDDSGEYRCQTNLSTLSDPVQLEVHIGWLLLQAPRWVFKEEDPIHLRCHSWKNTALHKVTYLQNGKGRKYFHHNSDFYIPKATLKDSGSYFCRGLVGSKNVSSETVNITITQGLAVPTISSFFPPGYQVSFCLVMVLLFAVDTGLYFSVK

SEQ ID NO: 9546 - protein, 479 aa, synthetic construct
MALPVTALLLPLALLLHAARPDIQMTQSPSSLSASVGDRVTITCRASQDVNTAVAWYQQKPGKAPKLLIYSASFLESGVPSRFSGSRSGTDFTLTISSLQPEDFATYYCQQHYTTPPTFGQTKVEIKRGGGGSGGGGSGGGGSEVQLVESGGGLVQPGGSLRLSCAASGFNIKDTYIHWVRQAPGKGLEWVARIYPTNGYTRYADSVKGRFTISADTSKNTAYLQMNSLRAEDTAVYYCSRWGGDGFYAMDVWGQGTLVTVSSTRGMRTEDLPKAVVFLEPQWYRVLEKDSVTLKCQGAYSPEDNSTQWFHNESLISSQASSYFIDAATVDDSGEYRCQTNLSTLSDPVQLEVHIGWLLLQAPRWVFKEEDPIHLRCHSWKNTALHKVTYLQNGKGRKYFHHNSDFYIPKATLKDSGSYFCRGLVGSKNVSSETVNITITQGLAVPTISSFFPPGYQVSFCLVMVLLFAVDTGLYFSVK

SEQ ID NO: 9547 - protein, 492 aa, synthetic construct
MALPVTALLLPLALLLHAARPQSALTQPPSASGSPGQSITISCTGTSNNFVSWYQQHAGKAPKLVIYDVNKRPSGVPDRFSGSKSGNTASLTVSGLQTDDEAVYYCGSLVGNWDVIFGGGTKLTVLGGGGSGGGGSGGGGSQPQLQESGPTLVEASETLSLTCAVSGDSTAACNSFWGWVRQPPGKGLEWVGSLSHCASYWNRGWTYHNPSLKSRLTLALDTPKNLVFLKLNSVTAADTATYYCARFGGEVLRYTDWPKPAWVDLWGRGTLVTVSSTRGMRTEDLPKAVVFLEPQWYRVLEKDSVTLKCQGAYSPEDNSTQWFHNESLISSQASSYFIDAATVDDSGEYRCQTNLSTLSDPVQLEVHIGWLLLQAPRWVFKEEDPIHLRCHSWKNTALHKVTYLQNGKGRKYFHHNSDFYIPKATLKDSGSYFCRGLVGSKNVSSETVNITITQGLAVPTISSFFPPGYQVSFCLVMVLLFAVDTGLYFSVK

SEQ ID NO: 9548 - protein, 487 aa, synthetic construct
MALPVTALLLPLALLLHAARPELVLTQSPGTLSLSAGERATLSCRASQSVSSGSLAWYQQKPGQAPRLLIYGASTRATGIPDRFSGSGSGTDFTLTIGRLEPEDLAVYYCQQYGTSPYTFGQGTKLEIGGGGSGGGGSGGGGSLEQSGAEVKKPGSSVQVSCKASGGTFSMYGFNWVRQAPGHGLEWMGGIIPIFGTSNYAQKFRGRVTFTADQATSTAYMELTNLRSDDTAVYYCARDFGPDWEDGDSYDGSGRGFFDFWGQGTLVTVSSTRGMRTEDLPKAVVFLEPQWYRVLEKDSVTLKCQGAYSPEDNSTQWFHNESLISSQASSYFIDAATVDDSGEYRCQTNLSTLSDPVQLEVHIGWLLLQAPRWVFKEEDPIHLRCHSWKNTALHKVTYLQNGKGRKYFHHNSDFYIPKATLKDSGSYFCRGLVGSKNVSSETVNITITQGLAVPTISSFFPPGYQVSFCLVMVLLFAVDTGLYFSVK

SEQ ID NO: 9549 - protein, 467 aa, synthetic construct
MALPVTALLLPLALLLHAARPDIQMTQSPSSLSASVGDRVTITCQASQDINNYLNWYQQKPGKAPKLLIYDASNLQTGVPSRFSGSGSGTDFTFTIEDIATYYCQQYTFGPGTKVDIKGGGGSGGGGSGGGGSEVQLLESGGGLVQPGGSLRLSCAASGFTFSWYSMTWVRQAPGKGLEWVSSIVPWGDFTQYADSVKGRFTISRDNSKNTLYLQMNSLRAEDTAVYYCAKGPGWGSFDLWGRGTLVTVSSTRGMRTEDLPKAVVFLEPQWYRVLEKDSVTLKCQGAYSPEDNSTQWFHNESLISSQASSYFIDAATVDDSGEYRCQTNLSTLSDPVQLEVHIGWLLLQAPRWVFKEEDPIHLRCHSWKNTALHKVTYLQNGKGRKYFHHNSDFYIPKATLKDSGSYFCRGLVGSKNVSSETVNITITQGLAVPTISSFFPPGYQVSFCLVMVLLFAVDTGLYFSVK

SEQ ID NO: 9550 - protein, 477 aa, synthetic construct
MALPVTALLLPLALLLHAARPDIQMTQSPSSLSASVGDRVTITCTASLSVSSTYLHWYQQKPGSSPKLWIYSTSNLASGVPSRFSGSGSGTSYTLTISSLQPEDFATYYCHQYHRSPLTFGGGTKVEIKRGGGGSGGGGSGGGGSEVQLVESGGGLVQPGGSLRLSCAASGFSLTKYGVHWVRQAPGKGLEWVGVKWAGGSTDYNSALMSRFTISKDNAKNSLYLQMNSLRAEDTAVYYCARDHRDAMDYWGQGTLVTVSSTRGMRTEDLPKAVVFLEPQWYRVLEKDSVTLKCQGAYSPEDNSTQWFHNESLISSQASSYFIDAATVDDSGEYRCQTNLSTLSDPVQLEVHIGWLLLQAPRWVFKEEDPIHLRCHSWKNTALHKVTYLQNGKGRKYFHHNSDFYIPKATLKDSGSYFCRGLVGSKNVSSETVNITITQGLAVPTISSFFPPGYQVSFCLVMVLLFAVDTGLYFSVK

SEQ ID NO: 9551 - protein, 481 aa, synthetic construct
MALPVTALLLPLALLLHAARPDIQMTQSPSSLSASVGDRVTITCKASQDVGTAVAWYQQKPGKAPKLLIYSASYRSTGVPSRFSGSGSGTDFTLTISSLQPEDFATYYCQHHYSAPWTFGGGTKVEIKGGGGSGGGGSGGGGSEVQLVESGGGLVQPGGSLRLSCAASGFTFSRNGMSWVRQAPGKGLEWVATVSSGGSYIYYADSVKGRFTISRDNAKNSLYLQMNSLRAEDTAVYYCARQGTTALATRFFDVWGQGTLVTVSSTRGMRTEDLPKAVVFLEPQWYRVLEKDSVTLKCQGAYSPEDNSTQWFHNESLISSQASSYFIDAATVDDSGEYRCQTNLSTLSDPVQLEVHIGWLLLQAPRWVFKEEDPIHLRCHSWKNTALHKVTYLQNGKGRKYFHHNSDFYIPKATLKDSGSYFCRGLVGSKNVSSETVNITITQGLAVPTISSFFPPGYQVSFCLVMVLLFAVDTGLYFSVK

SEQ ID NO: 9552 - protein, 477 aa, synthetic construct
MALPVTALLLPLALLLHAARPDIQMTQSFSSLSASVGDRVTITCRASQDISNYLNWYQQKPGKAPKLLIYYTSRLHSGVPSRFSGSGSGTDYTLTISSLQPEDFATYFCQQGNTLPWTFGGGTKLEIKRGGGGSGGGGSGGGGSEVQLVQSGGGLVQSGGSLRLSCRASGYTFTRYWMLWVRQRPGKGLEWVAEINPRNDRTNYNEKFKTRFTISVDRSKNTLYLQMDSLRAEDTAVYFCALGGGYAMDYWGQGTLVTVSSTRGMRTEDLPKAVVFLEPQWYRVLEKDSVTLKCQGAYSPEDNSTQWFHNESLISSQASSYFIDAATVDDSGEYRCQTNLSTLSDPVQLEVHIGWLLLQAPRWVFKEEDPIHLRCHSWKNTALHKVTYLQNGKGRKYFHHNSDFYIPKATLKDSGSYFCRGLVGSKNVSSETVNITITQGLAVPTISSFFPPGYQVSFCLVMVLLFAVDTGLYFSVK

SEQ ID NO: 9553 - protein, 477 aa, synthetic construct
MALPVTALLLPLALLLHAARPDIQMTQSPPSLSASVGGKVTITCKASQDIDRYMAWYQDKPGKGPKLLIHDTSTLQPGIPSRFSGSGSGRDYSFSISNLEPEDIATYYCLQYDNLWTFGGGTKLEIKRGGGGSGGGGSGGGGSQVQLVQSGAELVKPGASVKMSCKASGYIFTNYNIHWVKKSPGQGLEWIGAIYPGNGDAPYSQKFQDRATLTADTSSSTTYMELSSLTSEDSAVYYCVRANWDVAFAYWGQGTLVSVSSTRGMRTEDLPKAVVFLEPQWYRVLEKDSVTLKCQGAYSPEDNSTQWFHNESLISSQASSYFIDAATVDDSGEYRCQTNLSTLSDPVQLEVHIGWLLLQAPRWVFKEEDPIHLRCHSWKNTALHKVTYLQNGKGRKYFHHNSDFYIPKATLKDSGSYFCRGLVGSKNVSSETVNITITQGLAVPTISSFFPPGYQVSFCLVMVLLFAVDTGLYFSVK

SEQ ID NO: 9554 - protein, 478 aa, synthetic construct
MALPVTALLLPLALLLHAARPDIQMTQSPASLSASVGETVTITCRVSGNIHNYLAWYQQKQGKSPQLLVYNAKTLADGVPSRFSGSGSGTQYSLKINSLQPEDFGSYYCQHFWSNPYTFGGGTKLEIKGGGGSGGGGSGGGGSQVQLQQSGASVKVSCKASELVRPGTGYAFTNYLIEWVKQRPGQGLEWIGVINPGSGGTNYNEKFKGKATLTADKSSSTAYMQLSSLTSDDSAVYFCARYRSYDWYFDVWGAGTTVTVSSTRGMRTEDLPKAVVFLEPQWYRVLEKDSVTLKCQGAYSPEDNSTQWFHNESLISSQASSYFIDAATVDDSGEYRCQTNLSTLSDPVQLEVHIGWLLLQAPRWVFKEEDPIHLRCHSWKNTALHKVTYLQNGKGRKYFHHNSDFYIPKATLKDSGSYFCRGLVGSKNVSSETVNITITQGLAVPTISSFFPPGYQVSFCLVMVLLFAVDTGLYFSVK

SEQ ID NO: 9555 - protein, 478 aa, synthetic construct
MALPVTALLLPLALLLHAARPDIQMTQSPASLSASVGETVTIICRASVNIYSYLAWYQQKQGKSPQLLVYNAKILAEGVPSRFSGSGSGTQFSLKINSLQPEDFGSYYCQHHYGTFTFGSGTKLEIKRGGGGSGGGGSGGGGSQVQLKESGPGLVAPSQSLSITCTISGFSLTSYGVHWVRQPPGKGLEWLVVIWSDGSTTYNSALKSRLSISKDNSKSQVFLKMNSLQTDDTAIYYCASHYGSTLAFASWGHGTLVTVSAATRGMRTEDLPKAVVFLEPQWYRVLEKDSVTLKCQGAYSPEDNSTQWFHNESLISSQASSYFIDAATVDDSGEYRCQTNLSTLSDPVQLEVHIGWLLLQAPRWVFKEEDPIHLRCHSWKNTALHKVTYLQNGKGRKYFHHNSDFYIPKATLKDSGSYFCRGLVGSKNVSSETVNITITQGLAVPTISSFFPPGYQVSFCLVMVLLFAVDTGLYFSVK

SEQ ID NO: 9556 - protein, 486 aa, synthetic construct
MALPVTALLLPLALLLHAARPDIVMTQSHKFMSTSVGDRVSVTCKASQNVGNNVAWYQQKPGQSPKVLIYSASYRYSGVPDRFTGSGSGTDFTLTISNVQSEDLAEYFCQQYNTYPFTFGSGTKLEIKGGGGSGGGGSGGGGSEVQLEESGGGLVQPGGSMKLSCVASGFTFSNYWMNWVRQSPEKGLEWVAEIRFKSHNYATHFAESVKGRFTISRDDSKSSVYLQMNNLRAEDTGIYYCTRRIGNSDYDWWYFDVWGAGTSVTVSSASTRGMRTEDLPKAVVFLEPQWYRVLEKDSVTLKCQGAYSPEDNSTQWFHNESLISSQASSYFIDAATVDDSGEYRCQTNLSTLSDPVQLEVHIGWLLLQAPRWVFKEEDPIHLRCHSWKNTALHKVTYLQNGKGRKYFHHNSDFYIPKATLKDSGSYFCRGLVGSKNVSSETVNITITQGLAVPTISSFFPPGYQVSFCLVMVLLFAVDTGLYFSVK

SEQ ID NO: 9557 - protein, 478 aa, synthetic construct
MALPVTALLLPLALLLHAARPDIQMTQSSSSFSVSLGDRVTITCKASEDIYIRLAWYQQKPGNAPRLLISAATSLETGIPSRFSGSGSGEDYTLTITSLQTEDVATYYCQQYWTTPWTFGGGTKLEIKRGGGGSGGGGSGGGGSDVQLQESGPGLVKPSQSLSLTCTVTGYSITIDYTWNWIRQFPGNKLEWMGYITYSGSTDYNPSLKSRSSITRDTSMNQFFLQLNSVTTEDTATYYCARLGRRYALDYWGQGTSVTVSSTRGMRTEDLPKAVVFLEPQWYRVLEKDSVTLKCQGAYSPEDNSTQWFHNESLISSQASSYFIDAATVDDSGEYRCQTNLSTLSDPVQLEVHIGWLLLQAPRWVFKEEDPIHLRCHSWKNTALHKVTYLQNGKGRKYFHHNSDFYIPKATLKDSGSYFCRGLVGSKNVSSETVNITITQGLAVPTISSFFPPGYQVSFCLVMVLLFAVDTGLYFSVK

SEQ ID NO: 9558 - protein, 477 aa, synthetic construct
MALPVTALLLPLALLLHAARPDVQLQESGPGLVKPSQSLSLTCTVTGYSITSDYTWNWIRQFPGNKLEWMGYITYSGSTSYNPSLKSRNSITRDTSKNQFFLQLNSVTTEDTATYYCARLGRRYTMDYWGQGTSVTVSSGGGGSGGGGSGGGGSDIQMTQSSSSFSVSLGDRVTITCMASEDIYIRLAWYQQKPGNAPRLLISAATSLETGVPSRFSGSGSGKDYTLSITSLQTEDVGTYYCQQYWSSPWTFGGGTKLEINTRGMRTEDLPKAVVFLEPQWYRVLEKDSVTLKCQGAYSPEDNSTQWFHNESLISSQASSYFIDAATVDDSGEYRCQTNLSTLSDPVQLEVHIGWLLLQAPRWVFKEEDPIHLRCHSWKNTALHKVTYLQNGKGRKYFHHNSDFYIPKATLKDSGSYFCRGLVGSKNVSSETVNITITQGLAVPTISSFFPPGYQVSFCLVMVLLFAVDTGLYFSVK

SEQ ID NO: 9559 - protein, 477 aa, synthetic construct
MALPVTALLLPLALLLHAARPDIQMTQSSSSFSVSLGDRVTITCMASEDIYIRLAWYQQKPGNAPRLLISAATSLETGVPSRFSGSGSGKDYTLSITSLQTEDVGTYYCQQYWSSPWTFGGGTKLEINGGGGSGGGGSGGGGSDVQLQESGPGLVKPSQSLSLTCTVTGYSITSDYTWNWIRQFPGNKLEWMGYITYSGSTSYNPSLKSRNSITRDTSKNQFFLQLNSVTTEDTATYYCARLGRRYTMDYWGQGTSVTVSSTRGMRTEDLPKAVVFLEPQWYRVLEKDSVTLKCQGAYSPEDNSTQWFHNESLISSQASSYFIDAATVDDSGEYRCQTNLSTLSDPVQLEVHIGWLLLQAPRWVFKEEDPIHLRCHSWKNTALHKVTYLQNGKGRKYFHHNSDFYIPKATLKDSGSYFCRGLVGSKNVSSETVNITITQGLAVPTISSFFPPGYQVSFCLVMVLLFAVDTGLYFSVK

SEQ ID NO: 9560 - protein, 479 aa, synthetic construct
MALPVTALLLPLALLLHAARPDQIVLTQSPAIMSASPGEKVTISCSASSSVSYMYWYQQKPGSSPKPWIYRTSNLASGVPARFSGSGSGTSYSLTISNMEAEDAAAYYCQQYHSYPTTFGGGTKLEVKGGGGSGGGGSGGGGSEVQLVESGGGLVQPKGSLKLSCAASGFSFNTYAMNWVRQAPGKGLEWIAHIRSKSNNFATYYADSVKDRFSISRDASENILFLQMNNLKTEDTAMYYCVRQGGDFPMDYWGQGTSVTVSSTRGMRTEDLPKAVVFLEPQWYRVLEKDSVTLKCQGAYSPEDNSTQWFHNESLISSQASSYFIDAATVDDSGEYRCQTNLSTLSDPVQLEVHIGWLLLQAPRWVFKEEDPIHLRCHSWKNTALHKVTYLQNGKGRKYFHHNSDFYIPKATLKDSGSYFCRGLVGSKNVSSETVNITITQGLAVPTISSFFPPGYQVSFCLVMVLLFAVDTGLYFSVK

SEQ ID NO: 9561 - protein, 480 aa, synthetic construct
MALPVTALLLPLALLLHAARPDIQMTQSPSSLSASVGDRVTITCRASQSISSYLNWYQQKPGKAPKLLIYDASNLETGVPSRFSGSGSGTDFTFTISSLQPEDIATYYCQQYDNLPLTFGGGTKVDIKRGGGGSGGGGSGGGGSQVQLVESGGGVVQPGRSLRLSCAASGFTFSSYAMHWVRQAPGKGLEWVAVISYDGSNKYYADSVKGRFTISRDNSKNTLYLQMNSLRAEDTAVYYCARAHNSSSWSFDYWGQGTLVTVSSTRGMRTEDLPKAVVFLEPQWYRVLEKDSVTLKCQGAYSPEDNSTQWFHNESLISSQASSYFIDAATVDDSGEYRCQTNLSTLSDPVQLEVHIGWLLLQAPRWVFKEEDPIHLRCHSWKNTALHKVTYLQNGKGRKYFHHNSDFYIPKATLKDSGSYFCRGLVGSKNVSSETVNITITQGLAVPTISSFFPPGYQVSFCLVMVLLFAVDTGLYFSVK

SEQ ID NO: 9562 - protein, 489 aa, synthetic construct
MALPVTALLLPLALLLHAARPDVVMTQSPLSLPVSLGDQASISCRSSQRLVHSNGNTYLHWYLQKPGQSPKLLIYRVSNRFPGVPDRFSGSGSGTDFTLKISRVEAEDLGIYFCSQSTHVPYTFGGGTKLEIKRGGGGSGGGGSGGGGSEVRLQQSGPDLIKPGASVKMSCKASGYTFTGYVMHWVKQRPGQGLEWIGFINPYNDDIQSNERFRGKATLTSDKSSTTAYMELSSLTSEDSAVYYCARGAGYNFDGAYRFFDFWGQGTTLTVSSTRGMRTEDLPKAVVFLEPQWYRVLEKDSVTLKCQGAYSPEDNSTQWFHNESLISSQASSYFIDAATVDDSGEYRCQTNLSTLSDPVQLEVHIGWLLLQAPRWVFKEEDPIHLRCHSWKNTALHKVTYLQNGKGRKYFHHNSDFYIPKATLKDSGSYFCRGLVGSKNVSSETVNITITQGLAVPTISSFFPPGYQVSFCLVMVLLFAVDTGLYFSVK

SEQ ID NO: 9563 - protein, 480 aa, synthetic construct
MALPVTALLLPLALLLHAARPSYELTQPPSVSVSPGQTATISCSGDQLGGKYGHWYQKKPGQSPVLVLYQDRKRPAGIPERFSGSSSGNTITLTISGTQAVDEADYYCQAWDTNLGGVFGGGTKVTVLGQGGGGSGGGGSGGGGSQVQLVESGAEVKKPGASVKVSCKASGYTFTGYYMHWVRQAPGQGLEWMGRINPNSGGTNYAQKFQGRVTMTRDTSISTAYMELSRLRSDDTAVYYCASPRGRGSAFDIWGQGTLVTVSSTRGMRTEDLPKAVVFLEPQWYRVLEKDSVTLKCQGAYSPEDNSTQWFHNESLISSQASSYFIDAATVDDSGEYRCQTNLSTLSDPVQLEVHIGWLLLQAPRWVFKEEDPIHLRCHSWKNTALHKVTYLQNGKGRKYFHHNSDFYIPKATLKDSGSYFCRGLVGSKNVSSETVNITITQGLAVPTISSFFPPGYQVSFCLVMVLLFAVDTGLYFSVK

SEQ ID NO: 9564 - protein, 483 aa, synthetic construct
MALPVTALLLPLALLLHAARPNFMLTQPHSVSESPGKTVTISCTRSSGSIASKYVQWYQQRPGSSPTTVIYEDNQRPSGVPDRFSGSIDTSSNSASLTISGLRTEDEADYYCHSYDSNNHSVFGGGTKVTVLGQGGGGSGGGGSGGGGSEVQLVESGGGVVQPGGSLRLSCAASGFTFSSYAMSWVRQAPGKGLEWVSAISGSGGSTYYADSVKGRFSISRDNSKNTLYLQMNSLRAEDTAVYYCARTRSSGAFDIWGQGTLVTVSSTRGMRTEDLPKAVVFLEPQWYRVLEKDSVTLKCQGAYSPEDNSTQWFHNESLISSQASSYFIDAATVDDSGEYRCQTNLSTLSDPVQLEVHIGWLLLQAPRWVFKEEDPIHLRCHSWKNTALHKVTYLQNGKGRKYFHHNSDFYIPKATLKDSGSYFCRGLVGSKNVSSETVNITITQGLAVPTISSFFPPGYQVSFCLVMVLLFAVDTGLYFSVK

SEQ ID NO: 9565 - protein, 479 aa, synthetic construct
MALPVTALLLPLALLLHAARPDIQMNQSPSSLSASLGDTITITCHASQNINVWLSWYQQKPGNIPKLLIYKASNLHTGVPSRFSGSGSGTGFTITISSLQPEDIATYYCQQGQSYPWTFGGGTKLEIKRGGGGSGGGGSGGGGSEVQLQQSGPELVKPGASVKISCKASGYSFTGYFMNWVKQSHGKSLEYIGRFNPYNGETLYNQKFKGKATLTVDKSSSTVHMELLSVTSEDSAVYYCGRSGNDDAMDYWGQGTSVTVSSATRGMRTEDLPKAVVFLEPQWYRVLEKDSVTLKCQGAYSPEDNSTQWFHNESLISSQASSYFIDAATVDDSGEYRCQTNLSTLSDPVQLEVHIGWLLLQAPRWVFKEEDPIHLRCHSWKNTALHKVTYLQNGKGRKYFHHNSDFYIPKATLKDSGSYFCRGLVGSKNVSSETVNITITQGLAVPTISSFFPPGYQVSFCLVMVLLFAVDTGLYFSVK

SEQ ID NO: 9566 - protein, 476 aa, synthetic construct
MALPVTALLLPLALLLHAARPDILLTQSPAILSVSPGERVSFSCRASQNIGTSIHWYQQRTNGSPRLLIKYASESVSGIPSRFSGSGSGTDFTLSINSVESEDIADYYCQHTNSWPTTFGGGTKLEIKRGGGGSGGGGSGGGGSQVQLQQSDAELVKPGASVKISCKASGYTFTDHAIHWVKQKPEQGLEWIGYFSPGNGDIKYNEKFKGKATLTADKSSSTAYMQLNSLTSEDSAVYFCKRSYGNYDYWGQGTTLTVSSTRGMRTEDLPKAVVFLEPQWYRVLEKDSVTLKCQGAYSPEDNSTQWFHNESLISSQASSYFIDAATVDDSGEYRCQTNLSTLSDPVQLEVHIGWLLLQAPRWVFKEEDPIHLRCHSWKNTALHKVTYLQNGKGRKYFHHNSDFYIPKATLKDSGSYFCRGLVGSKNVSSETVNITITQGLAVPTISSFFPPGYQVSFCLVMVLLFAVDTGLYFSVK

SEQ ID NO: 9567 - protein, 481 aa, synthetic construct
MALPVTALLLPLALLLHAARPDIVMTQSPDSLAVSLGERATINCKSSQSLLNSGDQKNYLTWYQQKPGQPPKLLIYWASTRESGVPDRFSGSGSGTDFTLTISSLQAEDVAVYYCQNDYSYPLTFGQGTKVEIKGGGGSGGGGSGGGGSQVQLVQSGAEVKKTGSSVKVSCKASGYTFTDHAIHVWRQAPGQALEWMGHFSPGNTDIKYNDKFKGRVTLTVDRSMSTAYMELSSLRSEDTAMYYCKTSTFFFDYWGQGTMVTVSSTRGMRTEDLPKAVVFLEPQWYRVLEKDSVTLKCQGAYSPEDNSTQWFHNESLISSQASSYFIDAATVDDSGEYRCQTNLSTLSDPVQLEVHIGWLLLQAPRWVFKEEDPIHLRCHSWKNTALHKVTYLQNGKGRKYFHHNSDFYIPKATLKDSGSYFCRGLVGSKNVSSETVNITITQGLAVPTISSFFPPGYQVSFCLVMVLLFAVDTGLYFSVK

SEQ ID NO: 9568 - protein, 480 aa, synthetic construct
MALPVTALLLPLALLLHAARPDIQMTQSPSSLSASVGDRVTITCKASQDVSIAVAWYQQKPGKAPKVLIYSASYRYTGVPDRFSGSGSGTDFTFTISSLQPEDIAVYYCQQHYITPLTFGGGTKVEIKGGGGSGGGGSGGGGSQIQLVQSGHEVKKPGASVKVSCKASGYTFTNYGMNWVRQAPGQGLEWMGWINTKTGEPTYAEEFKGRFVFSLETSASTAYLQISSLKAEDTAMYFCGRGGYGSSYWYFDVWGQGTTVTVSSTRGMRTEDLPKAVVFLEPQWYRVLEKDSVTLKCQGAYSPEDNSTQWFHNESLISSQASSYFIDAATVDDSGEYRCQTNLSTLSDPVQLEVHIGWLLLQAPRWVFKEEDPIHLRCHSWKNTALHKVTYLQNGKGRKYFHHNSDFYIPKATLKDSGSYFCRGLVGSKNVSSETVNITITQGLAVPTISSFFPPGYQVSFCLVMVLLFAVDTGLYFSVK

SEQ ID NO: 9569 - protein, 483 aa, synthetic construct
MALPVTALLLPLALLLHAARPQAVVTQPPSASGTPGQRVTISCSGSSSNIGSNTVNWYQQVPGTAPKLLIYSNNQRPSGVPDRFSGSKSGTSASLAISGLQSEDEADYYCAAWDDSLNGWVFGGGTKLTVLGGGGSGGGGSGGGGSQMQLVQSGAEVKEPGESLRISCKGSGYSFTNFWISWVRQMPGKGLEWMGRVDPGYSYSTYSPSFQGHVTISADKSTSTAYLQWNSLKASDTAMYYCARVQYSGYYDWFDPWGQGTLVTVSSTRGMRTEDLPKAVVFLEPQWYRVLEKDSVTLKCQGAYSPEDNSTQWFHNESLISSQASSYFIDAATVDDSGEYRCQTNLSTLSDPVQLEVHIGWLLLQAPRWVFKEEDPIHLRCHSWKNTALHKVTYLQNGKGRKYFHHNSDFYIPKATLKDSGSYFCRGLVGSKNVSSETVNITITQGLAVPTISSFFPPGYQVSFCLVMVLLFAVDTGLYFSVK

SEQ ID NO: 9570 - protein, 477 aa, synthetic construct
MALPVTALLLPLALLLHAARPDIQMTQSPSTLSASVGDRVTITCRASQNINKWLAWYQQRPGKAPQLLIYKASSLESGVPSRFSGSGSGTEYTLTISSLQPDDFATYYCQQYNSYATFGQGTKVEIKRGGGGSGGGGSGGGGSQVQLVQSGAEVKKPGESLKISCKGSGYNFSNKWIGWVRQLPGRGLEWIAIIYPGYSDITYSPSFQGRVTISADTSINTAYLHWHSLKASDTAMYYCVRHTALAGFDYWGLGTLVTVSSTRGMRTEDLPKAVVFLEPQWYRVLEKDSVTLKCQGAYSPEDNSTQWFHNESLISSQASSYFIDAATVDDSGEYRCQTNLSTLSDPVQLEVHIGWLLLQAPRWVFKEEDPIHLRCHSWKNTALHKVTYLQNGKGRKYFHHNSDFYIPKATLKDSGSYFCRGLVGSKNVSSETVNITITQGLAVPTISSFFPPGYQVSFCLVMVLLFAVDTGLYFSVK

SEQ ID NO: 9571 - protein, 482 aa, synthetic construct
MALPVTALLLPLALLLHAARPQSVVTQPPSVSVAPGKTARITCGRNNIGSKSVHWYQQKPGQAPVLVVYDDSDRPSGIPERFSGSNSGNTATLTISRVEAGDEADYYCQVWDSSSDHVVFGGGTKLTVLGGGGGSGGGGSGGGGSEVQLVQSGGGVVRPGGSLRLSCAASGFTFDDYGMSWVRQAPGKGLEWVSGINWNGGSTGYADSVRGRFTISRDNAKNSLYLQMNSLRAEDTALYYCARERGYGYHDPHDYWGQGTLVTVSSTRGMRTEDLPKAVVFLEPQWYRVLEKDSVTLKCQGAYSPEDNSTQWFHNESLISSQASSYFIDAATVDDSGEYRCQTNLSTLSDPVQLEVHIGWLLLQAPRWVFKEEDPIHLRCHSWKNTALHKVTYLQNGKGRKYFHHNSDFYIPKATLKDSGSYFCRGLVGSKNVSSETVNITITQGLAVPTISSFFPPGYQVSFCLVMVLLFAVDTGLYFSVK

SEQ ID NO: 9572 - protein, 481 aa, synthetic construct
MALPVTALLLPLALLLHAARPDIVLTQSPASLAVSLGQRATISCRASESVDNYGNTFMHWYQQKPGQPPKLLIYRASNLESGIPARFSGSGSRTDFTLTINPVEADDVATYYCQQSNEDPPTFGAGTKLELKGGGGSGGGGSGGGGSQIQLVQSGPELKKPGETVKISCKASGYIFTNYGMNWVKQAPGKSFKWMGWINTYTGESTYSADFKGRFAFSLETSASTAYLHINDLKNEDTATYFCARSGGYDPMDYWGQGTSVTVSSTRGMRTEDLPKAVVFLEPQWYRVLEKDSVTLKCQGAYSPEDNSTQWFHNESLISSQASSYFIDAATVDDSGEYRCQTNLSTLSDPVQLEVHIGWLLLQAPRWVFKEEDPIHLRCHSWKNTALHKVTYLQNGKGRKYFHHNSDFYIPKATLKDSGSYFCRGLVGSKNVSSETVNITITQGLAVPTISSFFPPGYQVSFCLVMVLLFAVDTGLYFSVK

SEQ ID NO: 9573 - protein, 479 aa, synthetic construct
MALPVTALLLPLALLLHAARPEIVLTQSPGTLSLSPGERATLSCRASQSVSNTYLAWYHQRPGQAPRLLIYGASSRATGIPDRFSGSGSGTDFALTISSLEPEDFAVYYCQQYSNSWTFGQGTKVEIKRGGGGSGGGGSGGGGSQVQLVESGGGVVQPGRSLRLSCAASGFTFSSYDMHWVRQAPGKGLEWVAVISYDGTNEYYADSVKGRFTISRDTSKNTLYLQMNSLRAEDTAVYYCARERYFDWSFDYWGQGTLVSVSSTRGMRTEDLPKAVVFLEPQWYRVLEKDSVTLKCQGAYSPEDNSTQWFHNESLISSQASSYFIDAATVDDSGEYRCQTNLSTLSDPVQLEVHIGWLLLQAPRWVFKEEDPIHLRCHSWKNTALHKVTYLQNGKGRKYFHHNSDFYIPKATLKDSGSYFCRGLVGSKNVSSETVNITITQGLAVPTISSFFPPGYQVSFCLVMVLLFAVDTGLYFSVK

SEQ ID NO: 9574 - protein, 478 aa, synthetic construct
MALPVTALLLPLALLLHAARPELTQDPAVSVALGQTVRITCQGDSLRSNYANWYQQKPGQAPVLVIYGQNNRPSGIPDRFSGSSSGNTASLTITGAQAADEADYYCDSRVSTGNHVVFGGGTKLTVLGQGGGGSGGGGSGGGGSEVQLVQSGAEVKKPGASVKVSCKASGYTFTSYAMHWVRQAPGQRLEWMGWINAGNGNTKYSQKFQGRVTITRDTSASTAYMELSSLRSEDTAVYYCARDISYGSFDYWGQGTLVTVSSTRGMRTEDLPKAVVFLEPQWYRVLEKDSVTLKCQGAYSPEDNSTQWFHNESLISSQASSYFIDAATVDDSGEYRCQTNLSTLSDPVQLEVHIGWLLLQAPRWVFKEEDPIHLRCHSWKNTALHKVTYLQNGKGRKYFHHNSDFYIPKATLKDSGSYFCRGLVGSKNVSSETVNITITQGLAVPTISSFFPPGYQVSFCLVMVLLFAVDTGLYFSVK

SEQ ID NO: 9575 - protein, 474 aa, synthetic construct
MALPVTALLLPLALLLHAARPDIQMTQSPSSLSASVGDRVTITCSATSSISYMHWYQQKPGKAPKGWIYDTSKLAHGVPSRFSGSGSGTDFTLTISSLQPEDFATYYCHQRRSYPFTFGQGTKVEIKGGGGSGGGGSGGGGSEVQLVQSGAEVKKPGASVKVSCKASGYTFTNFWIHWVRQAPGQGLEWIGEIDPSDSYTNYNQKFKGRVTITRDTSTSTAYLELSSLRSEDTAVYYCAREITTVDYWGQGTLVTVSSTRGMRTEDLPKAVVFLEPQWYRVLEKDSVTLKCQGAYSPEDNSTQWFHNESLISSQASSYFIDAATVDDSGEYRCQTNLSTLSDPVQLEVHIGWLLLQAPRWVFKEEDPIHLRCHSWKNTALHKVTYLQNGKGRKYFHHNSDFYIPKATLKDSGSYFCRGLVGSKNVSSETVNITITQGLAVPTISSFFPPGYQVSFCLVMVLLFAVDTGLYFSVK

SEQ ID NO: 9576 - protein, 481 aa, synthetic construct
MALPVTALLLPLALLLHAARPDIQMTQSPSSLSASVGDRVTITCKASQGFNKYVAWYQQKPGKAPKLLIYYTSTLQPGVPSRFSGSGSGRDYTLTISSLQPEDFATYYCLQYGNLLYAFGQGTKVEIKRGGGGSGGGGSGGGGSEVQLVQSGAEVKKPGASVKVSCKASGYTFTSYWIGWVRQAPGQGLEWIGDIYPGGGYTNYNEKFKGRVTITRDTSTSTAYLELSSLRSEDTAVYYCARLDGSSYRGAMDSWGQGTLVTVSSTRGMRTEDLPKAVVFLEPQWYRVLEKDSVTLKCQGAYSPEDNSTQWFHNESLISSQASSYFIDAATVDDSGEYRCQTNLSTLSDPVQLEVHIGWLLLQAPRWVFKEEDPIHLRCHSWKNTALHKVTYLQNGKGRKYFHHNSDFYIPKATLKDSGSYFCRGLVGSKNVSSETVNITITQGLAVPTISSFFPPGYQVSFCLVMVLLFAVDTGLYFSVK

SEQ ID NO: 9577 - protein, 477 aa, synthetic construct
MALPVTALLLPLALLLHAARPDIQMTQSPSSLSASVGDRVTITCRASQDIRYYLNWYQQKPGKAPKLLIYVASSLQSGVPSRFSGSGSGTEFTLTVSSLQPEDFATYYCLQVYSTPRTFGQGTKVEIKGGGGSGGGGSGGGGSEVQLVESGGGLAKPGGSLRLSCAASGFRFTFNNYYMDWVRQAPGQGLEWVSRISSSGDPTWYADSVKGRFTISRENAKNTLFLQMNSLRAEDTAVYYCASLTTGSDSWGQGVLVTVSSTRGMRTEDLPKAVVFLEPQWYRVLEKDSVTLKCQGAYSPEDNSTQWFHNESLISSQASSYFIDAATVDDSGEYRCQTNLSTLSDPVQLEVHIGWLLLQAPRWVFKEEDPIHLRCHSWKNTALHKVTYLQNGKGRKYFHHNSDFYIPKATLKDSGSYFCRGLVGSKNVSSETVNITITQGLAVPTISSFFPPGYQVSFCLVMVLLFAVDTGLYFSVK

SEQ ID NO: 9578 - protein, 478 aa, synthetic construct
MALPVTALLLPLALLLHAARPEIVMTQSPATLSVSPGERATLSCRASQSVSRNLAWYQQKPGQAPRLLIYGASTRATGIPARFSGSGSGTEFTLTIGSLQSEDFAVYYCQQYKTWPRTFGQGTNVEIKGGGGSGGGGSGGGGSQVQLQQWGAGLLKPSETLSLTCAVFGGSFSGYYWSWIRQPPGKGLEWIGEINHRGNTNDNPSLKSRVTISVDTSKNQFALKLSSVTAADTAVYYCARERGYTYGNFDHWGQGTLVTVSSTRGMRTEDLPKAVVFLEPQWYRVLEKDSVTLKCQGAYSPEDNSTQWFHNESLISSQASSYFIDAATVDDSGEYRCQTNLSTLSDPVQLEVHIGWLLLQAPRWVFKEEDPIHLRCHSWKNTALHKVTYLQNGKGRKYFHHNSDFYIPKATLKDSGSYFCRGLVGSKNVSSETVNITITQGLAVPTISSFFPPGYQVSFCLVMVLLFAVDTGLYFSVK

SEQ ID NO: 9579 - protein, 484 aa, synthetic construct
MALPVTALLLPLALLLHAARPDIQMTQSPSSLSASVGDRVTITCKASKNIRSYLAWYQQKPGKAPKLLIYSGSTLHSGVPSRFSGSGSGTDFTLTISSLQPEDFATYYCQQHHEYPLTFGQGTKVEIKRGGGGSGGGGSGGGGSQVQLQESGPGLVKPSETLSLTCTVSGYTITSGYDWSWIRQPPGKGLEWIGYINYGGSTNYKPSLGSRVTISVDTSKNQFSLKLSSVTAADTAVYYCARYNEYKSYIYDWYFDFWGQGTLVTVSSTRGMRTEDLPKAVVFLEPQWYRVLEKDSVTLKCQGAYSPEDNSTQWFHNESLISSQASSYFIDAATVDDSGEYRCQTNLSTLSDPVQLEVHIGWLLLQAPRWVFKEEDPIHLRCHSWKNTALHKVTYLQNGKGRKYFHHNSDFYIPKATLKDSGSYFCRGLVGSKNVSSETVNITITQGLAVPTISSFFPPGYQVSFCLVMVLLFAVDTGLYFSVK

SEQ ID NO: 9580 - protein, 486 aa, synthetic construct
MALPVTALLLPLALLLHAARPQSVVTQPPSVSAAPGQKVTISCSGSSSNIGNNYVSWYQQLPGTAPKLLIYDNNKRPSGIPDRFSGSKSGTSATLGITGLQTGDEADYYCGTWDGSLYTMLFGGGTKLTVLGGGGSGGGGSGGGGSEVQLVESGGGLVKPGGSLRLSCAASGFTFSNAWMSWVRQAPGKGLEWVGFIRSKAYGGTTEYAASVKGRFTISRDDSKSIAYLQMNNLKTEDTAVYYCARDGLYSSSWYDSDYWGQGTLVTVSSTRGMRTEDLPKAVVFLEPQWYRVLEKDSVTLKCQGAYSPEDNSTQWFHNESLISSQASSYFIDAATVDDSGEYRCQTNLSTLSDPVQLEVHIGWLLLQAPRWVFKEEDPIHLRCHSWKNTALHKVTYLQNGKGRKYFHHNSDFYIPKATLKDSGSYFCRGLVGSKNVSSETVNITITQGLAVPTISSFFPPGYQVSFCLVMVLLFAVDTGLYFSVK

SEQ ID NO: 9581 - protein, 491 aa, synthetic construct
MALPVTALLLPLALLLHAARPQSVLTQPPSVSGAPGQRVTISCTGSSSNIGAGYDVHWYQQLPGTAPKLLIFGNSNRPSGVPDRFSGFKSGTSASLAITGLQAEDEADYFCQSYDSSLSGSGVFGTGTKVTVLGGGGGSGGGGSGGGGSQMQLVQSGGGLVQPGRSLRLSCAASGFTFDDYAMHWVRQAPGKGLEWVSGISWNSGSIGYADSVKGRFTISRDNAKNSLYLQMNSLRAEDTALYYCAKDIHSGSYYGLLYYAMDVWGQGTTVTVSSTRGMRTEDLPKAVVFLEPQWYRVLEKDSVTLKCQGAYSPEDNSTQWFHNESLISSQASSYFIDAATVDDSGEYRCQTNLSTLSDPVQLEVHIGWLLLQAPRWVFKEEDPIHLRCHSWKNTALHKVTYLQNGKGRKYFHHNSDFYIPKATLKDSGSYFCRGLVGSKNVSSETVNITITQGLAVPTISSFFPPGYQVSFCLVMVLLFAVDTGLYFSVK

SEQ ID NO: 9582 - protein, 491 aa, synthetic construct
MALPVTALLLPLALLLHAARPLPVLTQPPSASGTPGQRVTISCSGRSSNIGSNSVNWYRQLPGAAPKLLIYSNNQRPPGVPVRFSGSKSGTSASLAISGLQSEDEATYYCATWDDNLNVHYVFGTGTKVTVLGSRGGGGSGGGGSGGGGSLEMAQVQLVQSGAEVKKPGSSVKVSCKASGGTFSSYAISWVRQAPGQGLEWMGRIIPILGIANYAQKFQGRVTITADKSTSTAYMELSSLRSEDTAVYYCARGGYYSHDMWSEDWGQGTLVTVSSTRGMRTEDLPKAVVFLEPQWYRVLEKDSVTLKCQGAYSPEDNSTQWFHNESLISSQASSYFIDAATVDDSGEYRCQTNLSTLSDPVQLEVHIGWLLLQAPRWVFKEEDPIHLRCHSWKNTALHKVTYLQNGKGRKYFHHNSDFYIPKATLKDSGSYFCRGLVGSKNVSSETVNITITQGLAVPTISSFFPPGYQVSFCLVMVLLFAVDTGLYFSVK

SEQ ID NO: 9583 - protein, 480 aa, synthetic construct
MALPVTALLLPLALLLHAARPDIVLTQSPASLAVSLGERATINCRASESVSVIGAHLIHWYQQKPGQPPKLLIYLASNLETGVPARFSGSGSGTDFTLTISSLQAEDAAIYYCLQSRIFPRTFGQGTKLEIKGGGGSGGGGSGGGGSQVQLVQSGSELKKPGESVKISCKASGYTFTDYSINWVKQAPGQGLKWMGWINTETREPAYAYDFRGRFVFSLDTSASTAYLQISSLKAEDTAVYFCALDYSYAMDYWGQGTLVTVSSTRGMRTEDLPKAVVFLEPQWYRVLEKDSVTLKCQGAYSPEDNSTQWFHNESLISSQASSYFIDAATVDDSGEYRCQTNLSTLSDPVQLEVHIGWLLLQAPRWVFKEEDPIHLRCHSWKNTALHKVTYLQNGKGRKYFHHNSDFYIPKATLKDSGSYFCRGLVGSKNVSSETVNITITQGLAVPTISSFFPPGYQVSFCLVMVLLFAVDTGLYFSVK

SEQ ID NO: 9584 - protein, 481 aa, synthetic construct
MALPVTALLLPLALLLHAARPDIVLTQSPATLSLSPGDRATLSCRASESVTILGSHLIYWYQQKPGQAPRLLIQLASNVQTGIPARFSGSGSRTDFTLTISSLEPEDFAVYYCLQSRTIPRTFGQGTKLEIKRGGGGSGGGGSGGGGSQVQLVQSGSELKKPGESVKISCKASGYTFTHYSMNWVRQAPGQGLEWMGRINTETGEPLYADDFKGRFVFSLDTSASTAYLQISSLKAEDTAVYYCSNDYLYSLDYWGQGTLVTVSSTRGMRTEDLPKAVVFLEPQWYRVLEKDSVTLKCQGAYSPEDNSTQWFHNESLISSQASSYFIDAATVDDSGEYRCQTNLSTLSDPVQLEVHIGWLLLQAPRWVFKEEDPIHLRCHSWKNTALHKVTYLQNGKGRKYFHHNSDFYIPKATLKDSGSYFCRGLVGSKNVSSETVNITITQGLAVPTISSFFPPGYQVSFCLVMVLLFAVDTGLYFSVK

SEQ ID NO: 9585 - protein, 485 aa, synthetic construct
MALPVTALLLPLALLLHAARPDFVMTQSPDSLAVSLGERVTMSCKSSQSLLNSGNQKNYLTWYQQKPGQPPKLLIYWASTRESGVPDRFSGSGSGTDFTLTISSLQAEDVAVYYCQNDYSYPYTFGQGTKLEIKGGGGSGGGGSGGGGSEVQLVQSGAELKKPGASVKVSCKASGYTFTDYYMKWVRQAPGQGLEWIGDIIPSNGATFYNQKFKGRVTITVDKSTSTAYMELSSLRSEDTAVYYCARSHLLRASWFAYWGQGTLVTVSSTRGMRTEDLPKAVVFLEPQWYRVLEKDSVTLKCQGAYSPEDNSTQWFHNESLISSQASSYFIDAATVDDSGEYRCQTNLSTLSDPVQLEVHIGWLLLQAPRWVFKEEDPIHLRCHSWKNTALHKVTYLQNGKGRKYFHHNSDFYIPKATLKDSGSYFCRGLVGSKNVSSETVNITITQGLAVPTISSFFPPGYQVSFCLVMVLLFAVDTGLYFSVK

SEQ ID NO: 9586 - protein, 485 aa, synthetic construct
MALPVTALLLPLALLLHAARPDFVMTQSPDSLAVSLGERVTMSCKSSQSLLNSGNQKNYLTWYQQKPGQPPKLLIYWASTRESGVPDRFSGSGSGTDFTLTISSLQAEDVAVYYCQNDYSYPYTFGQGTKLEIKGGGGSGGGGSGGGGSQVQLVQSGAELKKPGASVKVSCKASGYTFTDYYMKWVRQAPGQGLEWIGDIIPSNGATFYNQKFKGRVTITVDKSTSTAYMELSSLRSEDTAVYYCARSHLLRASWFAYWGQGTLVTVSSTRGMRTEDLPKAVVFLEPQWYRVLEKDSVTLKCQGAYSPEDNSTQWFHNESLISSQASSYFIDAATVDDSGEYRCQTNLSTLSDPVQLEVHIGWLLLQAPRWVFKEEDPIHLRCHSWKNTALHKVTYLQNGKGRKYFHHNSDFYIPKATLKDSGSYFCRGLVGSKNVSSETVNITITQGLAVPTISSFFPPGYQVSFCLVMVLLFAVDTGLYFSVK

SEQ ID NO: 9587 - protein, 475 aa, synthetic construct
MALPVTALLLPLALLLHAARPDVQITQSPSYLAASPGETITINCRASKSISKDLAWYQEKPGKTNKLLIYSGSTLQSGIPSRFSGSGSGTDFTLTISSLEPEDFAMYYCQQHNKYPYTFGGGTKLEIKRGGGGSGGGGSGGGGSQVQLQQPGAELVRPGASVKLSCKASGYTFTSYWMNWVKQRPDQGLEWIGRIDPYDSETHYNQKFKDKAILTVDKSSSTAYMQLSSLTSEDSAVYYCARGNWDDYWGQGTTLTVSSTRGMRTEDLPKAVVFLEPQWYRVLEKDSVTLKCQGAYSPEDNSTQWFHNESLISSQASSYFIDAATVDDSGEYRCQTNLSTLSDPVQLEVHIGWLLLQAPRWVFKEEDPIHLRCHSWKNTALHKVTYLQNGKGRKYFHHNSDFYIPKATLKDSGSYFCRGLVGSKNVSSETVNITITQGLAVPTISSFFPPGYQVSFCLVMVLLFAVDTGLYFSVK

SEQ ID NO: 9588 - protein, 477 aa, synthetic construct
MALPVTALLLPLALLLHAARPEIVLTQSPTSMTASPGEQVTITCRASSSINYMHWYQQKPGASPRPWIYETSKLASGVPDRFSGSASGTSYSLTINNMEAEDAATYYCQQWNYPSWTFGGGTKLELKGGGGSGGGGSGGGGSEVQLVESGGGLVQPGRSLKLSCAASGFTFSDYNMAWVRQAPKKGLEWVATILYDGGRTYYRGSVKGRFTISRDNAKSTLYLRMDSLRSEDTATYYCATHSRGTDYFDYWGQGVMVTVSSTRGMRTEDLPKAVVFLEPQWYRVLEKDSVTLKCQGAYSPEDNSTQWFHNESLISSQASSYFIDAATVDDSGEYRCQTNLSTLSDPVQLEVHIGWLLLQAPRWVFKEEDPIHLRCHSWKNTALHKVTYLQNGKGRKYFHHNSDFYIPKATLKDSGSYFCRGLVGSKNVSSETVNITITQGLAVPTISSFFPPGYQVSFCLVMVLLFAVDTGLYFSVK

SEQ ID NO: 9589 - protein, 486 aa, synthetic construct
MALPVTALLLPLALLLHAARPDIVMTQSPSSLAVSEGETVTINCKSSQSFLSSGDGKNYVAWYQYKPGQSPKLLIYWASTRQSGVPDRFIGSGSGTDFTLTISTVQAEDLAIYYCQQYYDTPLTFGSGTKLEIKGGGGSGGGGSGGGGSEVKLQESGPSLVQSSQTLSLTCTVSGFSLTSYHIHWVRQTPGKGLEWMGVMWSDGDTSYNSALKSRLSISRDTSQSQVFLKMNSLQTEDTATYYCARGYYSSYLYLWFAYWGQGTLVTVSSTRGMRTEDLPKAVVFLEPQWYRVLEKDSVTLKCQGAYSPEDNSTQWFHNESLISSQASSYFIDAATVDDSGEYRCQTNLSTLSDPVQLEVHIGWLLLQAPRWVFKEEDPIHLRCHSWKNTALHKVTYLQNGKGRKYFHHNSDFYIPKATLKDSGSYFCRGLVGSKNVSSETVNITITQGLAVPTISSFFPPGYQVSFCLVMVLLFAVDTGLYFSVK

SEQ ID NO: 9590 - protein, 490 aa, synthetic construct
MALPVTALLLPLALLLHAARPDVLMTQTPVSLPVSLGGQVSISCRSSQSLVHSDGDTYLHWYLQKPGQSPQLLIYRVSNRFSGVPDRFSGSGSGTDFTLKISRVEPEDLGLYYCLQTTHFPPWTFGGGTKLEMKGGGGSGGGGSGGGGSQVQLQQSGPELRRPGSSVRLSCKASGYRIKDFLIHWIKNRPEHGLEWIGWIDPEDGETKYAQKFQTKATLTADTSSNTAYMQLSSLTSEDTATYFCARWGDVYYGLMRGHVMDAWGQGTSVTVSSTRGMRTEDLPKAVVFLEPQWYRVLEKDSVTLKCQGAYSPEDNSTQWFHNESLISSQASSYFIDAATVDDSGEYRCQTNLSTLSDPVQLEVHIGWLLLQAPRWVFKEEDPIHLRCHSWKNTALHKVTYLQNGKGRKYFHHNSDFYIPKATLKDSGSYFCRGLVGSKNVSSETVNITITQGLAVPTISSFFPPGYQVSFCLVMVLLFAVDTGLYFSVK

SEQ ID NO: 9591 - protein, 486 aa, synthetic construct
MALPVTALLLPLALLLHAARPDIVMTQAAPSIPVTPGESVSISCRSSKSLLNSNGNTYLYWFLQRPGQSPQLLIYRMSNLASGVPDRFSGSGSGTAFTLRISRVEAEDVGVYYCMQHLEYPFTFGAGTKLELKRGGGGSGGGGSGGGGSEVQLQQSGPELIKPGASVKMSCKASGYTFTSYVMHWVKQKPGQGLEWIGYINPYNDGTKYNEKFKGKATLTSDKSSSTAYMELSSLTSEDSAVYYCARGTYYYGSRVFDYWGQGTTLTVSSTRGMRTEDLPKAVVFLEPQWYRVLEKDSVTLKCQGAYSPEDNSTQWFHNESLISSQASSYFIDAATVDDSGEYRCQTNLSTLSDPVQLEVHIGWLLLQAPRWVFKEEDPIHLRCHSWKNTALHKVTYLQNGKGRKYFHHNSDFYIPKATLKDSGSYFCRGLVGSKNVSSETVNITITQGLAVPTISSFFPPGYQVSFCLVMVLLFAVDTGLYFSVK

SEQ ID NO: 9592 - protein, 486 aa, synthetic construct; identical to SEQ ID NO: 9591

SEQ ID NO: 9593 - protein, 504 aa, synthetic construct
MALPVTALLLPLALLLHAARPINIYNAEPANPSEKNSPEFDIVMTQSPATLSLSPGERATLSCRSSKSLQNVNGNTYLYWFQQKPGQSPQLLIYRMSNLNSGVPDRFSGSGSGTEFTLTISSLEPEDFAVYYCMQHLEYPITFGAGTKLEIKGGGGSGGGGSGGGGSEVQLVESGGGLVKPGGSLKLSCAASGYTFTSYVMHWVRQAPGKGLEWIGYINPYNDGTKYNEKFQGRVTISSDKSISTAYMELSSLRSEDTAMYYCARGTYYYGTRVFDYWGQGTLVTVSSTRGMRTEDLPKAVVFLEPQWYRVLEKDSVTLKCQGAYSPEDNSTQWFHNESLISSQASSYFIDAATVDDSGEYRCQTNLSTLSDPVQLEVHIGWLLLQAPRWVFKEEDPIHLRCHSWKNTALHKVTYLQNGKGRKYFHHNSDFYIPKATLKDSGSYFCRGLVGSKNVSSETVNITITQGLAVPTISSFFPPGYQVSFCLVMVLLFAVDTGLYFSVK

SEQ ID NO: 9594 - protein, 481 aa, synthetic construct
MALPVTALLLPLALLLHAARPDIQMTQSPSSLSASVGDRVTITCKASDHINNWLAWYQQKPGQAPKLLIYGATTLETGVPSRFSGSGSGTDYTLTISSLQPEDFATYYCQQSWNTPWTFGQGTKLEIKRGGGGSGGGGSGGGGSQVQLQQPGAELVKPGASVKMSCKASGYAFSSYWINWMKQKPGQGLEWIGQIYPGDGDTNYNGKFKGRATLTADTSSSTAYMQLSSLTSEDSAVYFCARSITTVVGCAMDYWGQGTSVTVSSTRGMRTEDLPKAVVFLEPQWYRVLEKDSVTLKCQGAYSPEDNSTQWFHNESLISSQASSYFIDAATVDDSGEYRCQTNLSTLSDPVQLEVHIGWLLLQAPRWVFKEEDPIHLRCHSWKNTALHKVTYLQNGKGRKYFHHNSDFYIPKATLKDSGSYFCRGLVGSKNVSSETVNITITQGLAVPTISSFFPPGYQVSFCLVMVLLFAVDTGLYFSVK

SEQ ID NO: 9595 - protein, 483 aa, synthetic construct
MALPVTALLLPLALLLHAARPQIVLSQSPAILSASPGEKVTMTCRASSSVSYMHWYQQKPGSSPKPWIYATSNLASGVPARFSGSGSGTSYSFTISRVEAEDAATYYCQQWTFNPPTFGGGTRLEIKRTVAAGGGGSGGGGSGGGGSQAYLQQSGAELVRPGASVKMSCKASGYTFTSYNMHWVKQTPRQGLEWIGGIYPGNGDTSYNQKFKGKATLTVGKSSSTAYMQLSSLTSEDSAVYFCARYDYNYAMDYWGQGTSVTVSSASTRGMRTEDLPKAVVFLEPQWYRVLEKDSVTLKCQGAYSPEDNSTQWFHNESLISSQASSYFIDAATVDDSGEYRCQTNLSTLSDPVQLEVHIGWLLLQAPRWVFKEEDPIHLRCHSWKNTALHKVTYLQNGKGRKYFHHNSDFYIPKATLKDSGSYFCRGLVGSKNVSSETVNITITQGLAVPTISSFFPPGYQVSFCLVMVLLFAVDTGLYFSVK

SEQ ID NO: 9596 - protein, 482 aa, synthetic construct
MALPVTALLLPLALLLHAARPDEIVLTQSPATLSLSPGERATLSCRASQSVSSYLAWYQQKPGQAPRLLIYDASNRATGIPARFSGSGSGTDFTLTISSLEPEDFAVYYCQQRSNWPITFGQGTRLEIKGGGGSGGGGSGGGGSEVQLVESGGGLVQPDRSLRLSCAASGFTFHDYAMHWVRQAPGKGLEWVSTISWNSGTIGYADSVKGRFTISRDNAKNSLYLQMNSLRAEDTALYYCAKDIQYGNYYYGMDVWGQGTTVTVSSTRGMRTEDLPKAVVFLEPQWYRVLEKDSVTLKCQGAYSPEDNSTQWFHNESLISSQASSYFIDAATVDDSGEYRCQTNLSTLSDPVQLEVHIGWLLLQAPRWVFKEEDPIHLRCHSWKNTALHKVTYLQNGKGRKYFHHNSDFYIPKATLKDSGSYFCRGLVGSKNVSSETVNITITQGLAVPTISSFFPPGYQVSFCLVMVLLFAVDTGLYFSVK

SEQ ID NO: 9597 - protein, 476 aa, synthetic construct
MALPVTALLLPLALLLHAARPDIQMTQSPSSLSASVGDRVTINCKASQDINSYLSWFQQKPGKAPKTLIYRANRLVDGVPSRFSGSGSGQDYTLTISSLQPEDFATYYCLQYDEFPLTFGGGTKVEIKGGGGSGGGGSGGGGSQVQLVQSGAEVKKPGASVKVSCKASGYTFTNYDINWVRQAPGQGLEWIGWIYPGDGSTKYNEKFKAKATLTADTSTSTAYMELRSLRSDDTAVYYCASGYEDAMDYWGQGTTVTVSSTRGMRTEDLPKAVVFLEPQWYRVLEKDSVTLKCQGAYSPEDNSTQWFHNESLISSQASSYFIDAATVDDSGEYRCQTNLSTLSDPVQLEVHIGWLLLQAPRWVFKEEDPIHLRCHSWKNTALHKVTYLQNGKGRKYFHHNSDFYIPKATLKDSGSYFCRGLVGSKNVSSETVNITITQGLAVPTISSFFPPGYQVSFCLVMVLLFAVDTGLYFSVK

SEQ ID NO: 9598 - protein, 478 aa, synthetic construct
MALPVTALLLPLALLLHAARPDIVMTQTPLSLSVTPGQPASISCKSSQSLLDGDGKTYLNWLLQKPGQSPQRLIYLVSKLDSGVPDRFSGSGSGTDFTLKISRVEAEDVGVYYCWQGTHFPRTFGQGTKLEIKGGGGSGGGGSGGGGSQVQLVQSGAEVKKPGASVKVSCKASGYTFKDTYIHWVRQAPGQGLEWMGRIDPANGNTKYDPKFQGRVTMTRDTSISTAYMELSRLRSDDTAVYYCARRGGVDWGQGTLVTVSSTRGMRTEDLPKAVVFLEPQWYRVLEKDSVTLKCQGAYSPEDNSTQWFHNESLISSQASSYFIDAATVDDSGEYRCQTNLSTLSDPVQLEVHIGWLLLQAPRWVFKEEDPIHLRCHSWKNTALHKVTYLQNGKGRKYFHHNSDFYIPKATLKDSGSYFCRGLVGSKNVSSETVNITITQGLAVPTISSFFPPGYQVSFCLVMVLLFAVDTGLYFSVK

SEQ ID NO: 9599 - protein, 479 aa, synthetic construct
MALPVTALLLPLALLLHAARPDIQMTQSPSSLSASVGDRVTITCKASQDVSTAVAWFQQKPGKAPKLLIYSPSYRYTGVPSRFSGSGSGTDFTLTISSLQPEDFTYYCQQLYSTPYTFGQGTKVEIKGGGGSGGGGSGGGGSEVQLVQSGAEVKKPGASVKVSCKASGYTFTDYYLDVVVRQAPGQGLEWIGRVNPYNGGTIYNQKFKGRVTLTRDTSTSTAYLELSSLRSEDTAVYYCARDHYRYDPLLDYWGQGTLVTVSSTRGMRTEDLPKAVVFLEPQWYRVLEKDSVTLKCQGAYSPEDNSTQWFHNESLISSQASSYFIDAATVDDSGEYRCQTNLSTLSDPVQLEVHIGWLLLQAPRWVFKEEDPIHLRCHSWKNTALHKVTYLQNGKGRKYFHHNSDFYIPKATLKDSGSYFCRGLVGSKNVSSETVNITITQGLAVPTISSFFPPGYQVSFCLVMVLLFAVDTGLYFSVK

SEQ ID NO: 9600 - protein, 485 aa, synthetic construct
MALPVTALLLPLALLLHAARPDIQMTQSPSSLSASVGDRVTITCRASQSVSTSSYNYMHWYQQKPGKPPKLLIKYASNLESGVPSRFSGSGSGTDFTLTISSLQPEDFATYYCQHSWEIPLTFGQGTKVEIKGGGGSGGGGSGGGGSEVQLVQSGAEVKKPGASVKVSCKASGYSFTDYYMHWVRQAPGQGLEWIGRINPYNGAAFYSQNFKDRVTLTVDTSTSTAYLELSSLRSEDTAVYYCAIERGADLEGYAMDYWGQGTLVTVSSTRGMRTEDLPKAVVFLEPQWYRVLEKDSVTLKCQGAYSPEDNSTQWFHNESLISSQASSYFIDAATVDDSGEYRCQTNLSTLSDPVQLEVHIGWLLLQAPRWVFKEEDPIHLRCHSWKNTALHKVTYLQNGKGRKYFHHNSDFYIPKATLKDSGSYFCRGLVGSKNVSSETVNITITQGLAVPTISSFFPPGYQVSFCLVMVLLFAVDTGLYFSVK

SEQ ID NO: 9601 - protein, 483 aa, synthetic construct
MALPVTALLLPLALLLHAARPEIVLTQSPATLSASPGERVTLTCRASSNVISSYVHWYQQKPGSSPRLFLYSTSNLASGVPSRFSGSGSGTDFTFTISSLEAEDAATYYCQQYSGYPLTFGQGTRLEIKGGGGSGGGGSGGGGSQVQLQESGPGLVKPSETLSLTCAVSGYSITSAYYWNWIRQPPGKGLEWIGYISYDGRNNYNPSLKNRITINPDTSKNQFSLQLNSVTPEDTAVYYCAREGDYDVGNYYAMDYWGQGTLVTVSSTRGMRTEDLPKAVVFLEPQWYRVLEKDSVTLKCQGAYSPEDNSTQWFHNESLISSQASSYFIDAATVDDSGEYRCQTNLSTLSDPVQLEVHIGWLLLQAPRWVFKEEDPIHLRCHSWKNTALHKVTYLQNGKGRKYFHHNSDFYIPKATLKDSGSYFCRGLVGSKNVSSETVNITITQGLAVPTISSFFPPGYQVSFCLVMVLLFAVDTGLYFSVK

SEQ ID NO: 9602 - protein, 483 aa, synthetic construct
MALPVTALLLPLALLLHAARPEIVLTQSPATLSLSPGERATLSCRASSNVISSYVHWYQQKPGQAPRLLIYSTSNLASGIPARFSGSGSGTDFTLTISSLEPEDFAVYYCQQYSGYPLTFGQGTRLEIKGGGGSGGGGSGGGGSEVQLVESGGGLVQPGRSLRLSCAASGYSITSAYYWNWVRQAPGKGLEWVSYISYDGRNNYNPSLKNRFTISRDNAKKSLYLQMNSLRAEDTALYYCAKEGDYDVGNYYAMDYWGQGTTVTVSSTRGMRTEDLPKAVVFLEPQWYRVLEKDSVTLKCQGAYSPEDNSTQWFHNESLISSQASSYFIDAATVDDSGEYRCQTNLSTLSDPVQLEVHIGWLLLQAPRWVFKEEDPIHLRCHSWKNTALHKVTYLQNGKGRKYFHHNSDFYIPKATLKDSGSYFCRGLVGSKNVSSETVNITITQGLAVPTISSFFPPGYQVSFCLVMVLLFAVDTGLYFSVK

SEQ ID NO: 9603 - protein, 492 aa, synthetic construct
MALPVTALLLPLALLLHAARPDVVMTQTPLSLPVSLGDQASISCRSSQSLVHSNGNTYLRWYLQKPGQSPKVLIYKVSNRVSGVPDRFSGSGSGTDFTLKINRVEAEDLGVYFCSQSTHVPWTFGGGTKLEIKSSADDAKKDAAKKDDAKKDDAKKDGGVKLDETGGGLVQPGGAMKLSCVTSGFTFGHYWMNWVRQSPEKGLEWVAQFRNKPYNYETYYSDSVKGRFTISRDDSKSSVYLQMNNLRVEDTGIYYCTGASYGMEYLGQGTSVTVSTTRGMRTEDLPKAVVFLEPQWYRVLEKDSVTLKCQGAYSPEDNSTQWFHNESLISSQASSYFIDAATVDDSGEYRCQTNLSTLSDPVQLEVHIGWLLLQAPRWVFKEEDPIHLRCHSWKNTALHKVTYLQNGKGRKYFHHNSDFYIPKATLKDSGSYFCRGLVGSKNVSSETVNITITQGLAVPTISSFFPPGYQVSFCLVMVLLFAVDTGLYFSVK

SEQ ID NO: 9604 - protein, 488 aa, synthetic construct
MALPVTALLLPLALLLHAARPQVQLVESGGNLVQPGGSLRLSCAASGFTFGSFSMSWVRQAPGGGLEWVAGLSARSSLTHYADSVKGRFTISRDNAKNSVYLQMNSLRVEDTAVYYCARRSYDSSGYWGHFYSYMDVWGQGTLVTVSGGGGSGGGGSGGGGSSVLTQPSSVSAAPGQKVTISCSGSTSNIGNNYVSWYQQHPGKAPKLMIYDVSKRPSGVPDRFSGSKSGNSASLDISGLQSEDEADYYCAAWDDSLSEFLFGTGTKLTVLGTRGMRTEDLPKAVVFLEPQWYRVLEKDSVTLKCQGAYSPEDNSTQWFHNESLISSQASSYFIDAATVDDSGEYRCQTNLSTLSDPVQLEVHIGWLLLQAPRWVFKEEDPIHLRCHSWKNTALHKVTYLQNGKGRKYFHHNSDFYIPKATLKDSGSYFCRGLVGSKNVSSETVNITITQGLAVPTISSFFPPGYQVSFCLVMVLLFAVDTGLYFSVK

SEQ ID NO: 9605 - protein, 479 aa, synthetic construct
MALPVTALLLPLALLLHAARPQSVVTQPPSVSGAPGQRVTISCTGSSSNIGAGYDVHWYQQLPGTAPKLLIYGNSNRPSGVPDRFSGSKSGTSASLAITGLQAEDEADYYCQSYDSSLSGSYVFGTGTKLTVLGGGGGSGGGGSGGGGSEVQLVETGGNLVQPGASLRLSCAASGFSFSGTAMHWVRQAPGKGLEWVSTISSTGRSTYYRDSVKGRFTISRDNSKNTLYLQMNSLRGEDTAVYYCARVSFDYWGQGTLVTVSSTRGMRTEDLPKAVVFLEPQWYRVLEKDSVTLKCQGAYSPEDNSTQWFHNESLISSQASSYFIDAATVDDSGEYRCQTNLSTLSDPVQLEVHIGWLLLQAPRWVFKEEDPIHLRCHSWKNTALHKVTYLQNGKGRKYFHHNSDFYIPKATLKDSGSYFCRGLVGSKNVSSETVNITITQGLAVPTISSFFPPGYQVSFCLVMVLLFAVDTGLYFSVK

SEQ ID NO: 9606 - protein, 481 aa, synthetic construct
MALPVTALLLPLALLLHAARPQSVVTQPASVSGSPGQSITISCTGTSSDVGGYNYVSWYQQHPGKAPKLMIYDVSKRPSGVSNRFSGSKSGNTASLTISGLQAEDEADYYCSSYTSSSTLVFGGGTKLTVLGGGGGSGGGGSGGGGSEVQLVESGGAFVQPGGSLRLSCAASGFTFSSYAMTWVRQAPGKGLEWVSTISGRGRSTFYADSVKGRFTISRDNSKNTLYLQMNSLRAEDTAVYYCARYYHAGAFDLWGQGTLVTVSSTRGMRTEDLPKAVVFLEPQWYRVLEKDSVTLKCQGAYSPEDNSTQWFHNESLISSQASSYFIDAATVDDSGEYRCQTNLSTLSDPVQLEVHIGWLLLQAPRWVFKEEDPIHLRCHSWKNTALHKVTYLQNGKGRKYFHHNSDFYIPKATLKDSGSYFCRGLVGSKNVSSETVNITITQGLAVPTISSFFPPGYQVSFCLVMVLLFAVDTGLYFSVK

SEQ ID NO: 9607 - protein, 483 aa, synthetic construct
MALPVTALLLPLALLLHAARPDVVMTQSPSSLSASVGDRVTITCQSSLDISHYLNWYQQKPGKAPKLLIYDASNLETGVPSRFSGSGSGTHFTFTISSLQPEDFATYYCQQYDNLPLTFGGGTKLEIKRGGGGSGGGGSGGGGSQVQLVQSGGGVVQPGGSLRVSCAASGVTLSDYGMHWVRQAPGKGLEWVAFIRNDGSDKYYADSVKGRFTISRDNSEKTVSLQMSSLRAEDTAVYYCAKNGESGPLDYWYLDLWGRGTLVTVSSTRGMRTEDLPKAVVFLEPQWYRVLEKDSVTLKCQGAYSPEDNSTQWFHNESLISSQASSYFIDAATVDDSGEYRCQTNLSTLSDPVQLEVHIGWLLLQAPRWVFKEEDPIHLRCHSWKNTALHKVTYLQNGKGRKYFHHNSDFYIPKATLKDSGSYFCRGLVGSKNVSSETVNITITQGLAVPTISSFFPPGYQVSFCLVMVLLFAVDTGLYFSVK

SEQ ID NO: 9608 - protein, 490 aa, synthetic construct
MALPVTALLLPLALLLHAARPDVMLTQTPLSLPVSLGDQASISCRSSQSILHSTGDTYLEWYLQKPGQSPKLLINKVSNRLSGVPDRFSGSGSGTDFTLKISRVEAEDLGVYYCFQGSHVPWTFGGGTKLEIKRADAAPTVSIFPGGGGSGGGGSGGGGSQVKLQQSGPSLVKPGASVKMSCKASGYTFTDFYMKWVKQSHGKSLEWIGDINPNIGDTFYNQKFKGKATLTVDKSSSTAYMQLNSLTSEDSAVYFCSVGYFDVWGAGTTVTVSSTRGMRTEDLPKAVVFLEPQWYRVLEKDSVTLKCQGAYSPEDNSTQWFHNESLISSQASSYFIDAATVDDSGEYRCQTNLSTLSDPVQLEVHIGWLLLQAPRWVFKEEDPIHLRCHSWKNTALHKVTYLQNGKGRKYFHHNSDFYIPKATLKDSGSYFCRGLVGSKNVSSETVNITITQGLAVPTISSFFPPGYQVSFCLVMVLLFAVDTGLYFSVK

SEQ ID NO: 9609 - protein, 490 aa, synthetic construct
MALPVTALLLPLALLLHAARPLPVLTQPPSVSVAPGKTARITCGGNNIGSKSVHWYQQKPGQAPVLVVYDDSDRPSGIPERFSGSNSGNTATLTISRVEAGDEADYYCQVWDSSSDYVVFGGGTKLTVLGGGGSGGGGSGGGGSEVQLVQSGAEVKKPGESLKISCKGSGYSFTSYWIGWVRQMPGKGLEWMGIIYPGDSDTRYSPSFQGQVTISADKSISTAYLQWSSLKASDTAMYYCARQVWGWQGGMYPRSNWWYNLDSWGQGTLVTVSSTRGMRTEDLPKAVVFLEPQWYRVLEKDSVTLKCQGAYSPEDNSTQWFHNESLISSQASSYFIDAATVDDSGEYRCQTNLSTLSDPVQLEVHIGWLLLQAPRWVFKEEDPIHLRCHSWKNTALHKVTYLQNGKGRKYFHHNSDFYIPKATLKDSGSYFCRGLVGSKNVSSETVNITITQGLAVPTISSFFPPGYQVSFCLVMVLLFAVDTGLYFSVK

SEQ ID NO: 9610 - protein, 483 aa, synthetic construct
MALPVTALLLPLALLLHAARPELVMTQSPASLAVSLGQRATISCRASESVDSYGKSFMHWYQLKPGQPPKLLIYRASNLESGVPARFSGSGSRTDFTLTIDPVEADDAATYYCQQNNEDPWTFGGGTKLEIKGGGGSGGGGSGGGGSEVQLEQSGPELVKPGASVKMSCKASGYTFTNYYMKWVKQSHGKSLEWIGDLNPNNGDTFYNQKFKGKATLTVDKSSNTAYMQLNSLTSEDSAVYYCARTGRYEENAMDYWGQGTSVTVSSTRGMRTEDLPKAVVFLEPQWYRVLEKDSVTLKCQGAYSPEDNSTQWFHNESLISSQASSYFIDAATVDDSGEYRCQTNLSTLSDPVQLEVHIGWLLLQAPRWVFKEEDPIHLRCHSWKNTALHKVTYLQNGKGRKYFHHNSDFYIPKATLKDSGSYFCRGLVGSKNVSSETVNITITQGLAVPTISSFFPPGYQVSFCLVMVLLFAVDTGLYFSVK

SEQ ID NO: 9611 - protein, 481 aa, synthetic construct; identical to SEQ ID NO: 9584

SEQ ID NO: 9612 - protein, 481 aa, synthetic construct; identical to SEQ ID NO: 9493

SEQ ID NO: 9613 - protein, 477 aa, synthetic construct
MALPVTALLLPLALLLHAARPDVVMTQSPSSLSASVGDRVTITCMASEDIYIRLAWYQQKPGNAPKLLIYAATSLETGVPSRFSGSGSGTDFTLTISSLQPEDFATYYCQQYWSSPWTFGGGTKVEIKGGGGSGGGGSGGGGSQVQLQESGPGLVKPSQTLSLTCTVSGYSITSDYTWNWIRQPPGNGLEWIGYITYSGSTSYNPSLKSRVLISVDTSKNQVSLKLSSVTAADTAVYYCARLGRRYTMDYWGQGTTVTVSSTRGMRTEDLPKAVVFLEPQWYRVLEKDSVTLKCQGAYSPEDNSTQWFHNESLISSQASSYFIDAATVDDSGEYRCQTNLSTLSDPVQLEVHIGWLLLQAPRWVFKEEDPIHLRCHSWKNTALHKVTYLQNGKGRKYFHHNSDFYIPKATLKDSGSYFCRGLVGSKNVSSETVNITITQGLAVPTISSFFPPGYQVSFCLVMVLLFAVDTGLYFSVK

SEQ ID NO: 9614 - protein, 482 aa, synthetic construct
MALPVTALLLPLALLLHAARPEVQLVESGGGLVQPGRSLRLSCAASGFTFDDYAMHWVRQAPGKGLEWVSGISWNSGSIGYADSVKGRFTISRDNAKNSLYLQMNSLRAEDTALYYCAKDKGGGYYDFWSGSDYWGQGTLVTVSSGGGGSGGGGSGGGGSSSELTQDPAVSVALGQTVRITCQGDSLRSYYASWYQQKPGQAPVLVIYGKNNRPSGIPDRFSGSSSGNTASLTITGAQAEDEADYYCNSRDSSGWVFGGGTKLTVLTRGMRTEDLPKAVVFLEPQWYRVLEKDSVTLKCQGAYSPEDNSTQWFHNESLISSQASSYFIDAATVDDSGEYRCQTNLSTLSDPVQLEVHIGWLLLQAPRWVFKEEDPIHLRCHSWKNTALHKVTYLQNGKGRKYFHHNSDFYIPKATLKDSGSYFCRGLVGSKNVSSETVNITITQGLAVPTISSFFPPGYQVSFCLVMVLLFAVDTGLYFSVK

SEQ ID NO: 9615 - protein, 491 aa, synthetic construct
MALPVTALLLPLALLLHAARPEVQLQQSGPGLVKPSQTLSLTCAISGDSVLSNSDTWNWIRQSPSRGLEWLGRTYHRSTWYDDYASSVRGRVSINVDTSKNQYSLQLNAVTPEDTGVYYCARDRLQDGNSWSDAFDVWGQGTMVTVSSGGGGSGGGGSGGGGSQSALTQPASVSGSPGQSITISCTGTSSDVGGYNYVSWYQQHPGKAPKLMIYDVSNRPSGVSNRFSGSKSGNTASLTISGLQAEDEADYYCSSYTSSSTLVYVFGTGTKVTVLTRGMRTEDLPKAVVFLEPQWYRVLEKDSVTLKCQGAYSPEDNSTQWFHNESLISSQASSYFIDAATVDDSGEYRCQTNLSTLSDPVQLEVHIGWLLLQAPRWVFKEEDPIHLRCHSWKNTALHKVTYLQNGKGRKYFHHNSDFYIPKATLKDSGSYFCRGLVGSKNVSSETVNITITQGLAVPTISSFFPPGYQVSFCLVMVLLFAVDTGLYFSVK

SEQ ID NO: 9616 - protein, 489 aa, synthetic construct
MALPVTALLLPLALLLHAARPQVQLVQSGAEVKKPGASVKVSCKASGYTFTSYDINWVRQATGQGLEWMGWMNPNSGNTGYAQKFQGRVTMTRNTSISTAYMELSSLRSEDTAVYYCARGDSNYWSYYGMDVWGQGTLVTVSSGGGGSGGGGSGGGGSGGGGSQSVLTQPRSVSGSPGQSVTISCTGTSSDVGGYNYVSWYQQHPGEAPKLIIYDADKRPSGISNRFSSGKSGNTASLTISGLQVEDEADYYCCSYAGGSTWVFGGGTKVTVLTRGMRTEDLPKAVVFLEPQWYRVLEKDSVTLKCQGAYSPEDNSTQWFHNESLISSQASSYFIDAATVDDSGEYRCQTNLSTLSDPVQLEVHIGWLLLQAPRWVFKEEDPIHLRCHSWKNTALHKVTYLQNGKGRKYFHHNSDFYIPKATLKDSGSYFCRGLVGSKNVSSETVNITITQGLAVPTISSFFPPGYQVSFCLVMVLLFAVDTGLYFSVK

SEQ ID NO: 9617 - protein, 491 aa, synthetic construct
MALPVTALLLPLALLLHAARPEVQLQQSGPGLVKPSQTLSLTCAISGDSVSSNSAAWNWIRQSPSRGLEWLGRTYYRSKWYSDYAVSVKSRITINPDTSKNQFSLQLNSVTPEDTAVYYCARDPYDFWSGYPDAFDIWGQGTMVTVSSGGGGSGGGGSGGGGSQSALTQPASVSGSPGQSITISCTGTSSDVGGYNYVSWYQQHPGKAPKVIISEVNNRPSGVSHRFSGSKSGNTASLTISGLQAEDEADYFCSSYTSGRTLYVFGTGSKVTVLGTRGMRTEDLPKAVVFLEPQWYRVLEKDSVTLKCQGAYSPEDNSTQWFHNESLISSQASSYFIDAATVDDSGEYRCQTNLSTLSDPVQLEVHIGWLLLQAPRWVFKEEDPIHLRCHSWKNTALHKVTYLQNGKGRKYFHHNSDFYIPKATLKDSGSYFCRGLVGSKNVSSETVNITITQGLAVPTISSFFPPGYQVSFCLVMVLLFAVDTGLYFSVK

SEQ ID NO: 9618 - protein, 490 aa, synthetic construct
MALPVTALLLPLALLLHAARPEVQLQQSGPGLVKPSQTLSLTCAISGDSMLSNSDTWNWIRQSPSRGLEWLGRTYHRSTWYDDYASSVRGRVSINVDTSKNQYSLQLNAVTPEDTGVYYCARVRLQDGNSWSDAFDVWGQGTMVTVSSGGGGSGGGGSGGGGSQSALTQPASASGSPGQSVTISCTGTSSDVGGYNYVSWYQQHPGKAPKLMIYDVSNRPSGVSNRFSGSKSGNTASLTISGLQAEDEADYYCSSYTSSSTLYVFGTGTQLTVLTRGMRTEDLPKAVVFLEPQWYRVLEKDSVTLKCQGAYSPEDNSTQWFHNESLISSQASSYFIDAATVDDSGEYRCQTNLSTLSDPVQLEVHIGWLLLQAPRWVFKEEDPIHLRCHSWKNTALHKVTYLQNGKGRKYFHHNSDFYIPKATLKDSGSYFCRGLVGSKNVSSETVNITITQGLAVPTISSFFPPGYQVSFCLVMVLLFAVDTGLYFSVK

SEQ ID NO: 9619 - protein, 481 aa, synthetic construct
MALPVTALLLPLALLLHAARPEIVLTQSPATLSLSPGERATLSCSASSSVSYMYWYQQKPGQAPRLLIYRTSNLASGIPARFSGSGSGTDFTLTISSLEPEDFAVYYCQQYHSYPTTFGQGTKVEIKRTVGGGGSGGGGSGGGGSEVQLVESGGGLVQPGGSLRLSCAASGFSFNTYAMNWVRQAPGKGLEWVSHIRSKSNNFATYYADSVKDRFTISRDNAKNSLYLQMNSLRAEDTAVYYCARQGGDFPMDYWGQGTLVTVSSTRGMRTEDLPKAVVFLEPQWYRVLEKDSVTLKCQGAYSPEDNSTQWFHNESLISSQASSYFIDAATVDDSGEYRCQTNLSTLSDPVQLEVHIGWLLLQAPRWVFKEEDPIHLRCHSWKNTALHKVTYLQNGKGRKYFHHNSDFYIPKATLKDSGSYFCRGLVGSKNVSSETVNITITQGLAVPTISSFFPPGYQVSFCLVMVLLFAVDTGLYFSVK

SEQ ID NO: 9620 - protein, 477 aa, synthetic construct
MALPVTALLLPLALLLHAARPDVVMTQSPSSLSASVGDRVTITCKASEDIYIRLAWYQQKPGKAPKLLIYAATSLETGVPSRFSGSGSGTDFTLTISSLQPEDFATYYCQQYWTTPWTFGGGTKVEIKGGGGSGGGGSGGGGSQVQLQESGPGLVKPSQTLSLTCTVSGYSITIDYTWNWIRQPPGKGLEWIGYITYSGSTDYNPSLKSRVLISVDTSKNQVSLKLSSVTAADTAVYYCARLGRRYALDYWGQGTTVTVSSTRGMRTEDLPKAVVFLEPQWYRVLEKDSVTLKCQGAYSPEDNSTQWFHNESLISSQASSYFIDAATVDDSGEYRCQTNLSTLSDPVQLEVHIGWLLLQAPRWVFKEEDPIHLRCHSWKNTALHKVTYLQNGKGRKYFHHNSDFYIPKATLKDSGSYFCRGLVGSKNVSSETVNITITQGLAVPTISSFFPPGYQVSFCLVMVLLFAVDTGLYFSVK

SEQ ID NO: 9621 - protein, 482 aa, synthetic construct
MALPVTALLLPLALLLHAARPDIQLTQSPSFLSASVGDRVTITCRASQGISTDLNWYQQKPGKAPKLLIYAASNLESGVPSRFSGSGSGTEFTLTISSLQPEDFATYYCQQSYNWPYTFGGGTKVEIKRGGGGSGGGGSGGGGSEVQLVESGGGLVKPGGSLRLSCAASGFTFSNFEMNWVRQAPGKGLEWVSGISSNGRYINYADSVKGRFTISRDNAKNSLYLQMNSLRAEDTAVYYCARVVDFDQDYNGFDYWGQGTLVTVSSTRGMRTEDLPKAVVFLEPQWYRVLEKDSVTLKCQGAYSPEDNSTQWFHNESLISSQASSYFIDAATVDDSGEYRCQTNLSTLSDPVQLEVHIGWLLLQAPRWVFKEEDPIHLRCHSWKNTALHKVTYLQNGKGRKYFHHNSDFYIPKATLKDSGSYFCRGLVGSKNVSSETVNITITQGLAVPTISSFFPPGYQVSFCLVMVLLFAVDTGLYFSVK

SEQ ID NO: 9622 - protein, 480 aa, synthetic construct
MALPVTALLLPLALLLHAARPDIQLTQSPSFLSASVGDRVTITCSLSLGISTWRDWFPPRLGRGLEPLTYAASTLQSGVPSRFSGSGSGTEFTLTISSLQPEDFATYYCQQLNSYPLTFGGGTKVEIKRGGGGSGGGGSGGGGSEVQLVESGGGLVKPGGSLRLSCAASGFTFSTYGMSWVRQAPGKGLEWVAYINNGSGYIYYADSVKGRFTISRDNAKNSLYLQMNSLRAEDTAVYYCARGQWWSGGDFDYWGQGTLVTVSSTRGMRTEDLPKAVVFLEPQWYRVLEKDSVTLKCQGAYSPEDNSTQWFHNESLISSQASSYFIDAATVDDSGEYRCQTNLSTLSDPVQLEVHIGWLLLQAPRWVFKEEDPIHLRCHSWKNTALHKVTYLQNGKGRKYFHHNSDFYIPKATLKDSGSYFCRGLVGSKNVSSETVNITITQGLAVPTISSFFPPGYQVSFCLVMVLLFAVDTGLYFSVK

SEQ ID NO: 9623 - protein, 482 aa, synthetic construct
MALPVTALLLPLALLLHAARPDIQMTQTTSSLSASLGDRVTISCRASQDISNYLNWYQQKPDGTVKLLIYYTSILHSGVPSRFSGSGSGTDYSLTISNLEQEDFATYFCQQGNTLPWTFGGGTKLEIKAGGGGSGGGGSGGGGSEVQLVESGGGLVKPGGSLKLSCAASGFAFSIYDMSWVRQTPEKRLEWVAYISSGGGTYYPDTVKGRFTISRDNAKNTLYLQMSSLKSEDTAMYYCARHSGYGTHWGVLFAYWGQGTLVTVSATRGMRTEDLPKAVVFLEPQWYRVLEKDSVTLKCQGAYSPEDNSTQWFHNESLISSQASSYFIDAATVDDSGEYRCQTNLSTLSDPVQLEVHIGWLLLQAPRWVFKEEDPIHLRCHSWKNTALHKVTYLQNGKGRKYFHHNSDFYIPKATLKDSGSYFCRGLVGSKNVSSETVNITITQGLAVPTISSFFPPGYQVSFCLVMVLLFAVDTGLYFSVK

SEQ ID NO: 9624 - protein, 492 aa, synthetic construct
MALPVTALLLPLALLLHAARPDIVMTQSPDSLAVSLGERATINCKSSQSLLYRSNQKNYLAWYQQKPGQPPKLLIYWASTRESGVPDRFSGSGSGTDFTLTISSLQAEDVAVYYCQQYYNYPRTFGQGTKVEIKRTVGGGGSGGGGSGGGGSEVQLLESGGGLVQPGGSLRLSCAASGYSITSDYAWNWVRQAPGKGLEWVSYISNSGSTSYNPSLKSRFTISRDNSKNTLYLQMNSLRAEDTAVYYCAKERNYDYDDYYYAMDYWGQGTLVTVSSTRGMRTEDLPKAVVFLEPQWYRVLEKDSVTLKCQGAYSPEDNSTQWFHNESLISSQASSYFIDAATVDDSGEYRCQTNLSTLSDPVQLEVHIGWLLLQAPRWVFKEEDPIHLRCHSWKNTALHKVTYLQNGKGRKYFHHNSDFYIPKATLKDSGSYFCRGLVGSKNVSSETVNITITQGLAVPTISSFFPPGYQVSFCLVMVLLFAVDTGLYFSVK

SEQ ID NO: 9625 - protein, 485 aa, synthetic construct
MALPVTALLLPLALLLHAARPDVVMTQSPLSLPVTLGQPASISCRSSQSLLHSSGNTYLEWYQQRPGQSPRPLIYKISTRFSGVPDRFSGSGSGTDFTLKISRVEAEDVGVYYCFQGSHVPYTFGGGTKVEIKRGGGGSGGGGSGGGGSQVQLVQSGAEVKKPGASVKVSCKASGLTIEDYYMHWVRQAPGQGLEWMGWIDPENGDTEYGPKFQGRVTMTRDTSINTAYMELSRLRSDDTAVYYCAVHNAHYGTWFAYWGQGTLVTVSSTRGMRTEDLPKAVVFLEPQWYRVLEKDSVTLKCQGAYSPEDNSTQWFHNESLISSQASSYFIDAATVDDSGEYRCQTNLSTLSDPVQLEVHIGWLLLQAPRWVFKEEDPIHLRCHSWKNTALHKVTYLQNGKGRKYFHHNSDFYIPKATLKDSGSYFCRGLVGSKNVSSETVNITITQGLAVPTISSFFPPGYQVSFCLVMVLLFAVDTGLYFSVK

SEQ ID NO: 9626 - protein, 477 aa, synthetic construct
MALPVTALLLPLALLLHAARPDIQMTQSPSSLSASVGDRVTITCRASENIYSNLAWYQQKPGKAPKLLIYAATNLADGVPSRFSGSGSGTDFTLTISSLQPEDFATYYCQHFWGTPTFGQGTKVEIKRTVGGGGSGGGGSGGGGSEVQLVESGGGLVQPGGSLRLSCAASGFSLTNYGVHWVRQAPGKGLEWVSVIWSGGSTDYNAAFISRFTISADTSKNTAYLQMNSLRAEDTAVYYCARELIHAMDNWGQGTLVTVSSTRGMRTEDLPKAVVFLEPQWYRVLEKDSVTLKCQGAYSPEDNSTQWFHNESLISSQASSYFIDAATVDDSGEYRCQTNLSTLSDPVQLEVHIGWLLLQAPRWVFKEEDPIHLRCHSWKNTALHKVTYLQNGKGRKYFHHNSDFYIPKATLKDSGSYFCRGLVGSKNVSSETVNITITQGLAVPTISSFFPPGYQVSFCLVMVLLFAVDTGLYFSVK

SEQ ID NO: 9627 - protein, 484 aa, synthetic construct
MALPVTALLLPLALLLHAARPDFVMTQSPLSLPVTPGEPASISCRSSQSIVHSNGNTYLEWYLQKPGQSPQLLIYKVSNRFSGVPDRFSGSGSGTDFTLKISRVEAEDVGVYYCFQGSHVPLTFGQGTKLEIKRGGGGSGGGGSGGGGSEVQLVESGAEVKKPGASVKVSCKASGYTFTSYWIHWVRQAPGQGLEWMGENDPSNGRTNYNEKFKNRVTLTVDTSISTAYMELSRLRSDDTAVYYCARGPNYFYSMDYWGQGTMVTVSSTRGMRTEDLPKAVVFLEPQWYRVLEKDSVTLKCQGAYSPEDNSTQWFHNESLISSQASSYFIDAATVDDSGEYRCQTNLSTLSDPVQLEVHIGWLLLQAPRWVFKEEDPIHLRCHSWKNTALHKVTYLQNGKGRKYFHHNSDFYIPKATLKDSGSYFCRGLVGSKNVSSETVNITITQGLAVPTISSFFPPGYQVSFCLVMVLLFAVDTGLYFSVK

SEQ ID NO: 9628 - protein, 477 aa, synthetic construct
MALPVTALLLPLALLLHAARPDIQLTQSPSFLSASVGDRVTITCSARSSISFMYWYQQKPGKAPKLLIYDTSNLASGVPSRFSGSGSGTEFTLTISSLEAEDAATYYCQQWSSYPLTFGQGTKLEIKGGGGSGGGGSGGGGSQVQLVQSGAEVKKPGASVKVSCKASGYTFTGSWMNWVRQAPGQGLEWIGRIYPGDGETNYNGKFKDRVTITADKSTSTAYMELSSLRSEDTAVYYCARIYGNNVYFDVWGQGTTVTVSSTRGMRTEDLPKAVVFLEPQWYRVLEKDSVTLKCQGAYSPEDNSTQWFHNESLISSQASSYFIDAATVDDSGEYRCQTNLSTLSDPVQLEVHIGWLLLQAPRWVFKEEDPIHLRCHSWKNTALHKVTYLQNGKGRKYFHHNSDFYIPKATLKDSGSYFCRGLVGSKNVSSETVNITITQGLAVPTISSFFPPGYQVSFCLVMVLLFAVDTGLYFSVK

SEQ ID NO: 9629 - protein, 485 aa, synthetic construct
MALPVTALLLPLALLLHAARPQLVLTQSPSASASLGSSVKLTCTLSSGHKTDTIDWYQQQPGKAPRYLMKLEGSGSYNKGSGVPDRFSGSSSGADWYLTISSLQSEDEADYYCGTDYPGNYLFGGGTQLTVLGGGGGSGGGGSGGGGSQEQLVESGGGLVQPGGSLRLSCAASGFTFSDYYMSWIRQAPGKGLEWVATIYPSSGKTYYADSAKGRLTISSDNAKDSLYLQMNSLRAEDTAVYYCTRDSYADDAALFDIWGQGTTVTVSSTRGMRTEDLPKAVVFLEPQWYRVLEKDSVTLKCQGAYSPEDNSTQWFHNESLISSQASSYFIDAATVDDSGEYRCQTNLSTLSDPVQLEVHIGWLLLQAPRWVFKEEDPIHLRCHSWKNTALHKVTYLQNGKGRKYFHHNSDFYIPKATLKDSGSYFCRGLVGSKNVSSETVNITITQGLAVPTISSFFPPGYQVSFCLVMVLLFAVDTGLYFSVK

SEQ ID NO: 9630 - protein, 480 aa, synthetic construct
MALPVTALLLPLALLLHAARPDIVLTQSPPSLAMSLGKRATISCRASESVTILGSHLIHWYQQKPGQPPTLLIQLASNVQTGVPARFSGSGSRTDFTLTIDPVEEDDVAVYYCLQSRTIPRTFGGGTKLEIKGGGGSGGGGSGGGGSQIQLVQSGPELKKPGETVKISCKASGYTFTDYSINWVKRAPGKGLKWMGWINTETREPAYAYDFRGRFAFSLETSASTAYLQINNLKYEDTATYFCALDYSYAMDYWGQGTSVTVSSTRGMRTEDLPKAVVFLEPQWYRVLEKDSVTLKCQGAYSPEDNSTQWFHNESLISSQASSYFIDAATVDDSGEYRCQTNLSTLSDPVQLEVHIGWLLLQAPRWVFKEEDPIHLRCHSWKNTALHKVTYLQNGKGRKYFHHNSDFYIPKATLKDSGSYFCRGLVGSKNVSSETVNITITQGLAVPTISSFFPPGYQVSFCLVMVLLFAVDTGLYFSVK

SEQ ID NO: 9631 - protein, 484 aa, synthetic construct
MALPVTALLLPLALLLHAARPQVQLQESGPGLVKPSQTLSLTCTVSGGSISSGGFYWSWIRQHPGKGLEWIGYIHHSGSTHYNPSLKSRVTISIDTSKNLFSLRLSSVTAADTAVYYCASLVYCGGDCYSGFDYWGQGTLVTVSSGGGGSGGGGSGGGGSDIQLTQSPSSLSASVGDRVSFTCQASQDINNFLNWYQQKPGKAPKLLIYDASNLETGVPSRFSGSGSGTDFTFTISSLQPEDIATYYCQQYGNLPFTFGGGTKVEIKRTRGMRTEDLPKAVVFLEPQWYRVLEKDSVTLKCQGAYSPEDNSTQWFHNESLISSQASSYFIDAATVDDSGEYRCQTNLSTLSDPVQLEVHIGWLLLQAPRWVFKEEDPIHLRCHSWKNTALHKVTYLQNGKGRKYFHHNSDFYIPKATLKDSGSYFCRGLVGSKNVSSETVNITITQGLAVPTISSFFPPGYQVSFCLVMVLLFAVDTGLYFSVK

SEQ ID NO: 9632 - protein, 482 aa, synthetic construct
MALPVTALLLPLALLLHAARPQVQLQESGPGLVKPSETLSLTCTVSGGSISSYYWSWIRQPPGKGLEWIGYIYYSGSTNYNPSLKSRVTISVDTSKNQFSLKLSSVTAADTAVYYCVSLVYCGGDCYSGFDYWGQGTLVTVSSGGGGSGGGGSGGGGSDIQLTQSPSSLSASVGDRVSFTCQASQDINNFLNWYQQKPGKAPKLLIYDASNLETGVPSRFSGSGSGTDFTFTISSLQPEDIATYYCQQYGNLPFTFGGGTKVEIKRTRGMRTEDLPKAVVFLEPQWYRVLEKDSVTLKCQGAYSPEDNSTQWFHNESLISSQASSYFIDAATVDDSGEYRCQTNLSTLSDPVQLEVHIGWLLLQAPRWVFKEEDPIHLRCHSWKNTALHKVTYLQNGKGRKYFHHNSDFYIPKATLKDSGSYFCRGLVGSKNVSSETVNITITQGLAVPTISSFFPPGYQVSFCLVMVLLFAVDTGLYFSVK

SEQ ID NO: 9633 - protein, 487 aa, synthetic construct
MALPVTALLLPLALLLHAARPQVTLKESGPVLVKPTETLTLTCTVSGFSLINARMGVSWIRQPPGKALEWLAHIFSNAEKSYRTSLKSRLTISKDTSKSQVVLTMTNMDPVDTATYYCARIPGYGGNGDYHYYGMDVWGQGTTVTVSSGGGGSGGGGSGGGGSDIQMTQSPSSLSASLGDRVTITCRASQGIRNDLGWYQQKPGKAPKRLIYASSTLQSGVPSRFSGSGSGTEFTLTISSLQPEDFATYYCLQHNNFPWTFGQGTKVEIKRTRGMRTEDLPKAVVFLEPQWYRVLEKDSVTLKCQGAYSPEDNSTQWFHNESLISSQASSYFIDAATVDDSGEYRCQTNLSTLSDPVQLEVHIGWLLLQAPRWVFKEEDPIHLRCHSWKNTALHKVTYLQNGKGRKYFHHNSDFYIPKATLKDSGSYFCRGLVGSKNVSSETVNITITQGLAVPTISSFFPPGYQVSFCLVMVLLFAVDTGLYFSVK

SEQ ID NO: 9634 - protein, 481 aa, synthetic construct
MALPVTALLLPLALLLHAARPQIQLVESGGGVVQPGRSLRLSCVASGFTFKNYGMHWVRQAPGKGLEWVAVIWYDGSNEYYGDPVKGRFTISRDNSKNMLYLQMNSLRADDTAVYYCARSGIAVAGAFDYWGQGTLVTVSSGGGGSGGGGSGGGGSEIVLTQSPDTLSLSPGEKATLSCRASQSVSSSFLAWYQQKPGQAPSLLIYVASRRAAGIPDRFSGSGSGTDFTLTISRLEPEDFGMFYCQHYGRTPFTFGPGTKVDIKRTRGMRTEDLPKAVVFLEPQWYRVLEKDSVTLKCQGAYSPEDNSTQWFHNESLISSQASSYFIDAATVDDSGEYRCQTNLSTLSDPVQLEVHIGWLLLQAPRWVFKEEDPIHLRCHSWKNTALHKVTYLQNGKGRKYFHHNSDFYIPKATLKDSGSYFCRGLVGSKNVSSETVNITITQGLAVPTISSFFPPGYQVSFCLVMVLLFAVDTGLYFSVK

SEQ ID NO: 9635 - protein, 482 aa, synthetic construct
MALPVTALLLPLALLLHAARPDIQLTQSPSFLSASVGDRVTITCRASQGISSYLAWYQQKPGKAPKLLIYAASTLQSGVPSRFSGSGSGTEFTLTISSLQPEDFATYYCQQVNSYPLTFGGGTKVEIKRGGGGSGGGGSGGGGSQLQLQESGPGLVKPSETLSLTCTVSGGSISSSTYYWGWIRQPPGKGLEWIGSIYFTGSTDYNPSLKSRVSISVDTSKNQFSLKLSSVTAADTAVYYCAKEDDSSGYYSFDYWGQGNLVTVSSTRGMRTEDLPKAVVFLEPQWYRVLEKDSVTLKCQGAYSPEDNSTQWFHNESLISSQASSYFIDAATVDDSGEYRCQTNLSTLSDPVQLEVHIGWLLLQAPRWVFKEEDPIHLRCHSWKNTALHKVTYLQNGKGRKYFHHNSDFYIPKATLKDSGSYFCRGLVGSKNVSSETVNITITQGLAVPTISSFFPPGYQVSFCLVMVLLFAVDTGLYFSVK

SEQ ID NO: 9636 - protein, 485 aa, synthetic construct
MALPVTALLLPLALLLHAARPQSALTQPRSVSGSPGHSVTISCTGTSSDVGDYNYVSWYQQRPGKVPKLLIYDVSKRPSGVPDRFSGSKSGNTASLTISGLQAEDEAIYFCASYAGNYNVVFGGGTKLTVLGQGGGGSGGGGSGGGGSQVQLVQSGSELKKPGASVKVSCKASGYTFNTYAMNWVRQAPGQGLEWMGWINTNTGNPTYAQGFTGRFVFSLDTSVSTAYLQISSLKAEDTAVYYCARRYFDWLLGAFDIWGQGTMVTVSSTRGMRTEDLPKAVVFLEPQWYRVLEKDSVTLKCQGAYSPEDNSTQWFHNESLISSQASSYFIDAATVDDSGEYRCQTNLSTLSDPVQLEVHIGWLLLQAPRWVFKEEDPIHLRCHSWKNTALHKVTYLQNGKGRKYFHHNSDFYIPKATLKDSGSYFCRGLVGSKNVSSETVNITITQGLAVPTISSFFPPGYQVSFCLVMVLLFAVDTGLYFSVK

SEQ ID NO: 9637 - protein, 477 aa, synthetic construct
MALPVTALLLPLALLLHAARPDIQMTQSPSSLSASVGDRVTITCSASQGINNYLNWYQQKPGKAPKLLIHYTSGLHAGVPSRFSGSGSGTDYTLTISSLQPEDVATYYCQQYSILPWTFGGGTKVEIKRGGGGSGGGGSGGGGSQVQLVQSGAEVKKPGSSVKVSCKASGYAFSSSWMNWVRQAPGQGLEWMGRIYPGDGNTHYAQKFQGRVTLTADKSTSTAYMELSSLRSEDTAVYYCGEGYLDPMDYWGQGTLVTVSSTRGMRTEDLPKAVVFLEPQWYRVLEKDSVTLKCQGAYSPEDNSTQWFHNESLISSQASSYFIDAATVDDSGEYRCQTNLSTLSDPVQLEVHIGWLLLQAPRWVFKEEDPIHLRCHSWKNTALHKVTYLQNGKGRKYFHHNSDFYIPKATLKDSGSYFCRGLVGSKNVSSETVNITITQGLAVPTISSFFPPGYQVSFCLVMVLLFAVDTGLYFSVK

SEQ ID NO: 9638 - protein, 480 aa, synthetic construct
MALPVTALLLPLALLLHAARPEVQLVESGGGLVQPGGSLRLSCAASGYTFTTYWMHWVRQAPGKGLEWVGYIRPSTGYTEYNQKFKDRFTISADTSKNTAYLQMNSLRAEDTAVYYCARSRWLLDYWGQGTLVTVSGGGGSGGGGSGGGGSDIQMTQSPSSLSASVGDRVTITCKSSQSVLYSSNQKNYLAWFQQKPGKAPKLLIYWASTRESGVPSRFSGSGSGTDFTLTISSLQPEDFATYFCHQYLSSYTFGQGTKVEIKRTRGMRTEDLPKAVVFLEPQWYRVLEKDSVTLKCQGAYSPEDNSTQWFHNESLISSQASSYFIDAATVDDSGEYRCQTNLSTLSDPVQLEVHIGWLLLQAPRWVFKEEDPIHLRCHSWKNTALHKVTYLQNGKGRKYFHHNSDFYIPKATLKDSGSYFCRGLVGSKNVSSETVNITITQGLAVPTISSFFPPGYQVSFCLVMVLLFAVDTGLYFSVK

SEQ ID NO: 9639 - protein, 477 aa, synthetic construct
MALPVTALLLPLALLLHAARPDIQMTQSPSSLSASVGDRVTITCRASQDISNYLNWYQQKPGKAPKLLIYYTSRLHSGVPSRFSGSGSGTDFTLTISSLQPEDFATYYCQQGNTLPYTFGQGTKVEIKRGGGGSGGGGSGGGGSEVQLVESGGGLVQPGGSLRLSCAASGFTFSDYFMSWVRQAPGKGLEWVATISNGGTYTYYPDSVKGRFTISRDNSKNTLYLQMNSLRAEDTAVYYCARFDGYIFDYWGQGTLVTVSSTRGMRTEDLPKAVVFLEPQWYRVLEKDSVTLKCQGAYSPEDNSTQWFHNESLISSQASSYFIDAATVDDSGEYRCQTNLSTLSDPVQLEVHIGWLLLQAPRWVFKEEDPIHLRCHSWKNTALHKVTYLQNGKGRKYFHHNSDFYIPKATLKDSGSYFCRGLVGSKNVSSETVNITITQGLAVPTISSFFPPGYQVSFCLVMVLLFAVDTGLYFSVK

SEQ ID NO: 9640 - protein, 484 aa, synthetic construct
MALPVTALLLPLALLLHAARPDIQMTQSPSSLSASVGDRVTITCTASSRVSSSYLHWFQQKPGKAPKLLIYSTSNLASGVPSRFSGSGSGTDFTLTISSLQPEDFATYYCHQYHRSPYTFGQGTKVEIKRGGGGSGGGGSGGGGSEVQLVESGGGLVQPGGSLRLSCAASGYAFSNSWINWVRQAPGKGLEWVGQIYPGDYDTNYNGKFKGRFTISRDKSKNTAYLQMNSLRAEDTAVYYCARGGSIYYGNLGFFDVWGQGTLVTVSSTRGMRTEDLPKAVVFLEPQWYRVLEKDSVTLKCQGAYSPEDNSTQWFHNESLISSQASSYFIDAATVDDSGEYRCQTNLSTLSDPVQLEVHIGWLLLQAPRWVFKEEDPIHLRCHSWKNTALHKVTYLQNGKGRKYFHHNSDFYIPKATLKDSGSYFCRGLVGSKNVSSETVNITITQGLAVPTISSFFPPGYQVSFCLVMVLLFAVDTGLYFSVK

SEQ ID NO: 9641 - protein, 474 aa, synthetic construct
MALPVTALLLPLALLLHAARPDIQMTQSPSSLSASVGDRVTITCSASSSVTYMYWYQQKPGKAPKLLIYDTSNLASGVPSRFSGSGSGTDYTLTISSLQPEDFATYYCQQWSNYPLTFGQGTKVEIKGGGGSGGGGSGGGGSQVQLVQSGAEVKKPGASVKVSCKASGYSFIEYTINWVRQAPGQGLEWIGNIDPYYGTTYYNQMFTGRATLTVDTSISTAYMELSRLRSDDTAVYYCARGSAWFPYWGQGTLVTVSSTRGMRTEDLPKAVVFLEPQWYRVLEKDSVTLKCQGAYSPEDNSTQWFHNESLISSQASSYFIDAATVDDSGEYRCQTNLSTLSDPVQLEVHIGWLLLQAPRWVFKEEDPIHLRCHSWKNTALHKVTYLQNGKGRKYFHHNSDFYIPKATLKDSGSYFCRGLVGSKNVSSETVNITITQGLAVPTISSFFPPGYQVSFCLVMVLLFAVDTGLYFSVK

SEQ ID NO: 9642 - protein, 474 aa, synthetic construct
MALPVTALLLPLALLLHAARPEIVLTQSPSSLSASVGDRVTITCRASENIYSYLAWYQQKPGKAPKLLIYNTKTLGEGVPSRFSGSGSGTDFTLTISSLQPEDFATYYCQHHYGTPFTFGPGTKVDIKGGGGSGGGGSGGGGSQVQLVQSGAEVKKPGASVKVSCKASGYTFSDYWVHWVRQAPGQGLEWMGAIDGSDTFNDYSQKFKGRVTMTRDTSISTAYMELSRLRSDDTAVYYCARGGLLQYWGQGTLVTVSSTRGMRTEDLPKAVVFLEPQWYRVLEKDSVTLKCQGAYSPEDNSTQWFHNESLISSQASSYFIDAATVDDSGEYRCQTNLSTLSDPVQLEVHIGWLLLQAPRWVFKEEDPIHLRCHSWKNTALHKVTYLQNGKGRKYFHHNSDFYIPKATLKDSGSYFCRGLVGSKNVSSETVNITITQGLAVPTISSFFPPGYQVSFCLVMVLLFAVDTGLYFSVK

SEQ ID NO: 9643 - protein, 478 aa, synthetic construct
MALPVTALLLPLALLLHAARPQVQLQQSGPELVKPGASVKISCKASGYAFSSSWMNWVKQRPGKGLEWIGRIYPGDEDTNYSGKFKDKATLTADKSSTTAYMQLSSLTSEDSAVYFCARSLLYGDYLDYWGQGTTLTVSSGGGGSGGGGSGGGGSQIVLTQSPAIMSASPGEKVTMTCSASSSVSYMHWYQQKSGTSPKRWIYDTSKLASGVPDRFSGSGSGTSYFLTINNMEAEDAATYYCQQWNINPLTFGAGTKLELKRTRGMRTEDLPKAVVFLEPQWYRVLEKDSVTLKCQGAYSPEDNSTQWFHNESLISSQASSYFIDAATVDDSGEYRCQTNLSTLSDPVQLEVHIGWLLLQAPRWVFKEEDPIHLRCHSWKNTALHKVTYLQNGKGRKYFHHNSDFYIPKATLKDSGSYFCRGLVGSKNVSSETVNITITQGLAVPTISSFFPPGYQVSFCLVMVLLFAVDTGLYFSVK

SEQ ID NO: 9644 - protein, 481 aa, synthetic construct
MALPVTALLLPLALLLHAARPDIQMTQSSAYLSVSLGGRVTITCKASDHINNWLAWYQHKPGNAPRLLISGATTLETGVPSRFSGSGSGKDYTLSITSLQTEDVATYYCQQSWNTPWTFGGGTKLEIKRGGGGSGGGGSGGGGSQVQLQQSGAELVRPGSSVKISCKASGYAFSSYWVNWMKQRPGQGLEWIGQIYPGDGDTNYNGKFKGRATVTADKSSSTSYMQFSSLTSEDSAVYFCARSITTVVGCAMDYWGQGTSVTVSSTRGMRTEDLPKAVVFLEPQWYRVLEKDSVTLKCQGAYSPEDNSTQWFHNESLISSQASSYFIDAATVDDSGEYRCQTNLSTLSDPVQLEVHIGWLLLQAPRWVFKEEDPIHLRCHSWKNTALHKVTYLQNGKGRKYFHHNSDFYIPKATLKDSGSYFCRGLVGSKNVSSETVNITITQGLAVPTISSFFPPGYQVSFCLVMVLLFAVDTGLYFSVK

SEQ ID NO: 9645 - protein, 480 aa, synthetic construct
MALPVTALLLPLALLLHAARPEVQLLESGGGLVQPGGSLRLSCAASGFTFSSYAMSWVRQAPGKGLEWVSVISGSGGRPNYADSVKGRFTISRDNSKNTLYLQMNSLRDEDTAVYYCAKVDYSNYLFFDYWGQGTLVTVSSGGGGSGGGGSGGGGSEIVLTQSPGTLSLSPGEGATLSCRAGQSVRSSYLGWYQQKPGQAPRLLIYGASSRATGIPDRFSGSGSGTDFTLTISRLEPEDFAVYYCQQYGYSPPTFGGGTKLEIKTRGMRTEDLPKAVVFLEPQWYRVLEKDSVTLKCQGAYSPEDNSTQWFHNESLISSQASSYFIDAATVDDSGEYRCQTNLSTLSDPVQLEVHIGWLLLQAPRWVFKEEDPIHLRCHSWKNTALHKVTYLQNGKGRKYFHHNSDFYIPKATLKDSGSYFCRGLVGSKNVSSETVNITITQGLAVPTISSFFPPGYQVSFCLVMVLLFAVDTGLYFSVK

SEQ ID NO: 9646 - protein, 483 aa, synthetic construct
MALPVTALLLPLALLLHAARPDIVLTQSPPSLAMSLGKRATISCRASESVTILGSHLIHWYQQKPGQPPTLLIQLASNVQTGVPARFSGSGSRTDFTLTIDPVEEDDVAVYYCLQSRTIPRTFGGGTKLEIKGSTSGSGKPGSGEGSTKGQIQLVQSGPELKKPGETVKISCKASGYTFTDYSINWVKRAPGKGLKWMGWINTETREPAYAYDFRGRFAFSLETSASTAYLQINNLKYEDTATYFCALDYSYAMDYWGQGTSVTVSSTRGMRTEDLPKAVVFLEPQWYRVLEKDSVTLKCQGAYSPEDNSTQWFHNESLISSQASSYFIDAATVDDSGEYRCQTNLSTLSDPVQLEVHIGWLLLQAPRWVFKEEDPIHLRCHSWKNTALHKVTYLQNGKGRKYFHHNSDFYIPKATLKDSGSYFCRGLVGSKNVSSETVNITITQGLAVPTISSFFPPGYQVSFCLVMVLLFAVDTGLYFSVK

SEQ ID NO: 9647 - protein, 483 aa, synthetic construct
MALPVTALLLPLALLLHAARPDIQMTQSPSSLSASVGDRVTITCRASSSVSYMHWYQQKPGKAPKLLIYATSNLASGVPSRFSGSGSGTDFTLTISSLQPEDFATYYCQQWTFNPPTFGQGTKLEIKRTVAAGGGGSGGGGSGGGGSQVQLVQSGAEVKKPGASVKVSCKASGYTFTSYNMHWVRQAPGQRLEWMGGIYPGNGDTSYNQKFKGRVTITRDTSASTAYMELSSLRSEDTAVYYCARYDYNYAMDYWGQGTLVTVSSASTRGMRTEDLPKAVVFLEPQWYRVLEKDSVTLKCQGAYSPEDNSTQWFHNESLISSQASSYFIDAATVDDSGEYRCQTNLSTLSDPVQLEVHIGWLLLQAPRWVFKEEDPIHLRCHSWKNTALHKVTYLQNGKGRKYFHHNSDFYIPKATLKDSGSYFCRGLVGSKNVSSETVNITITQGLAVPTISSFFPPGYQVSFCLVMVLLFAVDTGLYFSVK

SEQ ID NO: 9648 - protein, 478 aa, synthetic construct
MALPVTALLLPLALLLHAARPEIVLTQSPGTLSLSPGERATLSCRASQSVSSSYLAWYQQKPGQAPRLLIYGASSRATGIPDRFSGSGSGTDFTLTISRLEPEDFAVYYCQQYHHSPLTFGGGTKVEIKRGGGGSGGGGSGGGGSEVQLVESGGGLVQPGGSLRLSCAASGFTFSGRSMNWVRQAPGKGLEWVSYISSDSRTIYYADSVKGRFTISRDNAKNSLYLQMNSLRAEDTAVYYCARGGHGYFDLWGRGTLVTVSSTRGMRTEDLPKAVVFLEPQWYRVLEKDSVTLKCQGAYSPEDNSTQWFHNESLISSQASSYFIDAATVDDSGEYRCQTNLSTLSDPVQLEVHIGWLLLQAPRWVFKEEDPIHLRCHSWKNTALHKVTYLQNGKGRKYFHHNSDFYIPKATLKDSGSYFCRGLVGSKNVSSETVNITITQGLAVPTISSFFPPGYQVSFCLVMVLLFAVDTGLYFSVK

SEQ ID NO: 9649 - protein, 481 aa, synthetic construct
MALPVTALLLPLALLLHAARPEIVLTQSPGTLSLSPGERATLSCRASQSVSSDYLAWYQQKPGQAPRLLIYGASRRATGIPDRFSGSGSGTDFTLTISRLEPEDFAVYYCQQYVSYWTFGGGTKVEIKRGGGGSGGGGSGGGGSQVQLVESGGGVVQPGRSLRLSCAASGFTFSSYGMHWVRQAPGKGLEWVAGIWWDGSNEKYADSVKGRFTISRDNSKNTLYLQMNSLRAEDTAVYYCAKEAPYYAKDYMDVWGKGTTVTVSSTRGMRTEDLPKAVVFLEPQWYRVLEKDSVTLKCQGAYSPEDNSTQWFHNESLISSQASSYFIDAATVDDSGEYRCQTNLSTLSDPVQLEVHIGWLLLQAPRWVFKEEDPIHLRCHSWKNTALHKVTYLQNGKGRKYFHHNSDFYIPKATLKDSGSYFCRGLVGSKNVSSETVNITITQGLAVPTISSFFPPGYQVSFCLVMVLLFAVDTGLYFSVK

SEQ ID NO: 9650 - protein, 481 aa, synthetic construct
MALPVTALLLPLALLLHAARPDIQMTQSPSSLSASVGDRVTITCRASQDVNTAVAWYQQKPGKAPKLLIYSASFLYSGVPSRFSGSRSGTDFTLTISSLQPEDFATYYCQQHYTTPPTFGQGTKVEIKRTGGGGSGGGGSGGGGSEVQLVESGGGLVQPGGSLRLSCAASGFNIKDTYIHWVRQAPGKGLEWVARIYPTNGYTRYADSVKGRFTISADTSKNTAYLQMNSLRAEDTAVYYCSRWGGWGFYAMDYWGQGTLVTVSSTRGMRTEDLPKAVVFLEPQWYRVLEKDSVTLKCQGAYSPEDNSTQWFHNESLISSQASSYFIDAATVDDSGEYRCQTNLSTLSDPVQLEVHIGWLLLQAPRWVFKEEDPIHLRCHSWKNTALHKVTYLQNGKGRKYFHHNSDFYIPKATLKDSGSYFCRGLVGSKNVSSETVNITITQGLAVPTISSFFPPGYQVSFCLVMVLLFAVDTGLYFSVK

SEQ ID NO: 9651 - protein, 476 aa, synthetic construct
MALPVTALLLPLALLLHAARPQVQLVESGGGLVKPGGSLRLSCAASGFTFSDYYMTWIRQAPGKGLEWISYISSSGSTIYYADSVKGRFTISRDNAKNSLYLQMNSLRAEDTAVYYCARDRNSHFDYWGQGTLVTVSSGGGGSGGGGSGGGGSDIQMTQSPSSVSASVGDRVTITCRASQGITRWLAWYQQKPGKAPKLLIYAASVLQSGVPSRFSGSGSGTDFTLTISSLQPEDFATYYCQQSNSFPRTFGQGTKVEIKTRGMRTEDLPKAVVFLEPQWYRVLEKDSVTLKCQGAYSPEDNSTQWFHNESLISSQASSYFIDAATVDDSGEYRCQTNLSTLSDPVQLEVHIGWLLLQAPRWVFKEEDPIHLRCHSWKNTALHKVTYLQNGKGRKYFHHNSDFYIPKATLKDSGSYFCRGLVGSKNVSSETVNITITQGLAVPTISSFFPPGYQVSFCLVMVLLFAVDTGLYFSVK

SEQ ID NO: 9652 - protein, 476 aa, synthetic construct
MALPVTALLLPLALLLHAARPQVQLVESGGGLVKPGGSLRLSCAASGFTFSDHYMSWIRQAPGKGLEWFSYISSSGGIIYYADSVKGRFTISRDNAKNSLYLQMNSLRAEDTAVYYCARDVGSHFDYWGQGTLVTVSSGGGGSGGGGSGGGGSDIQMTQSPSSVSASVGDRVTITCRASQDISRWLAWYQQKPGKAPKLLISAASRLQSGVPSRFSGSGSGTDFTLTISSLQPEDFAIYYCQQAKSFPRTFGQGTKVEIKTRGMRTEDLPKAVVFLEPQWYRVLEKDSVTLKCQGAYSPEDNSTQWFHNESLISSQASSYFIDAATVDDSGEYRCQTNLSTLSDPVQLEVHIGWLLLQAPRWVFKEEDPIHLRCHSWKNTALHKVTYLQNGKGRKYFHHNSDFYIPKATLKDSGSYFCRGLVGSKNVSSETVNITITQGLAVPTISSFFPPGYQVSFCLVMVLLFAVDTGLYFSVK

SEQ ID NO: 9653 - protein, 488 aa, synthetic construct
MALPVTALLLPLALLLHAARPQVQLVESGGGVVQSGRSLRLSCAASGFTFRNYGMHWVRQAPGKGLEWVAVIWYDGSDKYYADSVRGRFTISRDNSKNTLYLQMNSLRAEDTAVYYCARDGYDILTGNPRDFDYWGQGTLVTVSSGGGGSGGGGSGGGGSDTVMTQTPLSSHVTLGQPASISCRSSQSLVHSDGNTYLSWLQQRPGQPPRLLIYRISRRFSGVPDRFSGSGAGTDFTLEISRVEAEDVGVYYCMQSTHVPRTFGQGTKVEIKTRGMRTEDLPKAVVFLEPQWYRVLEKDSVTLKCQGAYSPEDNSTQWFHNESLISSQASSYFIDAATVDDSGEYRCQTNLSTLSDPVQLEVHIGWLLLQAPRWVFKEEDPIHLRCHSWKNTALHKVTYLQNGKGRKYFHHNSDFYIPKATLKDSGSYFCRGLVGSKNVSSETVNITITQGLAVPTISSFFPPGYQVSFCLVMVLLFAVDTGLYFSVK

SEQ ID NO: 9654 - protein, 481 aa, synthetic construct
MALPVTALLLPLALLLHAARPEVQLVESGGGLVQPGGSLRLSCAASGFPFSSYDMHWVRQATGKGLEWVSAIGTAGATYYPGSVKGRFTISRENAKNSLYLQMNSLRAGDTAVYYCARGDYVWGTYRPLFDYWGQGTLVTVSSGGGGSGGGGSGGGGSDIQLTQSPSFLSASVGDRVTITCWASQGINNYLAWYQQKPGKAPKLLIYAASTLQTGVPSRFSGSGSGTEFTLTISSLQPEDFATYYCQQLNSYPLTFGGGTKVEIKTRGMRTEDLPKAVVFLEPQWYRVLEKDSVTLKCQGAYSPEDNSTQWFHNESLISSQASSYFIDAATVDDSGEYRCQTNLSTLSDPVQLEVHIGWLLLQAPRWVFKEEDPIHLRCHSWKNTALHKVTYLQNGKGRKYFHHNSDFYIPKATLKDSGSYFCRGLVGSKNVSSETVNITITQGLAVPTISSFFPPGYQVSFCLVMVLLFAVDTGLYFSVK

SEQ ID NO: 9655 - protein, 478 aa, synthetic construct
MALPVTALLLPLALLLHAARPQVQLQESGPGLVKPSETLSLTCTVSGASISSFYWSWIRQPPGKGLEWIGYIYYSGTTNYNPSLKSRVTISVDTSKNQFSLKLSSVTAADTAVYYCARIAVAGFFFDYWGQGTLVTVSSGGGGSGGGGSGGGGSEIVLTQSPGTLSLSPGERATLSCRASQSVNKNYLAWYQQKPGQAPRLLIYGASSRATGIPDRFSGSGSGTDFTLTISRLEPEDFAVYYCQQYDRSPLTFGGGTKVEIKTRGMRTEDLPKAVVFLEPQWYRVLEKDSVTLKCQGAYSPEDNSTQWFHNESLISSQASSYFIDAATVDDSGEYRCQTNLSTLSDPVQLEVHIGWLLLQAPRWVFKEEDPIHLRCHSWKNTALHKVTYLQNGKGRKYFHHNSDFYIPKATLKDSGSYFCRGLVGSKNVSSETVNITITQGLAVPTISSFFPPGYQVSFCLVMVLLFAVDTGLYFSVK

SEQ ID NO: 9656 - protein, 487 aa, synthetic construct
MALPVTALLLPLALLLHAARPQVQLVQSGAEVKKPGASVKVSCKASGYTFTNYYMHWVRQAPGLGLEWMGIINPSDGSTSYAQKFQGRVTMTRDTSTNTVYMDLSSLRSEDTAVYYCARGGNSAFYSYYDMDVWGQGTTVTVSSGGGGSGGGGSGGGGSDVVMTQTPLSLPVTLGQPASISCRSSQSLVYRDGNTYLSWFQQRPGQSPRRLIYKVSNWQSGVPDRFSGGGSGTDFTLKISRVEAEDVGVYYCMQGTHWPPTFGQGTKVEIKTRGMRTEDLPKAVVFLEPQWYRVLEKDSVTLKCQGAYSPEDNSTQWFHNESLISSQASSYFIDAATVDDSGEYRCQTNLSTLSDPVQLEVHIGWLLLQAPRWVFKEEDPIHLRCHSWKNTALHKVTYLQNGKGRKYFHHNSDFYIPKATLKDSGSYFCRGLVGSKNVSSETVNITITQGLAVPTISSFFPPGYQVSFCLVMVLLFAVDTGLYFSVK

SEQ ID NO: 9657 - protein, 474 aa, synthetic construct
MALPVTALLLPLALLLHAARPQVQLQQSGPELVKPGASVRISCKASGYTFTTYYIHWVKQRPGQGLEWIGWIYPGNVNTNYNEKFKGKATLTADKSSSTAYMQLTSLTSEDSAVYFCARGVYYFDYWGQGTILTVSSGGGGSGGGGSGGGGSIVMTQTPKFLLVSAGDRVTITCKASQSVNNDVSWFQQKPGQSPTLLIYYASNRYTGVPDRFTGSGYGTDFTFTISTVQAEDLAVYFCQQDYSSPYTFGGGTKLEIKTRGMRTEDLPKAVVFLEPQWYRVLEKDSVTLKCQGAYSPEDNSTQWFHNESLISSQASSYFIDAATVDDSGEYRCQTNLSTLSDPVQLEVHIGWLLLQAPRWVFKEEDPIHLRCHSWKNTALHKVTYLQNGKGRKYFHHNSDFYIPKATLKDSGSYFCRGLVGSKNVSSETVNITITQGLAVPTISSFFPPGYQVSFCLVMVLLFAVDTGLYFSVK

SEQ ID NO: 9658 - protein, 477 aa, synthetic construct
MALPVTALLLPLALLLHAARPQVQLQESGPGLVKPSQTLSLTCTVSGGSINNNNYYWTWIRQHPGKGLEWIGYIYYSGSTFYNPSLKSRVTISVDTSKTQFSLKLSSVTAADTAVYYCAREDTMTGLDVWGQGTTVTVSSGGGGSGGGGSGGGGSDIQMTQSPSSLSASVGDRVTITCRASQSINNYLNWYQQKPGKAPTLLIYAASSLQSGVPSRFSGSRSGTDFTLTISSLQPEDFAAYFCQQTYSNPTFGQGTKVEVKTRGMRTEDLPKAVVFLEPQWYRVLEKDSVTLKCQGAYSPEDNSTQWFHNESLISSQASSYFIDAATVDDSGEYRCQTNLSTLSDPVQLEVHIGWLLLQAPRWVFKEEDPIHLRCHSWKNTALHKVTYLQNGKGRKYFHHNSDFYIPKATLKDSGSYFCRGLVGSKNVSSETVNITITQGLAVPTISSFFPPGYQVSFCLVMVLLFAVDTGLYFSVK

SEQ ID NO: 9659 - protein, 482 aa, synthetic construct
MALPVTALLLPLALLLHAARPSYELTQPPSVSVSPGQTASITCSGDKLGDKYASWYQQKPGQSPVLVIYQDNRRPSGIPERFSGSNSGNTATLTISGTQAMDEADYYCQAWDSDTYVFGTGTKVTVLGQGGGGSGGGGSGGGGSEVQLVQSGAEVKKPGASVKVSCKASGDTFKRYYVHWVRQAPGQGLEWMGIINPSGVSTTYAQKFQGRVTMTRDTSTSTVYMELSSLRSEDTAVYYCAEVRGSGFNYFGMDVWGQGTLVTVSSTRGMRTEDLPKAVVFLEPQWYRVLEKDSVTLKCQGAYSPEDNSTQWFHNESLISSQASSYFIDAATVDDSGEYRCQTNLSTLSDPVQLEVHIGWLLLQAPRWVFKEEDPIHLRCHSWKNTALHKVTYLQNGKGRKYFHHNSDFYIPKATLKDSGSYFCRGLVGSKNVSSETVNITITQGLAVPTISSFFPPGYQVSFCLVMVLLFAVDTGLYFSVK

SEQ ID NO: 9660 - protein, 481 aa, synthetic construct
MALPVTALLLPLALLLHAARPEVQLLESGGGLVQPGGSLRLSCAASGFTFSSYAMSWVRQAPGKGLEVVVSAISGGGGRTYYADSVKGRFTISRDNSKNTLYLQMNSLRAEDTAVYYCAREEMAFRAYRFDIWGQGTLVTVSSGGGGSGGGGSGGGGSDIQMTQSPSSLSASVGDRVTITCRASQSISSYLNWYQQKPGKAPKLLIYAASSLQSGVPSRFSGSGSGTDFTLTISSLQPEDFATYYCQQSYITPLTFGGGTKVEIKTRGMRTEDLPKAVVFLEPQWYRVLEKDSVTLKCQGAYSPEDNSTQWFHNESLISSQASSYFIDAATVDDSGEYRCQTNLSTLSDPVQLEVHIGWLLLQAPRWVFKEEDPIHLRCHSWKNTALHKVTYLQNGKGRKYFHHNSDFYIPKATLKDSGSYFCRGLVGSKNVSSETVNITITQGLAVPTISSFFPPGYQVSFCLVMVLLFAVDTGLYFSVK

SEQ ID NO: 9661 - protein, 489 aa, synthetic construct
MALPVTALLLPLALLLHAARPDIVLTQSPASLAVSLGQGATISCRASKSVSTSGYTYMHWYQQKPGQPPKLLIYLASNLESGVPARFSGSGSGTDFTLNIHPVEEEDAATYYCQHSGELPPSFGGGTKLEIKRAGGGGSGGGGSGGGGSEVQLVESGGDLVKPGGSLKLSCAVSGFTFSSYGMSWVRQTPDKRLEWVATVSSGGTYTYYPDSVKGRFTISRDNAKNTLYLQMSSLKSEDSAMYYCARHRGNYYATYYYAMDYWGQGTSVTVSSTRGMRTEDLPKAVVFLEPQWYRVLEKDSVTLKCQGAYSPEDNSTQWFHNESLISSQASSYFIDAATVDDSGEYRCQTNLSTLSDPVQLEVHIGWLLLQAPRWVFKEEDPIHLRCHSWKNTALHKVTYLQNGKGRKYFHHNSDFYIPKATLKDSGSYFCRGLVGSKNVSSETVNITITQGLAVPTISSFFPPGYQVSFCLVMVLLFAVDTGLYFSVK

SEQ ID NO: 9662 - protein, 483 aa, synthetic construct
MALPVTALLLPLALLLHAARPDIQMTQSPSSLSASVGDRVTITCSASQGIRNYLNWYQQKPGKVPKLLIYYTSRLHSGVPSRFSGSGSGTDFTLTISSLQPEDVATYYCQQYGKLPYTFGQGTKLEIKRTVAAGGGGSGGGGSGGGGSEVQLVESGGGLVQPGGSLRLSCAASGFTFSDAWMDWVRQAPGKGLEWVGEIRSKVNNHETYYAESVKGRFTISRDDSKNSLYLQMNSLKTEDTAVYYCARNDYFDYWGQGTTVTVSSASTRGMRTEDLPKAVVFLEPQWYRVLEKDSVTLKCQGAYSPEDNSTQWFHNESLISSQASSYFIDAATVDDSGEYRCQTNLSTLSDPVQLEVHIGWLLLQAPRWVFKEEDPIHLRCHSWKNTALHKVTYLQNGKGRKYFHHNSDFYIPKATLKDSGSYFCRGLVGSKNVSSETVNITITQGLAVPTISSFFPPGYQVSFCLVMVLLFAVDTGLYFSVK

SEQ ID NO: 9663 - protein, 491 aa, synthetic construct
MALPVTALLLPLALLLHAARPEVQLQESGAEVKKPGSSVKVSCKASGFNIKDTYMHWVRQAPGQGLEWMGRIDPANGNSKYVPKFQGRVTITADESTSTAYMELSSLRSEDTAVYYCAPFGYYVSDYAMAYWGQGTTVTVSSASGGGGSGGGGSGGGGSDIVMTQSPDSLAVSLGERATINCRAGESVDIFGVGFLHWYQQKPGQPPKLLIYRASNLESGVPDRFSGSGSGTDFTLTIRPLQAEDVAVYYCQQTNEDPYTFGQGTKLEIKRTVAATRGMRTEDLPKAVVFLEPQWYRVLEKDSVTLKCQGAYSPEDNSTQWFHNESLISSQASSYFIDAATVDDSGEYRCQTNLSTLSDPVQLEVHIGWLLLQAPRWVFKEEDPIHLRCHSWKNTALHKVTYLQNGKGRKYFHHNSDFYIPKATLKDSGSYFCRGLVGSKNVSSETVNITITQGLAVPTISSFFPPGYQVSFCLVMVLLFAVDTGLYFSVK

SEQ ID NO: 9664 - protein, 484 aa, synthetic construct
MALPVTALLLPLALLLHAARPQVQLVQSGAEVKKPGSSVKVSCKASGGTFSSYAISWVRQAPGQGLEWMGLIIPRYGKARYAQKFQGRVTITADESTSTAYMELSSLRSEDTAVYYCARNWPYYYMDFWGQGTLVTVSSASGGGGSGGGGSGGGGSDIVLTQSPATLSLSPGERATLSCRASQNIVFNLAWYQQKPGQAPRLLIYDASNRATGVPARFSGSGSGTDFTLTISSLEPEDFAVYYCQQKKSMPLTFGQGTKVEIKRTVAATRGMRTEDLPKAVVFLEPQWYRVLEKDSVTLKCQGAYSPEDNSTQWFHNESLISSQASSYFIDAATVDDSGEYRCQTNLSTLSDPVQLEVHIGWLLLQAPRWVFKEEDPIHLRCHSWKNTALHKVTYLQNGKGRKYFHHNSDFYIPKATLKDSGSYFCRGLVGSKNVSSETVNITITQGLAVPTISSFFPPGYQVSFCLVMVLLFAVDTGLYFSVK

SEQ ID NO: 9665 - protein, 487 aa, synthetic construct
MALPVTALLLPLALLLHAARPEVQLVESGGGLVKPGGSLRLSCAASGFTFSNAWMSWVRQAPGKGLEWVGRIKSKTEGGTTDYAAPVKGRFTISRDDSKNTLYLQMNSLKTEDTAVYYCTTPYEWSWYDYWGQGTLVTVSSASGGGGSGGGGSGGGGSQTVVTQEPSLTVSPGGTVTLTCGSSTGAVTTSNYANWVQQKPGQAPRGLIGGTNKRAPGTPARFSGSLLGGKAALTLSGVQPEDEAEYYCALWYSNLWVFGGGTKLTVLTVAATRGMRTEDLPKAVVFLEPQWYRVLEKDSVTLKCQGAYSPEDNSTQWFHNESLISSQASSYFIDAATVDDSGEYRCQTNLSTLSDPVQLEVHIGWLLLQAPRWVFKEEDPIHLRCHSWKNTALHKVTYLQNGKGRKYFHHNSDFYIPKATLKDSGSYFCRGLVGSKNVSSETVNITITQGLAVPTISSFFPPGYQVSFCLVMVLLFAVDTGLYFSVK

SEQ ID NO: 9666 - protein, 487 aa, synthetic construct
MALPVTALLLPLALLLHAARPQVQLVQSGAEVKKPGASVKVSCKASGYTFTSYYMHWVRQAPGQGLEWMGIINPSGGSTSYAQKFQGRVTMTHDTSTSTVYMELSSLRSEDTAVYYCARSFFTGFHLDYWGQGTLVTVSSASGGGGSGGGGSGGGGSEIVLTQSPGTLSLSPGERATLSCRASQSVSSSYLAWYQQKPGQAPRLLIYGASSRATGIPDRFSGSGSGTDFTLTISRLEPEDFAVYYCQQYTNEHYYTFGQGTKVEIKRTVAATRGMRTEDLPKAVVFLEPQWYRVLEKDSVTLKCQGAYSPEDNSTQWFHNESLISSQASSYFIDAATVDDSGEYRCQTNLSTLSDPVQLEVHIGWLLLQAPRWVFKEEDPIHLRCHSWKNTALHKVTYLQNGKGRKYFHHNSDFYIPKATLKDSGSYFCRGLVGSKNVSSETVNITITQGLAVPTISSFFPPGYQVSFCLVMVLLFAVDTGLYFSVK

SEQ ID NO: 9667 - protein, 493 aa, synthetic construct
MALPVTALLLPLALLLHAARPEIVLTQSPATLSLSPGERATLSCSVSSSISSSNLHWYQQKPGQAPRLLIYGTSNLASGIPARFSGSGSGTDFTLTISSLEPEDFAVYYCQQWSSYPHTFGGGTKVEIKRTVAAGGGGSGGGGSGGGGSQVQLVQSGAEVKKPGASVKVSCKASGYTFTNYLIEWVRQAPGQGLEWMGLINPGSGGTNYNEKFKGRVTMTTDTSTSTAYMELRSLRSDDTAVYYCARRSPLGSWIYYAYDGVAYWGQGTLVTVSSASTRGMRTEDLPKAVVFLEPQWYRVLEKDSVTLKCQGAYSPEDNSTQWFHNESLISSQASSYFIDAATVDDSGEYRCQTNLSTLSDPVQLEVHIGWLLLQAPRWVFKEEDPIHLRCHSWKNTALHKVTYLQNGKGRKYFHHNSDFYIPKATLKDSGSYFCRGLVGSKNVSSETVNITITQGLAVPTISSFFPPGYQVSFCLVMVLLFAVDTGLYFSVK

SEQ ID NO: 9668 - protein, 478 aa, synthetic construct
MALPVTALLLPLALLLHAARPDIQMTQSPSSLSASVGDRVTITCKAGQNVGTSVAWYQQKPGKAPKLLIYSASYRYSGVPSRFSGSGSGTDFTLTISSLQPEDFATYYCQQYITYPYTFGQGTKVEIKRTVAAGGGGSGGGGSGGGGSEVQLVESGGGLVQPGGSLRLSCAASGFTFSRYWMSWVRQAPGKGLEWVAEINPDSSTIQYTPSLKARFTLSVDRSKNTLYLQMNSLRAEDTAVYYCARPAYWGQGTLVTVSSASTRGMRTEDLPKAVVFLEPQWYRVLEKDSVTLKCQGAYSPEDNSTQWFHNESLISSQASSYFIDAATVDDSGEYRCQTNLSTLSDPVQLEVHIGWLLLQAPRWVFKEEDPIHLRCHSWKNTALHKVTYLQNGKGRKYFHHNSDFYIPKATLKDSGSYFCRGLVGSKNVSSETVNITITQGLAVPTISSFFPPGYQVSFCLVMVLLFAVDTGLYFSVK

SEQ ID NO: 9669 - protein, 485 aa, synthetic construct
MALPVTALLLPLALLLHAARPDIQMTQSPSSLSASVGDRVTITCSASQDIGNFLNWYQQKPGKAPKLLIYYTSSLYSGVPSRFSGSGSGTDFTLTISSLQPEDFATYYCQQYSKLPLTFGQGTKLEIKRTVAAGGGGSGGGGSGGGGSQVQLVQSGAEVKKPGASVKVSCKASGYTFTGYNIHWVRQAPGQRLEWMGAIYPGNGDTSYKQKFRGRVTITRDTSASTAYMELSSLRSEDTAVYYCARGETARATFAYWGQGTLVTVSSASTRGMRTEDLPKAVVFLEPQWYRVLEKDSVTLKCQGAYSPEDNSTQWFHNESLISSQASSYFIDAATVDDSGEYRCQTNLSTLSDPVQLEVHIGWLLLQAPRWVFKEEDPIHLRCHSWKNTALHKVTYLQNGKGRKYFHHNSDFYIPKATLKDSGSYFCRGLVGSKNVSSETVNITITQGLAVPTISSFFPPGYQVSFCLVMVLLFAVDTGLYFSVK

SEQ ID NO: 9670 - protein, 349 aa, synthetic construct
MALPVTALLLPLALLLHAARPDVQVTQSPSSLSASVGDRVTITCRSSQSLANSYGNTFLSWYLHKPGKAPQLLIYGISNRFSGVPDRFSGSGSGTDFTLTISSLQPEDFATYYCLQGTHQPYTFGQGTKVEIKTRGMRTEDLPKAVVFLEPQWYRVLEKDSVTLKCQGAYSPEDNSTQWFHNESLISSQASSYFIDAATVDDSGEYRCQTNLSTLSDPVQLEVHIGWLLLQAPRWVFKEEDPIHLRCHSWKNTALHKVTYLQNGKGRKYFHHNSDFYIPKATLKDSGSYFCRGLVGSKNVSSETVNITITQGLAVPTISSFFPPGYQVSFCLVMVLLFAVDTGLYFSVK

SEQ ID NO: 9671 - protein, 344 aa, synthetic construct
MALPVTALLLPLALLLHAARPDIQMTQSPSSLSASVGDRVTITCRASQDISNYLNWYQQKPGKAVKLLIYYTSILHSGVPSRFSGSGSGTDYTLTISSLQPEDFATYFCQQGNTLPWTFGGGTKVEIKTRGMRTEDLPKAVVFLEPQWYRVLEKDSVTLKCQGAYSPEDNSTQWFHNESLISSQASSYFIDAATVDDSGEYRCQTNLSTLSDPVQLEVHIGWLLLQAPRWVFKEEDPIHLRCHSWKNTALHKVTYLQNGKGRKYFHHNSDFYIPKATLKDSGSYFCRGLVGSKNVSSETVNITITQGLAVPTISSFFPPGYQVSFCLVMVLLFAVDTGLYFSVK

SEQ ID NO: 9672 - protein, 345 aa, synthetic construct
MALPVTALLLPLALLLHAARPDIVMTQSQRFMTTSVGDRVSVTCKASQSVDSNVAWYQQKPRQSPKALIFSASLRFSGVPARFTGSGSGTDFTLTISNLQSEDLAEYFCQQYNNYPLTFGAGTKLELKRTRGMRTEDLPKAVVFLEPQWYRVLEKDSVTLKCQGAYSPEDNSTQWFHNESLISSQASSYFIDAATVDDSGEYRCQTNLSTLSDPVQLEVHIGWLLLQAPRWVFKEEDPIHLRCHSWKNTALHKVTYLQNGKGRKYFHHNSDFYIPKATLKDSGSYFCRGLVGSKNVSSETVNITITQGLAVPTISSFFPPGYQVSFCLVMVLLFAVDTGLYFSVK

SEQ ID NO: 9673 - protein, 345 aa, synthetic construct
MALPVTALLLPLALLLHAARPDIQMTQSPSSLSASVGDRVTITCRASQDISNYLNWYQQKPGKAPKLLIYYTSILHSGVPSRFSGSGSGTDFTLTISSLQPEDFATYYCQQGNTLPWTFGQGTKVEIKRTRGMRTEDLPKAVVFLEPQWYRVLEKDSVTLKCQGAYSPEDNSTQWFHNESLISSQASSYFIDAATVDDSGEYRCQTNLSTLSDPVQLEVHIGWLLLQAPRWVFKEEDPIHLRCHSWKNTALHKVTYLQNGKGRKYFHHNSDFYIPKATLKDSGSYFCRGLVGSKNVSSETVNITITQGLAVPTISSFFPPGYQVSFCLVMVLLFAVDTGLYFSVK

SEQ ID NO: 9674 - protein, 345 aa, synthetic construct
MALPVTALLLPLALLLHAARPDIQMTQSPSSLSASVGDRVTITCKASDHINNWLAWYQQKPGKAPKLLIYGATTLETGVPSRFSGSGSGTDFTLTISSLQPEDFATYYCQQSWNTPWTFGQGTKVEIKRTRGMRTEDLPKAVVFLEPQWYRVLEKDSVTLKCQGAYSPEDNSTQWFHNESLISSQASSYFIDAATVDDSGEYRCQTNLSTLSDPVQLEVHIGWLLLQAPRWVFKEEDPIHLRCHSWKNTALHKVTYLQNGKGRKYFHHNSDFYIPKATLKDSGSYFCRGLVGSKNVSSETVNITITQGLAVPTISSFFPPGYQVSFCLVMVLLFAVDTGLYFSVK

SEQ ID NO: 9675 - protein, 345 aa, synthetic construct
MALPVTALLLPLALLLHAARPSYVLTQPPSVSVAPGQTARITCGGNNIGSKSVHWYQQPPGQAPVVVVYDDSDRPSGIPERFSGSNSGNTATLTISRVEAGDEAVYYCQVWDSSSDHVVFGGGTKLTVLTRGMRTEDLPKAVVFLEPQWYRVLEKDSVTLKCQGAYSPEDNSTQWFHNESLISSQASSYFIDAATVDDSGEYRCQTNLSTLSDPVQLEVHIGWLLLQAPRWVFKEEDPIHLRCHSWKNTALHKVTYLQNGKGRKYFHHNSDFYIPKATLKDSGSYFCRGLVGSKNVSSETVNITITQGLAVPTISSFFPPGYQVSFCLVMVLLFAVDTGLYFSVK

SEQ ID NO: 9676 - protein, 345 aa, synthetic construct
MALPVTALLLPLALLLHAARPDIQMTQSPSSLSASVGDRVTITCMASEDIYIRLAWYQQKPGKAPKLLIYAATSLETGVPSRFSGSGSGTDFTLTISSLQPEDFATYYCQQYWSSPWTFGQGTKVEIKRTRGMRTEDLPKAVVFLEPQWYRVLEKDSVTLKCQGAYSPEDNSTQWFHNESLISSQASSYFIDAATVDDSGEYRCQTNLSTLSDPVQLEVHIGWLLLQAPRWVFKEEDPIHLRCHSWKNTALHKVTYLQNGKGRKYFHHNSDFYIPKATLKDSGSYFCRGLVGSKNVSSETVNITITQGLAVPTISSFFPPGYQVSFCLVMVLLFAVDTGLYFSVK

SEQ ID NO: 9677 - protein, 349 aa, synthetic construct
MALPVTALLLPLALLLHAARPDIQMTQSPSSVSASVGDRVTITCRASESVDNYGISFMNWYQQKPGKAPKLLISAASNRATGVPSRFSGSGSGTDFTLTISSLQPEDFAIYYCQQSKEVPWTFGQGTKVEIKRTRGMRTEDLPKAVVFLEPQWYRVLEKDSVTLKCQGAYSPEDNSTQWFHNESLISSQASSYFIDAATVDDSGEYRCQTNLSTLSDPVQLEVHIGWLLLQAPRWVFKEEDPIHLRCHSWKNTALHKVTYLQNGKGRKYFHHNSDFYIPKATLKDSGSYFCRGLVGSKNVSSETVNITITQGLAVPTISSFFPPGYQVSFCLVMVLLFAVDTGLYFSVK

SEQ ID NO: 9678 - protein, 349 aa, synthetic construct
MALPVTALLLPLALLLHAARPDIQLTQSPSSLSASVGDRVTITCRASKSVSTSGYSYMHWYQQKPGKAPKLLIYLVSNLESGVPSRFSGSGSGTDFTLTISSLQPEDFATYYCQQFSELPWTFGQGTKVEIKRTRGMRTEDLPKAVVFLEPQWYRVLEKDSVTLKCQGAYSPEDNSTQWFHNESLISSQASSYFIDAATVDDSGEYRCQTNLSTLSDPVQLEVHIGWLLLQAPRWVFKEEDPIHLRCHSWKNTALHKVTYLQNGKGRKYFHHNSDFYIPKATLKDSGSYFCRGLVGSKNVSSETVNITITQGLAVPTISSFFPPGYQVSFCLVMVLLFAVDTGLYFSVK

SEQ ID NO: 9679 - protein, 346 aa, synthetic construct
MALPVTALLLPLALLLHAARPDIQMTQSPSSVSASVGDRVTITCRASQFISSSYLSWYQQKPGKAPKLLISGSSSRATGVPSRFSGSGSGTDFTLTISSLQPEDFAIYYCQQLYSSPMTFGQGTKVEIKRTRGMRTEDLPKAVVFLEPQWYRVLEKDSVTLKCQGAYSPEDNSTQWFHNESLISSQASSYFIDAATVDDSGEYRCQTNLSTLSDPVQLEVHIGWLLLQAPRWVFKEEDPIHLRCHSWKNTALHKVTYLQNGKGRKYFHHNSDFYIPKATLKDSGSYFCRGLVGSKNVSSETVNITITQGLAVPTISSFFPPGYQVSFCLVMVLLFAVDTGLYFSVK

SEQ ID NO: 9680 - protein, 360 aa, synthetic construct
MALPVTALLLPLALLLHAARPQVQLVESGGGLVQAGDSVTLSCTASGRTFSSYALAWFRQRPGKEREFVAGLRWGGPTNYADSVKDRFTISGDSAKHTMYLQMNSLKPEDTAVYYCGYNPGGWAVPSQYEYDSWGQGTQVTVSSTRGMRTEDLPKAVVFLEPQWYRVLEKDSVTLKCQGAYSPEDNSTQWFHNESLISSQASSYFIDAATVDDSGEYRCQTNLSTLSDPVQLEVHIGWLLLQAPRWVFKEEDPIHLRCHSWKNTALHKVTYLQNGKGRKYFHHNSDFYIPKATLKDSGSYFCRGLVGSKNVSSETVNITITQGLAVPTISSFFPPGYQVSFCLVMVLLFAVDTGLYFSVK

SEQ ID NO: 9681 - protein, 355 aa, synthetic construct
MALPVTALLLPLALLLHAARPQVQLQESGGGLAQAGGSLRLSCAASGRTFSMGWFRQAPGKEREFVAAITYSGGSPYYASSVRGRFTISRDNAKNTVYLQMNSLKPEDTAVYYCAANPTYGSDWNAENWGQGTQVTVSSTRGMRTEDLPKAVVFLEPQWYRVLEKDSVTLKCQGAYSPEDNSTQWFHNESLISSQASSYFIDAATVDDSGEYRCQTNLSTLSDPVQLEVHIGWLLLQAPRWVFKEEDPIHLRCHSWKNTALHKVTYLQNGKGRKYFHHNSDFYIPKATLKDSGSYFCRGLVGSKNVSSETVNITITQGLAVPTISSFFPPGYQVSFCLVMVLLFAVDTGLYFSVK

SEQ ID NO: 9682 - protein, 353 aa, synthetic construct
MALPVTALLLPLALLLHAARPEVQLVESGGGLVQPGGSLRLSCAASGFSFSDFWMSWVRQAPGKGLEWVATISQAGSEKDYVDSVKGRFTISRDNAKKSLYLQMNSLRAEDTAVYYCASGVYSFDYRGQGTLVTVSSTRGMRTEDLPKAVVFLEPQWYRVLEKDSVTLKCQGAYSPEDNSTQWFHNESLISSQASSYFIDAATVDDSGEYRCQTNLSTLSDPVQLEVHIGWLLLQAPRWVFKEEDPIHLRCHSWKNTALHKVTYLQNGKGRKYFHHNSDFYIPKATLKDSGSYFCRGLVGSKNVSSETVNITITQGLAVPTISSFFPPGYQVSFCLVMVLLFAVDTGLYFSVK

SEQ ID NO: 9683 - protein, 353 aa, synthetic construct
MALPVTALLLPLALLLHAARPEVQLVESGGGLVQPGGSLRLSCAASGFTFSNYWMSWVRQAPGKGQEWVATINQDGSDKDYVDSVKGRFTISRDNAKKSLYLQMNSLRAEDTAVYYCASGVYSFDYRGQGTLVTVSSTRGMRTEDLPKAVVFLEPQWYRVLEKDSVTLKCQGAYSPEDNSTQWFHNESLISSQASSYFIDAATVDDSGEYRCQTNLSTLSDPVQLEVHIGWLLLQAPRWVFKEEDPIHLRCHSWKNTALHKVTYLQNGKGRKYFHHNSDFYIPKATLKDSGSYFCRGLVGSKNVSSETVNITITQGLAVPTISSFFPPGYQVSFCLVMVLLFAVDTGLYFSVK

SEQ ID NO: 9684 - protein, 353 aa, synthetic construct
MALPVTALLLPLALLLHAARPEVQLVESGGGLVQPGGSLRLSCAASGIDFSRYWMSWVRQAPGKGLEWVATISQAGSEKDYVDSVKGRFTISRDNAKKSLYLQMNSLRAEDTAVYYCASGVYSFDYRGQGTLVTVSSTRGMRTEDLPKAVVFLEPQWYRVLEKDSVTLKCQGAYSPEDNSTQWFHNESLISSQASSYFIDAATVDDSGEYRCQTNLSTLSDPVQLEVHIGWLLLQAPRWVFKEEDPIHLRCHSWKNTALHKVTYLQNGKGRKYFHHNSDFYIPKATLKDSGSYFCRGLVGSKNVSSETVNITITQGLAVPTISSFFPPGYQVSFCLVMVLLFAVDTGLYFSVK

SEQ ID NO: 9685 - protein, 353 aa, synthetic construct
MALPVTALLLPLALLLHAARPEVQLVESGGGLVQPGGSLRLSCAASGIDFSRYWMSWVRQAPGKGQEWVATINQDGSDKDYVDSVKGRFTISRDNAKKSLYLQMNSLRAEDTAVYYCASGVYSFDYRGQGTLVTVSSTRGMRTEDLPKAVVFLEPQWYRVLEKDSVTLKCQGAYSPEDNSTQWFHNESLISSQASSYFIDAATVDDSGEYRCQTNLSTLSDPVQLEVHIGWLLLQAPRWVFKEEDPIHLRCHSWKNTALHKVTYLQNGKGRKYFHHNSDFYIPKATLKDSGSYFCRGLVGSKNVSSETVNITITQGLAVPTISSFFPPGYQVSFCLVMVLLFAVDTGLYFSVK

SEQ ID NO: 9686 - protein, 357 aa, synthetic construct
MALPVTALLLPLALLLHAARPEVQLVESGGGLVQPGGSLRLSCTFSGGTFSSYTMGWFRQAPGKEREFVAEVRWGGVTTYSNSLKDRFSISEDSVKNAVYLQMNSLKPEDTAVYYCAAVRQMYMTVVPDYWGQGTLVTVSSTRGMRTEDLPKAVVFLEPQWYRVLEKDSVTLKCQGAYSPEDNSTQWFHNESLISSQASSYFIDAATVDDSGEYRCQTNLSTLSDPVQLEVHIGWLLLQAPRWVFKEEDPIHLRCHSWKNTALHKVTYLQNGKGRKYFHHNSDFYIPKATLKDSGSYFCRGLVGSKNVSSETVNITITQGLAVPTISSFFPPGYQVSFCLVMVLLFAVDTGLYFSVK

SEQ ID NO: 9687 - protein, 355 aa, synthetic construct
MALPVTALLLPLALLLHAARPEVQLVESGGGLVQAGGSLRLSCAASGRTFSMGWFRQAPGKEREFVAAITYSGGSPYYADSVKGRFTISRDNAKNTVYLQMNSLKPEDTAVYYCAANPTYGSDWNAENWGQGTQVTVSSTRGMRTEDLPKAVVFLEPQWYRVLEKDSVTLKCQGAYSPEDNSTQWFHNESLISSQASSYFIDAATVDDSGEYRCQTNLSTLSDPVQLEVHIGWLLLQAPRWVFKEEDPIHLRCHSWKNTALHKVTYLQNGKGRKYFHHNSDFYIPKATLKDSGSYFCRGLVGSKNVSSETVNITITQGLAVPTISSFFPPGYQVSFCLVMVLLFAVDTGLYFSVK

SEQ ID NO: 9688 - protein, 355 aa, synthetic construct
MALPVTALLLPLALLLHAARPQLQLQESGPGLVKPSETLSLTCTVSGGSISSGDYYWGWIRQPPGKGLEWIGHIYYSGATYYNPSLKSRVTISVDTSRNQFSLKLSSVTAADTAVYYCTRDDSSNWRSRGQGTLVTVSSTRGMRTEDLPKAVVFLEPQWYRVLEKDSVTLKCQGAYSPEDNSTQWFHNESLISSQASSYFIDAATVDDSGEYRCQTNLSTLSDPVQLEVHIGWLLLQAPRWVFKEEDPIHLRCHSWKNTALHKVTYLQNGKGRKYFHHNSDFYIPKATLKDSGSYFCRGLVGSKNVSSETVNITITQGLAVPTISSFFPPGYQVSFCLVMVLLFAVDTGLYFSVK

SEQ ID NO: 9689 - protein, 355 aa, synthetic construct
MALPVTALLLPLALLLHAARPQLQLQESGPGLVKPSETLSLTCTVSGDSISSGDYYWGWIRQPPGKGLEWIGHIYYSGVTYYNPSLKSRVTISVDTSRNQFSLKLSSVTAADTAVYYCTREDSSNWRSRGQGTLVTVSSTRGMRTEDLPKAVVFLEPQWYRVLEKDSVTLKCQGAYSPEDNSTQWFHNESLISSQASSYFIDAATVDDSGEYRCQTNLSTLSDPVQLEVHIGWLLLQAPRWVFKEEDPIHLRCHSWKNTALHKVTYLQNGKGRKYFHHNSDFYIPKATLKDSGSYFCRGLVGSKNVSSETVNITITQGLAVPTISSFFPPGYQVSFCLVMVLLFAVDTGLYFSVK

SEQ ID NO: 9690 - protein, 355 aa, synthetic construct
MALPVTALLLPLALLLHAARPQLQLQESGPGLVKPSETLSLTCTVSGGSISSGDYYWGWIRQPPGKGLEWIGSISYSGSTYYNPSLKSRVTISVDTSRNQFSLKLSSVTAADTAVYYCTREDSSNWRSRGQGTLVTVSSTRGMRTEDLPKAVVFLEPQWYRVLEKDSVTLKCQGAYSPEDNSTQWFHNESLISSQASSYFIDAATVDDSGEYRCQTNLSTLSDPVQLEVHIGWLLLQAPRWVFKEEDPIHLRCHSWKNTALHKVTYLQNGKGRKYFHHNSDFYIPKATLKDSGSYFCRGLVGSKNVSSETVNITITQGLAVPTISSFFPPGYQVSFCLVMVLLFAVDTGLYFSVK

SEQ ID NO: 9691 - protein, 361 aa, synthetic construct
MALPVTALLLPLALLLHAARPQLQLQESGPGLVKPSETLALTCNVSGGSISSSSYYWGWIRQPPGKRLEWIGSIYYSGSTYFNPSLKSRVTISVDTSKNQFSLKLSSVTAADTAVYYCAGGDYYGPVGQWPSDYRGQGTLVTVSSTRGMRTEDLPKAVVFLEPQWYRVLEKDSVTLKCQGAYSPEDNSTQWFHNESLISSQASSYFIDAATVDDSGEYRCQTNLSTLSDPVQLEVHIGWLLLQAPRWVFKEEDPIHLRCHSWKNTALHKVTYLQNGKGRKYFHHNSDFYIPKATLKDSGSYFCRGLVGSKNVSSETVNITITQGLAVPTISSFFPPGYQVSFCLVMVLLFAVDTGLYFSVK

SEQ ID NO: 9692 - protein, 367 aa, synthetic construct
MALPVTALLLPLALLLHAARPEVQLLESGGGLVQPGGSLRLSCAASGFIFSSYAMSWVRQAPGKGQEWVSGVSGTGVNTYYADSVKGRFTISRDNSKNTLYLQMNSLRAEDTAVYYCASGKGWDSGSWYEDYRGQGTLVTVSSTRPRLCLLTRGMRTEDLPKAVVFLEPQWYRVLEKDSVTLKCQGAYSPEDNSTQWFHNESLISSQASSYFIDAATVDDSGEYRCQTNLSTLSDPVQLEVHIGWLLLQAPRWVFKEEDPIHLRCHSWKNTALHKVTYLQNGKGRKYFHHNSDFYIPKATLKDSGSYFCRGLVGSKNVSSETVNITITQGLAVPTISSFFPPGYQVSFCLVMVLLFAVDTGLYFSVK

SEQ ID NO: 9693 - protein, 361 aa, synthetic construct
MALPVTALLLPLALLLHAARPQLQLQESGPGLVKPSETLSLTCTVSGGSVSSSSYYWGWIRQPPGKRLELIGSIYYGGSTYFNPSLKSRVTISVDTSKNQFSLKLSSVTAADTAVYYCAGGDTYGPVGQWPSDYRGQGTLVTVSSTRGMRTEDLPKAVVFLEPQWYRVLEKDSVTLKCQGAYSPEDNSTQWFHNESLISSQASSYFIDAATVDDSGEYRCQTNLSTLSDPVQLEVHIGWLLLQAPRWVFKEEDPIHLRCHSWKNTALHKVTYLQNGKGRKYFHHNSDFYIPKATLKDSGSYFCRGLVGSKNVSSETVNITITQGLAVPTISSFFPPGYQVSFCLVMVLLFAVDTGLYFSVK

SEQ ID NO: 9694 - protein, 359 aa, synthetic construct
MALPVTALLLPLALLLHAARPEVQLLESGGGLVQPGGSLRLSCAASGFIFSIYAMSWVRQAPGKGLEWVSGISGSGVNTYYADSVKGRFIISRDNSRNTVYLQMNSLRADDTAVYHCANGKGWDGNTWYEDYRGQGTLVTVSSTRGMRTEDLPKAVVFLEPQWYRVLEKDSVTLKCQGAYSPEDNSTQWFHNESLISSQASSYFIDAATVDDSGEYRCQTNLSTLSDPVQLEVHIGWLLLQAPRWVFKEEDPIHLRCHSWKNTALHKVTYLQNGKGRKYFHHNSDFYIPKATLKDSGSYFCRGLVGSKNVSSETVNITITQGLAVPTISSFFPPGYQVSFCLVMVLLFAVDTGLYFSVK

SEQ ID NO: 9695 - protein, 354 aa, synthetic construct
MALPVTALLLPLALLLHAARPEVQVLESGGGLVQPGGSLRLSCAASGFTFSNFAMSWVRQAPGKGLEWVSTISGSAGTTDYADSVKGRFTISRDNSKKTLYLQMNSLRVEDTAVYYCADGRGPFFDYRGQGTLVTVSSTRGMRTEDLPKAVVFLEPQWYRVLEKDSVTLKCQGAYSPEDNSTQWFHNESLISSQASSYFIDAATVDDSGEYRCQTNLSTLSDPVQLEVHIGWLLLQAPRWVFKEEDPIHLRCHSWKNTALHKVTYLQNGKGRKYFHHNSDFYIPKATLKDSGSYFCRGLVGSKNVSSETVNITITQGLAVPTISSFFPPGYQVSFCLVMVLLFAVDTGLYFSVK

SEQ ID NO: 9696 - protein, 356 aa, synthetic construct
MALPVTALLLPLALLLHAARPEVQLVESGGGLVQPGGSLRLSCAASGFNIKDTCIGWVRRAPGKEEELVAKICKYSGHTRYADSVKGRFTISADTSKNTAYLQMNSLRAEDTAVYYCAAVSVRDGHYNYWGQGTTVTVSSTRGMRTEDLPKAVVFLEPQWYRVLEKDSVTLKCQGAYSPEDNSTQWFHNESLISSQASSYFIDAATVDDSGEYRCQTNLSTLSDPVQLEVHIGWLLLQAPRWVFKEEDPIHLRCHSWKNTALHKVTYLQNGKGRKYFHHNSDFYIPKATLKDSGSYFCRGLVGSKNVSSETVNITITQGLAVPTISSFFPPGYQVSFCLVMVLLFAVDTGLYFSVK

SEQ ID NO: 9697 - protein, 356 aa, synthetic construct
MALPVTALLLPLALLLHAARPEVQLVESGGGLVQPGGSLRLSCAASGFNIKDTCIGWVRRAPGKEEELVADICPYKGSTRYADSVKGRFTISADTSKNTAYLQMNSLRAEDTAVYYCAIVSARDGYYNYWGQGTTVTVSSTRGMRTEDLPKAVVFLEPQWYRVLEKDSVTLKCQGAYSPEDNSTQWFHNESLISSQASSYFIDAATVDDSGEYRCQTNLSTLSDPVQLEVHIGWLLLQAPRWVFKEEDPIHLRCHSWKNTALHKVTYLQNGKGRKYFHHNSDFYIPKATLKDSGSYFCRGLVGSKNVSSETVNITITQGLAVPTISSFFPPGYQVSFCLVMVLLFAVDTGLYFSVK

SEQ ID NO: 9698 - protein, 356 aa, synthetic construct
MALPVTALLLPLALLLHAARPEVQLLESGGGLVQPGGSLRLSCAASGFTFSSYAMSWVRQAPGKGLEWVSAITGSGGSTYYADSVKGRFTISRDNSKNTLYLQMNSLRAEDTAVYYCAKDEDGGSLLGHRGQGTLVTVSSTRGMRTEDLPKAVVFLEPQWYRVLEKDSVTLKCQGAYSPEDNSTQWFHNESLISSQASSYFIDAATVDDSGEYRCQTNLSTLSDPVQLEVHIGWLLLQAPRWVFKEEDPIHLRCHSWKNTALHKVTYLQNGKGRKYFHHNSDFYIPKATLKDSGSYFCRGLVGSKNVSSETVNITITQGLAVPTISSFFPPGYQVSFCLVMVLLFAVDTGLYFSVK

SEQ ID NO: 9699 - protein, 356 aa, synthetic construct
MALPVTALLLPLALLLHAARPEVQLLESGGGLIQPGGSLRLSCAASGFTFSSHAMTWVRQAPGKGLEWVSAISSGGSYTYYADSVKGRFTISRDNSKNTLYLQMNSLRAEDTAVYYCAKDEDGGSLLGHRGQGTLVTVSSTRGMRTEDLPKAVVFLEPQWYRVLEKDSVTLKCQGAYSPEDNSTQWFHNESLISSQASSYFIDAATVDDSGEYRCQTNLSTLSDPVQLEVHIGWLLLQAPRWVFKEEDPIHLRCHSWKNTALHKVTYLQNGKGRKYFHHNSDFYIPKATLKDSGSYFCRGLVGSKNVSSETVNITITQGLAVPTISSFFPPGYQVSFCLVMVLLFAVDTGLYFSVK

SEQ ID NO: 9700 - protein, 356 aa, synthetic construct
MALPVTALLLPLALLLHAARPEVQLVESGGGLVQPGGSLRLSCAASGFSFSDFWMSWVRQAPGKGLEWVSAISGSGDYTHYADSVKGRFTISRDNSKNTVYLQMNSLRAEDSAVYYCAKDEDGGSLLGHRGQGTLVTVSSTRGMRTEDLPKAVVFLEPQWYRVLEKDSVTLKCQGAYSPEDNSTQWFHNESLISSQASSYFIDAATVDDSGEYRCQTNLSTLSDPVQLEVHIGWLLLQAPRWVFKEEDPIHLRCHSWKNTALHKVTYLQNGKGRKYFHHNSDFYIPKATLKDSGSYFCRGLVGSKNVSSETVNITITQGLAVPTISSFFPPGYQVSFCLVMVLLFAVDTGLYFSVK

SEQ ID NO: 9701 - protein, 358 aa, synthetic construct
MALPVTALLLPLALLLHAARPEVQLLESGGGLVQPGGSLRLSCAASGFAFSIYDMSWVRQAPGKGLEWVSSISGSGDYIYYADSVKGRFTISRDISKNTLYLQMNSLRAEDTAVYYCAKEGTGANSSLADYRGQGTLVTVSSTRGMRTEDLPKAVVFLEPQWYRVLEKDSVTLKCQGAYSPEDNSTQWFHNESLISSQASSYFIDAATVDDSGEYRCQTNLSTLSDPVQLEVHIGWLLLQAPRWVFKEEDPIHLRCHSWKNTALHKVTYLQNGKGRKYFHHNSDFYIPKATLKDSGSYFCRGLVGSKNVSSETVNITITQGLAVPTISSFFPPGYQVSFCLVMVLLFAVDTGLYFSVK

SEQ ID NO: 9702 - protein, 358 aa, synthetic construct
MALPVTALLLPLALLLHAARPEVQLLESGGGLVQPGGSLRLSCAASGFTFSSYAMSWVRQAPGKGLEWVSSISGSGDYIYYADSVKGRFTISRDISKNTLYLQMNSLRAEDTAVYYCAKEGTGANSSLADYRGQGTLVTVSSTRGMRTEDLPKAVVFLEPQWYRVLEKDSVTLKCQGAYSPEDNSTQWFHNESLISSQASSYFIDAATVDDSGEYRCQTNLSTLSDPVQLEVHIGWLLLQAPRWVFKEEDPIHLRCHSWKNTALHKVTYLQNGKGRKYFHHNSDFYIPKATLKDSGSYFCRGLVGSKNVSSETVNITITQGLAVPTISSFFPPGYQVSFCLVMVLLFAVDTGLYFSVK

SEQ ID NO: 9703 - protein, 355 aa, synthetic construct
MALPVTALLLPLALLLHAARPQVQLVESGGGLVQPGGSLRLSCAASGFTFTNHAMSWVRQAPGKGLELVSSISGNGRTTYYADSVKGRFTISRDISKNTLDLQMNSLRAEDTAVYYCAKDGGETLVDSRGQGTLVTVSSTRGMRTEDLPKAVVFLEPQWYRVLEKDSVTLKCQGAYSPEDNSTQWFHNESLISSQASSYFIDAATVDDSGEYRCQTNLSTLSDPVQLEVHIGWLLLQAPRWVFKEEDPIHLRCHSWKNTALHKVTYLQNGKGRKYFHHNSDFYIPKATLKDSGSYFCRGLVGSKNVSSETVNITITQGLAVPTISSFFPPGYQVSFCLVMVLLFAVDTGLYFSVK

SEQ ID NO: 9704 - protein, 356 aa, synthetic construct
MALPVTALLLPLALLLHAARPEVQLLESGGGLIQPGGSLRLSCAASGFTFSSHAMTWVRQAPGKGLEWVSAISGSGDYTHYADSVKGRFTISRDNSKNTVYLQMNSLRAEDSAVYYCAKDEDGGSLLGHRGQGTLVTVSSTRGMRTEDLPKAVVFLEPQWYRVLEKDSVTLKCQGAYSPEDNSTQWFHNESLISSQASSYFIDAATVDDSGEYRCQTNLSTLSDPVQLEVHIGWLLLQAPRWVFKEEDPIHLRCHSWKNTALHKVTYLQNGKGRKYFHHNSDFYIPKATLKDSGSYFCRGLVGSKNVSSETVNITITQGLAVPTISSFFPPGYQVSFCLVMVLLFAVDTGLYFSVK

SEQ ID NO: 9705 - protein, 357 aa, synthetic construct
MALPVTALLLPLALLLHAARPQVQLQESGGGLVQAGDSLRLSCAASGRAVSSLFMGWFRRAPGKERELVAAISRYSLYTYYADSVKGRFTISADNAKNAVYLQMNSLKPEDTAVYYCASKLEYTSNDYDSWGQGTQVTVSSTRGMRTEDLPKAVVFLEPQWYRVLEKDSVTLKCQGAYSPEDNSTQWFHNESLISSQASSYFIDAATVDDSGEYRCQTNLSTLSDPVQLEVHIGWLLLQAPRWVFKEEDPIHLRCHSWKNTALHKVTYLQNGKGRKYFHHNSDFYIPKATLKDSGSYFCRGLVGSKNVSSETVNITITQGLAVPTISSFFPPGYQVSFCLVMVLLFAVDTGLYFSVK

SEQ ID NO: 9706 - protein, 357 aa, synthetic construct
MALPVTALLLPLALLLHAARPEVQLQESGGGLVQPGGSLRLSCAASGRTFSSLFMGWFRQAPGKERELVAAISRYSLYTYYADSVKGRFTISADNAKNAVYLQMNSLKPEDTAVYYCASKLEYTSNDYDSWGQGTQVTVSSTRGMRTEDLPKAVVFLEPQWYRVLEKDSVTLKCQGAYSPEDNSTQWFHNESLISSQASSYFIDAATVDDSGEYRCQTNLSTLSDPVQLEVHIGWLLLQAPRWVFKEEDPIHLRCHSWKNTALHKVTYLQNGKGRKYFHHNSDFYIPKATLKDSGSYFCRGLVGSKNVSSETVNITITQGLAVPTISSFFPPGYQVSFCLVMVLLFAVDTGLYFSVK

SEQ ID NO: 9707 - protein, 357 aa, synthetic construct
MALPVTALLLPLALLLHAARPEVQLQESGGGLVQPGGSLRLSCAASGRTFSSLFMGWVRQAPGKGLELVSAISRYSLYTYYADSVKGRFTISRDNAKNTLYLQMNSLRPEDTAVYYCASKLEYTSNDYDSWGQGTLVTVSSTRGMRTEDLPKAVVFLEPQWYRVLEKDSVTLKCQGAYSPEDNSTQWFHNESLISSQASSYFIDAATVDDSGEYRCQTNLSTLSDPVQLEVHIGWLLLQAPRWVFKEEDPIHLRCHSWKNTALHKVTYLQNGKGRKYFHHNSDFYIPKATLKDSGSYFCRGLVGSKNVSSETVNITITQGLAVPTISSFFPPGYQVSFCLVMVLLFAVDTGLYFSVK

SEQ ID NO: 9708 - protein, 365 aa, synthetic construct
MALPVTALLLPLALLLHAARPEVQLVESGGGLVQPGGSLRLSCEASGFASDDYIIGWFRQAPGKEREGVSCISSKYANTVYTDSVKGRFRLSRGTAKNTVYLQMSALKPEDTAVYYCAMDSRRVTCPEISTMHRNFDSWGQGTLVTVSSTRGMRTEDLPKAVVFLEPQWYRVLEKDSVTLKCQGAYSPEDNSTQWFHNESLISSQASSYFIDAATVDDSGEYRCQTNLSTLSDPVQLEVHIGWLLLQAPRWVFKEEDPIHLRCHSWKNTALHKVTYLQNGKGRKYFHHNSDFYIPKATLKDSGSYFCRGLVGSKNVSSETVNITITQGLAVPTISSFFPPGYQVSFCLVMVLLFAVDTGLYFSVK

SEQ ID NO: 9709 - protein, 365 aa, synthetic construct
MALPVTALLLPLALLLHAARPEVQLVESGGGLVQPGGSLRLSCAASGFASDYYIIGWFRQAPGKEREGVSCISSRYANTNYADSVKGRFTISRDNAKNTVYLQMNSLKPEDTAVYYCAADTRRYTCPDIATMHRNFDSWGQGTLVTVSSTRGMRTEDLPKAVVFLEPQWYRVLEKDSVTLKCQGAYSPEDNSTQWFHNESLISSQASSYFIDAATVDDSGEYRCQTNLSTLSDPVQLEVHIGWLLLQAPRWVFKEEDPIHLRCHSWKNTALHKVTYLQNGKGRKYFHHNSDFYIPKATLKDSGSYFCRGLVGSKNVSSETVNITITQGLAVPTISSFFPPGYQVSFCLVMVLLFAVDTGLYFSVK

SEQ ID NO: 9710 - protein, 361 aa, synthetic construct
MALPVTALLLPLALLLHAARPEVQLVESGGSLVQPGGSLRLSCAASGFTFDDYAMSWVRQVPGKGLEWVSSINWSGTHTDYADSVKGRFTISRNNANNTLYLQMNSLKSEDTAVYYCAKNWRDAGTTWFEKSGSAGQGTQVTVSSTRGMRTEDLPKAVVFLEPQWYRVLEKDSVTLKCQGAYSPEDNSTQWFHNESLISSQASSYFIDAATVDDSGEYRCQTNLSTLSDPVQLEVHIGWLLLQAPRWVFKEEDPIHLRCHSWKNTALHKVTYLQNGKGRKYFHHNSDFYIPKATLKDSGSYFCRGLVGSKNVSSETVNITITQGLAVPTISSFFPPGYQVSFCLVMVLLFAVDTGLYFSVK

SEQ ID NO: 9711 - protein, 355 aa, synthetic construct
MALPVTALLLPLALLLHAARPEVQLVESGGGLVQAGGSLRLSCAASGITFSINTMGWYRQAPGKQRELVALISSIGDTYYADSVKGRFTISRDNAKNTVYLQMNSLKPEDTAVYYCKRFRTAAQGTDYWGQGTQVTVSSTRGMRTEDLPKAVVFLEPQWYRVLEKDSVTLKCQGAYSPEDNSTQWFHNESLISSQASSYFIDAATVDDSGEYRCQTNLSTLSDPVQLEVHIGWLLLQAPRWVFKEEDPIHLRCHSWKNTALHKVTYLQNGKGRKYFHHNSDFYIPKATLKDSGSYFCRGLVGSKNVSSETVNITITQGLAVPTISSFFPPGYQVSFCLVMVLLFAVDTGLYFSVK

SEQ ID NO: 9712 - protein, 356 aa, synthetic construct
MALPVTALLLPLALLLHAARPEVQLVESGGGLVQPGGSLRLSCAASGSIFGFNDMAWYRQAPGKQRELVALISRVGVTSSADSVKGRFTISRVNAKDTVYLQMNSLKPEDTAVYYCYMDQRLDGSTLAYWGQGTQVTVSSTRGMRTEDLPKAVVFLEPQWYRVLEKDSVTLKCQGAYSPEDNSTQWFHNESLISSQASSYFIDAATVDDSGEYRCQTNLSTLSDPVQLEVHIGWLLLQAPRWVFKEEDPIHLRCHSWKNTALHKVTYLQNGKGRKYFHHNSDFYIPKATLKDSGSYFCRGLVGSKNVSSETVNITITQGLAVPTISSFFPPGYQVSFCLVMVLLFAVDTGLYFSVK

SEQ ID NO: 9713 - protein, 357 aa, synthetic construct
MALPVTALLLPLALLLHAARPDVQLVESGGGLVQPGGSLRLSCAASGSIGGLNAMAWYRQAPGKERELVAGIFGVGSTRYADSVKGRFTISRDNSKNTVYLQMNSLRPEDTAVYYCRMSSVTRGSSDYWGQGTLVTVSSLETRGMRTEDLPKAVVFLEPQWYRVLEKDSVTLKCQGAYSPEDNSTQWFHNESLISSQASSYFIDAATVDDSGEYRCQTNLSTLSDPVQLEVHIGWLLLQAPRWVFKEEDPIHLRCHSWKNTALHKVTYLQNGKGRKYFHHNSDFYIPKATLKDSGSYFCRGLVGSKNVSSETVNITITQGLAVPTISSFFPPGYQVSFCLVMVLLFAVDTGLYFSVK

SEQ ID NO: 9714 - protein, 362 aa, synthetic construct
MALPVTALLLPLALLLHAARPEVQLVESGGGLVQPGGSLRLSCAASGRTYYLNAMGWFRQAPGKEREFVAAIDWSEGNKDYADSVKGRFTISRDNSKNTVYLQMNSLRPEDTAVYYCAADTPPWGPLIYIESYDSWGQGTLVTVSSTRGMRTEDLPKAVVFLEPQWYRVLEKDSVTLKCQGAYSPEDNSTQWFHNESLISSQASSYFIDAATVDDSGEYRCQTNLSTLSDPVQLEVHIGWLLLQAPRWVFKEEDPIHLRCHSWKNTALHKVTYLQNGKGRKYFHHNSDFYIPKATLKDSGSYFCRGLVGSKNVSSETVNITITQGLAVPTISSFFPPGYQVSFCLVMVLLFAVDTGLYFSVK

SEQ ID NO: 9715 - protein, 360 aa, synthetic construct
MALPVTALLLPLALLLHAARPEVQLVESGGGSVQAGGSLRLSCAASGDTYGSYWMGWFRQAPGKEREGVAAINRGGGYTVYADSVKGRFTISRDTAKNTVYLQMNSLRPDDTADYYCAASGVLGGLHEDWFNYWGQGTLVTVSSTRGMRTEDLPKAVVFLEPQWYRVLEKDSVTLKCQGAYSPEDNSTQWFHNESLISSQASSYFIDAATVDDSGEYRCQTNLSTLSDPVQLEVHIGWLLLQAPRWVFKEEDPIHLRCHSWKNTALHKVTYLQNGKGRKYFHHNSDFYIPKATLKDSGSYFCRGLVGSKNVSSETVNITITQGLAVPTISSFFPPGYQVSFCLVMVLLFAVDTGLYFSVK

SEQ ID NO: 9716 - protein, 359 aa, synthetic construct
MALPVTALLLPLALLLHAARPVQLVESGGGSVQAGGSLRLSCAASGDTYGSYWMGWFRQAPGQEREAVAAINRGGGYTVYADSVKGRFTISRDNAKNTLYLQMNSLRPDDTADYYCAASGVLGGLHEDWFNYWGQGTLVTVSSTRGMRTEDLPKAVVFLEPQWYRVLEKDSVTLKCQGAYSPEDNSTQWFHNESLISSQASSYFIDAATVDDSGEYRCQTNLSTLSDPVQLEVHIGWLLLQAPRWVFKEEDPIHLRCHSWKNTALHKVTYLQNGKGRKYFHHNSDFYIPKATLKDSGSYFCRGLVGSKNVSSETVNITITQGLAVPTISSFFPPGYQVSFCLVMVLLFAVDTGLYFSVK

SEQ ID NO: 9717 - protein, 361 aa, synthetic construct
MALPVTALLLPLALLLHAARPEVQLVESGGGSVQTGGSLRLTCAASGRTSRSYGMGWFRQAPGKEREFVSGISWRGDSTGYADSVKGRFTISRDNAKNTVDLQMNSLKPEDTAIYYCAAAAGSAWYGTLYEYDYWGQGTLVTVSSTRGMRTEDLPKAVVFLEPQWYRVLEKDSVTLKCQGAYSPEDNSTQWFHNESLISSQASSYFIDAATVDDSGEYRCQTNLSTLSDPVQLEVHIGWLLLQAPRWVFKEEDPIHLRCHSWKNTALHKVTYLQNGKGRKYFHHNSDFYIPKATLKDSGSYFCRGLVGSKNVSSETVNITITQGLAVPTISSFFPPGYQVSFCLVMVLLFAVDTGLYFSVK

SEQ ID NO: 9718 - protein, 361 aa, synthetic construct
MALPVTALLLPLALLLHAARPEVQLVESGGGSVQAGGSLRLTCAASGSTSRSYGMGWFRQAPGKEREFVSGISWRGDSTGYADSVKGRFTISRDNAKNTVDLQMNSLKPEDTAIYYCAAAAGSTWYGTLYEYDYWGQGTLVTVSSTRGMRTEDLPKAVVFLEPQWYRVLEKDSVTLKCQGAYSPEDNSTQWFHNESLISSQASSYFIDAATVDDSGEYRCQTNLSTLSDPVQLEVHIGWLLLQAPRWVFKEEDPIHLRCHSWKNTALHKVTYLQNGKGRKYFHHNSDFYIPKATLKDSGSYFCRGLVGSKNVSSETVNITITQGLAVPTISSFFPPGYQVSFCLVMVLLFAVDTGLYFSVK

SEQ ID NO: 9719 - protein, 362 aa, synthetic construct
MALPVTALLLPLALLLHAARPDVQLVESGGGLVQPGGSLRLSCAASGFILDYYAIGWFRQAPGKEREGVLCIDASDDITYYADSVKGRFTISRDNSKNTVYLQMNSLRPEDTAVYYCATPIGLSSSCLLEYDYDYWGQGTLVTVSSTRGMRTEDLPKAVVFLEPQWYRVLEKDSVTLKCQGAYSPEDNSTQWFHNESLISSQASSYFIDAATVDDSGEYRCQTNLSTLSDPVQLEVHIGWLLLQAPRWVFKEEDPIHLRCHSWKNTALHKVTYLQNGKGRKYFHHNSDFYIPKATLKDSGSYFCRGLVGSKNVSSETVNITITQGLAVPTISSFFPPGYQVSFCLVMVLLFAVDTGLYFSVK

SEQ ID NO: 9720 - protein, 363 aa, synthetic construct
MALPVTALLLPLALLLHAARPEVQLVESGGGLVQAGDSLRLSCAASGRAFSRYAMGWFRQAPGKEREFVAAIGWGPSKTNYADSVKGRFTISRDNAKNTVYLQMNTLKPEDTAVYSCAAKFVNTDSTWSRSEMYTYWGQGTLVTVSSTRGMRTEDLPKAVVFLEPQWYRVLEKDSVTLKCQGAYSPEDNSTQWFHNESLISSQASSYFIDAATVDDSGEYRCQTNLSTLSDPVQLEVHIGWLLLQAPRWVFKEEDPIHLRCHSWKNTALHKVTYLQNGKGRKYFHHNSDFYIPKATLKDSGSYFCRGLVGSKNVSSETVNITITQGLAVPTISSFFPPGYQVSFCLVMVLLFAVDTGLYFSVK

SEQ ID NO: 9721 - protein, 359 aa, synthetic construct
MALPVTALLLPLALLLHAARPEVQLVESGGGLVQAGGSLRLSCVASGISSSKRNMGWYRQAPGKQRESVATISSGGNKDYTDAVKDRFTISRDTTKNTVYLQMNSLKPEDTAVYYCKIEAGTGWATRRGYTYWGQGTLVTVSSTRGMRTEDLPKAVVFLEPQWYRVLEKDSVTLKCQGAYSPEDNSTQWFHNESLISSQASSYFIDAATVDDSGEYRCQTNLSTLSDPVQLEVHIGWLLLQAPRWVFKEEDPIHLRCHSWKNTALHKVTYLQNGKGRKYFHHNSDFYIPKATLKDSGSYFCRGLVGSKNVSSETVNITITQGLAVPTISSFFPPGYQVSFCLVMVLLFAVDTGLYFSVK

SEQ ID NO: 9722 - protein, 349 aa, synthetic construct
MALPVTALLLPLALLLHAARPQVQLVQSGGGLVQPGGSLRLSCAASDFDFAAYEMSWVRQAPGQGLEWVAIISHDGIDKYYTDSVKGRFTISRDNSKNTLYLQMNTLRAEDTATYYCLRLGAVGQGTLVTVSSTRGMRTEDLPKAVVFLEPQWYRVLEKDSVTLKCQGAYSPEDNSTQWFHNESLISSQASSYFIDAATVDDSGEYRCQTNLSTLSDPVQLEVHIGWLLLQAPRWVFKEEDPIHLRCHSWKNTALHKVTYLQNGKGRKYFHHNSDFYIPKATLKDSGSYFCRGLVGSKNVSSETVNITITQGLAVPTISSFFPPGYQVSFCLVMVLLFAVDTGLYFSVK

SEQ ID NO: 9723 - protein, 357 aa, synthetic construct
MALPVTALLLPLALLLHAARPQVQLVQSGGGLVQPGGSLRLSCAASDFAFDDYEMSWVRQAPGKALEWIGDINHSGTTIYNPSLKSRVTISRDNSKNTLYLQMNTLRAEDTAIYYCARPHYGDYSDAFDIWGQGTMVTVSSTRGMRTEDLPKAVVFLEPQWYRVLEKDSVTLKCQGAYSPEDNSTQWFHNESLISSQASSYFIDAATVDDSGEYRCQTNLSTLSDPVQLEVHIGWLLLQAPRWVFKEEDPIHLRCHSWKNTALHKVTYLQNGKGRKYFHHNSDFYIPKATLKDSGSYFCRGLVGSKNVSSETVNITITQGLAVPTISSFFPPGYQVSFCLVMVLLFAVDTGLYFSVK

SEQ ID NO: 9724 - protein, 352 aa, synthetic construct
MALPVTALLLPLALLLHAARPEVQLVESGGGLVQPGNSLRLSCAASGFTFSSFGMSWVRQAPGKGLEWVSSISGSGSDTLYADSVKGRFTISRDNAKTTLYLQMNSLRPEDTAVYYCTIGGSLSRSSQGTLVTVSSTRGMRTEDLPKAVVFLEPQWYRVLEKDSVTLKCQGAYSPEDNSTQWFHNESLISSQASSYFIDAATVDDSGEYRCQTNLSTLSDPVQLEVHIGWLLLQAPRWVFKEEDPIHLRCHSWKNTALHKVTYLQNGKGRKYFHHNSDFYIPKATLKDSGSYFCRGLVGSKNVSSETVNITITQGLAVPTISSFFPPGYQVSFCLVMVLLFAVDTGLYFSVK

SEQ ID NO: 9725 - protein, 353 aa, synthetic construct
MALPVTALLLPLALLLHAARPEVQLVESGGGLVQAGGSLRLSCAASGSIFSGNVMGWYRRQAPGKEREWVAAIASGGSIYYRDSVKGRFTISRDNAKNTVYLQMNSLKPEDTAVYYCNSHPPTLPYWGLGTQVTVSSTRGMRTEDLPKAVVFLEPQWYRVLEKDSVTLKCQGAYSPEDNSTQWFHNESLISSQASSYFIDAATVDDSGEYRCQTNLSTLSDPVQLEVHIGWLLLQAPRWVFKEEDPIHLRCHSWKNTALHKVTYLQNGKGRKYFHHNSDFYIPKATLKDSGSYFCRGLVGSKNVSSETVNITITQGLAVPTISSFFPPGYQVSFCLVMVLLFAVDTGLYFSVK

SEQ ID NO: 9726 - protein, 363 aa, synthetic construct
MALPVTALLLPLALLLHAARPEVQLVESGGGSVQAGGSLRLSCTTSGRALNMYVMGWFRQAPGNEREFVAATSSSGGSTSYPDSVKGRFTISRDNAKNTVYLQMNSLKPEDTAAYRCAASPYVSTPTMNILEEYRYWGLGTQVTVSSTRGMRTEDLPKAVVFLEPQWYRVLEKDSVTLKCQGAYSPEDNSTQWFHNESLISSQASSYFIDAATVDDSGEYRCQTNLSTLSDPVQLEVHIGWLLLQAPRWVFKEEDPIHLRCHSWKNTALHKVTYLQNGKGRKYFHHNSDFYIPKATLKDSGSYFCRGLVGSKNVSSETVNITITQGLAVPTISSFFPPGYQVSFCLVMVLLFAVDTGLYFSVK

SEQ ID NO: 9727 - protein, 358 aa, synthetic construct
MALPVTALLLPLALLLHAARPEVQLVESGGGLVQPGGSLRLSCAASGSVFKINVMAWYRQAPGKGRELVAGIISGGSTSYADSVKGRFTISRDNAKNTLYLQMNSLRPEDTAVYYCAFITTESDYDLGRRYWGQGTLVTVSSTRGMRTEDLPKAVVFLEPQWYRVLEKDSVTLKCQGAYSPEDNSTQWFHNESLISSQASSYFIDAATVDDSGEYRCQTNLSTLSDPVQLEVHIGWLLLQAPRWVFKEEDPIHLRCHSWKNTALHKVTYLQNGKGRKYFHHNSDFYIPKATLKDSGSYFCRGLVGSKNVSSETVNITITQGLAVPTISSFFPPGYQVSFCLVMVLLFAVDTGLYFSVK

SEQ ID NO: 9728 - protein, 503 aa, synthetic construct
MALPVTALLLPLALLLHAARPEVQLVESGGGSVQTGGSLRLTCAASGRTSRSYGMGWFRQAPGKEREFVSGISWRGDSTGYADSVKGRFTISRDNAKNTVDLQMNSLKPEDTAIYYCAAAAGSAWYGTLYEYDYWGQGTLVTVSSLEGGGGSGGGGSGGGGSFEEVQLVESGGGSVQAGGSLRLSCAASGDTYGSYWMGWFRQAPGKEREGVAAINRGGGYTVYADSVKGRFTISRDTAKNTVYLQMNSLRPDDTADYYCAASGVLGGLHEDWFNYWGQGTLVTVSSTRGMRTEDLPKAVVFLEPQWYRVLEKDSVTLKCQGAYSPEDNSTQWFHNESLISSQASSYFIDAATVDDSGEYRCQTNLSTLSDPVQLEVHIGWLLLQAPRWVFKEEDPIHLRCHSWKNTALHKVTYLQNGKGRKYFHHNSDFYIPKATLKDSGSYFCRGLVGSKNVSSETVNITITQGLAVPTISSFFPPGYQVSFCLVMVLLFAVDTGLYFSVK

SEQ ID NO: 9729 - protein, 522 aa, synthetic construct
MALPVTALLLPLALLLHAARPEVQLVESGGGSVQAGGSLRLTCAASGSTSRSYGMGWFRQAPGKEREFVSGISWRGDSTGYADSVKGRFTISRDNAKNTVDLQMNSLKPEDTAIYYCAAAAGSTWYGTLYEYDYWGQGTLVTVSSLEGGGGSGGGGSGGGGSGSGGSGSGGSGSGGSGSGGSFEVQLVESGGGSVQAGGSLRLSCAASGDTYGSYWMGWFRQAPGQEREAVAAINRGGGYTVYADSVKGRFTISRDNAKNTLYLQMNSLRPDDTADYYCAASGVLGGLHEDWFNYWGQGTLVTVSSTRGMRTEDLPKAVVFLEPQWYRVLEKDSVTLKCQGAYSPEDNSTQWFHNESLISSQASSYFIDAATVDDSGEYRCQTNLSTLSDPVQLEVHIGWLLLQAPRWVFKEEDPIHLRCHSWKNTALHKVTYLQNGKGRKYFHHNSDFYIPKATLKDSGSYFCRGLVGSKNVSSETVNITITQGLAVPTISSFFPPGYQVSFCLVMVLLFAVDTGLYFSVK

SEQ ID NO: 9730 - protein, 512 aa, synthetic construct
MALPVTALLLPLALLLHAARPEVQLVESGGGLVQAGGSLRLSCAASGITFSINTMGWYRQAPGKQRELVALISSIGDTYYADSVKGRFTISRDNAKNTVYLQMNSLKPEDTAVYYCKRFRTAAQGTDYWGQGTQVTVSSLEGGGGSGGGGSGGGGSGSGGSGSGGSGSGGSGSGGSFEVQLVESGGGLVQPGGSLRLSCAASGSIFGFNDMAWYRQAPGKQRELVALISRVGVTSSADSVKGRFTISRVNAKDTVYLQMNSLKPEDTAVYYCYMDQRLDGSTLAYWGQGTQVTVSSTRGMRTEDLPKAVVFLEPQWYRVLEKDSVTLKCQGAYSPEDNSTQWFHNESLISSQASSYFIDAATVDDSGEYRCQTNLSTLSDPVQLEVHIGWLLLQAPRWVFKEEDPIHLRCHSWKNTALHKVTYLQNGKGRKYFHHNSDFYIPKATLKDSGSYFCRGLVGSKNVSSETVNITITQGLAVPTISSFFPPGYQVSFCLVMVLLFAVDTGLYFSVK

SEQ ID NO: 9731 - protein, 479 aa, synthetic construct; identical to SEQ ID NO: 9546

SEQ ID NO: 9732 - protein, 517 aa, synthetic construct
MALPVTALLLPLALLLHAARPDVQLVESGGGLVQPGGSLRLSCAASGSIGGLNAMAWYRQAPGKERELVAGIFGVGSTRYADSVKGRFTISRDNSKNTVYLQMNSLRPEDTAVYYCRMSSVTRGSSDYWGQGTLVTVSSLEGGGGSGGGGSGGGGSGSGGSGSGGSGSGGSGSGGSFEVQLVESGGSLVQPGGSLRLSCAASGFTFDDYAMSWVRQVPGKGLEWVSSINWSGTHTDYADSVKGRFTISRNNANNTLYLQMNSLKSEDTAVYYCAKNWRDAGTTWFEKSGSAGQGTQVTVSSTRGMRTEDLPKAVVFLEPQWYRVLEKDSVTLKCQGAYSPEDNSTQWFHNESLISSQASSYFIDAATVDDSGEYRCQTNLSTLSDPVQLEVHIGWLLLQAPRWVFKEEDPIHLRCHSWKNTALHKVTYLQNGKGRKYFHHNSDFYIPKATLKDSGSYFCRGLVGSKNVSSETVNITITQGLAVPTISSFFPPGYQVSFCLVMVLLFAVDTGLYFSVK

SEQ ID NO: 9733 - protein, 525 aa, synthetic construct
MALPVTALLLPLALLLHAARPDVQLVESGGGLVQPGGSLRLSCAASGFILDYYAIGWFRQAPGKEREGVLCIDASDDITYYADSVKGRFTISRDNSKNTVYLQMNSLRPEDTAVYYCATPIGLSSSCLLEYDYDYWGQGTLVTVSSLEGGSGSGGGGSGGGGSGSGGSGSGGSGSGGSGSGGSFEVQLVESGGGLVQPGGSLRLSCAASGRTYYLNAMGWFRQAPGKEREFVAAIDWSEGNKDYADSVKGRFTISRDNSKNTVYLQMNSLRPEDTAVYYCAADTPPWGPLIYIESYDSWGQGTLVTVSSTRGMRTEDLPKAVVFLEPQWYRVLEKDSVTLKCQGAYSPEDNSTQWFHNESLISSQASSYFIDAATVDDSGEYRCQTNLSTLSDPVQLEVHIGWLLLQAPRWVFKEEDPIHLRCHSWKNTALHKVTYLQNGKGRKYFHHNSDFYIPKATLKDSGSYFCRGLVGSKNVSSETVNITITQGLAVPTISSFFPPGYQVSFCLVMVLLFAVDTGLYFSVK

SEQ ID NO: 9734 - protein, 508 aa, synthetic construct
MALPVTALLLPLALLLHAARPQVQLVQSGGGLVQPGGSLRLSCAASDFDFAAYEMSWVRQAPGQGLEWVAIISHDGIDKYYTDSVKGRFTISRDNSKNTLYLQMNTLRAEDTATYYCLRLGAVGQGTLVTVSSLEGGGGSGGGGSGGGGSGSGGSGSGGSGSGGSGSGGSFEQVQLVQSGGGLVQPGGSLRLSCAASDFAFDDYEMSWVRQAPGKALEWIGDINHSGTTIYNPSLKSRVTISRDNSKNTLYLQMNTLRAEDTAIYYCARPHYGDYSDAFDIWGQGTMVTVSSTRGMRTEDLPKAVVFLEPQWYRVLEKDSVTLKCQGAYSPEDNSTQWFHNESLISSQASSYFIDAATVDDSGEYRCQTNLSTLSDPVQLEVHIGWLLLQAPRWVFKEEDPIHLRCHSWKNTALHKVTYLQNGKGRKYFHHNSDFYIPKATLKDSGSYFCRGLVGSKNVSSETVNITITQGLAVPTISSFFPPGYQVSFCLVMVLLFAVDTGLYFSVK

SEQ ID NO: 9735 - protein, 356 aa, synthetic construct
MALPVTALLLPLALLLHAARPQVKLEESGGGLVQAGRSLRLSCAASEHTFSSHVMGWFRQAPGKERESVAVIGWRDISTSYADSVKGRFTISRDNAKKTLYLQMNSLKPEDTAVYYCAARRIDAADFDSWGQGTQVTVSSTRGMRTEDLPKAVVFLEPQWYRVLEKDSVTLKCQGAYSPEDNSTQWFHNESLISSQASSYFIDAATVDDSGEYRCQTNLSTLSDPVQLEVHIGWLLLQAPRWVFKEEDPIHLRCHSWKNTALHKVTYLQNGKGRKYFHHNSDFYIPKATLKDSGSYFCRGLVGSKNVSSETVNITITQGLAVPTISSFFPPGYQVSFCLVMVLLFAVDTGLYFSVK

SEQ ID NO: 9736 - protein, 355 aa, synthetic construct
MALPVTALLLPLALLLHAARPEVQLVESGGGLVQAGGSLRLSCAASGRTFTMGWFRQAPGKEREFVAAISLSPTLAYYAESVKGRFTISRDNAKNTVVLQMNSLKPEDTALYYCAADRKSVMSIRPDYWGQGTQVTVSSTRGMRTEDLPKAVVFLEPQWYRVLEKDSVTLKCQGAYSPEDNSTQWFHNESLISSQASSYFIDAATVDDSGEYRCQTNLSTLSDPVQLEVHIGWLLLQAPRWVFKEEDPIHLRCHSWKNTALHKVTYLQNGKGRKYFHHNSDFYIPKATLKDSGSYFCRGLVGSKNVSSETVNITITQGLAVPTISSFFPPGYQVSFCLVMVLLFAVDTGLYFSVK

SEQ ID NO: 9737 - protein, 489 aa, synthetic construct
MALPVTALLLPLALLLHAARPQVKLEESGGGLVQAGRSLRLSCAASEHTFSSHVMGWFRQAPGKERESVAVIGWRDISTSYADSVKGRFTISRDNAKKTLYLQMNSLKPEDTAVYYCAARRIDAADFDSWGQGTQVTVSSGGGGSGGGGSGGGGSEVQLVESGGGLVQAGGSLRLSCAASGRTFTMGWFRQAPGKEREFVAAISLSPTLAYYAESVKGRFTISRDNAKNTVVLQMNSLKPEDTALYYCAADRKSVMSIRPDYWGQGTQVTVSSTRGMRTEDLPKAVVFLEPQWYRVLEKDSVTLKCQGAYSPEDNSTQWFHNESLISSQASSYFIDAATVDDSGEYRCQTNLSTLSDPVQLEVHIGWLLLQAPRWVFKEEDPIHLRCHSWKNTALHKVTYLQNGKGRKYFHHNSDFYIPKATLKDSGSYFCRGLVGSKNVSSETVNITITQGLAVPTISSFFPPGYQVSFCLVMVLLFAVDTGLYFSVK

SEQ ID NO: 9738 - protein, 353 aa, synthetic construct
MALPVTALLLPLALLLHAARPEVQLVESGGGLVQAGGSLRLSCIATGKVFSIYDMGWYRQAPGKQRELVAEITSSGTTHYDDFVSGRFTISRDNAKNTVYLQMNTLKAEDTAVYYCRANHVFGGSYWGQGTQVTVSSTRGMRTEDLPKAVVFLEPQWYRVLEKDSVTLKCQGAYSPEDNSTQWFHNESLISSQASSYFIDAATVDDSGEYRCQTNLSTLSDPVQLEVHIGWLLLQAPRWVFKEEDPIHLRCHSWKNTALHKVTYLQNGKGRKYFHHNSDFYIPKATLKDSGSYFCRGLVGSKNVSSETVNITITQGLAVPTISSFFPPGYQVSFCLVMVLLFAVDTGLYFSVK

SEQ ID NO: 9739 - protein, 359 aa, synthetic construct
MALPVTALLLPLALLLHAARPQVQLVESGGGLVQPGGSLRLSCEASGFTLDYYAIGWFRQAPGKEREGVICISRSDGSTYYADSVKGRFTISRDNAKKTVYLQMISLKPEDTAAYYCAAGADCSGYLRDYEFRGQGTQVTVSSTRGMRTEDLPKAVVFLEPQWYRVLEKDSVTLKCQGAYSPEDNSTQWFHNESLISSQASSYFIDAATVDDSGEYRCQTNLSTLSDPVQLEVHIGWLLLQAPRWVFKEEDPIHLRCHSWKNTALHKVTYLQNGKGRKYFHHNSDFYIPKATLKDSGSYFCRGLVGSKNVSSETVNITITQGLAVPTISSFFPPGYQVSFCLVMVLLFAVDTGLYFSVK

SEQ ID NO: 9740 - protein, 482 aa, synthetic construct
MALPVTALLLPLALLLHAARPEVQLVESGGGLVQAGGSLRLSCIATGKVFSIYDMGWYRQAPGKQRELVAEITSSGTTHYDDFVSGRFTISRDNAKNTVYLQMNTLKAEDTAVYYCRANHVFGGSYWGQGTQVTVSSEVAALEKQVQLVESGGGLVQPGGSLRLSCEASGFTLDYYAIGWFRQAPGKEREGVICISRSDGSTYYADSVKGRFTISRDNAKKTVYLQMISLKPEDTAAYYCAAGADCSGYLRDYEFRGQGTQVTVSSTRGMRTEDLPKAVVFLEPQWYRVLEKDSVTLKCQGAYSPEDNSTQWFHNESLISSQASSYFIDAATVDDSGEYRCQTNLSTLSDPVQLEVHIGWLLLQAPRWVFKEEDPIHLRCHSWKNTALHKVTYLQNGKGRKYFHHNSDFYIPKATLKDSGSYFCRGLVGSKNVSSETVNITITQGLAVPTISSFFPPGYQVSFCLVMVLLFAVDTGLYFSVK

SEQ ID NO: 9741 - protein, 365 aa, synthetic construct
MALPVTALLLPLALLLHAARPQVKLEESGGRLVQPRGSLRLSCAGSGRTFSTYGMAWFRQAPGKEREFVASKASMNYSGRTYYADSVKGRFTIARDNAKNMVFLQMNNLKPEDTAVYYCAAGTGCSTYGCFDAQIIDYWGKGTLVTVSSTRGMRTEDLPKAVVFLEPQWYRVLEKDSVTLKCQGAYSPEDNSTQWFHNESLISSQASSYFIDAATVDDSGEYRCQTNLSTLSDPVQLEVHIGWLLLQAPRWVFKEEDPIHLRCHSWKNTALHKVTYLQNGKGRKYFHHNSDFYIPKATLKDSGSYFCRGLVGSKNVSSETVNITITQGLAVPTISSFFPPGYQVSFCLVMVLLFAVDTGLYFSVK

SEQ ID NO: 9742 - protein, 356 aa, synthetic construct
MALPVTALLLPLALLLHAARPQVKLEESGGGLVQPGESLRLSCSASGSIFKVFRVFAMSWYRQGPGKQRELVASISSGETTTYADSVKGRFTISRDNAKNTAYLQMDSLKPEDTAVYYCNADHTFTGDFWGQGTQVTVSSTRGMRTEDLPKAVVFLEPQWYRVLEKDSVTLKCQGAYSPEDNSTQWFHNESLISSQASSYFIDAATVDDSGEYRCQTNLSTLSDPVQLEVHIGWLLLQAPRWVFKEEDPIHLRCHSWKNTALHKVTYLQNGKGRKYFHHNSDFYIPKATLKDSGSYFCRGLVGSKNVSSETVNITITQGLAVPTISSFFPPGYQVSFCLVMVLLFAVDTGLYFSVK

SEQ ID NO: 9743 - protein, 491 aa, synthetic construct
MALPVTALLLPLALLLHAARPQVKLEESGGRLVQPRGSLRLSCAGSGRTFSTYGMAWFRQAPGKEREFVASKASMNYSGRTYYADSVKGRFTIARDNAKNMVFLQMNNLKPEDTAVYYCAAGTGCSTYGCFDAQIIDYWGKGTLVTVSSEVAALEKQVKLEESGGGLVQPGESLRLSCSASGSIFKVFRVFAMSWYRQGPGKQRELVASISSGETTTYADSVKGRFTISRDNAKNTAYLQMDSLKPEDTAVYYCNADHTFTGDFWGQGTQVTVSSTRGMRTEDLPKAVVFLEPQWYRVLEKDSVTLKCQGAYSPEDNSTQWFHNESLISSQASSYFIDAATVDDSGEYRCQTNLSTLSDPVQLEVHIGWLLLQAPRWVFKEEDPIHLRCHSWKNTALHKVTYLQNGKGRKYFHHNSDFYIPKATLKDSGSYFCRGLVGSKNVSSETVNITITQGLAVPTISSFFPPGYQVSFCLVMVLLFAVDTGLYFSVK

SEQ ID NO: 9744 - protein, 354 aa, synthetic construct
MALPVTALLLPLALLLHAARPQVKLEESGGELVQPGGPLRLSCAASGNIFSINRMGWYRQAPGKQRAFVASITVRGITNYADSVKGRFTISVDKSKNTIYLQMNALKPEDTAVYYCNAVSSNRDPDYWGQGTQVTVSSTRGMRTEDLPKAVVFLEPQWYRVLEKDSVTLKCQGAYSPEDNSTQWFHNESLISSQASSYFIDAATVDDSGEYRCQTNLSTLSDPVQLEVHIGWLLLQAPRWVFKEEDPIHLRCHSWKNTALHKVTYLQNGKGRKYFHHNSDFYIPKATLKDSGSYFCRGLVGSKNVSSETVNITITQGLAVPTISSFFPPGYQVSFCLVMVLLFAVDTGLYFSVK

SEQ ID NO: 9745 - protein, 366 aa, synthetic construct
MALPVTALLLPLALLLHAARPPVQLVESGGGLVQAGDSLRLSCAASGRTFGIGTMGWFRQPPGKEREFVAAIRWSTGGTRYADSVKGRFTISRDNAKLTVDLQMDSLKPEDTAVYYCAADRLSLDLSGRYHYNPAVYDYWGQGTQVTVSSTRGMRTEDLPKAVVFLEPQWYRVLEKDSVTLKCQGAYSPEDNSTQWFHNESLISSQASSYFIDAATVDDSGEYRCQTNLSTLSDPVQLEVHIGWLLLQAPRWVFKEEDPIHLRCHSWKNTALHKVTYLQNGKGRKYFHHNSDFYIPKATLKDSGSYFCRGLVGSKNVSSETVNITITQGLAVPTISSFFPPGYQVSFCLVMVLLFAVDTGLYFSVK

SEQ ID NO: 9746 - protein, 498 aa, synthetic construct
MALPVTALLLPLALLLHAARPQVKLEESGGELVQPGGPLRLSCAASGNIFSINRMGWYRQAPGKQRAFVASITVRGITNYADSVKGRFTISVDKSKNTIYLQMNALKPEDTAVYYCNAVSSNRDPDYWGQGTQVTVSSGGGGSGGGGSGGGGSPVQLVESGGGLVQAGDSLRLSCAASGRTFGIGTMGWFRQPPGKEREFVAAIRWSTGGTRYADSVKGRFTISRDNAKLTVDLQMDSLKPEDTAVYYCAADRLSLDLSGRYHYNPAVYDYWGQGTQVTVSSTRGMRTEDLPKAVVFLEPQWYRVLEKDSVTLKCQGAYSPEDNSTQWFHNESLISSQASSYFIDAATVDDSGEYRCQTNLSTLSDPVQLEVHIGWLLLQAPRWVFKEEDPIHLRCHSWKNTALHKVTYLQNGKGRKYFHHNSDFYIPKATLKDSGSYFCRGLVGSKNVSSETVNITITQGLAVPTISSFFPPGYQVSFCLVMVLLFAVDTGLYFSVK

SEQ ID NO: 9747 - protein, 356 aa, synthetic construct
MALPVTALLLPLALLLHAARPAVQLVESGGGLVQAGDSLRLTCTASGRAFSTYFMAWFRQAPGKEREFVAGIAWSGGSTAYADSVKGRFTISRDNAKNTVYLQMNSLKSEDTAVYYCASRGIEVEEFGAWGQGTQVTVSSTRGMRTEDLPKAVVFLEPQWYRVLEKDSVTLKCQGAYSPEDNSTQWFHNESLISSQASSYFIDAATVDDSGEYRCQTNLSTLSDPVQLEVHIGWLLLQAPRWVFKEEDPIHLRCHSWKNTALHKVTYLQNGKGRKYFHHNSDFYIPKATLKDSGSYFCRGLVGSKNVSSETVNITITQGLAVPTISSFFPPGYQVSFCLVMVLLFAVDTGLYFSVK

SEQ ID NO: 9748 - protein, 357 aa, synthetic construct
MALPVTALLLPLALLLHAARPQVQLVESGGGLVQAGGSLRLSCAASGGTLSKNTVAWFRQAPGKERGFVASITWDGRTTYYADSVKGRFTISRDNAKNTVYLQMNSLKPEDTAVYVCADLGKWPAGPADYWGQGTQVTVSSTRGMRTEDLPKAVVFLEPQWYRVLEKDSVTLKCQGAYSPEDNSTQWFHNESLISSQASSYFIDAATVDDSGEYRCQTNLSTLSDPVQLEVHIGWLLLQAPRWVFKEEDPIHLRCHSWKNTALHKVTYLQNGKGRKYFHHNSDFYIPKATLKDSGSYFCRGLVGSKNVSSETVNITITQGLAVPTISSFFPPGYQVSFCLVMVLLFAVDTGLYFSVK

SEQ ID NO: 9749 - protein, 361 aa, synthetic construct
MALPVTALLLPLALLLHAARPGSDLGIKLLFAAAKGQDDEVRILLAAGADVNAKDFEGYTPLHVAAYDGHLEIVEVLLKAGADVNAKDSQGRTPLHEAAYSGHLEIVEVLLKAGADVNAQDDAGETPADLAAAWGHEDIAEVLQKTRGMRTEDLPKAVVFLEPQWYRVLEKDSVTLKCQGAYSPEDNSTQWFHNESLISSQASSYFIDAATVDDSGEYRCQTNLSTLSDPVQLEVHIGWLLLQAPRWVFKEEDPIHLRCHSWKNTALHKVTYLQNGKGRKYFHHNSDFYIPKATLKDSGSYFCRGLVGSKNVSSETVNITITQGLAVPTISSFFPPGYQVSFCLVMVLLFAVDTGLYFSVK

SEQ ID NO: 9750 - protein, 363 aa, synthetic construct
MALPVTALLLPLALLLHAARPRSDLGKKLLEAARAGQDDEVRILMANGADVNAKDEYGLTPLYLATAHGHLEIVEVLLKNGADVNAVDAIGFTPLHLAAFIGHLEIAEVLLKHGADVNAQDKFGKTAFDISIGNGNEDLAEILQKLNTRGMRTEDLPKAVVFLEPQWYRVLEKDSVTLKCQGAYSPEDNSTQWFHNESLISSQASSYFIDAATVDDSGEYRCQTNLSTLSDPVQLEVHIGWLLLQAPRWVFKEEDPIHLRCHSWKNTALHKVTYLQNGKGRKYFHHNSDFYIPKATLKDSGSYFCRGLVGSKNVSSETVNITITQGLAVPTISSFFPPGYQVSFCLVMVLLFAVDTGLYFSVK

SEQ ID NO: 9751 - protein, 295 aa, synthetic construct
MALPVTALLLPLALLLHAARPVDNKFNKERYSAYYEIWQLPNLNVRQKAAFIGSLQDDPSQSANLLAEAKKLNDAQAPKTRGMRTEDLPKAVVFLEPQWYRVLEKDSVTLKCQGAYSPEDNSTQWFHNESLISSQASSYFIDAATVDDSGEYRCQTNLSTLSDPVQLEVHIGWLLLQAPRWVFKEEDPIHLRCHSWKNTALHKVTYLQNGKGRKYFHHNSDFYIPKATLKDSGSYFCRGLVGSKNVSSETVNITITQGLAVPTISSFFPPGYQVSFCLVMVLLFAVDTGLYFSVK

SEQ ID NO: 9752 - protein, 288 aa, synthetic construct
MALPVTALLLPLALLLHAARPYAKEMRNAYWEIALLPNLTNQQKRAPIRKLYDDPSQSSELLSEAKKLNDSQTRGMRTEDLPKAVVFLEPQWYRVLEKDSVTLKCQGAYSPEDNSTQWFHNESLISSQASSYFIDAATVDDSGEYRCQTNLSTLSDPVQLEVHIGWLLLQAPRWVFKEEDPIHLRCHSWKNTALHKVTYLQNGKGRKYFHHNSDFYIPKATLKDSGSYFCRGLVGSKNVSSETVNITITQGLAVPTISSFFPPGYQVSFCLVMVLLFAVDTGLYFSVK

SEQ ID NO: 9753 - protein, 288 aa, synthetic construct
MALPVTALLLPLALLLHAARPYAKEMWIAWEEIRNLPNLNGWQMTAFIAKLLDDPSQSSELLSEAKKLNDSQTRGMRTEDLPKAVVFLEPQWYRVLEKDSVTLKCQGAYSPEDNSTQWFHNESLISSQASSYFIDAATVDDSGEYRCQTNLSTLSDPVQLEVHIGWLLLQAPRWVFKEEDPIHLRCHSWKNTALHKVTYLQNGKGRKYFHHNSDFYIPKATLKDSGSYFCRGLVGSKNVSSETVNITITQGLAVPTISSFFPPGYQVSFCLVMVLLFAVDTGLYFSVK

SEQ ID NO: 9754 - protein, 326 aa, synthetic construct
MALPVTALLLPLALLLHAARPLPAPKNLVVSRVTEDSARLSWTAPDAAFDSFAIGYWEWDDDGEAIVLTVPGSERSYDLTGLKPGTEYPVYIAGVKGGQWSFPLSAIFTTTRGMRTEDLPKAVVFLEPQWYRVLEKDSVTLKCQGAYSPEDNSTQWFHNESLISSQASSYFIDAATVDDSGEYRCQTNLSTLSDPVQLEVHIGWLLLQAPRWVFKEEDPIHLRCHSWKNTALHKVTYLQNGKGRKYFHHNSDFYIPKATLKDSGSYFCRGLVGSKNVSSETVNITITQGLAVPTISSFFPPGYQVSFCLVMVLLFAVDTGLYFSVK

SEQ ID NO: 9755 - protein, 328 aa, synthetic construct
MALPVTALLLPLALLLHAARPLPAPKNLVVSRVTEDSARLSWAIDEQRDWFESFLIQYQESEKVGEAIVLTVPGSERSYDLTGLKPGTEYTVSIYGVYHVYRSNPLSAIFTTTRGMRTEDLPKAVVFLEPQWYRVLEKDSVTLKCQGAYSPEDNSTQWFHNESLISSQASSYFIDAATVDDSGEYRCQTNLSTLSDPVQLEVHIGWLLLQAPRWVFKEEDPIHLRCHSWKNTALHKVTYLQNGKGRKYFHHNSDFYIPKATLKDSGSYFCRGLVGSKNVSSETVNITITQGLAVPTISSFFPPGYQVSFCLVMVLLFAVDTGLYFSVK

SEQ ID NO: 9756 - protein, 326 aa, synthetic construct
MALPVTALLLPLALLLHAARPLPAPKNLVVSRVTEDSARLSWTAPDAAFDSFPIGYWEWDDDGEAIVLTVPGSERSYDLTGLKPGTEYHVYIAGVKGGQWSFPLSAIFTTTRGMRTEDLPKAVVFLEPQWYRVLEKDSVTLKCQGAYSPEDNSTQWFHNESLISSQASSYFIDAATVDDSGEYRCQTNLSTLSDPVQLEVHIGWLLLQAPRWVFKEEDPIHLRCHSWKNTALHKVTYLQNGKGRKYFHHNSDFYIPKATLKDSGSYFCRGLVGSKNVSSETVNITITQGLAVPTISSFFPPGYQVSFCLVMVLLFAVDTGLYFSVK

SEQ ID NO: 9757 - protein, 331 aa, synthetic construct
MALPVTALLLPLALLLHAARPLPAPKNLVVSEVTEDSARLSWDDPWAFYESFLIQYQESEKVGEAIVLTVPGSERSYDLTGLKPGTEYTVSIYGVHNVYKDTNMRGLPLSAIFTTTRGMRTEDLPKAVVFLEPQWYRVLEKDSVTLKCQGAYSPEDNSTQWFHNESLISSQASSYFIDAATVDDSGEYRCQTNLSTLSDPVQLEVHIGWLLLQAPRWVFKEEDPIHLRCHSWKNTALHKVTYLQNGKGRKYFHHNSDFYIPKATLKDSGSYFCRGLVGSKNVSSETVNITITQGLAVPTISSFFPPGYQVSFCLVMVLLFAVDTGLYFSVK

SEQ ID NO: 9758 - protein, 326 aa, synthetic construct
MALPVTALLLPLALLLHAARPLPAPKNLVVSRVTEDSARLSWTAPDAAFDSFWIRYFEFLGSGEAIVLTVPGSERSYDLTGLKPGTEYVVNIMGVKGGKISPPLSAIFTTTRGMRTEDLPKAVVFLEPQWYRVLEKDSVTLKCQGAYSPEDNSTQWFHNESLISSQASSYFIDAATVDDSGEYRCQTNLSTLSDPVQLEVHIGWLLLQAPRWVFKEEDPIHLRCHSWKNTALHKVTYLQNGKGRKYFHHNSDFYIPKATLKDSGSYFCRGLVGSKNVSSETVNITITQGLAVPTISSFFPPGYQVSFCLVMVLLFAVDTGLYFSVK

SEQ ID NO: 9759 - protein, 430 aa, synthetic construct
MALPVTALLLPLALLLHAARPLPAPKNLVVSEVTEDSARLSWDDPWAFYESFLIQYQESEKVGEAIVLTVPGSERSYDLTGLKPGTEYTVSIYGVHNVYKDTNMRGLPLSAIFTTAPAPAPAPAPLPAPKNLVVSRVTEDSARLSWTAPDAAFDSFWIRYFEFLGSGEAIVLTVPGSERSYDLTGLKPGTEYVVNIMGVKGGKISPPLSAIFTTTRGMRTEDLPKAVVFLEPQWYRVLEKDSVTLKCQGAYSPEDNSTQWFHNESLISSQASSYFIDAATVDDSGEYRCQTNLSTLSDPVQLEVHIGWLLLQAPRWVFKEEDPIHLRCHSWKNTALHKVTYLQNGKGRKYFHHNSDFYIPKATLKDSGSYFCRGLVGSKNVSSETVNITITQGLAVPTISSFFPPGYQVSFCLVMVLLFAVDTGLYFSVK

SEQ ID NO: 9760 - protein, 327 aa, synthetic construct
MALPVTALLLPLALLLHAARPMLPAPKNLVVSRITEDSARLSWTAPDAAFDSFPIRYIETLIWGEAIWLDVPGSERSYDLTGLKPGTEYAVVITGVKGGRFSSPLVASFTTTRGMRTEDLPKAVVFLEPQWYRVLEKDSVTLKCQGAYSPEDNSTQWFHNESLISSQASSYFIDAATVDDSGEYRCQTNLSTLSDPVQLEVHIGWLLLQAPRWVFKEEDPIHLRCHSWKNTALHKVTYLQNGKGRKYFHHNSDFYIPKATLKDSGSYFCRGLVGSKNVSSETVNITITQGLAVPTISSFFPPGYQVSFCLVMVLLFAVDTGLYFSVK

SEQ ID NO: 9761 - protein, 803 aa, synthetic construct
MALPVTALLLPLALLLHAARPEWVKFAKPCREGEDNSKRNPIAKITSDYQATQKITYRISGVGIDQPPFGIFVVDKNTGDINITAIVDREETPSFLITCRALNAQGLDVEKPLILTVKILDINDNPPVFSQQIFMGEIEENSASNSLVMILNATDADEPNHLNSKIAFKIVSQEPAGTPMFLLSRNTGEVRTLTNSLDREQASSYRLVVSGADKDGEGLSTQCECNIKVKDVNDNFPMFRDSQYSARIEENILSSELLRFQVTDLDEEYTDNWLAVYFFTSGNEGNWFEIQTDPRTNEGILKVVKALDYEQLQSVKLSIAVKNKAEFHQSVISRYRVQSTPVTIQVINVREGIAFRPASKTFTVQKGISSKKLVDYILGTYQAIDEDTNKAASNVKYVMGRNDGGYLMIDSKTAEIKFVKNMNRDSTFIVNKTITAEVLAIDEYTGKTSTGTVYVRVPDFNDNCPTAVLEKDAVCSSSPSVVVSARTLNNRYTGPYTFALEDQPVKLPAVWSITTLNATSALLRAQEQIPPGVYHISLVLTDSQNNRCEMPRSLTLEVCQCDNRGICGTSYPTTSPGTRYGRPHSGRTRGMRTEDLPKAVVFLEPQWYRVLEKDSVTLKCQGAYSPEDNSTQWFHNESLISSQASSYFIDAATVDDSGEYRCQTNLSTLSDPVQLEVHIGWLLLQAPRWVFKEEDPIHLRCHSWKNTALHKVTYLQNGKGRKYFHHNSDFYIPKATLKDSGSYFCRGLVGSKNVSSETVNITITQGLAVPTISSFFPPGYQVSFCLVMVLLFAVDTGLYFSVK

SEQ ID NO: 9762 - protein, 544 aa, synthetic construct
MALPVTALLLPLALLLHAARPMALPVTALLLPLALLLHAARPLFNQEVQIPLTESYCGPCPKNWICYKNNCYQFFDESKNWYESQASCMSQNASLLKVYSKEDQDLLKLVKSYHWMGLVHIPTNGSWQWEDGSILSPNLLTIIEMQKGDCALYASSFKGYIENCSTPNTYICMQRTVGGGGSGGGGSGGGGSDLFNQEVQIPLTESYCGPCPKNWICYKNNCYQFFDESKNWYESQASCMSQNASLLKVYSKEDQDLLKLVKSYHWMGLVHIPTNGSWQWEDGSILSPNLLTIIEMQKGDCALYASSFKGYIENCSTPNTYICMQRTVTRGMRTEDLPKAVVFLEPQWYRVLEKDSVTLKCQGAYSPEDNSTQWFHNESLISSQASSYFIDAATVDDSGEYRCQTNLSTLSDPVQLEVHIGWLLLQAPRWVFKEEDPIHLRCHSWKNTALHKVTYLQNGKGRKYFHHNSDFYIPKATLKDSGSYFCRGLVGSKNVSSETVNITITQGLAVPTISSFFPPGYQVSFCLVMVLLFAVDTGLYFSVK

SEQ ID NO: 9763 - protein, 424 aa, synthetic construct
MALPVTALLLPLALLLHAARPMELTDLLLAAMLLAVARLTLSSPVAPACDPRLLNKLLRDSHLLHSRLSQCPDVDPLSIPVLLPAVDFSLGEWKTQTEQSKAQDILGAVSLLLEGVMAARGQLEPSCLSSLLGQLSGQVRLLLGALQGLLGTQLPLQGRTTAHKDPNALFLSLQQLLRGKVRFLLLVEGPTLCVRRTLPTTAVPSSTSTRGMRTEDLPKAVVFLEPQWYRVLEKDSVTLKCQGAYSPEDNSTQWFHNESLISSQASSYFIDAATVDDSGEYRCQTNLSTLSDPVQLEVHIGWLLLQAPRWVFKEEDPIHLRCHSWKNTALHKVTYLQNGKGRKYFHHNSDFYIPKATLKDSGSYFCRGLVGSKNVSSETVNITITQGLAVPTISSFFPPGYQVSFCLVMVLLFAVDTGLYFSVK

SEQ ID NO: 9764 - protein, 290 aa, synthetic construct
MALPVTALLLPLALLLHAARPMDPDLEIRAAFLRQRNTALRTEVAELEQEVQRLENEVSQYETRYGPLGGGKTRTRGMRTEDLPKAVVFLEPQWYRVLEKDSVTLKCQGAYSPEDNSTQWFHNESLISSQASSYFIDAATVDDSGEYRCQTNLSTLSDPVQLEVHIGWLLLQAPRWVFKEEDPIHLRCHSWKNTALHKVTYLQNGKGRKYFHHNSDFYIPKATLKDSGSYFCRGLVGSKNVSSETVNITITQGLAVPTISSFFPPGYQVSFCLVMVLLFAVDTGLYFSVK

SEQ ID NO: 9765 - protein, 265 aa, synthetic construct
MALPVTALLLPLALLLHAARPEVAALEKEVAALEKEVAALEKEVAALEKTRGMRTEDLPKAVVFLEPQWYRVLEKDSVTLKCQGAYSPEDNSTQWFHNESLISSQASSYFIDAATVDDSGEYRCQTNLSTLSDPVQLEVHIGWLLLQAPRWVFKEEDPIHLRCHSWKNTALHKVTYLQNGKGRKYFHHNSDFYIPKATLKDSGSYFCRGLVGSKNVSSETVNITITQGLAVPTISSFFPPGYQVSFCLVMVLLFAVDTGLYFSVK

SEQ ID NO: 9766 - protein, 523 aa, synthetic construct
MALPVTALLLPLALLLHAARPLFNQEVQIPLTESYCGPCPKNWICYKNNCYQFFDESKNWYESQASCMSQNASLLKVYSKEDQDLLKLVKSAHWMGLVHIPTNGSWQWEDGSILSPNLLTIIEMQKGDCALYASSFKGFIENCSTPNTYICMQRTVGGGGSGGGGSGGGGSDLFNQEVQIPLTESYCGPCPKNWICYKNNCYQFFDESKNWYESQASCMSQNASLLKVYSKEDQDLLKLVKSAHWMGLVHIPTNGSWQWEDGSILSPNLLTIIEMQKGDCALYASSFKGFIENCSTPNTYICMQRTVTRGMRTEDLPKAVVFLEPQWYRVLEKDSVTLKCQGAYSPEDNSTQWFHNESLISSQASSYFIDAATVDDSGEYRCQTNLSTLSDPVQLEVHIGWLLLQAPRWVFKEEDPIHLRCHSWKNTALHKVTYLQNGKGRKYFHHNSDFYIPKATLKDSGSYFCRGLVGSKNVSSETVNITITQGLAVPTISSFFPPGYQVSFCLVMVLLFAVDTGLYFSVK

SEQ ID NO: 9767 - protein, 523 aa, synthetic construct
MALPVTALLLPLALLLHAARPLFNQEVQIPLTESYCGPCPKNWICYKNNCYQFFDESKNWYESQASCMSQNASLLKVYSKEDQDLLKLVKSAHWMGLVHIPTNGSWQWEDGSILSPNLLTIIEMQKGDCALYASSFKGYIENCSTPNTYICMQRTVSGGGGSGGGGSGGGGDLFNQEVQIPLTESYCGPCPKNWICYKNNCYQFFDESKNWYESQASCMSQNASLLKVYSKEDQDLLKLVKSAHWMGLVHIPTNGSWQWEDGSILSPNLLTIIEMQKGDCALYASSFKGYIENCSTPNTYICMQRTVTRGMRTEDLPKAVVFLEPQWYRVLEKDSVTLKCQGAYSPEDNSTQWFHNESLISSQASSYFIDAATVDDSGEYRCQTNLSTLSDPVQLEVHIGWLLLQAPRWVFKEEDPIHLRCHSWKNTALHKVTYLQNGKGRKYFHHNSDFYIPKATLKDSGSYFCRGLVGSKNVSSETVNITITQGLAVPTISSFFPPGYQVSFCLVMVLLFAVDTGLYFSVK

SEQ ID NO: 9768 - protein, 709 aa, synthetic construct
MALPVTALLLPLALLLHAARPDIQMTQSPSSLSASVGDRVTITCKASQDVGTAVDWYQQKPGKAPKLLIYWASTRHTGVPSRFSGSGSGTDFTLTISSLQPEDFATYYCQQYNSYPLTFGQGTKVEIKRLEDLKNVFPPEVAVFEPSEAEISHTQKATLVCLATGFYPDHVELSWWVNGKEVHSGVSTDPQPLKEQPALNDSRYCLSSRLRVSATFWQNPRNHFRCQVQFYGLSENDEWTQDRAKPVTQIVSAEAWGRADCGSQSFGLLDPKLCYLLDGILFIYGVILTALFLRVKFSRSADAPAYQQGQNQLYNELNLGRREEYDVLDKRRGRDPEMGGKPQRRKNPQEGLYNELQKDKMAEAYSEIGMKGERRRGKGHDGLYQGLSTATKDTYDALHMQALPPRRAKRSGSGATNFSLLKQAGDVEENPGPTSMDWIWRILFLVGAATGAHSFEVQLVESGGGLVQPGGSLRLSCAASGYTFTEYTIHWVRQAPGKGLEWVANINPNNGGTTYNQKFEDRFTISRDNSKNTLYLQMNSLRAEDTAVYYCARGWNFDYWGQGTLVTVSSTRIQNPDPAVYQLRDSKSSDKSVCLFTDFDSQTNVSQSKDSDVYITDKTVLDMRSMDFKSNSAVAWSNKSDFACANAFNNSIIPEDTFFPSPESSCGTITQGLAVPTISSFFPPGYQVSFCLVMVLLFAVDTGLYFSVK

SEQ ID NO: 9769 - protein, 634 aa, synthetic construct
MALPVTALLLPLALLLHAARPDIQMTQSPSSLSASVGDRVTITCKASQDVGTAVDWYQQKPGKAPKLLIYWASTRHTGVPSRFSGSGSGTDFTLTISSLQPEDFATYYCQQYNSYPLTFGQGTKVEIKRLEDLKNVFPPEVAVFEPSEAEISHTQKATLVCLATGFYPDHVELSWWVNGKEVHSGVSTDPQPLKEQPALNDSRYCLSSRLRVSATFWQNPRNHFRCQVQFYGLSENDEWTQDRAKPVTQIVSAEAWGRADCGSLGEPQLCYILDAILFLYGIVLTLLYCRLKIQVRKAAITSYEKSDGVYTGLSTRNQETYETLKHEKPPQRAKRSGSGATNFSLLKQAGDVEENPGPTSMDWIWRILFLVGAATGAHSFEVQLVESGGGLVQPGGSLRLSCAASGYTFTEYTIHWVRQAPGKGLEWVANINPNNGGTTYNQKFEDRFTISRDNSKNTLYLQMNSLRAEDTAVYYCARGWNFDYWGQGTLVTVSSTRIQNPDPAVYQLRDSKSSDKSVCLFTDFDSQTNVSQSKDSDVYITDKTVLDMRSMDFKSNSAVAWSNKSDFACANAFNNSIIPEDTFFPSPESSCGTITQGLAVPTISSFFPPGYQVSFCLVMVLLFAVDTGLYFSVK

SEQ ID NO: 9770 - protein, 610 aa, synthetic construct
MALPVTALLLPLALLLHAARPDIQMTQSPSSLSASVGDRVTITCKASQDVGTAVDWYQQKPGKAPKLLIYWASTRHTGVPSRFSGSGSGTDFTLTISSLQPEDFATYYCQQYNSYPLTFGQGTKVEIKRLEGQPKANPTVTLFPPSSEELQANKATLVCLISDFYPGAVTVAWKADGSPVKAGVETTKPSKQSNNKYAASSYLSLTPEQWKSHRSYSCQVTHEGSTVEKTVAPTECSGSLGEPQLCYILDAILFLYGIVLTLLYCRLKIQVRKAAITSYEKSDGVYTGLSTRNQETYETLKHEKPPQRAKRSGSGATNFSLLKQAGDVEENPGPTSMDWIWRILFLVGAATGAHSFEVQLVESGGGLVQPGGSLRLSCAASGYTFTEYTIHWVRQAPGKGLEWVANINPNNGGTTYNQKFEDRFTISRDNSKNTLYLQMNSLRAEDTAVYYCARGWNFDYWGQGTLVTVSSTRIQNPDPAVYQLRDSKSSDKSVCLFTDFDSQTNVSQSKDSDVYITDKTVLDMRSMDFKSNSAVAWSNKSDFACANAFNNSIIPEDTFFPSPESSCGTITQGLAVPTISSFFPPGYQVSFCLVMVLLFAVDTGLYFSVK

SEQ ID NO: 9771 - protein, 619 aa, synthetic construct
MALPVTALLLPLALLLHAARPDIQMTQSPSSLSASVGDRVTITCKASQDVGTAVDWYQQKPGKAPKLLIYWASTRHTGVPSRFSGSGSGTDFTLTISSLQPEDFATYYCQQYNSYPLTFGQGTKVEIKRLEGQPKANPTVTLFPPSSEELQANKATLVCLISDFYPGAVTVAWKADGSPVKAGVETTKPSKQSNNKYAASSYLSLTPEQWKSHRSYSCQVTHEGSTVEKTVAPTECSGSLGEPQLCYILDAILFLYGIVLTLLYCRLKIQVRKAAITSYEKSDGVYTGLSTRNQETYETLKHEKPPQRAKRSGSGATNFSLLKQAGDVEENPGPTSMDWIWRILFLVGAATGAHSFEVQLVESGGGLVQPGGSLRLSCAASGYTFTEYTIHWVRQAPGKGLEWVANINPNNGGTTYNQKFEDRFTISRDNSKNTLYLQMNSLRAEDTAVYYCARGWNFDYWGQGTLVTVSSTRASTKGPSVFPLAPSSKSTSGGTAALGCLVKDYFPEPVTVSWNSGALTSGVHTFPAVLQSSGLYSLSSVVTVPSSSLGTQTYICNVNHKPSNTKVDKRVEPKSCGTITQGLAVPTISSFFPPGYQVSFCLVMVLLFAVDTGLYFSVK

SEQ ID NO: 9772 - protein, 487 aa, synthetic construct
MALPVTALLLPLALLLHAARPDVQMIQTPDSLAVSLGQRATISCRASESVDNYGISFMHWYQQKPGQSPKLLIYRASNLESGIPARFSGSGSRTDFTLTINPVETDDVATYYCQQNNKDPPTFGGGTKLEIKGGGGSGGGGSGGGGSGGGGSQVQLQQSGAELVKPGASVKISCKASGYAFSSYWMNWVKQRPGKGLEWIGQIYPGDGDTTYNGKFKGKATLTADKSSSTVYMQLNSLTSEDSAVYFCVRYYYGSSGYFDYWGQGTTLTVSSTRGMRTEDLPKAVVFLEPQWYRVLEKDSVTLKCQGAYSPEDNSTQWFHNESLISSQASSYFIDAATVDDSGEYRCQTNLSTLSDPVQLEVHIGWLLLQAPRWVFKEEDPIHLRCHSWKNTALHKVTYLQNGKGRKYFHHNSDFYIPKATLKDSGSYFCRGLVGSKNVSSETVNITITQGLAVPTISSFFPPGYQVSFCLVMVLLFAVDTGLYFSV

SEQ ID NO: 9773 - protein, 478 aa, synthetic construct
MALPVTALLLPLALLLHAARPDVQMIQTPSSLSASLGDRVTISCRASQDIGNYLNWYQQKPDGTVKLLIYYTSRLHSGVPSRFSGSGSGTEYSLTISNLEQEDIATYFCQQGSALPPTFGGGTKLEINGGGGSGGGGSGGGGSALQLQQSGAELVRPGASVTLSCKASGYTFTDYEMHWVKQTPVHGLEWIGAIDPETGGTAYNQKFEGKAILTADKSSSTAYMELRSLTSEDSPVYYCARRRYYGSSSFDYWGQGTTLTVSSTRGMRTEDLPKAVVFLEPQWYRVLEKDSVTLKCQGAYSPEDNSTQWFHNESLISSQASSYFIDAATVDDSGEYRCQTNLSTLSDPVQLEVHIGWLLLQAPRWVFKEEDPIHLRCHSWKNTALHKVTYLQNGKGRKYFHHNSDFYIPKATLKDSGSYFCRGLVGSKNVSSETVNITITQGLAVPTISSFFPPGYQVSFCLVMVLLFAVDTGLYFSV

SEQ ID NO: 9774 - protein, 480 aa, synthetic construct
MALPVTALLLPLALLLHAARPDIVLTQSPATLSLSPGDRATISCRASESVTILGSHLIYWYQQKPGQPPRLLIQLASNVQTGVPARFSGSGSRTDFTLTISSVEPEDFAVYYCLQSRTIPRTFGQGTKLEIKRGGGGSGGGGSGGGGSQVQLVQSGPEVKKPGESVKISCKASGYTFRHYSMNWVKQAPGQGLKWMGRINTESGVPIYADDFKGRFSFTVDTSASTAYLEISSLTSEDTAVYFCSNDYLYSLDFWGQGTTLTVSSTRGMRTEDLPKAVVFLEPQWYRVLEKDSVTLKCQGAYSPEDNSTQWFHNESLISSQASSYFIDAATVDDSGEYRCQTNLSTLSDPVQLEVHIGWLLLQAPRWVFKEEDPIHLRCHSWKNTALHKVTYLQNGKGRKYFHHNSDFYIPKATLKDSGSYFCRGLVGSKNVSSETVNITITQGLAVPTISSFFPPGYQVSFCLVMVLLFAVDTGLYFSV

SEQ ID NO: 9775 - protein, 480 aa, synthetic construct
MALPVTALLLPLALLLHAARPDIQMTQSPSSLSASVGDRVTITCSASQDISNYLNWYQQKPGKAPKLLIYYTSNLHSGVPSRFSGSGSGTDFTLTISSLQPEDFATYYCQQYRKLPWTFGQGTKLEIKRGGGGSGGGGSGGGGSQVQLVQSGAEVKKPGSSVKVSCKASGGTFSNYWMHWVRQAPGQGLEWMGATYRGHSDTYYNQKFKGRVTITADKSTSTAYMELSSLRSEDTAVYYCARGAIYDGYDVLDNWGQGTLVTVSSTRGMRTEDLPKAVVFLEPQWYRVLEKDSVTLKCQGAYSPEDNSTQWFHNESLISSQASSYFIDAATVDDSGEYRCQTNLSTLSDPVQLEVHIGWLLLQAPRWVFKEEDPIHLRCHSWKNTALHKVTYLQNGKGRKYFHHNSDFYIPKATLKDSGSYFCRGLVGSKNVSSETVNITITQGLAVPTISSFFPPGYQVSFCLVMVLLFAVDTGLYFSV

SEQ ID NO: 9776 - protein, 485 aa, synthetic construct
MALPVTALLLPLALLLHAARPDIVMTQSPDSLAVSLGERATINCESSQSLLNSGNQKNYLTWYQQKPGQPPKPLIYWASTRESGVPDRFSGSGSGTDFTLTISSLQAEDVAVYYCQNDYSYPYTFGQGTKLEIKRGGGGSGGGGSGGGGSEVQLVQSGAEVKKPGESLKISCKGSGYSFTDYYMKWARQMPGKGLEWMGDIIPSNGATFYNQKFKGQVTISADKSISTTYLQWSSLKASDTAMYYCARSHLLRASWFAYWGQGTMVTVSSTRGMRTEDLPKAVVFLEPQWYRVLEKDSVTLKCQGAYSPEDNSTQWFHNESLISSQASSYFIDAATVDDSGEYRCQTNLSTLSDPVQLEVHIGWLLLQAPRWVFKEEDPIHLRCHSWKNTALHKVTYLQNGKGRKYFHHNSDFYIPKATLKDSGSYFCRGLVGSKNVSSETVNITITQGLAVPTISSFFPPGYQVSFCLVMVLLFAVDTGLYFSV

SEQ ID NO: 9777 - protein, 480 aa, synthetic construct
MALPVTALLLPLALLLHAARPDIQMTQSTSSLSASLGDRVTISCSASQGINNYLNWYQQKPDGTVELLIYYTSTLQSGVPSRFSGSGSGTDYSLTISNLEPEDIGTYYCQQYSKLPRTFGGGTKLEIKGGGGSGGGGSGGGGSQVQLQQSGSELMMPGASVKISCKATGYTFSNYWIEWVKQRPGHGLEWIGEILPGTGRTIYNEKFKGKATFTADISSNTVQMQLSSLTSEDSAVYYCARRDYYGNFYYAMDYWGQGTSVTVSSTRGMRTEDLPKAVVFLEPQWYRVLEKDSVTLKCQGAYSPEDNSTQWFHNESLISSQASSYFIDAATVDDSGEYRCQTNLSTLSDPVQLEVHIGWLLLQAPRWVFKEEDPIHLRCHSWKNTALHKVTYLQNGKGRKYFHHNSDFYIPKATLKDSGSYFCRGLVGSKNVSSETVNITITQGLAVPTISSFFPPGYQVSFCLVMVLLFAVDTGLYFSV

SEQ ID NO: 9778 - protein, 475 aa, synthetic construct
MALPVTALLLPLALLLHAARPDIQMTQSPASLSVSVGETVTITCRASENIYSNLAWYQQKQGKSPQLLVYAATNLADGVPSRFSGSGSGTQYSLKINSLQSEDFGSYYCQHFWGTWTFGGGTTLEIKGGGGSGGGGSGGGGSEVQLQQSGPELVKPGASVKMSCKASGYTFTDYYMKWMKQSHGKSLEWIGDINPNNGGTTYNQKFKGKATLTVDKSSSTAYMQLNSLTSEDSAVYYCARDYGYGYFDYWGQGTTLTVSSTRGMRTEDLPKAVVFLEPQWYRVLEKDSVTLKCQGAYSPEDNSTQWFHNESLISSQASSYFIDAATVDDSGEYRCQTNLSTLSDPVQLEVHIGWLLLQAPRWVFKEEDPIHLRCHSWKNTALHKVTYLQNGKGRKYFHHNSDFYIPKATLKDSGSYFCRGLVGSKNVSSETVNITITQGLAVPTISSFFPPGYQVSFCLVMVLLFAVDTGLYFSV

SEQ ID NO: 9779 - protein, 479 aa, synthetic construct
MALPVTALLLPLALLLHAARPDEIVLTQSPATLSLSPGERATLSCSASSSVSYMHWYQQKPGQAPRLLIYDTSKLASGIPARFSGSGSGTDFTLTISSLEPEDVAVYYCFQGSVYPFTFGQGTKLEIKRGGGGSGGGGSGGGGSQVQLQESGPGLVKPSQTLSLTCTVSGGSISTSGMGVGWIRQHPGKGLEWIGHIWWDDDKRYNPALKSRVTISVDTSKNQFSLKLSSVTAADTAVYYCARMELWSYYFDYWGQGTLVTVSSTRGMRTEDLPKAVVFLEPQWYRVLEKDSVTLKCQGAYSPEDNSTQWFHNESLISSQASSYFIDAATVDDSGEYRCQTNLSTLSDPVQLEVHIGWLLLQAPRWVFKEEDPIHLRCHSWKNTALHKVTYLQNGKGRKYFHHNSDFYIPKATLKDSGSYFCRGLVGSKNVSSETVNITITQGLAVPTISSFFPPGYQVSFCLVMVLLFAVDTGLYFSV

SEQ ID NO: 9780 - protein, 478 aa, synthetic construct
MALPVTALLLPLALLLHAARPDIQMTQTTSSLSASLGDRVTISCRASQDISKYLNWYQQKPDGTVKLLIYHTSRLHSGVPSRFSGSGSGTDYSLTISNLEQEDIATYFCQQGNTLPYTFGGGTKLEITGGGGSGGGGSGGGGSEVKLQESGPGLVAPSQSLSVTCTVSGVSLPDYGVSWIRQPPRKGLEWLGVIWGSETTYYNSALKSRLTIIKDNSKSQVFLKMNSLQTDDTAIYYCAKHYYYGGSYAMDYWGQGTSVTVSSTRGMRTEDLPKAVVFLEPQWYRVLEKDSVTLKCQGAYSPEDNSTQWFHNESLISSQASSYFIDAATVDDSGEYRCQTNLSTLSDPVQLEVHIGWLLLQAPRWVFKEEDPIHLRCHSWKNTALHKVTYLQNGKGRKYFHHNSDFYIPKATLKDSGSYFCRGLVGSKNVSSETVNITITQGLAVPTISSFFPPGYQVSFCLVMVLLFAVDTGLYFSV

SEQ ID NO: 9781 - protein, 478 aa, synthetic construct
MALPVTALLLPLALLLHAARPEIVMTQSPATLSLSPGERATLSCRASQDISKYLNWYQQKPGQAPRLLIYHTSRLHSGIPARFSGSGSGTDYTLTISSLQPEDFAVYFCQQGNTLPYTFGQGTKLEIKGGGGSGGGGSGGGGSQVQLQESGPGLVKPSETLSLTCTVSGVSLPDYGVSWIRQPPGKGLEWIGVIWGSETTYYNSSLKSRVTISKDNSKNQVSLKLSSVTAADTAVYYCAKHYYYGGSYAMDYWGQGTLVTVSSTRGMRTEDLPKAVVFLEPQWYRVLEKDSVTLKCQGAYSPEDNSTQWFHNESLISSQASSYFIDAATVDDSGEYRCQTNLSTLSDPVQLEVHIGWLLLQAPRWVFKEEDPIHLRCHSWKNTALHKVTYLQNGKGRKYFHHNSDFYIPKATLKDSGSYFCRGLVGSKNVSSETVNITITQGLAVPTISSFFPPGYQVSFCLVMVLLFAVDTGLYFSV

SEQ ID NO: 9782 - protein, 480 aa, synthetic construct
MALPVTALLLPLALLLHAARPEIVLTQSPATLSLSPGERATLSCRASQSVSSYLAWYQQKPGQAPRLLIYDASNRATGIPARFSGSGSGTDFTLTISSLEPEDFAVYYCQQRSNWPITFGQGTRLEIKGGGGSGGGGSGGGGSEVQLVESGGGLVQPGRSLRLSCAASGFTFNDYAMHWVRQAPGKGLEWVSTISWNSGSIGYADSVKGRFTISRDNAKKSLYLQMNSLRAEDTALYYCAKDIQYGNYYYGMDVWGQGTTVTVSSTRGMRTEDLPKAVVFLEPQWYRVLEKDSVTLKCQGAYSPEDNSTQWFHNESLISSQASSYFIDAATVDDSGEYRCQTNLSTLSDPVQLEVHIGWLLLQAPRWVFKEEDPIHLRCHSWKNTALHKVTYLQNGKGRKYFHHNSDFYIPKATLKDSGSYFCRGLVGSKNVSSETVNITITQGLAVPTISSFFPPGYQVSFCLVMVLLFAVDTGLYFSV

SEQ ID NO: 9783 - protein, 483 aa, synthetic construct
MALPVTALLLPLALLLHAARPDIVMTQTPLSLPVTPGEPASISCRSSKSLLHSNGITYLYWYLQKPGQSPQLLIYQMSNLVSGVPDRFSGSGSGTDFTLKISRVEAEDVGVYYCAQNLELPYTFGGGTKVEIKRGGGGSGGGGSGGGGSQVQLVQSGAEVKKPGSSVKVSCKASGYAFSYSWINWVRQAPGQGLEWMGRIFPGDGDTDYNGKFKGRVTITADKSTSTAYMELSSLRSEDTAVYYCARNVFDGYWLVYWGQGTLVTVSSTRGMRTEDLPKAVVFLEPQWYRVLEKDSVTLKCQGAYSPEDNSTQWFHNESLISSQASSYFIDAATVDDSGEYRCQTNLSTLSDPVQLEVHIGWLLLQAPRWVFKEEDPIHLRCHSWKNTALHKVTYLQNGKGRKYFHHNSDFYIPKATLKDSGSYFCRGLVGSKNVSSETVNITITQGLAVPTISSFFPPGYQVSFCLVMVLLFAVDTGLYFSV

SEQ ID NO: 9784 - protein, 484 aa, synthetic construct
MALPVTALLLPLALLLHAARPDIQMTQSPSSLSASVGDRVTITCRSSQSIVHSVGNTFLEWYQQKPGKAPKLLIYKVSNRFSGVPSRFSGSGSGTDFTLTISSLQPEDFATYYCFQGSQFPYTFGQGTKVEIKRGGGGSGGGGSGGGGSEVQLVESGGGLVQPGGSLRLSCAASGYEFSRSWMNWVRQAPGKGLEWVGRIYPGDGDTNYSGKFKGRFTISADTSKNTAYLQMNSLRAEDTAVYYCARDGSSWDWYFDVWGQGTLVTVSSTRGMRTEDLPKAVVFLEPQWYRVLEKDSVTLKCQGAYSPEDNSTQWFHNESLISSQASSYFIDAATVDDSGEYRCQTNLSTLSDPVQLEVHIGWLLLQAPRWVFKEEDPIHLRCHSWKNTALHKVTYLQNGKGRKYFHHNSDFYIPKATLKDSGSYFCRGLVGSKNVSSETVNITITQGLAVPTISSFFPPGYQVSFCLVMVLLFAVDTGLYFSV

SEQ ID NO: 9785 - protein, 478 aa, synthetic construct
MALPVTALLLPLALLLHAARPEIVLTQSPGTLSLSPGERATLSCRASQSVGGYLAWYQQKPGQAPRLLIYDASNRATGIPARFSGSGSGTDFTLTISSLEPEDFAVYYCQQRNNWPPMYTFGQGTKLEIKRGGGGSGGGGSGGGGSQVQLVQSGAEVKKPGSSVKVSCKASGGTFSSYAISWVRQAPGQGLEWMGGIIPILGTANYAQKFQGRVTITADESTSTAYMELSSLRSEDTAVYYCARWGGGAFDIWGQGTMVTVSSTRGMRTEDLPKAVVFLEPQWYRVLEKDSVTLKCQGAYSPEDNSTQWFHNESLISSQASSYFIDAATVDDSGEYRCQTNLSTLSDPVQLEVHIGWLLLQAPRWVFKEEDPIHLRCHSWKNTALHKVTYLQNGKGRKYFHHNSDFYIPKATLKDSGSYFCRGLVGSKNVSSETVNITITQGLAVPTISSFFPPGYQVSFCLVMVLLFAVDTGLYFSV

SEQ ID NO: 9786 - protein, 475 aa, synthetic construct
MALPVTALLLPLALLLHAARPDIQMTQSPATIENTSLSASVGDRVTITCRASQGISSWLTWYQQKPEKAPKSLIYAASSLQSGVPSRFSGSGSGTDFTLTISSLQPEDFATYYCQQYDSYPITFGQGTRLEIKGGGGSGGGGSGGGGSQVQLQQWGAGLLKPSETLSLTCAVYGGSFSAYYWSWIRQPPGKGLEWIGDINHGGGTNYNPSLKSRVTISVDTSKNQFSLKLNSVTAADTAVYYCASLTAYWGQGSLVTVSSTRGMRTEDLPKAVVFLEPQWYRVLEKDSVTLKCQGAYSPEDNSTQWFHNESLISSQASSYFIDAATVDDSGEYRCQTNLSTLSDPVQLEVHIGWLLLQAPRWVFKEEDPIHLRCHSWKNTALHKVTYLQNGKGRKYFHHNSDFYIPKATLKDSGSYFCRGLVGSKNVSSETVNITITQGLAVPTISSFFPPGYQVSFCLVMVLLFAVDTGLYFSV

SEQ ID NO: 9787 - protein, 479 aa, synthetic construct
MALPVTALLLPLALLLHAARPEIVLTQSPDSLAVSLGERATINCKASQSVDFDGDSYLNWYQQKPGQPPKVLIYAASTLQSGVPSRFSGSGSGTDFTLTINSLEAEDAATYYCQQSNEDPWTFGGGTKVEIKGGGGSGGGGSGGGGSQVQLVQSGAEVKKPGASVKVSCKVSGYTFTDYYITWVRQAPGQALEWMGWIYPGSGNTKYSQKFQGRFVFSVDTSASTAYLQLSSLKAEDTAVYYCANYGNYWFAYWGQGTLVTVSSTRGMRTEDLPKAVVFLEPQWYRVLEKDSVTLKCQGAYSPEDNSTQWFHNESLISSQASSYFIDAATVDDSGEYRCQTNLSTLSDPVQLEVHIGWLLLQAPRWVFKEEDPIHLRCHSWKNTALHKVTYLQNGKGRKYFHHNSDFYIPKATLKDSGSYFCRGLVGSKNVSSETVNITITQGLAVPTISSFFPPGYQVSFCLVMVLLFAVDTGLYFSV

SEQ ID NO: 9788 - protein, 477 aa, synthetic construct
MALPVTALLLPLALLLHAARPDIQMTQSPSSLSASVGDRVTITCRASQGISSWLAWYQQKPEKAPKSLIYAASSLQSGVPSRFSGSGSGTDFTLTISSLQPEDFATYYCQQYNSYPPTFGGGTKVEIKGGGGSGGGGSGGGGSEVQLVQSGGGLVHPGGSLRLSCAGSGFAFSSSTMHWIRQAPGKGLEWISLIGSGGGIYYGDSVKGRFTISRDNAKNSLYLQMNSLRAEDMAVYYCVRGYFDWVDYFDYWGQGTLVTVSSTRGMRTEDLPKAVVFLEPQWYRVLEKDSVTLKCQGAYSPEDNSTQWFHNESLISSQASSYFIDAATVDDSGEYRCQTNLSTLSDPVQLEVHIGWLLLQAPRWVFKEEDPIHLRCHSWKNTALHKVTYLQNGKGRKYFHHNSDFYIPKATLKDSGSYFCRGLVGSKNVSSETVNITITQGLAVPTISSFFPPGYQVSFCLVMVLLFAVDTGLYFSV

SEQ ID NO: 9789 - protein, 483 aa, synthetic construct
MALPVTALLLPLALLLHAARPDVVMTQSPLSLPVTLGQPASISCRSSQSIVHSDGNTYLEWYQQRPGQSPRRLIYKVSNRFSGVPDRFSGSGSGTDFTLKISRVEAEDVGVYYCFQGSHAPWTFGGGTKVEIKGGGGSGGGGSGGGGSEVQLVESGGGLVQPGGSLRLSCAASGFTFSSYGMHWVRQAPGKGLEWVAYITTRSSTIYYADSVKGRFTISRDNAKNSLYLQMNSLRAEDTAVYYCTREPLTGYYAMDYWGQGTSVTVSSTRGMRTEDLPKAVVFLEPQWYRVLEKDSVTLKCQGAYSPEDNSTQWFHNESLISSQASSYFIDAATVDDSGEYRCQTNLSTLSDPVQLEVHIGWLLLQAPRWVFKEEDPIHLRCHSWKNTALHKVTYLQNGKGRKYFHHNSDFYIPKATLKDSGSYFCRGLVGSKNVSSETVNITITQGLAVPTISSFFPPGYQVSFCLVMVLLFAVDTGLYFSV

SEQ ID NO: 9790 - protein, 473 aa, synthetic construct
MALPVTALLLPLALLLHAARPQIVLTQSPALMSASPGEKVTMTCSASSSVRYMYWYQQKPRSSPKPWIHLTSNLASGVPARFSGSGSGTSYSLTISSMEAEDAATYYCQQWSSHPFTFGSGTKLEIKGGGGSGGGGSGGGGSDVQLQESGPGLVKPSQSLSLTCTVTGFSITSDYSWNWIRQFPGNKLEWMGYISYSGHTSYNPSLESRISITRDTSKNQFFLQLNSVTTEDTATYYCTRGNWDVVYWGQGTLVTVSATRGMRTEDLPKAVVFLEPQWYRVLEKDSVTLKCQGAYSPEDNSTQWFHNESLISSQASSYFIDAATVDDSGEYRCQTNLSTLSDPVQLEVHIGWLLLQAPRWVFKEEDPIHLRCHSWKNTALHKVTYLQNGKGRKYFHHNSDFYIPKATLKDSGSYFCRGLVGSKNVSSETVNITITQGLAVPTISSFFPPGYQVSFCLVMVLLFAVDTGLYFSV

SEQ ID NO: 9791 - protein, 482 aa, synthetic construct
MALPVTALLLPLALLLHAARPEIVLTQSPGSLAVSPGERVTMSCKSSQSVFFSSSQKNYLAWYQQIPGQSPRLLIYWASTRESGVPDRFTGSGSGTDFTLTISSVQPEDLAIYYCHQYLSSRTFGQGTKLEIKRGGGGSGGGGSGGGGSQVQLQQPGAEVVKPGASVKMSCKASGYTFTSYYIHWIKQTPGQGLEWVGVIYPGNDDISYNQKFQGKATLTADKSSTTAYMQLSSLTSEDSAVYYCAREVRLRYFDVWGQGTTVTVSSTRGMRTEDLPKAVVFLEPQWYRVLEKDSVTLKCQGAYSPEDNSTQWFHNESLISSQASSYFIDAATVDDSGEYRCQTNLSTLSDPVQLEVHIGWLLLQAPRWVFKEEDPIHLRCHSWKNTALHKVTYLQNGKGRKYFHHNSDFYIPKATLKDSGSYFCRGLVGSKNVSSETVNITITQGLAVPTISSFFPPGYQVSFCLVMVLLFAVDTGLYFSV

SEQ ID NO: 9792 - protein, 486 aa, synthetic construct
MALPVTALLLPLALLLHAARPDIVMTQSPDSLTVSLGERTTINCKSSQSVLDSSKNKNSLAWYQQKPGQPPKLLLSWASTRESGIPDRFSGSGSGTDFTLTIDSLQPEDSATYYCQQSAHFPITFGQGTRLEIKGGGGSGGGGSGGGGSQVQLVQSGAEVKKPGASVKVSCKASGYTFTNYGMNWVKQAPGQGLKWMGWINTYTGEPTYADDFKGRVTMTSDTSTSTAYLELHNLRSDDTAVYYCARWSWSDGYYVYFDYWGQGTTVTVSSTRGMRTEDLPKAVVFLEPQWYRVLEKDSVTLKCQGAYSPEDNSTQWFHNESLISSQASSYFIDAATVDDSGEYRCQTNLSTLSDPVQLEVHIGWLLLQAPRWVFKEEDPIHLRCHSWKNTALHKVTYLQNGKGRKYFHHNSDFYIPKATLKDSGSYFCRGLVGSKNVSSETVNITITQGLAVPTISSFFPPGYQVSFCLVMVLLFAVDTGLYFSV

SEQ ID NO: 9793 - protein, 486 aa, synthetic construct
MALPVTALLLPLALLLHAARPDVLLTQSPLSLPVTLGQPASISCRSSQTIVHSNGNTYLEWFQQRPGQSPRLLIYQVSNRFSGVPDRFSGSGSGTDFTLKISRVEAEDVGVYYCFQGSHVPRTFGGGTKVEIKRGGGGSGGGGSGGGGSQIQLVQSGSELKKPGASVKVSCKASGYTFTNYGMNWVRQAPGQGLKWMGWINTNTGEPKYAEEFKGRFALSLDTSVSTAYLQINSLKAEDTAVYFCARGYGNYARGAWLAYWGQGTLVTVSSTRGMRTEDLPKAVVFLEPQWYRVLEKDSVTLKCQGAYSPEDNSTQWFHNESLISSQASSYFIDAATVDDSGEYRCQTNLSTLSDPVQLEVHIGWLLLQAPRWVFKEEDPIHLRCHSWKNTALHKVTYLQNGKGRKYFHHNSDFYIPKATLKDSGSYFCRGLVGSKNVSSETVNITITQGLAVPTISSFFPPGYQVSFCLVMVLLFAVDTGLYFSV

SEQ ID NO: 9794 - protein, 481 aa, synthetic construct
MALPVTALLLPLALLLHAARPDHIVLTQSPSSLSASLGDRVTISCRASQDISTYLNWYQQKPDGTVKLLIFYTSRLHAGVPSRFSGSGSGTHHSLTISNLEQEDIATYFCQQGNSLPFTFGSGTKLEIKRGGGGSGGGGSGGGGSQVQLKESGPELEKPGASVKISCKASGYSFTAYSMNWVKQNNGMSLEWIGSIDPYYGDTKYAQKFKGKATLTVDKASSTAYLQLKSLTSEDSAVYYCARRMITTGDWYFDVWGAGTTVTVSSTRGMRTEDLPKAVVFLEPQWYRVLEKDSVTLKCQGAYSPEDNSTQWFHNESLISSQASSYFIDAATVDDSGEYRCQTNLSTLSDPVQLEVHIGWLLLQAPRWVFKEEDPIHLRCHSWKNTALHKVTYLQNGKGRKYFHHNSDFYIPKATLKDSGSYFCRGLVGSKNVSSETVNITITQGLAVPTISSFFPPGYQVSFCLVMVLLFAVDTGLYFSV

SEQ ID NO: 9795 - protein, 481 aa, synthetic construct; identical to SEQ ID NO: 9794

SEQ ID NO: 9796 - protein, 481 aa, synthetic construct
MALPVTALLLPLALLLHAARPDIVMTQSPDSLAVSLGERATINCRASKSVSTSGYSFMHWYQQKPGQPPKLLIYLASNLESGVPDRFSGSGSGTDFTLTISSLQAEDVAVYYCQHSREVPWTFGQGTKVEIKRGGGGSGGGGSGGGGSQVQLVQSGAEVKKPGASVKVSCKASGYTFTNYGMNWVRQAPGQGLEWMGWINTYTGEPTYADAFKGRFAFSLDTSTSTAYLQINSLRSDDTAVYYCARDYGDYGMDYWGQGTTVTVSSTRGMRTEDLPKAVVFLEPQWYRVLEKDSVTLKCQGAYSPEDNSTQWFHNESLISSQASSYFIDAATVDDSGEYRCQTNLSTLSDPVQLEVHIGWLLLQAPRWVFKEEDPIHLRCHSWKNTALHKVTYLQNGKGRKYFHHNSDFYIPKATLKDSGSYFCRGLVGSKNVSSETVNITITQGLAVPTISSFFPPGYQVSFCLVMVLLFAVDTGLYFSV

SEQ ID NO: 9797 - protein, 477 aa, synthetic construct
MALPVTALLLPLALLLHAARPDIVMTQTPLTLSVTIGQPASISCKSSQSLLDSDGKTYLNWLLQRPGQSPERLIYLVSKLDSGVPDRFTGSGSGTDFTLKISRVEAEDLGVYCCWQGTHFPYTFGGGTKVEIKGGGGGSGGGGSGGGGSQVQLQQPGAELVRPGASVKLSCKASGYTFTSYWMNWVKQRPGQGLEWIGMIDPSDSETHYNHIFKDKATLTVDKSSSTAYLQLSSLTSEDSAVYYCARNLYLWGQGTSVTVSSTRGMRTEDLPKAVVFLEPQWYRVLEKDSVTLKCQGAYSPEDNSTQWFHNESLISSQASSYFIDAATVDDSGEYRCQTNLSTLSDPVQLEVHIGWLLLQAPRWVFKEEDPIHLRCHSWKNTALHKVTYLQNGKGRKYFHHNSDFYIPKATLKDSGSYFCRGLVGSKNVSSETVNITITQGLAVPTISSFFPPGYQVSFCLVMVLLFAVDTGLYFSV

SEQ ID NO: 9798 - protein, 480 aa, synthetic construct
MALPVTALLLPLALLLHAARPDIQLTQSPSSLSASVGDRVTITCKASQSVDYEGDSFLNWYQQKPGKAPKLLIYAASNLESGVPSRFSGSGSGTDFTLTISSLQPEDFATYYCQQSNEDPLTFGQGTKVEIKRGGGGSGGGGSGGGGSEVQLVESGGGLVQPGGSLRLSCAASGYTFSSYWIEWVRQAPGKGLEWIGEILPGGGDTNYNEIFKGRATFSADTSKNTAYLQMNSLRAEDTAVYYCTRRVPIRLDYWGQGTLVTVSSTRGMRTEDLPKAVVFLEPQWYRVLEKDSVTLKCQGAYSPEDNSTQWFHNESLISSQASSYFIDAATVDDSGEYRCQTNLSTLSDPVQLEVHIGWLLLQAPRWVFKEEDPIHLRCHSWKNTALHKVTYLQNGKGRKYFHHNSDFYIPKATLKDSGSYFCRGLVGSKNVSSETVNITITQGLAVPTISSFFPPGYQVSFCLVMVLLFAVDTGLYFSV

SEQ ID NO: 9799 - protein, 488 aa, synthetic construct
MALPVTALLLPLALLLHAARPDIVMSQSPSSLAVSVGEKVTMSCKSSQSLLHSSNQKNYLAWYQQKPGQSPKVLIYWASTRESGVPDRFTGSGSGTDFTLTITSVKSEDLAVYYCQQYYSYPWTFGGGTRLEIKRGGGGSGGGGSGGGGSEVQLQQSVAELVKPGASVKMSCKVSGYTLTDHTIHWMKQRPEQGLEWIGYIYPRDGITGYNEKFKGKATLTADTSSSTAYMQLNSLTSEDSAVYFCARWGYSYRNYAYYYDYWGQGTTLTVSSTRGMRTEDLPKAVVFLEPQWYRVLEKDSVTLKCQGAYSPEDNSTQWFHNESLISSQASSYFIDAATVDDSGEYRCQTNLSTLSDPVQLEVHIGWLLLQAPRWVFKEEDPIHLRCHSWKNTALHKVTYLQNGKGRKYFHHNSDFYIPKATLKDSGSYFCRGLVGSKNVSSETVNITITQGLAVPTISSFFPPGYQVSFCLVMVLLFAVDTGLYFSV

SEQ ID NO: 9800 - protein, 485 aa, synthetic construct
MALPVTALLLPLALLLHAARPEIVLTQSPGTLSLSPGERATLSCRASQSVSSSYLAWYQQKPGQAPRLLIYGTSSRATGIPDRFSGSGSGTDFTLTISRLEPEDFAVYYCQQYGSSPFTFGGGTKVEIKRGGGGSGGGGSGGGGSQVQLQESGPGLAKPSETLSLTCTVSGDSITSYYWSWIRQPPGKGLEWIGYIYYSGSTNYNPSLKSRVTISVDTSKNQFSLKLSSVTAADTAVYYCARDQRRIAAAGTHFYGMDVWGQGTTVTVSSTRGMRTEDLPKAVVFLEPQWYRVLEKDSVTLKCQGAYSPEDNSTQWFHNESLISSQASSYFIDAATVDDSGEYRCQTNLSTLSDPVQLEVHIGWLLLQAPRWVFKEEDPIHLRCHSWKNTALHKVTYLQNGKGRKYFHHNSDFYIPKATLKDSGSYFCRGLVGSKNVSSETVNITITQGLAVPTISSFFPPGYQVSFCLVMVLLFAVDTGLYFSV

SEQ ID NO: 9801 - protein, 475 aa, synthetic construct
MALPVTALLLPLALLLHAARPDIQMTQSPSSLSASVGDRVTITCRASQSISLWLNWYQQKPGKAPKLLIYAASTLQSGVPSRFSGSGSGTDFTLTISSLQPEDFATYYCQQYYTSPYTFGQGTKVEIKRGGGGSGGGGSGGGGSQVQLLESGGGLVQPGGSLRLSCAASGFTFSSYAMSWVRQAPGKGLEWVSVIRSSGSSTYYADSVKGRFTISRDNSKNTLYLQMNSLRAEDTAVYYCARGGGYFDYWGQGTLVTVSSTRGMRTEDLPKAVVFLEPQWYRVLEKDSVTLKCQGAYSPEDNSTQWFHNESLISSQASSYFIDAATVDDSGEYRCQTNLSTLSDPVQLEVHIGWLLLQAPRWVFKEEDPIHLRCHSWKNTALHKVTYLQNGKGRKYFHHNSDFYIPKATLKDSGSYFCRGLVGSKNVSSETVNITITQGLAVPTISSFFPPGYQVSFCLVMVLLFAVDTGLYFSV

SEQ ID NO: 9802 - protein, 478 aa, synthetic construct
MALPVTALLLPLALLLHAARPDIQMTQSPSSLSASVGDRVTITCRASQSISSYLNWYQQKPGKAPKLLIYAVSTLQSGVPSRFSGSGSGTDFTLTISSLQPEDFATYYCQQSGTFPPTTFGQGTKVEIKRGGGGSGGGGSGGGGSQVQLLESGGGLVQPGGSLRLSCAASGFTFSSHGMHWVRQAPGKGLEWVSVISGSGSNTGYADSVKGRFTISRDNSKNTLYLQMNSLRAEDTAVYYCARQWGSYAFDSWGQGTLVTVSSTRGMRTEDLPKAVVFLEPQWYRVLEKDSVTLKCQGAYSPEDNSTQWFHNESLISSQASSYFIDAATVDDSGEYRCQTNLSTLSDPVQLEVHIGWLLLQAPRWVFKEEDPIHLRCHSWKNTALHKVTYLQNGKGRKYFHHNSDFYIPKATLKDSGSYFCRGLVGSKNVSSETVNITITQGLAVPTISSFFPPGYQVSFCLVMVLLFAVDTGLYFSV

SEQ ID NO: 9803 - protein, 470 aa, synthetic construct
MALPVTALLLPLALLLHAARPMTQSPKFLLVSAGDRVTLTCKASQSVNNDVYWYQQEPGQSPKLLIYWASTRESGVPDRFTGSGSGTDFTLTISSVQAEDLAVYYCKQSYNLYTFGGGTKLEIKRGGGGSGGGGSGGGGSESGRGLVQPGGSRKLSCAASGFTFSTSGMHWVRQAPEKGLEWVAYISSGSTTIYHADTVKGRFTISRDNPKNTLFLQMTSLRSEDTAMYYCCARSGQFGNYFDYWGQGTTLTVSSTRGMRTEDLPKAVVFLEPQWYRVLEKDSVTLKCQGAYSPEDNSTQWFHNESLISSQASSYFIDAATVDDSGEYRCQTNLSTLSDPVQLEVHIGWLLLQAPRWVFKEEDPIHLRCHSWKNTALHKVTYLQNGKGRKYFHHNSDFYIPKATLKDSGSYFCRGLVGSKNVSSETVNITITQGLAVPTISSFFPPGYQVSFCLVMVLLFAVDTGLYFSV

SEQ ID NO: 9804 - protein, 475 aa, synthetic construct
MALPVTALLLPLALLLHAARPQSPSSLAVSAGEKVTMSCKSSQSLLNSRTRKNYLAWYQQKPGQSPKLLIYWASTRESGVPDRFTGSGSGTDFTLTISSVQAEDLAVYYCKQSNLYTFGGGTKLEIKGGGGSGGGGSGGGGSQVQLEESGPELVKPGASVKLSCKASGYTFTEYIIHWVKQRSGQGLEWIGWFYPGSGSIKYNEKFKDKATLTADKSSSTVYMELSGLTSEDSAVYFCARHDGYSYFDYWGQGTTLTVSSTRGMRTEDLPKAVVFLEPQWYRVLEKDSVTLKCQGAYSPEDNSTQWFHNESLISSQASSYFIDAATVDDSGEYRCQTNLSTLSDPVQLEVHIGWLLLQAPRWVFKEEDPIHLRCHSWKNTALHKVTYLQNGKGRKYFHHNSDFYIPKATLKDSGSYFCRGLVGSKNVSSETVNITITQGLAVPTISSFFPPGYQVSFCLVMVLLFAVDTGLYFSV

SEQ ID NO: 9805 - protein, 478 aa, synthetic construct
MALPVTALLLPLALLLHAARPDIQMTQSPSSLSASLGERVSLTCRATQELSGYLSWLQQKPDGTIKRLIYAASTLDSGVPKRFSGNRSGSDYSLTISSLESEDFADYYCLQYAIYPYTFGGGTKLEIKGGGGSGGGGSGGGGSEVQLQQSGPELVKPGASVKMSCKASGYTFTSYFIHWVKQKPGQGLEWIGFINPYNDGSKYNEKFKGKATLTSDKSSSTAYMELSSLTSEDSAVYYCTRDDGYYGYAMDYWGQGTSVTVSSTRGMRTEDLPKAVVFLEPQWYRVLEKDSVTLKCQGAYSPEDNSTQWFHNESLISSQASSYFIDAATVDDSGEYRCQTNLSTLSDPVQLEVHIGWLLLQAPRWVFKEEDPIHLRCHSWKNTALHKVTYLQNGKGRKYFHHNSDFYIPKATLKDSGSYFCRGLVGSKNVSSETVNITITQGLAVPTISSFFPPGYQVSFCLVMVLLFAVDTGLYFSV

SEQ ID NO: 9806 - protein, 483 aa, synthetic construct
MALPVTALLLPLALLLHAARPDTIVLTQSPASLAVSLGQRATISCRASESVDSYGNSFMHWYQQKPGQPPKLLIYLASNLESGVPARFSGSGSRTDFTLTIDPVEADDAATYYCQQNNYDPWTFGGGTKLEIKGGGGSGGGGSGGGGSEVQLQQSGPELVKPGASVKMSCKASGYTFTSYVMHWVKQKPGQGLEWIGYINPYNDGTKYNEKFKGKATLTSDTSSSTAYMELNSLTSEDSAVYFCARPIYFDNDYFDYWGQGTTLKVSSTRGMRTEDLPKAVVFLEPQWYRVLEKDSVTLKCQGAYSPEDNSTQWFHNESLISSQASSYFIDAATVDDSGEYRCQTNLSTLSDPVQLEVHIGWLLLQAPRWVFKEEDPIHLRCHSWKNTALHKVTYLQNGKGRKYFHHNSDFYIPKATLKDSGSYFCRGLVGSKNVSSETVNITITQGLAVPTISSFFPPGYQVSFCLVMVLLFAVDTGLYFSV

SEQ ID NO: 9807 - protein, 477 aa, synthetic construct
MALPVTALLLPLALLLHAARPDIQMTQSPSSLSASVGDRVTITCKASQDVGIAVAWYQQKPGKVPKLLIYWASTRHTGVPDRFSGSGSGTDFTLTISSLQPEDVATYYCQQYSSYPYTFGQGTKVEIKGGGGSGGGGSGGGGSEVQLVESGGGLVQPGGSLRLSCAASGFDFSRYWMSWVRQAPGKGLEWIGEINPDSSTINYAPSLKDKFIISRDNAKNSLYLQMNSLRAEDTAVYYCARPDGNYWYFDVWGQGTLVTVSSTRGMRTEDLPKAVVFLEPQWYRVLEKDSVTLKCQGAYSPEDNSTQWFHNESLISSQASSYFIDAATVDDSGEYRCQTNLSTLSDPVQLEVHIGWLLLQAPRWVFKEEDPIHLRCHSWKNTALHKVTYLQNGKGRKYFHHNSDFYIPKATLKDSGSYFCRGLVGSKNVSSETVNITITQGLAVPTISSFFPPGYQVSFCLVMVLLFAVDTGLYFSV

SEQ ID NO: 9808 - protein, 478 aa, synthetic construct
MALPVTALLLPLALLLHAARPDIVMTQSQKSMSTSVGDRVSITCKASQDVITGVAWYQQKPGQSPKLLIYSASYRYTGVPDRFTGSGSGTDFTFTISNVQAEDLAVYYCQQHYSTPLTFGAGTKLELKGGGGSGGGGSGGGGSQVQLQQPGAELVRPGASVKLSCKASGYSFTTYWMNWVKQRPGQGLEWIGMIHPSDSETRLNQKFKDKATLTVDKSSSTAYMQLSSPTSEDSAVYYCARSTMIATRAMDYWGQGTSVTVSSTRGMRTEDLPKAVVFLEPQWYRVLEKDSVTLKCQGAYSPEDNSTQWFHNESLISSQASSYFIDAATVDDSGEYRCQTNLSTLSDPVQLEVHIGWLLLQAPRWVFKEEDPIHLRCHSWKNTALHKVTYLQNGKGRKYFHHNSDFYIPKATLKDSGSYFCRGLVGSKNVSSETVNITITQGLAVPTISSFFPPGYQVSFCLVMVLLFAVDTGLYFSV

SEQ ID NO: 9809 - protein, 484 aa, synthetic construct
MALPVTALLLPLALLLHAARPQSVLTQPPSVSGAPGQRVTISCTGSGSNIGAPYDVSWYQQLPGTAPKLLIYHNNKRPSGVPDRFSGSKSGTSASLAITGLQAEDEADYYCATVEAGLSGSVFGGGTKLTVLGAGGGGSGGGGSGGGGSQVQLVQSGAEVKKPGASVKVSCKVSGYTLTELSIHWVRQAPGKGLEWMGGFDPEENEIVYAQRFQGRVTMTEDTSTDTAYMELSSLRSEDTAVYYCAIVGSFSPLTLGLWGQGTMVTVSSTRGMRTEDLPKAVVFLEPQWYRVLEKDSVTLKCQGAYSPEDNSTQWFHNESLISSQASSYFIDAATVDDSGEYRCQTNLSTLSDPVQLEVHIGWLLLQAPRWVFKEEDPIHLRCHSWKNTALHKVTYLQNGKGRKYFHHNSDFYIPKATLKDSGSYFCRGLVGSKNVSSETVNITITQGLAVPTISSFFPPGYQVSFCLVMVLLFAVDTGLYFSV

SEQ ID NO: 9810 - protein, 484 aa, synthetic construct
MALPVTALLLPLALLLHAARPQSVLTQPPSVSGAPGQRVTISCTGSGSNIGAPYDVSWYQQLPGTAPKLLIYHNNKRPSGVPDRFSGSKSGTSASLAITGLQAEDEADYYCQSYDSSSISTIFGGGTKLTVLGAGGGGSGGGGSGGGGSQVQLVQSGAEVKKPGASVKVSCKVSGYTLTELSIHWVRQAPGKGLEWMGGFDPEENEIVYAQRFQGRVTMTEDTSTDTAYMELSSLRSEDTAVYYCAIVGSFSGIAYRPWGQGTMVTVSSTRGMRTEDLPKAVVFLEPQWYRVLEKDSVTLKCQGAYSPEDNSTQWFHNESLISSQASSYFIDAATVDDSGEYRCQTNLSTLSDPVQLEVHIGWLLLQAPRWVFKEEDPIHLRCHSWKNTALHKVTYLQNGKGRKYFHHNSDFYIPKATLKDSGSYFCRGLVGSKNVSSETVNITITQGLAVPTISSFFPPGYQVSFCLVMVLLFAVDTGLYFSV

SEQ ID NO: 9811 - protein, 482 aa, synthetic construct
MALPVTALLLPLALLLHAARPDIQMTQSPSSLSASVGDRVTITCSASSSVSYMYWYQQKPGKAPKLLIYLTSNLASGVPSRFSGSGSGTDFTLTISSLQPEDFATYYCQQWRSNPFTFGQGTKLEIKRGGGGSGGGGSGGGGSQITLKESGPTLVKPTQTLTLTCTFSGFSLSTSGMGVGWIRQPPGKALEWLAHIWWDDVKRYSPSLKSRLTITKDTSKNQVVLTMTNMDPVDTATYYCARIVSFDNDVVSAMDYWGQGTLVTVSSTRGMRTEDLPKAVVFLEPQWYRVLEKDSVTLKCQGAYSPEDNSTQWFHNESLISSQASSYFIDAATVDDSGEYRCQTNLSTLSDPVQLEVHIGWLLLQAPRWVFKEEDPIHLRCHSWKNTALHKVTYLQNGKGRKYFHHNSDFYIPKATLKDSGSYFCRGLVGSKNVSSETVNITITQGLAVPTISSFFPPGYQVSFCLVMVLLFAVDTGLYFSV

SEQ ID NO: 9812 - protein, 477 aa, synthetic construct
MALPVTALLLPLALLLHAARPEIVMTQSPATLSVSPGERATLSCKASQSVSNDVVWYQQKPGQAPRLLIYYASNRYTGIPARFSGSGSGTEFTLTISSLQSEDFAVYYCQQDYTSPWTFGQGTKLEIKRGGGGSGGGGSGGGGSQVQLVQSGAEVKKPGASVKVSCKASGYTFTNYGMNWVRQAPGQGLEWMGWINTYTGEPTYADDFKGRVTMTTDTSTSTAYMELRSLRSDDTAVYYCARIGDSSPSDYWGQGTLVTVSSTRGMRTEDLPKAVVFLEPQWYRVLEKDSVTLKCQGAYSPEDNSTQWFHNESLISSQASSYFIDAATVDDSGEYRCQTNLSTLSDPVQLEVHIGWLLLQAPRWVFKEEDPIHLRCHSWKNTALHKVTYLQNGKGRKYFHHNSDFYIPKATLKDSGSYFCRGLVGSKNVSSETVNITITQGLAVPTISSFFPPGYQVSFCLVMVLLFAVDTGLYFSV

SEQ ID NO: 9813 - protein, 477 aa, synthetic construct
MALPVTALLLPLALLLHAARPDILLTQSPVILSVSPGERVSFSCRASQSIGTNIHWYQQRTNGSPRLLIKYASESISGIPSRFSGSGSGTDFTLSINSVESEDIADYYCQQNNNWPTTFGAGTKLELKGGGGSGGGGSGGGGSQVQLKQSGPGLVQPSQSLSITCTVSGFSLTNYGVHWVRQSPGKGLEWLGVIWSGGNTDYNTPFTSRLSINKDNSKSQVFFKMNSLQSNDTAIYYCARALTYYDYEFAYWGQGTLVTVSATRGMRTEDLPKAVVFLEPQWYRVLEKDSVTLKCQGAYSPEDNSTQWFHNESLISSQASSYFIDAATVDDSGEYRCQTNLSTLSDPVQLEVHIGWLLLQAPRWVFKEEDPIHLRCHSWKNTALHKVTYLQNGKGRKYFHHNSDFYIPKATLKDSGSYFCRGLVGSKNVSSETVNITITQGLAVPTISSFFPPGYQVSFCLVMVLLFAVDTGLYFSV

SEQ ID NO: 9814 - protein, 477 aa, synthetic construct
MALPVTALLLPLALLLHAARPEIQLVQSGAEVKKPGESLRISCKGSGFNIEDYYIHWVRQMPGKGLEWMGRIDPENDETKYGPIFQGHVTISADTSINTVYLQWSSLKASDTAMYYCAFRGGVYWGQGTTVTVSSGGGGSGGGGSGGGGSDVVMTQSPDSLAVSLGERATINCKSSQSLLDSDGKTYLNWLQQKPGQPPKRLISLVSKLDSGVPDRFSGSGSGTDFTLTISSLQAEDVAVYYCWQGTHFPGTFGGGTKVEIKTRGMRTEDLPKAVVFLEPQWYRVLEKDSVTLKCQGAYSPEDNSTQWFHNESLISSQASSYFIDAATVDDSGEYRCQTNLSTLSDPVQLEVHIGWLLLQAPRWVFKEEDPIHLRCHSWKNTALHKVTYLQNGKGRKYFHHNSDFYIPKATLKDSGSYFCRGLVGSKNVSSETVNITITQGLAVPTISSFFPPGYQVSFCLVMVLLFAVDTGLYFSV

SEQ ID NO: 9815 - protein, 485 aa, synthetic construct
MALPVTALLLPLALLLHAARPELQMTQSPSSLSASVGDRVTITCRASQSISSYLNWYQQKPGQPPKLLIYWASTRESGVPDRFSGSESGTNYTLTISSLQPEDFATYFCQQSDSLPITFGQGTRLDIQGGGGSGGGGSGGGGSEVQLLESGGGVVQPGRSLRLSCAASGFTFSSYGMHWVRQAPGKGLEWVAVISYDGSNKYYADSVKGRFTISRDNSKNTLYLQMNSLRAEDTAVYYCAKDMGWGSGWRPYYYYGMDVWGQGTTVTVSSTRGMRTEDLPKAVVFLEPQWYRVLEKDSVTLKCQGAYSPEDNSTQWFHNESLISSQASSYFIDAATVDDSGEYRCQTNLSTLSDPVQLEVHIGWLLLQAPRWVFKEEDPIHLRCHSWKNTALHKVTYLQNGKGRKYFHHNSDFYIPKATLKDSGSYFCRGLVGSKNVSSETVNITITQGLAVPTISSFFPPGYQVSFCLVMVLLFAVDTGLYFSV

SEQ ID NO: 9816 - protein, 484 aa, synthetic construct
MALPVTALLLPLALLLHAARPELVMTQSPSSLTVTAGEKVTMSCKSSQSLLNSGNQKNYLTWYQQKPGQPPKLLIYWASTRESGVPDRFTGSGSGTDFTLTISSVQAEDLAVYYCQNDYSYPLTFGAGTKLEIKGGGGSGGGGSGGGGSEVQLLEQSGAELVRPGTSVKISCKASGYAFTNYWLGWVKQRPGHGLEWIGDIFPGSGNIHYNEKFKGKATLTADKSSSTAYMQLSSLTFEDSAVYFCARLRNWDEPMDYWGQGTTVTVSSTRGMRTEDLPKAVVFLEPQWYRVLEKDSVTLKCQGAYSPEDNSTQWFHNESLISSQASSYFIDAATVDDSGEYRCQTNLSTLSDPVQLEVHIGWLLLQAPRWVFKEEDPIHLRCHSWKNTALHKVTYLQNGKGRKYFHHNSDFYIPKATLKDSGSYFCRGLVGSKNVSSETVNITITQGLAVPTISSFFPPGYQVSFCLVMVLLFAVDTGLYFSV

SEQ ID NO: 9817 - protein, 482 aa, synthetic construct
MALPVTALLLPLALLLHAARPDIQMTQSPSSLSASVGDRVTITCRASQSISSYLNWYQQKPGKAPKLLIYAASSLQSGVPSRFSGSGSGTDFTLTISSLQPEDLATYYCQQSYSTPFTFGPGTKVDIKGGGGSGGGGSGGGGSVHEVQLVQSGAEVKKPGSSVKVSCKASGGTFSSYAISWVRQAPGQGLEWMGGIIPIFGTANYAQKFQGRVTITADKSTSTAYMELSSLRSEDTAVYYCATFALFGFREQAFDIWGQGTTVTVSSTRGMRTEDLPKAVVFLEPQWYRVLEKDSVTLKCQGAYSPEDNSTQWFHNESLISSQASSYFIDAATVDDSGEYRCQTNLSTLSDPVQLEVHIGWLLLQAPRWVFKEEDPIHLRCHSWKNTALHKVTYLQNGKGRKYFHHNSDFYIPKATLKDSGSYFCRGLVGSKNVSSETVNITITQGLAVPTISSFFPPGYQVSFCLVMVLLFAVDTGLYFSV

SEQ ID NO: 9818 - protein, 476 aa, synthetic construct
MALPVTALLLPLALLLHAARPYIHVTQSPSSLSVSIGDRVTINCQTSQGVGSDLHWYQHKPGRAPKLLIHHASSVEDGVPSRFSGTGFHTSFNLTINDLQADDIGTYYCQVLQSFGRGSRLDTKGGGGSGGGGSGGGGSRAHLVQSGTAMKKPGASVRVSCQTSGYTFTAHILFWFRQAPGRGLEWVGWIKPQYGAVNFGGGFRDRVTLTRDVYREIAYMDIRGLKPDDTAVYYCARDRSYGDSSWALDAWGQGTTVVVSATRGMRTEDLPKAVVFLEPQWYRVLEKDSVTLKCQGAYSPEDNSTQWFHNESLISSQASSYFIDAATVDDSGEYRCQTNLSTLSDPVQLEVHIGWLLLQAPRWVFKEEDPIHLRCHSWKNTALHKVTYLQNGKGRKYFHHNSDFYIPKATLKDSGSYFCRGLVGSKNVSSETVNITITQGLAVPTISSFFPPGYQVSFCLVMVLLFAVDTGLYFSV

SEQ ID NO: 9819 - protein, 481 aa, synthetic construct
MALPVTALLLPLALLLHAARPDIVLTQSPLSLAVSLGQPAIISCKASQSVSFAGTSLMHWYHQKPGQQPRLLIYRASNLEAGVPDRFSGSGSKTDFTLTISPVEAEDAATYYCQQSREYPYTFGGGTKLEIKRGGGGSGGGGSGGGGSQVQLVQSGAEVVKPGASVKISCKASGYTFTGYFMNWVKQSPGQSLEWIGRIHPYDGDTFYNQKFQGKATLTVDKSSNTAHMELLSLTSEDFAVYYCTRYDGSRAMDYWGQGTTVTVSSTRGMRTEDLPKAVVFLEPQWYRVLEKDSVTLKCQGAYSPEDNSTQWFHNESLISSQASSYFIDAATVDDSGEYRCQTNLSTLSDPVQLEVHIGWLLLQAPRWVFKEEDPIHLRCHSWKNTALHKVTYLQNGKGRKYFHHNSDFYIPKATLKDSGSYFCRGLVGSKNVSSETVNITITQGLAVPTISSFFPPGYQVSFCLVMVLLFAVDTGLYFSV

SEQ ID NO: 9820 - protein, 477 aa, synthetic construct
MALPVTALLLPLALLLHAARPDVVMTQTPLSLPVTPGEPASISCRSSQSLVHRNGNTYLHWYLQKPGQSPKLLIHKVSNRFSGVPDRFSGSGSGTDFTLKISRVEAEDLGVYFCSQSTHVPPLTFGAGTKLELKGGGGSGGGGSGGGGSEVQLVQSGAEVEKPGASVKISCKASGSSFTGYNMNWVRQNIGKSLEWIGAIDPYYGGTSYNQKFKGRATLTVDKSTSTAYMHLKSLRSEDTAVYYCVSGMEYWGQGTSVTVSSTRGMRTEDLPKAVVFLEPQWYRVLEKDSVTLKCQGAYSPEDNSTQWFHNESLISSQASSYFIDAATVDDSGEYRCQTNLSTLSDPVQLEVHIGWLLLQAPRWVFKEEDPIHLRCHSWKNTALHKVTYLQNGKGRKYFHHNSDFYIPKATLKDSGSYFCRGLVGSKNVSSETVNITITQGLAVPTISSFFPPGYQVSFCLVMVLLFAVDTGLYFSV

SEQ ID NO: 9821 - protein, 475 aa, synthetic construct
MALPVTALLLPLALLLHAARPEIVMTQTPATLSVSAGERVTITCKASQSVSNDVTWYQQKPGQAPRLLIYSASNRYSGVPARFSGSGYGTEFTFTISSVQSEDFAVYFCQQDYSSFGQGTKLEIKRGGGGSGGGGSGGGGSQVQLVESGPGVVQPGRSLRISCAVSGFSVTNYGVHWVRQPPGKGLEWLGVIWAGGITNYNSAFMSRLTISKDNSKNTVYLQMNSLRAEDTAMYYCASRGGHYGYALDYWGQGTLVTVSSTRGMRTEDLPKAVVFLEPQWYRVLEKDSVTLKCQGAYSPEDNSTQWFHNESLISSQASSYFIDAATVDDSGEYRCQTNLSTLSDPVQLEVHIGWLLLQAPRWVFKEEDPIHLRCHSWKNTALHKVTYLQNGKGRKYFHHNSDFYIPKATLKDSGSYFCRGLVGSKNVSSETVNITITQGLAVPTISSFFPPGYQVSFCLVMVLLFAVDTGLYFSV

SEQ ID NO: 9822 - protein, 478 aa, synthetic construct
MALPVTALLLPLALLLHAARPDIQMTQTASSLPASLGDRVTISCSASQDISNYLNWYQQKPDGTVKLLIFYSSNLHSGVPSRFSGGGSGTDYSLTISNLEPEDIATYFCHQYSKLPWTFGGGTKLEIKRGGGGSGGGGSGGGGSEVTLVESGGDFVKPGGSLKVSCAASGFAFSHYAMSWVRQTPAKRLEWVAYISSGGSGTYYSDSVKGRFTISRDNAKNTLYLQMRSLRSEDSAMYFCTRVKLGTYYFDSWGQGTTLTVSSTRGMRTEDLPKAVVFLEPQWYRVLEKDSVTLKCQGAYSPEDNSTQWFHNESLISSQASSYFIDAATVDDSGEYRCQTNLSTLSDPVQLEVHIGWLLLQAPRWVFKEEDPIHLRCHSWKNTALHKVTYLQNGKGRKYFHHNSDFYIPKATLKDSGSYFCRGLVGSKNVSSETVNITITQGLAVPTISSFFPPGYQVSFCLVMVLLFAVDTGLYFSV

SEQ ID NO: 9823 - protein, 480 aa, synthetic construct
MALPVTALLLPLALLLHAARPQFVLTQSPSASAALGASAKLTCTLSSAHKTYTIDWYQQQKGKAPRYLIQVKSDGTYTKATGVPDRFSGSSSGADRYLIIPSVQADDEADYYCGTDYTGGYVFGGGTQLTVTGGGGSGGGGSGGGGSEQLKESGGGLFKPTDTLTLTCTVSGFSLSYYGVNWVRQAPGNGLEWIGTIGGSGDTYYASWAKSRSTIIRNTNENTVTLKMTSLTAADTATYFCVRYANIGYEYFNVWGPGTLVTVSSTRGMRTEDLPKAVVFLEPQWYRVLEKDSVTLKCQGAYSPEDNSTQWFHNESLISSQASSYFIDAATVDDSGEYRCQTNLSTLSDPVQLEVHIGWLLLQAPRWVFKEEDPIHLRCHSWKNTALHKVTYLQNGKGRKYFHHNSDFYIPKATLKDSGSYFCRGLVGSKNVSSETVNITITQGLAVPTISSFFPPGYQVSFCLVMVLLFAVDTGLYFSV

SEQ ID NO: 9824 - protein, 479 aa, synthetic construct
MALPVTALLLPLALLLHAARPDIQMTQSPSSLSASVGDRVTITCRASQGISSWLAWYQQKPEKAPKSLIYAASSLQSGVPSRFSGSGSGTDFTLTISSLQPEDFATYYCQQYNSYPPTFGGGTKVEIKGGGGSGGGGSGGGGSEVQLVESGGGLVQPGESLRLSCVASGFTFSRYKMNWVRQAPGKGLEWVSYISRSGRDIYYADSVKGRFTISRDNAKNSLYLQMNSLRDEDTAVYYCAGTVTTYYYFGMDVWGHGTTVTVSSTRGMRTEDLPKAVVFLEPQWYRVLEKDSVTLKCQGAYSPEDNSTQWFHNESLISSQASSYFIDAATVDDSGEYRCQTNLSTLSDPVQLEVHIGWLLLQAPRWVFKEEDPIHLRCHSWKNTALHKVTYLQNGKGRKYFHHNSDFYIPKATLKDSGSYFCRGLVGSKNVSSETVNITITQGLAVPTISSFFPPGYQVSFCLVMVLLFAVDTGLYFSV

SEQ ID NO: 9825 - protein, 478 aa, synthetic construct
MALPVTALLLPLALLLHAARPQSVVTQPPSMSAAPGQQVTISCSGGNSNIERNYVSWYLQLPGTAPKLVIFDNDRRPSGIPDRFSGSKSGTSATLGITGLQTGDEADYYCGTWDSSLRGWVFGGGTKLTVLGGGGGSGGGGSGGGGSEVQLVESGGGLIQPGGSLRLSCAASGFTFSNYAMNWVRQAPGKGLEWVSTINGRGSSTIYADSVKGRFTISRDNSKNTLYLQMNSLRAEDTATYYCARYISRGLGDSWGQGTLVTVTRGMRTEDLPKAVVFLEPQWYRVLEKDSVTLKCQGAYSPEDNSTQWFHNESLISSQASSYFIDAATVDDSGEYRCQTNLSTLSDPVQLEVHIGWLLLQAPRWVFKEEDPIHLRCHSWKNTALHKVTYLQNGKGRKYFHHNSDFYIPKATLKDSGSYFCRGLVGSKNVSSETVNITITQGLAVPTISSFFPPGYQVSFCLVMVLLFAVDTGLYFSV

SEQ ID NO: 9826 - protein, 479 aa, synthetic construct
MALPVTALLLPLALLLHAARPQSVLTQPPSASGTPGQRVTISCSGSRSNVGGNYVFWYQQVPGATPKLLIYRSNQRPSGVPDRFAGSKSGSSASLAISGLRSEDEADYYCATWDDSLSGFVFGTGTKVTVLGGGGGSGGGGSGGGGSEVQLVESGGGLVKPGGSLRLSCAASGFTFSDYYMSWIRQAPGKGLEWVSYISSSGSTIYYADSVKGRFTISRDNAKNSLYLQMNSLRAEDTAVYYCARGYGKAYDQWGQGTLVTVSSTRGMRTEDLPKAVVFLEPQWYRVLEKDSVTLKCQGAYSPEDNSTQWFHNESLISSQASSYFIDAATVDDSGEYRCQTNLSTLSDPVQLEVHIGWLLLQAPRWVFKEEDPIHLRCHSWKNTALHKVTYLQNGKGRKYFHHNSDFYIPKATLKDSGSYFCRGLVGSKNVSSETVNITITQGLAVPTISSFFPPGYQVSFCLVMVLLFAVDTGLYFSV

SEQ ID NO: 9827 - protein, 478 aa, synthetic construct
MALPVTALLLPLALLLHAARPDIQMTQSPSSLSASVGDRVTITCRASQDVNTAVAWYQQKPGKAPKLLIYSASFLESGVPSRFSGSRSGTDFTLTISSLQPEDFATYYCQQHYTTPPTFGQTKVEIKRGGGGSGGGGSGGGGSEVQLVESGGGLVQPGGSLRLSCAASGFNIKDTYIHWVRQAPGKGLEWVARIYPTNGYTRYADSVKGRFTISADTSKNTAYLQMNSLRAEDTAVYYCSRWGGDGFYAMDVWGQGTLVTVSSTRGMRTEDLPKAVVFLEPQWYRVLEKDSVTLKCQGAYSPEDNSTQWFHNESLISSQASSYFIDAATVDDSGEYRCQTNLSTLSDPVQLEVHIGWLLLQAPRWVFKEEDPIHLRCHSWKNTALHKVTYLQNGKGRKYFHHNSDFYIPKATLKDSGSYFCRGLVGSKNVSSETVNITITQGLAVPTISSFFPPGYQVSFCLVMVLLFAVDTGLYFSV

SEQ ID NO: 9828 - protein, 491 aa, synthetic construct
MALPVTALLLPLALLLHAARPQSALTQPPSASGSPGQSITISCTGTSNNFVSWYQQHAGKAPKLVIYDVNKRPSGVPDRFSGSKSGNTASLTVSGLQTDDEAVYYCGSLVGNWDVIFGGGTKLTVLGGGGSGGGGSGGGGSQPQLQESGPTLVEASETLSLTCAVSGDSTAACNSFWGWVRQPPGKGLEWVGSLSHCASYWNRGWTYHNPSLKSRLTLALDTPKNLVFLKLNSVTAADTATYYCARFGGEVLRYTDWPKPAWVDLWGRGTLVTVSSTRGMRTEDLPKAVVFLEPQWYRVLEKDSVTLKCQGAYSPEDNSTQWFHNESLISSQASSYFIDAATVDDSGEYRCQTNLSTLSDPVQLEVHIGWLLLQAPRWVFKEEDPIHLRCHSWKNTALHKVTYLQNGKGRKYFHHNSDFYIPKATLKDSGSYFCRGLVGSKNVSSETVNITITQGLAVPTISSFFPPGYQVSFCLVMVLLFAVDTGLYFSV

SEQ ID NO: 9829 - protein, 486 aa, synthetic construct
MALPVTALLLPLALLLHAARPELVLTQSPGTLSLSAGERATLSCRASQSVSSGSLAWYQQKPGQAPRLLIYGASTRATGIPDRFSGSGSGTDFTLTIGRLEPEDLAVYYCQQYGTSPYTFGQGTKLEIGGGGSGGGGSGGGGSLEQSGAEVKKPGSSVQVSCKASGGTFSMYGFNWVRQAPGHGLEWMGGIIPIFGTSNYAQKFRGRVTFTADQATSTAYMELTNLRSDDTAVYYCARDFGPDWEDGDSYDGSGRGFFDFWGQGTLVTVSSTRGMRTEDLPKAVVFLEPQWYRVLEKDSVTLKCQGAYSPEDNSTQWFHNESLISSQASSYFIDAATVDDSGEYRCQTNLSTLSDPVQLEVHIGWLLLQAPRWVFKEEDPIHLRCHSWKNTALHKVTYLQNGKGRKYFHHNSDFYIPKATLKDSGSYFCRGLVGSKNVSSETVNITITQGLAVPTISSFFPPGYQVSFCLVMVLLFAVDTGLYFSV

SEQ ID NO: 9830 - protein, 466 aa, synthetic construct
MALPVTALLLPLALLLHAARPDIQMTQSPSSLSASVGDRVTITCQASQDINNYLNWYQQKPGKAPKLLIYDASNLQTGVPSRFSGSGSGTDFTFTIEDIATYYCQQYTFGPGTKVDIKGGGGSGGGGSGGGGSEVQLLESGGGLVQPGGSLRLSCAASGFTFSWYSMTWVRQAPGKGLEWVSSIVPWGDFTQYADSVKGRFTISRDNSKNTLYLQMNSLRAEDTAVYYCAKGPGWGSFDLWGRGTLVTVSSTRGMRTEDLPKAVVFLEPQWYRVLEKDSVTLKCQGAYSPEDNSTQWFHNESLISSQASSYFIDAATVDDSGEYRCQTNLSTLSDPVQLEVHIGWLLLQAPRWVFKEEDPIHLRCHSWKNTALHKVTYLQNGKGRKYFHHNSDFYIPKATLKDSGSYFCRGLVGSKNVSSETVNITITQGLAVPTISSFFPPGYQVSFCLVMVLLFAVDTGLYFSV

SEQ ID NO: 9831 - protein, 476 aa, synthetic construct
MALPVTALLLPLALLLHAARPDIQMTQSPSSLSASVGDRVTITCTASLSVSSTYLHWYQQKPGSSPKLWIYSTSNLASGVPSRFSGSGSGTSYTLTISSLQPEDFATYYCHQYHRSPLTFGGGTKVEIKRGGGGSGGGGSGGGGSEVQLVESGGGLVQPGGSLRLSCAASGFSLTKYGVHWVRQAPGKGLEWVGVKWAGGSTDYNSALMSRFTISKDNAKNSLYLQMNSLRAEDTAVYYCARDHRDAMDYWGQGTLVTVSSTRGMRTEDLPKAVVFLEPQWYRVLEKDSVTLKCQGAYSPEDNSTQWFHNESLISSQASSYFIDAATVDDSGEYRCQTNLSTLSDPVQLEVHIGWLLLQAPRWVFKEEDPIHLRCHSWKNTALHKVTYLQNGKGRKYFHHNSDFYIPKATLKDSGSYFCRGLVGSKNVSSETVNITITQGLAVPTISSFFPPGYQVSFCLVMVLLFAVDTGLYFSV

SEQ ID NO: 9832 - protein, 480 aa, synthetic construct
MALPVTALLLPLALLLHAARPDIQMTQSPSSLSASVGDRVTITCKASQDVGTAVAWYQQKPGKAPKLLIYSASYRSTGVPSRFSGSGSGTDFTLTISSLQPEDFATYYCQHHYSAPWTFGGGTKVEIKGGGGSGGGGSGGGGSEVQLVESGGGLVQPGGSLRLSCAASGFTFSRNGMSWVRQAPGKGLEWVATVSSGGSYIYYADSVKGRFTISRDNAKNSLYLQMNSLRAEDTAVYYCARQGTTALATRFFDVWGQGTLVTVSSTRGMRTEDLPKAVVFLEPQWYRVLEKDSVTLKCQGAYSPEDNSTQWFHNESLISSQASSYFIDAATVDDSGEYRCQTNLSTLSDPVQLEVHIGWLLLQAPRWVFKEEDPIHLRCHSWKNTALHKVTYLQNGKGRKYFHHNSDFYIPKATLKDSGSYFCRGLVGSKNVSSETVNITITQGLAVPTISSFFPPGYQVSFCLVMVLLFAVDTGLYFSV

SEQ ID NO: 9833 - protein, 476 aa, synthetic construct
MALPVTALLLPLALLLHAARPDIQMTQSFSSLSASVGDRVTITCRASQDISNYLNWYQQKPGKAPKLLIYYTSRLHSGVPSRFSGSGSGTDYTLTISSLQPEDFATYFCQQGNTLPWTFGGGTKLEIKRGGGGSGGGGSGGGGSEVQLVQSGGGLVQSGGSLRLSCRASGYTFTRYWMLWVRQRPGKGLEWVAEINPRNDRTNYNEKFKTRFTISVDRSKNTLYLQMDSLRAEDTAVYFCALGGGYAMDYWGQGTLVTVSSTRGMRTEDLPKAVVFLEPQWYRVLEKDSVTLKCQGAYSPEDNSTQWFHNESLISSQASSYFIDAATVDDSGEYRCQTNLSTLSDPVQLEVHIGWLLLQAPRWVFKEEDPIHLRCHSWKNTALHKVTYLQNGKGRKYFHHNSDFYIPKATLKDSGSYFCRGLVGSKNVSSETVNITITQGLAVPTISSFFPPGYQVSFCLVMVLLFAVDTGLYFSV

SEQ ID NO: 9834 - protein, 476 aa, synthetic construct
MALPVTALLLPLALLLHAARPDIQMTQSPPSLSASVGGKVTITCKASQDIDRYMAWYQDKPGKGPKLLIHDTSTLQPGIPSRFSGSGSGRDYSFSISNLEPEDIATYYCLQYDNLWTFGGGTKLEIKRGGGGSGGGGSGGGGSQVQLVQSGAELVKPGASVKMSCKASGYIFTNYNIHWVKKSPGQGLEWIGAIYPGNGDAPYSQKFQDRATLTADTSSSTTYMELSSLTSEDSAVYYCVRANWDVAFAYWGQGTLVSVSSTRGMRTEDLPKAVVFLEPQWYRVLEKDSVTLKCQGAYSPEDNSTQWFHNESLISSQASSYFIDAATVDDSGEYRCQTNLSTLSDPVQLEVHIGWLLLQAPRWVFKEEDPIHLRCHSWKNTALHKVTYLQNGKGRKYFHHNSDFYIPKATLKDSGSYFCRGLVGSKNVSSETVNITITQGLAVPTISSFFPPGYQVSFCLVMVLLFAVDTGLYFSV

SEQ ID NO: 9835 - protein, 477 aa, synthetic construct
MALPVTALLLPLALLLHAARPDIQMTQSPASLSASVGETVTITCRVSGNIHNYLAWYQQKQGKSPQLLVYNAKTLADGVPSRFSGSGSGTQYSLKINSLQPEDFGSYYCQHFWSNPYTFGGGTKLEIKGGGGSGGGGSGGGGSQVQLQQSGASVKVSCKASELVRPGTGYAFTNYLIEWVKQRPGQGLEWIGVINPGSGGTNYNEKFKGKATLTADKSSSTAYMQLSSLTSDDSAVYFCARYRSYDWYFDVWGAGTTVTVSSTRGMRTEDLPKAVVFLEPQWYRVLEKDSVTLKCQGAYSPEDNSTQWFHNESLISSQASSYFIDAATVDDSGEYRCQTNLSTLSDPVQLEVHIGWLLLQAPRWVFKEEDPIHLRCHSWKNTALHKVTYLQNGKGRKYFHHNSDFYIPKATLKDSGSYFCRGLVGSKNVSSETVNITITQGLAVPTISSFFPPGYQVSFCLVMVLLFAVDTGLYFSV

SEQ ID NO: 9836 - protein, 477 aa, synthetic construct
MALPVTALLLPLALLLHAARPDIQMTQSPASLSASVGETVTIICRASVNIYSYLAWYQQKQGKSPQLLVYNAKILAEGVPSRFSGSGSGTQFSLKINSLQPEDFGSYYCQHHYGTFTFGSGTKLEIKRGGGGSGGGGSGGGGSQVQLKESGPGLVAPSQSLSITCTISGFSLTSYGVHWVRQPPGKGLEWLVVIWSDGSTTYNSALKSRLSISKDNSKSQVFLKMNSLQTDDTAIYYCASHYGSTLAFASWGHGTLVTVSAATRGMRTEDLPKAVVFLEPQWYRVLEKDSVTLKCQGAYSPEDNSTQWFHNESLISSQASSYFIDAATVDDSGEYRCQTNLSTLSDPVQLEVHIGWLLLQAPRWVFKEEDPIHLRCHSWKNTALHKVTYLQNGKGRKYFHHNSDFYIPKATLKDSGSYFCRGLVGSKNVSSETVNITITQGLAVPTISSFFPPGYQVSFCLVMVLLFAVDTGLYFSV

SEQ ID NO: 9837 - protein, 485 aa, synthetic construct
MALPVTALLLPLALLLHAARPDIVMTQSHKFMSTSVGDRVSVTCKASQNVGNNVAWYQQKPGQSPKVLIYSASYRYSGVPDRFTGSGSGTDFTLTISNVQSEDLAEYFCQQYNTYPFTFGSGTKLEIKGGGGSGGGGSGGGGSEVQLEESGGGLVQPGGSMKLSCVASGFTFSNYWMNWVRQSPEKGLEWVAEIRFKSHNYATHFAESVKGRFTISRDDSKSSVYLQMNNLRAEDTGIYYCTRRIGNSDYDWWYFDVWGAGTSVTVSSASTRGMRTEDLPKAVVFLEPQWYRVLEKDSVTLKCQGAYSPEDNSTQWFHNESLISSQASSYFIDAATVDDSGEYRCQTNLSTLSDPVQLEVHIGWLLLQAPRWVFKEEDPIHLRCHSWKNTALHKVTYLQNGKGRKYFHHNSDFYIPKATLKDSGSYFCRGLVGSKNVSSETVNITITQGLAVPTISSFFPPGYQVSFCLVMVLLFAVDTGLYFSV

SEQ ID NO: 9838 - protein, 477 aa, synthetic construct
MALPVTALLLPLALLLHAARPDIQMTQSSSSFSVSLGDRVTITCKASEDIYIRLAWYQQKPGNAPRLLISAATSLETGIPSRFSGSGSGEDYTLTITSLQTEDVATYYCQQYWTTPWTFGGGTKLEIKRGGGGSGGGGSGGGGSDVQLQESGPGLVKPSQSLSLTCTVTGYSITIDYTWNWIRQFPGNKLEWMGYITYSGSTDYNPSLKSRSSITRDTSMNQFFLQLNSVTTEDTATYYCARLGRRYALDYWGQGTSVTVSSTRGMRTEDLPKAVVFLEPQWYRVLEKDSVTLKCQGAYSPEDNSTQWFHNESLISSQASSYFIDAATVDDSGEYRCQTNLSTLSDPVQLEVHIGWLLLQAPRWVFKEEDPIHLRCHSWKNTALHKVTYLQNGKGRKYFHHNSDFYIPKATLKDSGSYFCRGLVGSKNVSSETVNITITQGLAVPTISSFFPPGYQVSFCLVMVLLFAVDTGLYFSV

SEQ ID NO: 9839 - protein, 476 aa, synthetic construct
MALPVTALLLPLALLLHAARPDVQLQESGPGLVKPSQSLSLTCTVTGYSITSDYTWNWIRQFPGNKLEWMGYITYSGSTSYNPSLKSRNSITRDTSKNQFFLQLNSVTTEDTATYYCARLGRRYTMDYWGQGTSVTVSSGGGGSGGGGSGGGGSDIQMTQSSSSFSVSLGDRVTITCMASEDIYIRLAWYQQKPGNAPRLLISAATSLETGVPSRFSGSGSGKDYTLSITSLQTEDVGTYYCQQYWSSPWTFGGGTKLEINTRGMRTEDLPKAVVFLEPQWYRVLEKDSVTLKCQGAYSPEDNSTQWFHNESLISSQASSYFIDAATVDDSGEYRCQTNLSTLSDPVQLEVHIGWLLLQAPRWVFKEEDPIHLRCHSWKNTALHKVTYLQNGKGRKYFHHNSDFYIPKATLKDSGSYFCRGLVGSKNVSSETVNITITQGLAVPTISSFFPPGYQVSFCLVMVLLFAVDTGLYFSV

SEQ ID NO: 9840 - protein, 476 aa, synthetic construct
MALPVTALLLPLALLLHAARPDIQMTQSSSSFSVSLGDRVTITCMASEDIYIRLAWYQQKPGNAPRLLISAATSLETGVPSRFSGSGSGKDYTLSITSLQTEDVGTYYCQQYWSSPWTFGGGTKLEINGGGGSGGGGSGGGGSDVQLQESGPGLVKPSQSLSLTCTVTGYSITSDYTWNWIRQFPGNKLEWMGYITYSGSTSYNPSLKSRNSITRDTSKNQFFLQLNSVTTEDTATYYCARLGRRYTMDYWGQGTSVTVSSTRGMRTEDLPKAVVFLEPQWYRVLEKDSVTLKCQGAYSPEDNSTQWFHNESLISSQASSYFIDAATVDDSGEYRCQTNLSTLSDPVQLEVHIGWLLLQAPRWVFKEEDPIHLRCHSWKNTALHKVTYLQNGKGRKYFHHNSDFYIPKATLKDSGSYFCRGLVGSKNVSSETVNITITQGLAVPTISSFFPPGYQVSFCLVMVLLFAVDTGLYFSV

SEQ ID NO: 9841 - protein, 478 aa, synthetic construct
MALPVTALLLPLALLLHAARPDQIVLTQSPAIMSASPGEKVTISCSASSSVSYMYWYQQKPGSSPKPWIYRTSNLASGVPARFSGSGSGTSYSLTISNMEAEDAAAYYCQQYHSYPTTFGGGTKLEVKGGGGSGGGGSGGGGSEVQLVESGGGLVQPKGSLKLSCAASGFSFNTYAMNWVRQAPGKGLEWIAHIRSKSNNFATYYADSVKDRFSISRDASENILFLQMNNLKTEDTAMYYCVRQGGDFPMDYWGQGTSVTVSSTRGMRTEDLPKAVVFLEPQWYRVLEKDSVTLKCQGAYSPEDNSTQWFHNESLISSQASSYFIDAATVDDSGEYRCQTNLSTLSDPVQLEVHIGWLLLQAPRWVFKEEDPIHLRCHSWKNTALHKVTYLQNGKGRKYFHHNSDFYIPKATLKDSGSYFCRGLVGSKNVSSETVNITITQGLAVPTISSFFPPGYQVSFCLVMVLLFAVDTGLYFSV

SEQ ID NO: 9842 - protein, 479 aa, synthetic construct
MALPVTALLLPLALLLHAARPDIQMTQSPSSLSASVGDRVTITCRASQSISSYLNWYQQKPGKAPKLLIYDASNLETGVPSRFSGSGSGTDFTFTISSLQPEDIATYYCQQYDNLPLTFGGGTKVDIKRGGGGSGGGGSGGGGSQVQLVESGGGVVQPGRSLRLSCAASGFTFSSYAMHWVRQAPGKGLEWVAVISYDGSNKYYADSVKGRFTISRDNSKNTLYLQMNSLRAEDTAVYYCARAHNSSSWSFDYWGQGTLVTVSSTRGMRTEDLPKAVVFLEPQWYRVLEKDSVTLKCQGAYSPEDNSTQWFHNESLISSQASSYFIDAATVDDSGEYRCQTNLSTLSDPVQLEVHIGWLLLQAPRWVFKEEDPIHLRCHSWKNTALHKVTYLQNGKGRKYFHHNSDFYIPKATLKDSGSYFCRGLVGSKNVSSETVNITITQGLAVPTISSFFPPGYQVSFCLVMVLLFAVDTGLYFSV

SEQ ID NO: 9843 - protein, 488 aa, synthetic construct
MALPVTALLLPLALLLHAARPDVVMTQSPLSLPVSLGDQASISCRSSQRLVHSNGNTYLHWYLQKPGQSPKLLIYRVSNRFPGVPDRFSGSGSGTDFTLKISRVEAEDLGIYFCSQSTHVPYTFGGGTKLEIKRGGGGSGGGGSGGGGSEVRLQQSGPDLIKPGASVKMSCKASGYTFTGYVMHWVKQRPGQGLEWIGFINPYNDDIQSNERFRGKATLTSDKSSTTAYMELSSLTSEDSAVYYCARGAGYNFDGAYRFFDFWGQGTTLTVSSTRGMRTEDLPKAVVFLEPQWYRVLEKDSVTLKCQGAYSPEDNSTQWFHNESLISSQASSYFIDAATVDDSGEYRCQTNLSTLSDPVQLEVHIGWLLLQAPRWVFKEEDPIHLRCHSWKNTALHKVTYLQNGKGRKYFHHNSDFYIPKATLKDSGSYFCRGLVGSKNVSSETVNITITQGLAVPTISSFFPPGYQVSFCLVMVLLFAVDTGLYFSV

SEQ ID NO: 9844 - protein, 479 aa, synthetic construct
MALPVTALLLPLALLLHAARPSYELTQPPSVSVSPGQTATISCSGDQLGGKYGHWYQKKPGQSPVLVLYQDRKRPAGIPERFSGSSSGNTITLTISGTQAVDEADYYCQAWDTNLGGVFGGGTKVTVLGQGGGGSGGGGSGGGGSQVQLVESGAEVKKPGASVKVSCKASGYTFTGYYMHWVRQAPGQGLEWMGRINPNSGGTNYAQKFQGRVTMTRDTSISTAYMELSRLRSDDTAVYYCASPRGRGSAFDIWGQGTLVTVSSTRGMRTEDLPKAVVFLEPQWYRVLEKDSVTLKCQGAYSPEDNSTQWFHNESLISSQASSYFIDAATVDDSGEYRCQTNLSTLSDPVQLEVHIGWLLLQAPRWVFKEEDPIHLRCHSWKNTALHKVTYLQNGKGRKYFHHNSDFYIPKATLKDSGSYFCRGLVGSKNVSSETVNITITQGLAVPTISSFFPPGYQVSFCLVMVLLFAVDTGLYFSV

SEQ ID NO: 9845 - protein, 482 aa, synthetic construct
MALPVTALLLPLALLLHAARPNFMLTQPHSVSESPGKTVTISCTRSSGSIASKYVQWYQQRPGSSPTTVIYEDNQRPSGVPDRFSGSIDTSSNSASLTISGLRTEDEADYYCHSYDSNNHSVFGGGTKVTVLGQGGGGSGGGGSGGGGSEVQLVESGGGVVQPGGSLRLSCAASGFTFSSYAMSWVRQAPGKGLEWVSAISGSGGSTYYADSVKGRFSISRDNSKNTLYLQMNSLRAEDTAVYYCARTRSSGAFDIWGQGTLVTVSSTRGMRTEDLPKAVVFLEPQWYRVLEKDSVTLKCQGAYSPEDNSTQWFHNESLISSQASSYFIDAATVDDSGEYRCQTNLSTLSDPVQLEVHIGWLLLQAPRWVFKEEDPIHLRCHSWKNTALHKVTYLQNGKGRKYFHHNSDFYIPKATLKDSGSYFCRGLVGSKNVSSETVNITITQGLAVPTISSFFPPGYQVSFCLVMVLLFAVDTGLYFSV

SEQ ID NO: 9846 - protein, 478 aa, synthetic construct
MALPVTALLLPLALLLHAARPDIQMNQSPSSLSASLGDTITITCHASQNINVWLSWYQQKPGNIPKLLIYKASNLHTGVPSRFSGSGSGTGFTITISSLQPEDIATYYCQQGQSYPWTFGGGTKLEIKRGGGGSGGGGSGGGGSEVQLQQSGPELVKPGASVKISCKASGYSFTGYFMNWVKQSHGKSLEYIGRFNPYNGETLYNQKFKGKATLTVDKSSSTVHMELLSVTSEDSAVYYCGRSGNDDAMDYWGQGTSVTVSSATRGMRTEDLPKAVVFLEPQWYRVLEKDSVTLKCQGAYSPEDNSTQWFHNESLISSQASSYFIDAATVDDSGEYRCQTNLSTLSDPVQLEVHIGWLLLQAPRWVFKEEDPIHLRCHSWKNTALHKVTYLQNGKGRKYFHHNSDFYIPKATLKDSGSYFCRGLVGSKNVSSETVNITITQGLAVPTISSFFPPGYQVSFCLVMVLLFAVDTGLYFSV

SEQ ID NO: 9847 - protein, 475 aa, synthetic construct
MALPVTALLLPLALLLHAARPDILLTQSPAILSVSPGERVSFSCRASQNIGTSIHWYQQRTNGSPRLLIKYASESVSGIPSRFSGSGSGTDFTLSINSVESEDIADYYCQHTNSWPTTFGGGTKLEIKRGGGGSGGGGSGGGGSQVQLQQSDAELVKPGASVKISCKASGYTFTDHAIHWVKQKPEQGLEWIGYFSPGNGDIKYNEKFKGKATLTADKSSSTAYMQLNSLTSEDSAVYFCKRSYGNYDYWGQGTTLTVSSTRGMRTEDLPKAVVFLEPQWYRVLEKDSVTLKCQGAYSPEDNSTQWFHNESLISSQASSYFIDAATVDDSGEYRCQTNLSTLSDPVQLEVHIGWLLLQAPRWVFKEEDPIHLRCHSWKNTALHKVTYLQNGKGRKYFHHNSDFYIPKATLKDSGSYFCRGLVGSKNVSSETVNITITQGLAVPTISSFFPPGYQVSFCLVMVLLFAVDTGLYFSV

SEQ ID NO: 9848 - protein, 480 aa, synthetic construct
MALPVTALLLPLALLLHAARPDIVMTQSPDSLAVSLGERATINCKSSQSLLNSGDQKNYLTWYQQKPGQPPKLLIYWASTRESGVPDRFSGSGSGTDFTLTISSLQAEDVAVYYCQNDYSYPLTFGQGTKVEIKGGGGSGGGGSGGGGSQVQLVQSGAEVKKTGSSVKVSCKASGYTFTDHAIHVWRQAPGQALEWMGHFSPGNTDIKYNDKFKGRVTLTVDRSMSTAYMELSSLRSEDTAMYYCKTSTFFFDYWGQGTMVTVSSTRGMRTEDLPKAVVFLEPQWYRVLEKDSVTLKCQGAYSPEDNSTQWFHNESLISSQASSYFIDAATVDDSGEYRCQTNLSTLSDPVQLEVHIGWLLLQAPRWVFKEEDPIHLRCHSWKNTALHKVTYLQNGKGRKYFHHNSDFYIPKATLKDSGSYFCRGLVGSKNVSSETVNITITQGLAVPTISSFFPPGYQVSFCLVMVLLFAVDTGLYFSV

SEQ ID NO: 9849 - protein, 479 aa, synthetic construct
MALPVTALLLPLALLLHAARPDIQMTQSPSSLSASVGDRVTITCKASQDVSIAVAWYQQKPGKAPKVLIYSASYRYTGVPDRFSGSGSGTDFTFTISSLQPEDIAVYYCQQHYITPLTFGGGTKVEIKGGGGSGGGGSGGGGSQIQLVQSGHEVKKPGASVKVSCKASGYTFTNYGMNWVRQAPGQGLEWMGWINTKTGEPTYAEEFKGRFVFSLETSASTAYLQISSLKAEDTAMYFCGRGGYGSSYWYFDVWGQGTTVTVSSTRGMRTEDLPKAVVFLEPQWYRVLEKDSVTLKCQGAYSPEDNSTQWFHNESLISSQASSYFIDAATVDDSGEYRCQTNLSTLSDPVQLEVHIGWLLLQAPRWVFKEEDPIHLRCHSWKNTALHKVTYLQNGKGRKYFHHNSDFYIPKATLKDSGSYFCRGLVGSKNVSSETVNITITQGLAVPTISSFFPPGYQVSFCLVMVLLFAVDTGLYFSV

SEQ ID NO: 9850 - protein, 482 aa, synthetic construct
MALPVTALLLPLALLLHAARPQAVVTQPPSASGTPGQRVTISCSGSSSNIGSNTVNWYQQVPGTAPKLLIYSNNQRPSGVPDRFSGSKSGTSASLAISGLQSEDEADYYCAAWDDSLNGWVFGGGTKLTVLGGGGSGGGGSGGGGSQMQLVQSGAEVKEPGESLRISCKGSGYSFTNFWISWVRQMPGKGLEWMGRVDPGYSYSTYSPSFQGHVTISADKSTSTAYLQWNSLKASDTAMYYCARVQYSGYYDWFDPWGQGTLVTVSSTRGMRTEDLPKAVVFLEPQWYRVLEKDSVTLKCQGAYSPEDNSTQWFHNESLISSQASSYFIDAATVDDSGEYRCQTNLSTLSDPVQLEVHIGWLLLQAPRWVFKEEDPIHLRCHSWKNTALHKVTYLQNGKGRKYFHHNSDFYIPKATLKDSGSYFCRGLVGSKNVSSETVNITITQGLAVPTISSFFPPGYQVSFCLVMVLLFAVDTGLYFSV

SEQ ID NO: 9851 - protein, 476 aa, synthetic construct
MALPVTALLLPLALLLHAARPDIQMTQSPSTLSASVGDRVTITCRASQNINKWLAWYQQRPGKAPQLLIYKASSLESGVPSRFSGSGSGTEYTLTISSLQPDDFATYYCQQYNSYATFGQGTKVEIKRGGGGSGGGGSGGGGSQVQLVQSGAEVKKPGESLKISCKGSGYNFSNKWIGWVRQLPGRGLEWIAIIYPGYSDITYSPSFQGRVTISADTSINTAYLHWHSLKASDTAMYYCVRHTALAGFDYWGLGTLVTVSSTRGMRTEDLPKAVVFLEPQWYRVLEKDSVTLKCQGAYSPEDNSTQWFHNESLISSQASSYFIDAATVDDSGEYRCQTNLSTLSDPVQLEVHIGWLLLQAPRWVFKEEDPIHLRCHSWKNTALHKVTYLQNGKGRKYFHHNSDFYIPKATLKDSGSYFCRGLVGSKNVSSETVNITITQGLAVPTISSFFPPGYQVSFCLVMVLLFAVDTGLYFSV

SEQ ID NO: 9852 - protein, 481 aa, synthetic construct
MALPVTALLLPLALLLHAARPQSVVTQPPSVSVAPGKTARITCGRNNIGSKSVHWYQQKPGQAPVLVVYDDSDRPSGIPERFSGSNSGNTATLTISRVEAGDEADYYCQVWDSSSDHVVFGGGTKLTVLGGGGGSGGGGSGGGGSEVQLVQSGGGVVRPGGSLRLSCAASGFTFDDYGMSWVRQAPGKGLEWVSGINWNGGSTGYADSVRGRFTISRDNAKNSLYLQMNSLRAEDTALYYCARERGYGYHDPHDYWGQGTLVTVSSTRGMRTEDLPKAVVFLEPQWYRVLEKDSVTLKCQGAYSPEDNSTQWFHNESLISSQASSYFIDAATVDDSGEYRCQTNLSTLSDPVQLEVHIGWLLLQAPRWVFKEEDPIHLRCHSWKNTALHKVTYLQNGKGRKYFHHNSDFYIPKATLKDSGSYFCRGLVGSKNVSSETVNITITQGLAVPTISSFFPPGYQVSFCLVMVLLFAVDTGLYFSV

SEQ ID NO: 9853 - protein, 480 aa, synthetic construct
MALPVTALLLPLALLLHAARPDIVLTQSPASLAVSLGQRATISCRASESVDNYGNTFMHWYQQKPGQPPKLLIYRASNLESGIPARFSGSGSRTDFTLTINPVEADDVATYYCQQSNEDPPTFGAGTKLELKGGGGSGGGGSGGGGSQIQLVQSGPELKKPGETVKISCKASGYIFTNYGMNWVKQAPGKSFKWMGWINTYTGESTYSADFKGRFAFSLETSASTAYLHINDLKNEDTATYFCARSGGYDPMDYWGQGTSVTVSSTRGMRTEDLPKAVVFLEPQWYRVLEKDSVTLKCQGAYSPEDNSTQWFHNESLISSQASSYFIDAATVDDSGEYRCQTNLSTLSDPVQLEVHIGWLLLQAPRWVFKEEDPIHLRCHSWKNTALHKVTYLQNGKGRKYFHHNSDFYIPKATLKDSGSYFCRGLVGSKNVSSETVNITITQGLAVPTISSFFPPGYQVSFCLVMVLLFAVDTGLYFSV

SEQ ID NO: 9854 - protein, 478 aa, synthetic construct
MALPVTALLLPLALLLHAARPEIVLTQSPGTLSLSPGERATLSCRASQSVSNTYLAWYHQRPGQAPRLLIYGASSRATGIPDRFSGSGSGTDFALTISSLEPEDFAVYYCQQYSNSWTFGQGTKVEIKRGGGGSGGGGSGGGGSQVQLVESGGGVVQPGRSLRLSCAASGFTFSSYDMHWVRQAPGKGLEWVAVISYDGTNEYYADSVKGRFTISRDTSKNTLYLQMNSLRAEDTAVYYCARERYFDWSFDYWGQGTLVSVSSTRGMRTEDLPKAVVFLEPQWYRVLEKDSVTLKCQGAYSPEDNSTQWFHNESLISSQASSYFIDAATVDDSGEYRCQTNLSTLSDPVQLEVHIGWLLLQAPRWVFKEEDPIHLRCHSWKNTALHKVTYLQNGKGRKYFHHNSDFYIPKATLKDSGSYFCRGLVGSKNVSSETVNITITQGLAVPTISSFFPPGYQVSFCLVMVLLFAVDTGLYFSV

SEQ ID NO: 9855 - protein, 477 aa, synthetic construct
MALPVTALLLPLALLLHAARPELTQDPAVSVALGQTVRITCQGDSLRSNYANWYQQKPGQAPVLVIYGQNNRPSGIPDRFSGSSSGNTASLTITGAQAADEADYYCDSRVSTGNHVVFGGGTKLTVLGQGGGGSGGGGSGGGGSEVQLVQSGAEVKKPGASVKVSCKASGYTFTSYAMHWVRQAPGQRLEWMGWINAGNGNTKYSQKFQGRVTITRDTSASTAYMELSSLRSEDTAVYYCARDISYGSFDYWGQGTLVTVSSTRGMRTEDLPKAVVFLEPQWYRVLEKDSVTLKCQGAYSPEDNSTQWFHNESLISSQASSYFIDAATVDDSGEYRCQTNLSTLSDPVQLEVHIGWLLLQAPRWVFKEEDPIHLRCHSWKNTALHKVTYLQNGKGRKYFHHNSDFYIPKATLKDSGSYFCRGLVGSKNVSSETVNITITQGLAVPTISSFFPPGYQVSFCLVMVLLFAVDTGLYFSV

SEQ ID NO: 9856 - protein, 473 aa, synthetic construct
MALPVTALLLPLALLLHAARPDIQMTQSPSSLSASVGDRVTITCSATSSISYMHWYQQKPGKAPKGWIYDTSKLAHGVPSRFSGSGSGTDFTLTISSLQPEDFATYYCHQRRSYPFTFGQGTKVEIKGGGGSGGGGSGGGGSEVQLVQSGAEVKKPGASVKVSCKASGYTFTNFWIHWVRQAPGQGLEWIGEIDPSDSYTNYNQKFKGRVTITRDTSTSTAYLELSSLRSEDTAVYYCAREITTVDYWGQGTLVTVSSTRGMRTEDLPKAVVFLEPQWYRVLEKDSVTLKCQGAYSPEDNSTQWFHNESLISSQASSYFIDAATVDDSGEYRCQTNLSTLSDPVQLEVHIGWLLLQAPRWVFKEEDPIHLRCHSWKNTALHKVTYLQNGKGRKYFHHNSDFYIPKATLKDSGSYFCRGLVGSKNVSSETVNITITQGLAVPTISSFFPPGYQVSFCLVMVLLFAVDTGLYFSV

SEQ ID NO: 9857 - protein, 480 aa, synthetic construct
MALPVTALLLPLALLLHAARPDIQMTQSPSSLSASVGDRVTITCKASQGFNKYVAWYQQKPGKAPKLLIYYTSTLQPGVPSRFSGSGSGRDYTLTISSLQPEDFATYYCLQYGNLLYAFGQGTKVEIKRGGGGSGGGGSGGGGSEVQLVQSGAEVKKPGASVKVSCKASGYTFTSYWIGWVRQAPGQGLEWIGDIYPGGGYTNYNEKFKGRVTITRDTSTSTAYLELSSLRSEDTAVYYCARLDGSSYRGAMDSWGQGTLVTVSSTRGMRTEDLPKAVVFLEPQWYRVLEKDSVTLKCQGAYSPEDNSTQWFHNESLISSQASSYFIDAATVDDSGEYRCQTNLSTLSDPVQLEVHIGWLLLQAPRWVFKEEDPIHLRCHSWKNTALHKVTYLQNGKGRKYFHHNSDFYIPKATLKDSGSYFCRGLVGSKNVSSETVNITITQGLAVPTISSFFPPGYQVSFCLVMVLLFAVDTGLYFSV

SEQ ID NO: 9858 - protein, 476 aa, synthetic construct
MALPVTALLLPLALLLHAARPDIQMTQSPSSLSASVGDRVTITCRASQDIRYYLNWYQQKPGKAPKLLIYVASSLQSGVPSRFSGSGSGTEFTLTVSSLQPEDFATYYCLQVYSTPRTFGQGTKVEIKGGGGSGGGGSGGGGSEVQLVESGGGLAKPGGSLRLSCAASGFRFTFNNYYMDWVRQAPGQGLEWVSRISSSGDPTWYADSVKGRFTISRENAKNTLFLQMNSLRAEDTAVYYCASLTTGSDSWGQGVLVTVSSTRGMRTEDLPKAVVFLEPQWYRVLEKDSVTLKCQGAYSPEDNSTQWFHNESLISSQASSYFIDAATVDDSGEYRCQTNLSTLSDPVQLEVHIGWLLLQAPRWVFKEEDPIHLRCHSWKNTALHKVTYLQNGKGRKYFHHNSDFYIPKATLKDSGSYFCRGLVGSKNVSSETVNITITQGLAVPTISSFFPPGYQVSFCLVMVLLFAVDTGLYFSV

SEQ ID NO: 9859 - protein, 477 aa, synthetic construct
MALPVTALLLPLALLLHAARPEIVMTQSPATLSVSPGERATLSCRASQSVSRNLAWYQQKPGQAPRLLIYGASTRATGIPARFSGSGSGTEFTLTIGSLQSEDFAVYYCQQYKTWPRTFGQGTNVEIKGGGGSGGGGSGGGGSQVQLQQWGAGLLKPSETLSLTCAVFGGSFSGYYWSWIRQPPGKGLEWIGEINHRGNTNDNPSLKSRVTISVDTSKNQFALKLSSVTAADTAVYYCARERGYTYGNFDHWGQGTLVTVSSTRGMRTEDLPKAVVFLEPQWYRVLEKDSVTLKCQGAYSPEDNSTQWFHNESLISSQASSYFIDAATVDDSGEYRCQTNLSTLSDPVQLEVHIGWLLLQAPRWVFKEEDPIHLRCHSWKNTALHKVTYLQNGKGRKYFHHNSDFYIPKATLKDSGSYFCRGLVGSKNVSSETVNITITQGLAVPTISSFFPPGYQVSFCLVMVLLFAVDTGLYFSV

SEQ ID NO: 9860 - protein, 483 aa, synthetic construct
MALPVTALLLPLALLLHAARPDIQMTQSPSSLSASVGDRVTITCKASKNIRSYLAWYQQKPGKAPKLLIYSGSTLHSGVPSRFSGSGSGTDFTLTISSLQPEDFATYYCQQHHEYPLTFGQGTKVEIKRGGGGSGGGGSGGGGSQVQLQESGPGLVKPSETLSLTCTVSGYTITSGYDWSWIRQPPGKGLEWIGYINYGGSTNYKPSLGSRVTISVDTSKNQFSLKLSSVTAADTAVYYCARYNEYKSYIYDWYFDFWGQGTLVTVSSTRGMRTEDLPKAVVFLEPQWYRVLEKDSVTLKCQGAYSPEDNSTQWFHNESLISSQASSYFIDAATVDDSGEYRCQTNLSTLSDPVQLEVHIGWLLLQAPRWVFKEEDPIHLRCHSWKNTALHKVTYLQNGKGRKYFHHNSDFYIPKATLKDSGSYFCRGLVGSKNVSSETVNITITQGLAVPTISSFFPPGYQVSFCLVMVLLFAVDTGLYFSV

SEQ ID NO: 9861 - protein, 485 aa, synthetic construct
MALPVTALLLPLALLLHAARPQSVVTQPPSVSAAPGQKVTISCSGSSSNIGNNYVSWYQQLPGTAPKLLIYDNNKRPSGIPDRFSGSKSGTSATLGITGLQTGDEADYYCGTWDGSLYTMLFGGGTKLTVLGGGGSGGGGSGGGGSEVQLVESGGGLVKPGGSLRLSCAASGFTFSNAWMSWVRQAPGKGLEWVGFIRSKAYGGTTEYAASVKGRFTISRDDSKSIAYLQMNNLKTEDTAVYYCARDGLYSSSWYDSDYWGQGTLVTVSSTRGMRTEDLPKAVVFLEPQWYRVLEKDSVTLKCQGAYSPEDNSTQWFHNESLISSQASSYFIDAATVDDSGEYRCQTNLSTLSDPVQLEVHIGWLLLQAPRWVFKEEDPIHLRCHSWKNTALHKVTYLQNGKGRKYFHHNSDFYIPKATLKDSGSYFCRGLVGSKNVSSETVNITITQGLAVPTISSFFPPGYQVSFCLVMVLLFAVDTGLYFSV

SEQ ID NO: 9862 - protein, 490 aa, synthetic construct
MALPVTALLLPLALLLHAARPQSVLTQPPSVSGAPGQRVTISCTGSSSNIGAGYDVHWYQQLPGTAPKLLIFGNSNRPSGVPDRFSGFKSGTSASLAITGLQAEDEADYFCQSYDSSLSGSGVFGTGTKVTVLGGGGGSGGGGSGGGGSQMQLVQSGGGLVQPGRSLRLSCAASGFTFDDYAMHWVRQAPGKGLEWVSGISWNSGSIGYADSVKGRFTISRDNAKNSLYLQMNSLRAEDTALYYCAKDIHSGSYYGLLYYAMDVWGQGTTVTVSSTRGMRTEDLPKAVVFLEPQWYRVLEKDSVTLKCQGAYSPEDNSTQWFHNESLISSQASSYFIDAATVDDSGEYRCQTNLSTLSDPVQLEVHIGWLLLQAPRWVFKEEDPIHLRCHSWKNTALHKVTYLQNGKGRKYFHHNSDFYIPKATLKDSGSYFCRGLVGSKNVSSETVNITITQGLAVPTISSFFPPGYQVSFCLVMVLLFAVDTGLYFSV

SEQ ID NO: 9863 - protein, 490 aa, synthetic construct
MALPVTALLLPLALLLHAARPLPVLTQPPSASGTPGQRVTISCSGRSSNIGSNSVNWYRQLPGAAPKLLIYSNNQRPPGVPVRFSGSKSGTSASLAISGLQSEDEATYYCATWDDNLNVHYVFGTGTKVTVLGSRGGGGSGGGGSGGGGSLEMAQVQLVQSGAEVKKPGSSVKVSCKASGGTFSSYAISWVRQAPGQGLEWMGRIIPILGIANYAQKFQGRVTITADKSTSTAYMELSSLRSEDTAVYYCARGGYYSHDMWSEDWGQGTLVTVSSTRGMRTEDLPKAVVFLEPQWYRVLEKDSVTLKCQGAYSPEDNSTQWFHNESLISSQASSYFIDAATVDDSGEYRCQTNLSTLSDPVQLEVHIGWLLLQAPRWVFKEEDPIHLRCHSWKNTALHKVTYLQNGKGRKYFHHNSDFYIPKATLKDSGSYFCRGLVGSKNVSSETVNITITQGLAVPTISSFFPPGYQVSFCLVMVLLFAVDTGLYFSV

SEQ ID NO: 9864 - protein, 479 aa, synthetic construct
MALPVTALLLPLALLLHAARPDIVLTQSPASLAVSLGERATINCRASESVSVIGAHLIHWYQQKPGQPPKLLIYLASNLETGVPARFSGSGSGTDFTLTISSLQAEDAAIYYCLQSRIFPRTFGQGTKLEIKGGGGSGGGGSGGGGSQVQLVQSGSELKKPGESVKISCKASGYTFTDYSINWVKQAPGQGLKWMGWINTETREPAYAYDFRGRFVFSLDTSASTAYLQISSLKAEDTAVYFCALDYSYAMDYWGQGTLVTVSSTRGMRTEDLPKAVVFLEPQWYRVLEKDSVTLKCQGAYSPEDNSTQWFHNESLISSQASSYFIDAATVDDSGEYRCQTNLSTLSDPVQLEVHIGWLLLQAPRWVFKEEDPIHLRCHSWKNTALHKVTYLQNGKGRKYFHHNSDFYIPKATLKDSGSYFCRGLVGSKNVSSETVNITITQGLAVPTISSFFPPGYQVSFCLVMVLLFAVDTGLYFSV

SEQ ID NO: 9865 - protein, 480 aa, synthetic construct
MALPVTALLLPLALLLHAARPDIVLTQSPATLSLSPGDRATLSCRASESVTILGSHLIYWYQQKPGQAPRLLIQLASNVQTGIPARFSGSGSRTDFTLTISSLEPEDFAVYYCLQSRTIPRTFGQGTKLEIKRGGGGSGGGGSGGGGSQVQLVQSGSELKKPGESVKISCKASGYTFTHYSMNWVRQAPGQGLEWMGRINTETGEPLYADDFKGRFVFSLDTSASTAYLQISSLKAEDTAVYYCSNDYLYSLDYWGQGTLVTVSSTRGMRTEDLPKAVVFLEPQWYRVLEKDSVTLKCQGAYSPEDNSTQWFHNESLISSQASSYFIDAATVDDSGEYRCQTNLSTLSDPVQLEVHIGWLLLQAPRWVFKEEDPIHLRCHSWKNTALHKVTYLQNGKGRKYFHHNSDFYIPKATLKDSGSYFCRGLVGSKNVSSETVNITITQGLAVPTISSFFPPGYQVSFCLVMVLLFAVDTGLYFSV

SEQ ID NO: 9866 - protein, 484 aa, synthetic construct
MALPVTALLLPLALLLHAARPDFVMTQSPDSLAVSLGERVTMSCKSSQSLLNSGNQKNYLTWYQQKPGQPPKLLIYWASTRESGVPDRFSGSGSGTDFTLTISSLQAEDVAVYYCQNDYSYPYTFGQGTKLEIKGGGGSGGGGSGGGGSEVQLVQSGAELKKPGASVKVSCKASGYTFTDYYMKWVRQAPGQGLEWIGDIIPSNGATFYNQKFKGRVTITVDKSTSTAYMELSSLRSEDTAVYYCARSHLLRASWFAYWGQGTLVTVSSTRGMRTEDLPKAVVFLEPQWYRVLEKDSVTLKCQGAYSPEDNSTQWFHNESLISSQASSYFIDAATVDDSGEYRCQTNLSTLSDPVQLEVHIGWLLLQAPRWVFKEEDPIHLRCHSWKNTALHKVTYLQNGKGRKYFHHNSDFYIPKATLKDSGSYFCRGLVGSKNVSSETVNITITQGLAVPTISSFFPPGYQVSFCLVMVLLFAVDTGLYFSV

SEQ ID NO: 9867 - protein, 484 aa, synthetic construct
MALPVTALLLPLALLLHAARPDFVMTQSPDSLAVSLGERVTMSCKSSQSLLNSGNQKNYLTWYQQKPGQPPKLLIYWASTRESGVPDRFSGSGSGTDFTLTISSLQAEDVAVYYCQNDYSYPYTFGQGTKLEIKGGGGSGGGGSGGGGSQVQLVQSGAELKKPGASVKVSCKASGYTFTDYYMKWVRQAPGQGLEWIGDIIPSNGATFYNQKFKGRVTITVDKSTSTAYMELSSLRSEDTAVYYCARSHLLRASWFAYWGQGTLVTVSSTRGMRTEDLPKAVVFLEPQWYRVLEKDSVTLKCQGAYSPEDNSTQWFHNESLISSQASSYFIDAATVDDSGEYRCQTNLSTLSDPVQLEVHIGWLLLQAPRWVFKEEDPIHLRCHSWKNTALHKVTYLQNGKGRKYFHHNSDFYIPKATLKDSGSYFCRGLVGSKNVSSETVNITITQGLAVPTISSFFPPGYQVSFCLVMVLLFAVDTGLYFSV

SEQ ID NO: 9868 - protein, 474 aa, synthetic construct
MALPVTALLLPLALLLHAARPDVQITQSPSYLAASPGETITINCRASKSISKDLAWYQEKPGKTNKLLIYSGSTLQSGIPSRFSGSGSGTDFTLTISSLEPEDFAMYYCQQHNKYPYTFGGGTKLEIKRGGGGSGGGGSGGGGSQVQLQQPGAELVRPGASVKLSCKASGYTFTSYWMNWVKQRPDQGLEWIGRIDPYDSETHYNQKFKDKAILTVDKSSSTAYMQLSSLTSEDSAVYYCARGNWDDYWGQGTTLTVSSTRGMRTEDLPKAVVFLEPQWYRVLEKDSVTLKCQGAYSPEDNSTQWFHNESLISSQASSYFIDAATVDDSGEYRCQTNLSTLSDPVQLEVHIGWLLLQAPRWVFKEEDPIHLRCHSWKNTALHKVTYLQNGKGRKYFHHNSDFYIPKATLKDSGSYFCRGLVGSKNVSSETVNITITQGLAVPTISSFFPPGYQVSFCLVMVLLFAVDTGLYFSV

SEQ ID NO: 9869 - protein, 476 aa, synthetic construct
MALPVTALLLPLALLLHAARPEIVLTQSPTSMTASPGEQVTITCRASSSINYMHWYQQKPGASPRPWIYETSKLASGVPDRFSGSASGTSYSLTINNMEAEDAATYYCQQWNYPSWTFGGGTKLELKGGGGSGGGGSGGGGSEVQLVESGGGLVQPGRSLKLSCAASGFTFSDYNMAWVRQAPKKGLEWVATILYDGGRTYYRGSVKGRFTISRDNAKSTLYLRMDSLRSEDTATYYCATHSRGTDYFDYWGQGVMVTVSSTRGMRTEDLPKAVVFLEPQWYRVLEKDSVTLKCQGAYSPEDNSTQWFHNESLISSQASSYFIDAATVDDSGEYRCQTNLSTLSDPVQLEVHIGWLLLQAPRWVFKEEDPIHLRCHSWKNTALHKVTYLQNGKGRKYFHHNSDFYIPKATLKDSGSYFCRGLVGSKNVSSETVNITITQGLAVPTISSFFPPGYQVSFCLVMVLLFAVDTGLYFSV

SEQ ID NO: 9870 - protein, 485 aa, synthetic construct
MALPVTALLLPLALLLHAARPDIVMTQSPSSLAVSEGETVTINCKSSQSFLSSGDGKNYVAWYQYKPGQSPKLLIYWASTRQSGVPDRFIGSGSGTDFTLTISTVQAEDLAIYYCQQYYDTPLTFGSGTKLEIKGGGGSGGGGSGGGGSEVKLQESGPSLVQSSQTLSLTCTVSGFSLTSYHIHWVRQTPGKGLEWMGVMWSDGDTSYNSALKSRLSISRDTSQSQVFLKMNSLQTEDTATYYCARGYYSSYLYLWFAYWGQGTLVTVSSTRGMRTEDLPKAVVFLEPQWYRVLEKDSVTLKCQGAYSPEDNSTQWFHNESLISSQASSYFIDAATVDDSGEYRCQTNLSTLSDPVQLEVHIGWLLLQAPRWVFKEEDPIHLRCHSWKNTALHKVTYLQNGKGRKYFHHNSDFYIPKATLKDSGSYFCRGLVGSKNVSSETVNITITQGLAVPTISSFFPPGYQVSFCLVMVLLFAVDTGLYFSV

SEQ ID NO: 9871 - protein, 489 aa, synthetic construct
MALPVTALLLPLALLLHAARPDVLMTQTPVSLPVSLGGQVSISCRSSQSLVHSDGDTYLHWYLQKPGQSPQLLIYRVSNRFSGVPDRFSGSGSGTDFTLKISRVEPEDLGLYYCLQTTHFPPWTFGGGTKLEMKGGGGSGGGGSGGGGSQVQLQQSGPELRRPGSSVRLSCKASGYRIKDFLIHWIKNRPEHGLEWIGWIDPEDGETKYAQKFQTKATLTADTSSNTAYMQLSSLTSEDTATYFCARWGDVYYGLMRGHVMDAWGQGTSVTVSSTRGMRTEDLPKAVVFLEPQWYRVLEKDSVTLKCQGAYSPEDNSTQWFHNESLISSQASSYFIDAATVDDSGEYRCQTNLSTLSDPVQLEVHIGWLLLQAPRWVFKEEDPIHLRCHSWKNTALHKVTYLQNGKGRKYFHHNSDFYIPKATLKDSGSYFCRGLVGSKNVSSETVNITITQGLAVPTISSFFPPGYQVSFCLVMVLLFAVDTGLYFSV

SEQ ID NO: 9872 - protein, 485 aa, synthetic construct
MALPVTALLLPLALLLHAARPDIVMTQAAPSIPVTPGESVSISCRSSKSLLNSNGNTYLYWFLQRPGQSPQLLIYRMSNLASGVPDRFSGSGSGTAFTLRISRVEAEDVGVYYCMQHLEYPFTFGAGTKLELKRGGGGSGGGGSGGGGSEVQLQQSGPELIKPGASVKMSCKASGYTFTSYVMHWVKQKPGQGLEWIGYINPYNDGTKYNEKFKGKATLTSDKSSSTAYMELSSLTSEDSAVYYCARGTYYYGSRVFDYWGQGTTLTVSSTRGMRTEDLPKAVVFLEPQWYRVLEKDSVTLKCQGAYSPEDNSTQWFHNESLISSQASSYFIDAATVDDSGEYRCQTNLSTLSDPVQLEVHIGWLLLQAPRWVFKEEDPIHLRCHSWKNTALHKVTYLQNGKGRKYFHHNSDFYIPKATLKDSGSYFCRGLVGSKNVSSETVNITITQGLAVPTISSFFPPGYQVSFCLVMVLLFAVDTGLYFSV

SEQ ID NO: 9873 - protein, 485 aa, synthetic construct; identical to SEQ ID NO: 9872

SEQ ID NO: 9874 - protein, 503 aa, synthetic construct
MALPVTALLLPLALLLHAARPINIYNAEPANPSEKNSPEFDIVMTQSPATLSLSPGERATLSCRSSKSLQNVNGNTYLYWFQQKPGQSPQLLIYRMSNLNSGVPDRFSGSGSGTEFTLTISSLEPEDFAVYYCMQHLEYPITFGAGTKLEIKGGGGSGGGGSGGGGSEVQLVESGGGLVKPGGSLKLSCAASGYTFTSYVMHWVRQAPGKGLEWIGYINPYNDGTKYNEKFQGRVTISSDKSISTAYMELSSLRSEDTAMYYCARGTYYYGTRVFDYWGQGTLVTVSSTRGMRTEDLPKAVVFLEPQWYRVLEKDSVTLKCQGAYSPEDNSTQWFHNESLISSQASSYFIDAATVDDSGEYRCQTNLSTLSDPVQLEVHIGWLLLQAPRWVFKEEDPIHLRCHSWKNTALHKVTYLQNGKGRKYFHHNSDFYIPKATLKDSGSYFCRGLVGSKNVSSETVNITITQGLAVPTISSFFPPGYQVSFCLVMVLLFAVDTGLYFSV

SEQ ID NO: 9875 - protein, 480 aa, synthetic construct
MALPVTALLLPLALLLHAARPDIQMTQSPSSLSASVGDRVTITCKASDHINNWLAWYQQKPGQAPKLLIYGATTLETGVPSRFSGSGSGTDYTLTISSLQPEDFATYYCQQSWNTPWTFGQGTKLEIKRGGGGSGGGGSGGGGSQVQLQQPGAELVKPGASVKMSCKASGYAFSSYWINWMKQKPGQGLEWIGQIYPGDGDTNYNGKFKGRATLTADTSSSTAYMQLSSLTSEDSAVYFCARSITTVVGCAMDYWGQGTSVTVSSTRGMRTEDLPKAVVFLEPQWYRVLEKDSVTLKCQGAYSPEDNSTQWFHNESLISSQASSYFIDAATVDDSGEYRCQTNLSTLSDPVQLEVHIGWLLLQAPRWVFKEEDPIHLRCHSWKNTALHKVTYLQNGKGRKYFHHNSDFYIPKATLKDSGSYFCRGLVGSKNVSSETVNITITQGLAVPTISSFFPPGYQVSFCLVMVLLFAVDTGLYFSV

SEQ ID NO: 9876 - protein, 482 aa, synthetic construct
MALPVTALLLPLALLLHAARPQIVLSQSPAILSASPGEKVTMTCRASSSVSYMHWYQQKPGSSPKPWIYATSNLASGVPARFSGSGSGTSYSFTISRVEAEDAATYYCQQWTFNPPTFGGGTRLEIKRTVAAGGGGSGGGGSGGGGSQAYLQQSGAELVRPGASVKMSCKASGYTFTSYNMHWVKQTPRQGLEWIGGIYPGNGDTSYNQKFKGKATLTVGKSSSTAYMQLSSLTSEDSAVYFCARYDYNYAMDYWGQGTSVTVSSASTRGMRTEDLPKAVVFLEPQWYRVLEKDSVTLKCQGAYSPEDNSTQWFHNESLISSQASSYFIDAATVDDSGEYRCQTNLSTLSDPVQLEVHIGWLLLQAPRWVFKEEDPIHLRCHSWKNTALHKVTYLQNGKGRKYFHHNSDFYIPKATLKDSGSYFCRGLVGSKNVSSETVNITITQGLAVPTISSFFPPGYQVSFCLVMVLLFAVDTGLYFSV

SEQ ID NO: 9877 - protein, 481 aa, synthetic construct
MALPVTALLLPLALLLHAARPDEIVLTQSPATLSLSPGERATLSCRASQSVSSYLAWYQQKPGQAPRLLIYDASNRATGIPARFSGSGSGTDFTLTISSLEPEDFAVYYCQQRSNWPITFGQGTRLEIKGGGGSGGGGSGGGGSEVQLVESGGGLVQPDRSLRLSCAASGFTFHDYAMHWVRQAPGKGLEWVSTISWNSGTIGYADSVKGRFTISRDNAKNSLYLQMNSLRAEDTALYYCAKDIQYGNYYYGMDVWGQGTTVTVSSTRGMRTEDLPKAVVFLEPQWYRVLEKDSVTLKCQGAYSPEDNSTQWFHNESLISSQASSYFIDAATVDDSGEYRCQTNLSTLSDPVQLEVHIGWLLLQAPRWVFKEEDPIHLRCHSWKNTALHKVTYLQNGKGRKYFHHNSDFYIPKATLKDSGSYFCRGLVGSKNVSSETVNITITQGLAVPTISSFFPPGYQVSFCLVMVLLFAVDTGLYFSV

SEQ ID NO: 9878 - protein, 475 aa, synthetic construct
MALPVTALLLPLALLLHAARPDIQMTQSPSSLSASVGDRVTINCKASQDINSYLSWFQQKPGKAPKTLIYRANRLVDGVPSRFSGSGSGQDYTLTISSLQPEDFATYYCLQYDEFPLTFGGGTKVEIKGGGGSGGGGSGGGGSQVQLVQSGAEVKKPGASVKVSCKASGYTFTNYDINWVRQAPGQGLEWIGWIYPGDGSTKYNEKFKAKATLTADTSTSTAYMELRSLRSDDTAVYYCASGYEDAMDYWGQGTTVTVSSTRGMRTEDLPKAVVFLEPQWYRVLEKDSVTLKCQGAYSPEDNSTQWFHNESLISSQASSYFIDAATVDDSGEYRCQTNLSTLSDPVQLEVHIGWLLLQAPRWVFKEEDPIHLRCHSWKNTALHKVTYLQNGKGRKYFHHNSDFYIPKATLKDSGSYFCRGLVGSKNVSSETVNITITQGLAVPTISSFFPPGYQVSFCLVMVLLFAVDTGLYFSV

SEQ ID NO: 9879 - protein, 477 aa, synthetic construct
MALPVTALLLPLALLLHAARPDIVMTQTPLSLSVTPGQPASISCKSSQSLLDGDGKTYLNWLLQKPGQSPQRLIYLVSKLDSGVPDRFSGSGSGTDFTLKISRVEAEDVGVYYCWQGTHFPRTFGQGTKLEIKGGGGSGGGGSGGGGSQVQLVQSGAEVKKPGASVKVSCKASGYTFKDTYIHWVRQAPGQGLEWMGRIDPANGNTKYDPKFQGRVTMTRDTSISTAYMELSRLRSDDTAVYYCARRGGVDWGQGTLVTVSSTRGMRTEDLPKAVVFLEPQWYRVLEKDSVTLKCQGAYSPEDNSTQWFHNESLISSQASSYFIDAATVDDSGEYRCQTNLSTLSDPVQLEVHIGWLLLQAPRWVFKEEDPIHLRCHSWKNTALHKVTYLQNGKGRKYFHHNSDFYIPKATLKDSGSYFCRGLVGSKNVSSETVNITITQGLAVPTISSFFPPGYQVSFCLVMVLLFAVDTGLYFSV

SEQ ID NO: 9880 - protein, 478 aa, synthetic construct
MALPVTALLLPLALLLHAARPDIQMTQSPSSLSASVGDRVTITCKASQDVSTAVAWFQQKPGKAPKLLIYSPSYRYTGVPSRFSGSGSGTDFTLTISSLQPEDFTYYCQQLYSTPYTFGQGTKVEIKGGGGSGGGGSGGGGSEVQLVQSGAEVKKPGASVKVSCKASGYTFTDYYLDVVVRQAPGQGLEWIGRVNPYNGGTIYNQKFKGRVTLTRDTSTSTAYLELSSLRSEDTAVYYCARDHYRYDPLLDYWGQGTLVTVSSTRGMRTEDLPKAVVFLEPQWYRVLEKDSVTLKCQGAYSPEDNSTQWFHNESLISSQASSYFIDAATVDDSGEYRCQTNLSTLSDPVQLEVHIGWLLLQAPRWVFKEEDPIHLRCHSWKNTALHKVTYLQNGKGRKYFHHNSDFYIPKATLKDSGSYFCRGLVGSKNVSSETVNITITQGLAVPTISSFFPPGYQVSFCLVMVLLFAVDTGLYFSV

SEQ ID NO: 9881 - protein, 484 aa, synthetic construct
MALPVTALLLPLALLLHAARPDIQMTQSPSSLSASVGDRVTITCRASQSVSTSSYNYMHWYQQKPGKPPKLLIKYASNLESGVPSRFSGSGSGTDFTLTISSLQPEDFATYYCQHSWEIPLTFGQGTKVEIKGGGGSGGGGSGGGGSEVQLVQSGAEVKKPGASVKVSCKASGYSFTDYYMHWVRQAPGQGLEWIGRINPYNGAAFYSQNFKDRVTLTVDTSTSTAYLELSSLRSEDTAVYYCAIERGADLEGYAMDYWGQGTLVTVSSTRGMRTEDLPKAVVFLEPQWYRVLEKDSVTLKCQGAYSPEDNSTQWFHNESLISSQASSYFIDAATVDDSGEYRCQTNLSTLSDPVQLEVHIGWLLLQAPRWVFKEEDPIHLRCHSWKNTALHKVTYLQNGKGRKYFHHNSDFYIPKATLKDSGSYFCRGLVGSKNVSSETVNITITQGLAVPTISSFFPPGYQVSFCLVMVLLFAVDTGLYFSV

SEQ ID NO: 9882 - protein, 482 aa, synthetic construct
MALPVTALLLPLALLLHAARPEIVLTQSPATLSASPGERVTLTCRASSNVISSYVHWYQQKPGSSPRLFLYSTSNLASGVPSRFSGSGSGTDFTFTISSLEAEDAATYYCQQYSGYPLTFGQGTRLEIKGGGGSGGGGSGGGGSQVQLQESGPGLVKPSETLSLTCAVSGYSITSAYYWNWIRQPPGKGLEWIGYISYDGRNNYNPSLKNRITINPDTSKNQFSLQLNSVTPEDTAVYYCAREGDYDVGNYYAMDYWGQGTLVTVSSTRGMRTEDLPKAVVFLEPQWYRVLEKDSVTLKCQGAYSPEDNSTQWFHNESLISSQASSYFIDAATVDDSGEYRCQTNLSTLSDPVQLEVHIGWLLLQAPRWVFKEEDPIHLRCHSWKNTALHKVTYLQNGKGRKYFHHNSDFYIPKATLKDSGSYFCRGLVGSKNVSSETVNITITQGLAVPTISSFFPPGYQVSFCLVMVLLFAVDTGLYFSV

SEQ ID NO: 9883 - protein, 482 aa, synthetic construct
MALPVTALLLPLALLLHAARPEIVLTQSPATLSLSPGERATLSCRASSNVISSYVHWYQQKPGQAPRLLIYSTSNLASGIPARFSGSGSGTDFTLTISSLEPEDFAVYYCQQYSGYPLTFGQGTRLEIKGGGGSGGGGSGGGGSEVQLVESGGGLVQPGRSLRLSCAASGYSITSAYYWNWVRQAPGKGLEWVSYISYDGRNNYNPSLKNRFTISRDNAKKSLYLQMNSLRAEDTALYYCAKEGDYDVGNYYAMDYWGQGTTVTVSSTRGMRTEDLPKAVVFLEPQWYRVLEKDSVTLKCQGAYSPEDNSTQWFHNESLISSQASSYFIDAATVDDSGEYRCQTNLSTLSDPVQLEVHIGWLLLQAPRWVFKEEDPIHLRCHSWKNTALHKVTYLQNGKGRKYFHHNSDFYIPKATLKDSGSYFCRGLVGSKNVSSETVNITITQGLAVPTISSFFPPGYQVSFCLVMVLLFAVDTGLYFSV

SEQ ID NO: 9884 - protein, 491 aa, synthetic construct
MALPVTALLLPLALLLHAARPDVVMTQTPLSLPVSLGDQASISCRSSQSLVHSNGNTYLRWYLQKPGQSPKVLIYKVSNRVSGVPDRFSGSGSGTDFTLKINRVEAEDLGVYFCSQSTHVPWTFGGGTKLEIKSSADDAKKDAAKKDDAKKDDAKKDGGVKLDETGGGLVQPGGAMKLSCVTSGFTFGHYWMNWVRQSPEKGLEWVAQFRNKPYNYETYYSDSVKGRFTISRDDSKSSVYLQMNNLRVEDTGIYYCTGASYGMEYLGQGTSVTVSTTRGMRTEDLPKAVVFLEPQWYRVLEKDSVTLKCQGAYSPEDNSTQWFHNESLISSQASSYFIDAATVDDSGEYRCQTNLSTLSDPVQLEVHIGWLLLQAPRWVFKEEDPIHLRCHSWKNTALHKVTYLQNGKGRKYFHHNSDFYIPKATLKDSGSYFCRGLVGSKNVSSETVNITITQGLAVPTISSFFPPGYQVSFCLVMVLLFAVDTGLYFSV

SEQ ID NO: 9885 - protein, 487 aa, synthetic construct
MALPVTALLLPLALLLHAARPQVQLVESGGNLVQPGGSLRLSCAASGFTFGSFSMSWVRQAPGGGLEWVAGLSARSSLTHYADSVKGRFTISRDNAKNSVYLQMNSLRVEDTAVYYCARRSYDSSGYWGHFYSYMDVWGQGTLVTVSGGGGSGGGGSGGGGSSVLTQPSSVSAAPGQKVTISCSGSTSNIGNNYVSWYQQHPGKAPKLMIYDVSKRPSGVPDRFSGSKSGNSASLDISGLQSEDEADYYCAAWDDSLSEFLFGTGTKLTVLGTRGMRTEDLPKAVVFLEPQWYRVLEKDSVTLKCQGAYSPEDNSTQWFHNESLISSQASSYFIDAATVDDSGEYRCQTNLSTLSDPVQLEVHIGWLLLQAPRWVFKEEDPIHLRCHSWKNTALHKVTYLQNGKGRKYFHHNSDFYIPKATLKDSGSYFCRGLVGSKNVSSETVNITITQGLAVPTISSFFPPGYQVSFCLVMVLLFAVDTGLYFSV

SEQ ID NO: 9886 - protein, 478 aa, synthetic construct
MALPVTALLLPLALLLHAARPQSVVTQPPSVSGAPGQRVTISCTGSSSNIGAGYDVHWYQQLPGTAPKLLIYGNSNRPSGVPDRFSGSKSGTSASLAITGLQAEDEADYYCQSYDSSLSGSYVFGTGTKLTVLGGGGGSGGGGSGGGGSEVQLVETGGNLVQPGASLRLSCAASGFSFSGTAMHWVRQAPGKGLEWVSTISSTGRSTYYRDSVKGRFTISRDNSKNTLYLQMNSLRGEDTAVYYCARVSFDYWGQGTLVTVSSTRGMRTEDLPKAVVFLEPQWYRVLEKDSVTLKCQGAYSPEDNSTQWFHNESLISSQASSYFIDAATVDDSGEYRCQTNLSTLSDPVQLEVHIGWLLLQAPRWVFKEEDPIHLRCHSWKNTALHKVTYLQNGKGRKYFHHNSDFYIPKATLKDSGSYFCRGLVGSKNVSSETVNITITQGLAVPTISSFFPPGYQVSFCLVMVLLFAVDTGLYFSV

SEQ ID NO: 9887 - protein, 480 aa, synthetic construct
MALPVTALLLPLALLLHAARPQSVVTQPASVSGSPGQSITISCTGTSSDVGGYNYVSWYQQHPGKAPKLMIYDVSKRPSGVSNRFSGSKSGNTASLTISGLQAEDEADYYCSSYTSSSTLVFGGGTKLTVLGGGGGSGGGGSGGGGSEVQLVESGGAFVQPGGSLRLSCAASGFTFSSYAMTWVRQAPGKGLEWVSTISGRGRSTFYADSVKGRFTISRDNSKNTLYLQMNSLRAEDTAVYYCARYYHAGAFDLWGQGTLVTVSSTRGMRTEDLPKAVVFLEPQWYRVLEKDSVTLKCQGAYSPEDNSTQWFHNESLISSQASSYFIDAATVDDSGEYRCQTNLSTLSDPVQLEVHIGWLLLQAPRWVFKEEDPIHLRCHSWKNTALHKVTYLQNGKGRKYFHHNSDFYIPKATLKDSGSYFCRGLVGSKNVSSETVNITITQGLAVPTISSFFPPGYQVSFCLVMVLLFAVDTGLYFSV

SEQ ID NO: 9888 - protein, 482 aa, synthetic construct
MALPVTALLLPLALLLHAARPDVVMTQSPSSLSASVGDRVTITCQSSLDISHYLNWYQQKPGKAPKLLIYDASNLETGVPSRFSGSGSGTHFTFTISSLQPEDFATYYCQQYDNLPLTFGGGTKLEIKRGGGGSGGGGSGGGGSQVQLVQSGGGVVQPGGSLRVSCAASGVTLSDYGMHWVRQAPGKGLEWVAFIRNDGSDKYYADSVKGRFTISRDNSEKTVSLQMSSLRAEDTAVYYCAKNGESGPLDYWYLDLWGRGTLVTVSSTRGMRTEDLPKAVVFLEPQWYRVLEKDSVTLKCQGAYSPEDNSTQWFHNESLISSQASSYFIDAATVDDSGEYRCQTNLSTLSDPVQLEVHIGWLLLQAPRWVFKEEDPIHLRCHSWKNTALHKVTYLQNGKGRKYFHHNSDFYIPKATLKDSGSYFCRGLVGSKNVSSETVNITITQGLAVPTISSFFPPGYQVSFCLVMVLLFAVDTGLYFSV

SEQ ID NO: 9889 - protein, 489 aa, synthetic construct
MALPVTALLLPLALLLHAARPDVMLTQTPLSLPVSLGDQASISCRSSQSILHSTGDTYLEWYLQKPGQSPKLLINKVSNRLSGVPDRFSGSGSGTDFTLKISRVEAEDLGVYYCFQGSHVPWTFGGGTKLEIKRADAAPTVSIFPGGGGSGGGGSGGGGSQVKLQQSGPSLVKPGASVKMSCKASGYTFTDFYMKWVKQSHGKSLEWIGDINPNIGDTFYNQKFKGKATLTVDKSSSTAYMQLNSLTSEDSAVYFCSVGYFDVWGAGTTVTVSSTRGMRTEDLPKAVVFLEPQWYRVLEKDSVTLKCQGAYSPEDNSTQWFHNESLISSQASSYFIDAATVDDSGEYRCQTNLSTLSDPVQLEVHIGWLLLQAPRWVFKEEDPIHLRCHSWKNTALHKVTYLQNGKGRKYFHHNSDFYIPKATLKDSGSYFCRGLVGSKNVSSETVNITITQGLAVPTISSFFPPGYQVSFCLVMVLLFAVDTGLYFSV

SEQ ID NO: 9890 - protein, 489 aa, synthetic construct
MALPVTALLLPLALLLHAARPLPVLTQPPSVSVAPGKTARITCGGNNIGSKSVHWYQQKPGQAPVLVVYDDSDRPSGIPERFSGSNSGNTATLTISRVEAGDEADYYCQVWDSSSDYVVFGGGTKLTVLGGGGSGGGGSGGGGSEVQLVQSGAEVKKPGESLKISCKGSGYSFTSYWIGWVRQMPGKGLEWMGIIYPGDSDTRYSPSFQGQVTISADKSISTAYLQWSSLKASDTAMYYCARQVWGWQGGMYPRSNWWYNLDSWGQGTLVTVSSTRGMRTEDLPKAVVFLEPQWYRVLEKDSVTLKCQGAYSPEDNSTQWFHNESLISSQASSYFIDAATVDDSGEYRCQTNLSTLSDPVQLEVHIGWLLLQAPRWVFKEEDPIHLRCHSWKNTALHKVTYLQNGKGRKYFHHNSDFYIPKATLKDSGSYFCRGLVGSKNVSSETVNITITQGLAVPTISSFFPPGYQVSFCLVMVLLFAVDTGLYFSV

SEQ ID NO: 9891 - protein, 482 aa, synthetic construct
MALPVTALLLPLALLLHAARPELVMTQSPASLAVSLGQRATISCRASESVDSYGKSFMHWYQLKPGQPPKLLIYRASNLESGVPARFSGSGSRTDFTLTIDPVEADDAATYYCQQNNEDPWTFGGGTKLEIKGGGGSGGGGSGGGGSEVQLEQSGPELVKPGASVKMSCKASGYTFTNYYMKWVKQSHGKSLEWIGDLNPNNGDTFYNQKFKGKATLTVDKSSNTAYMQLNSLTSEDSAVYYCARTGRYEENAMDYWGQGTSVTVSSTRGMRTEDLPKAVVFLEPQWYRVLEKDSVTLKCQGAYSPEDNSTQWFHNESLISSQASSYFIDAATVDDSGEYRCQTNLSTLSDPVQLEVHIGWLLLQAPRWVFKEEDPIHLRCHSWKNTALHKVTYLQNGKGRKYFHHNSDFYIPKATLKDSGSYFCRGLVGSKNVSSETVNITITQGLAVPTISSFFPPGYQVSFCLVMVLLFAVDTGLYFSV

SEQ ID NO: 9892 - protein, 480 aa, synthetic construct; identical to SEQ ID NO: 9865

SEQ ID NO: 9893 - protein, 480 aa, synthetic construct; identical to SEQ ID NO: 9774

SEQ ID NO: 9894 - protein, 476 aa, synthetic construct
MALPVTALLLPLALLLHAARPDVVMTQSPSSLSASVGDRVTITCMASEDIYIRLAWYQQKPGNAPKLLIYAATSLETGVPSRFSGSGSGTDFTLTISSLQPEDFATYYCQQYWSSPWTFGGGTKVEIKGGGGSGGGGSGGGGSQVQLQESGPGLVKPSQTLSLTCTVSGYSITSDYTWNWIRQPPGNGLEWIGYITYSGSTSYNPSLKSRVLISVDTSKNQVSLKLSSVTAADTAVYYCARLGRRYTMDYWGQGTTVTVSSTRGMRTEDLPKAVVFLEPQWYRVLEKDSVTLKCQGAYSPEDNSTQWFHNESLISSQASSYFIDAATVDDSGEYRCQTNLSTLSDPVQLEVHIGWLLLQAPRWVFKEEDPIHLRCHSWKNTALHKVTYLQNGKGRKYFHHNSDFYIPKATLKDSGSYFCRGLVGSKNVSSETVNITITQGLAVPTISSFFPPGYQVSFCLVMVLLFAVDTGLYFSV

SEQ ID NO: 9895 - protein, 481 aa, synthetic construct
MALPVTALLLPLALLLHAARPEVQLVESGGGLVQPGRSLRLSCAASGFTFDDYAMHWVRQAPGKGLEWVSGISWNSGSIGYADSVKGRFTISRDNAKNSLYLQMNSLRAEDTALYYCAKDKGGGYYDFWSGSDYWGQGTLVTVSSGGGGSGGGGSGGGGSSSELTQDPAVSVALGQTVRITCQGDSLRSYYASWYQQKPGQAPVLVIYGKNNRPSGIPDRFSGSSSGNTASLTITGAQAEDEADYYCNSRDSSGWVFGGGTKLTVLTRGMRTEDLPKAVVFLEPQWYRVLEKDSVTLKCQGAYSPEDNSTQWFHNESLISSQASSYFIDAATVDDSGEYRCQTNLSTLSDPVQLEVHIGWLLLQAPRWVFKEEDPIHLRCHSWKNTALHKVTYLQNGKGRKYFHHNSDFYIPKATLKDSGSYFCRGLVGSKNVSSETVNITITQGLAVPTISSFFPPGYQVSFCLVMVLLFAVDTGLYFSV

SEQ ID NO: 9896 - protein, 490 aa, synthetic construct
MALPVTALLLPLALLLHAARPEVQLQQSGPGLVKPSQTLSLTCAISGDSVLSNSDTWNWIRQSPSRGLEWLGRTYHRSTWYDDYASSVRGRVSINVDTSKNQYSLQLNAVTPEDTGVYYCARDRLQDGNSWSDAFDVWGQGTMVTVSSGGGGSGGGGSGGGGSQSALTQPASVSGSPGQSITISCTGTSSDVGGYNYVSWYQQHPGKAPKLMIYDVSNRPSGVSNRFSGSKSGNTASLTISGLQAEDEADYYCSSYTSSSTLVYVFGTGTKVTVLTRGMRTEDLPKAVVFLEPQWYRVLEKDSVTLKCQGAYSPEDNSTQWFHNESLISSQASSYFIDAATVDDSGEYRCQTNLSTLSDPVQLEVHIGWLLLQAPRWVFKEEDPIHLRCHSWKNTALHKVTYLQNGKGRKYFHHNSDFYIPKATLKDSGSYFCRGLVGSKNVSSETVNITITQGLAVPTISSFFPPGYQVSFCLVMVLLFAVDTGLYFSV

SEQ ID NO: 9897 - protein, 488 aa, synthetic construct
MALPVTALLLPLALLLHAARPQVQLVQSGAEVKKPGASVKVSCKASGYTFTSYDINWVRQATGQGLEWMGWMNPNSGNTGYAQKFQGRVTMTRNTSISTAYMELSSLRSEDTAVYYCARGDSNYWSYYGMDVWGQGTLVTVSSGGGGSGGGGSGGGGSGGGGSQSVLTQPRSVSGSPGQSVTISCTGTSSDVGGYNYVSWYQQHPGEAPKLIIYDADKRPSGISNRFSSGKSGNTASLTISGLQVEDEADYYCCSYAGGSTWVFGGGTKVTVLTRGMRTEDLPKAVVFLEPQWYRVLEKDSVTLKCQGAYSPEDNSTQWFHNESLISSQASSYFIDAATVDDSGEYRCQTNLSTLSDPVQLEVHIGWLLLQAPRWVFKEEDPIHLRCHSWKNTALHKVTYLQNGKGRKYFHHNSDFYIPKATLKDSGSYFCRGLVGSKNVSSETVNITITQGLAVPTISSFFPPGYQVSFCLVMVLLFAVDTGLYFSV

SEQ ID NO: 9898 - protein, 490 aa, synthetic construct
MALPVTALLLPLALLLHAARPEVQLQQSGPGLVKPSQTLSLTCAISGDSVSSNSAAWNWIRQSPSRGLEWLGRTYYRSKWYSDYAVSVKSRITINPDTSKNQFSLQLNSVTPEDTAVYYCARDPYDFWSGYPDAFDIWGQGTMVTVSSGGGGSGGGGSGGGGSQSALTQPASVSGSPGQSITISCTGTSSDVGGYNYVSWYQQHPGKAPKVIISEVNNRPSGVSHRFSGSKSGNTASLTISGLQAEDEADYFCSSYTSGRTLYVFGTGSKVTVLGTRGMRTEDLPKAVVFLEPQWYRVLEKDSVTLKCQGAYSPEDNSTQWFHNESLISSQASSYFIDAATVDDSGEYRCQTNLSTLSDPVQLEVHIGWLLLQAPRWVFKEEDPIHLRCHSWKNTALHKVTYLQNGKGRKYFHHNSDFYIPKATLKDSGSYFCRGLVGSKNVSSETVNITITQGLAVPTISSFFPPGYQVSFCLVMVLLFAVDTGLYFSV

SEQ ID NO: 9899 - protein, 489 aa, synthetic construct
MALPVTALLLPLALLLHAARPEVQLQQSGPGLVKPSQTLSLTCAISGDSMLSNSDTWNWIRQSPSRGLEWLGRTYHRSTWYDDYASSVRGRVSINVDTSKNQYSLQLNAVTPEDTGVYYCARVRLQDGNSWSDAFDVWGQGTMVTVSSGGGGSGGGGSGGGGSQSALTQPASASGSPGQSVTISCTGTSSDVGGYNYVSWYQQHPGKAPKLMIYDVSNRPSGVSNRFSGSKSGNTASLTISGLQAEDEADYYCSSYTSSSTLYVFGTGTQLTVLTRGMRTEDLPKAVVFLEPQWYRVLEKDSVTLKCQGAYSPEDNSTQWFHNESLISSQASSYFIDAATVDDSGEYRCQTNLSTLSDPVQLEVHIGWLLLQAPRWVFKEEDPIHLRCHSWKNTALHKVTYLQNGKGRKYFHHNSDFYIPKATLKDSGSYFCRGLVGSKNVSSETVNITITQGLAVPTISSFFPPGYQVSFCLVMVLLFAVDTGLYFSV

SEQ ID NO: 9900 - protein, 480 aa, synthetic construct
MALPVTALLLPLALLLHAARPEIVLTQSPATLSLSPGERATLSCSASSSVSYMYWYQQKPGQAPRLLIYRTSNLASGIPARFSGSGSGTDFTLTISSLEPEDFAVYYCQQYHSYPTTFGQGTKVEIKRTVGGGGSGGGGSGGGGSEVQLVESGGGLVQPGGSLRLSCAASGFSFNTYAMNWVRQAPGKGLEWVSHIRSKSNNFATYYADSVKDRFTISRDNAKNSLYLQMNSLRAEDTAVYYCARQGGDFPMDYWGQGTLVTVSSTRGMRTEDLPKAVVFLEPQWYRVLEKDSVTLKCQGAYSPEDNSTQWFHNESLISSQASSYFIDAATVDDSGEYRCQTNLSTLSDPVQLEVHIGWLLLQAPRWVFKEEDPIHLRCHSWKNTALHKVTYLQNGKGRKYFHHNSDFYIPKATLKDSGSYFCRGLVGSKNVSSETVNITITQGLAVPTISSFFPPGYQVSFCLVMVLLFAVDTGLYFSV

SEQ ID NO: 9901 - protein, 476 aa, synthetic construct
MALPVTALLLPLALLLHAARPDVVMTQSPSSLSASVGDRVTITCKASEDIYIRLAWYQQKPGKAPKLLIYAATSLETGVPSRFSGSGSGTDFTLTISSLQPEDFATYYCQQYWTTPWTFGGGTKVEIKGGGGSGGGGSGGGGSQVQLQESGPGLVKPSQTLSLTCTVSGYSITIDYTWNWIRQPPGKGLEWIGYITYSGSTDYNPSLKSRVLISVDTSKNQVSLKLSSVTAADTAVYYCARLGRRYALDYWGQGTTVTVSSTRGMRTEDLPKAVVFLEPQWYRVLEKDSVTLKCQGAYSPEDNSTQWFHNESLISSQASSYFIDAATVDDSGEYRCQTNLSTLSDPVQLEVHIGWLLLQAPRWVFKEEDPIHLRCHSWKNTALHKVTYLQNGKGRKYFHHNSDFYIPKATLKDSGSYFCRGLVGSKNVSSETVNITITQGLAVPTISSFFPPGYQVSFCLVMVLLFAVDTGLYFSV

SEQ ID NO: 9902 - protein, 481 aa, synthetic construct
MALPVTALLLPLALLLHAARPDIQLTQSPSFLSASVGDRVTITCRASQGISTDLNWYQQKPGKAPKLLIYAASNLESGVPSRFSGSGSGTEFTLTISSLQPEDFATYYCQQSYNWPYTFGGGTKVEIKRGGGGSGGGGSGGGGSEVQLVESGGGLVKPGGSLRLSCAASGFTFSNFEMNWVRQAPGKGLEWVSGISSNGRYINYADSVKGRFTISRDNAKNSLYLQMNSLRAEDTAVYYCARVVDFDQDYNGFDYWGQGTLVTVSSTRGMRTEDLPKAVVFLEPQWYRVLEKDSVTLKCQGAYSPEDNSTQWFHNESLISSQASSYFIDAATVDDSGEYRCQTNLSTLSDPVQLEVHIGWLLLQAPRWVFKEEDPIHLRCHSWKNTALHKVTYLQNGKGRKYFHHNSDFYIPKATLKDSGSYFCRGLVGSKNVSSETVNITITQGLAVPTISSFFPPGYQVSFCLVMVLLFAVDTGLYFSV

SEQ ID NO: 9903 - protein, 479 aa, synthetic construct
MALPVTALLLPLALLLHAARPDIQLTQSPSFLSASVGDRVTITCSLSLGISTWRDWFPPRLGRGLEPLTYAASTLQSGVPSRFSGSGSGTEFTLTISSLQPEDFATYYCQQLNSYPLTFGGGTKVEIKRGGGGSGGGGSGGGGSEVQLVESGGGLVKPGGSLRLSCAASGFTFSTYGMSWVRQAPGKGLEWVAYINNGSGYIYYADSVKGRFTISRDNAKNSLYLQMNSLRAEDTAVYYCARGQWWSGGDFDYWGQGTLVTVSSTRGMRTEDLPKAVVFLEPQWYRVLEKDSVTLKCQGAYSPEDNSTQWFHNESLISSQASSYFIDAATVDDSGEYRCQTNLSTLSDPVQLEVHIGWLLLQAPRWVFKEEDPIHLRCHSWKNTALHKVTYLQNGKGRKYFHHNSDFYIPKATLKDSGSYFCRGLVGSKNVSSETVNITITQGLAVPTISSFFPPGYQVSFCLVMVLLFAVDTGLYFSV

SEQ ID NO: 9904 - protein, 481 aa, synthetic construct
MALPVTALLLPLALLLHAARPDIQMTQTTSSLSASLGDRVTISCRASQDISNYLNWYQQKPDGTVKLLIYYTSILHSGVPSRFSGSGSGTDYSLTISNLEQEDFATYFCQQGNTLPWTFGGGTKLEIKAGGGGSGGGGSGGGGSEVQLVESGGGLVKPGGSLKLSCAASGFAFSIYDMSWVRQTPEKRLEWVAYISSGGGTYYPDTVKGRFTISRDNAKNTLYLQMSSLKSEDTAMYYCARHSGYGTHWGVLFAYWGQGTLVTVSATRGMRTEDLPKAVVFLEPQWYRVLEKDSVTLKCQGAYSPEDNSTQWFHNESLISSQASSYFIDAATVDDSGEYRCQTNLSTLSDPVQLEVHIGWLLLQAPRWVFKEEDPIHLRCHSWKNTALHKVTYLQNGKGRKYFHHNSDFYIPKATLKDSGSYFCRGLVGSKNVSSETVNITITQGLAVPTISSFFPPGYQVSFCLVMVLLFAVDTGLYFSV

SEQ ID NO: 9905 - protein, 491 aa, synthetic construct
MALPVTALLLPLALLLHAARPDIVMTQSPDSLAVSLGERATINCKSSQSLLYRSNQKNYLAWYQQKPGQPPKLLIYWASTRESGVPDRFSGSGSGTDFTLTISSLQAEDVAVYYCQQYYNYPRTFGQGTKVEIKRTVGGGGSGGGGSGGGGSEVQLLESGGGLVQPGGSLRLSCAASGYSITSDYAWNWVRQAPGKGLEWVSYISNSGSTSYNPSLKSRFTISRDNSKNTLYLQMNSLRAEDTAVYYCAKERNYDYDDYYYAMDYWGQGTLVTVSSTRGMRTEDLPKAVVFLEPQWYRVLEKDSVTLKCQGAYSPEDNSTQWFHNESLISSQASSYFIDAATVDDSGEYRCQTNLSTLSDPVQLEVHIGWLLLQAPRWVFKEEDPIHLRCHSWKNTALHKVTYLQNGKGRKYFHHNSDFYIPKATLKDSGSYFCRGLVGSKNVSSETVNITITQGLAVPTISSFFPPGYQVSFCLVMVLLFAVDTGLYFSV

SEQ ID NO: 9906 - protein, 484 aa, synthetic construct
MALPVTALLLPLALLLHAARPDVVMTQSPLSLPVTLGQPASISCRSSQSLLHSSGNTYLEWYQQRPGQSPRPLIYKISTRFSGVPDRFSGSGSGTDFTLKISRVEAEDVGVYYCFQGSHVPYTFGGGTKVEIKRGGGGSGGGGSGGGGSQVQLVQSGAEVKKPGASVKVSCKASGLTIEDYYMHWVRQAPGQGLEWMGWIDPENGDTEYGPKFQGRVTMTRDTSINTAYMELSRLRSDDTAVYYCAVHNAHYGTWFAYWGQGTLVTVSSTRGMRTEDLPKAVVFLEPQWYRVLEKDSVTLKCQGAYSPEDNSTQWFHNESLISSQASSYFIDAATVDDSGEYRCQTNLSTLSDPVQLEVHIGWLLLQAPRWVFKEEDPIHLRCHSWKNTALHKVTYLQNGKGRKYFHHNSDFYIPKATLKDSGSYFCRGLVGSKNVSSETVNITITQGLAVPTISSFFPPGYQVSFCLVMVLLFAVDTGLYFSV

SEQ ID NO: 9907 - protein, 476 aa, synthetic construct
MALPVTALLLPLALLLHAARPDIQMTQSPSSLSASVGDRVTITCRASENIYSNLAWYQQKPGKAPKLLIYAATNLADGVPSRFSGSGSGTDFTLTISSLQPEDFATYYCQHFWGTPTFGQGTKVEIKRTVGGGGSGGGGSGGGGSEVQLVESGGGLVQPGGSLRLSCAASGFSLTNYGVHWVRQAPGKGLEWVSVIWSGGSTDYNAAFISRFTISADTSKNTAYLQMNSLRAEDTAVYYCARELIHAMDNWGQGTLVTVSSTRGMRTEDLPKAVVFLEPQWYRVLEKDSVTLKCQGAYSPEDNSTQWFHNESLISSQASSYFIDAATVDDSGEYRCQTNLSTLSDPVQLEVHIGWLLLQAPRWVFKEEDPIHLRCHSWKNTALHKVTYLQNGKGRKYFHHNSDFYIPKATLKDSGSYFCRGLVGSKNVSSETVNITITQGLAVPTISSFFPPGYQVSFCLVMVLLFAVDTGLYFSV

SEQ ID NO: 9908 - protein, 483 aa, synthetic construct
MALPVTALLLPLALLLHAARPDFVMTQSPLSLPVTPGEPASISCRSSQSIVHSNGNTYLEWYLQKPGQSPQLLIYKVSNRFSGVPDRFSGSGSGTDFTLKISRVEAEDVGVYYCFQGSHVPLTFGQGTKLEIKRGGGGSGGGGSGGGGSEVQLVESGAEVKKPGASVKVSCKASGYTFTSYWIHWVRQAPGQGLEWMGENDPSNGRTNYNEKFKNRVTLTVDTSISTAYMELSRLRSDDTAVYYCARGPNYFYSMDYWGQGTMVTVSSTRGMRTEDLPKAVVFLEPQWYRVLEKDSVTLKCQGAYSPEDNSTQWFHNESLISSQASSYFIDAATVDDSGEYRCQTNLSTLSDPVQLEVHIGWLLLQAPRWVFKEEDPIHLRCHSWKNTALHKVTYLQNGKGRKYFHHNSDFYIPKATLKDSGSYFCRGLVGSKNVSSETVNITITQGLAVPTISSFFPPGYQVSFCLVMVLLFAVDTGLYFSV

SEQ ID NO: 9909 - protein, 476 aa, synthetic construct
MALPVTALLLPLALLLHAARPDIQLTQSPSFLSASVGDRVTITCSARSSISFMYWYQQKPGKAPKLLIYDTSNLASGVPSRFSGSGSGTEFTLTISSLEAEDAATYYCQQWSSYPLTFGQGTKLEIKGGGGSGGGGSGGGGSQVQLVQSGAEVKKPGASVKVSCKASGYTFTGSWMNWVRQAPGQGLEWIGRIYPGDGETNYNGKFKDRVTITADKSTSTAYMELSSLRSEDTAVYYCARIYGNNVYFDVWGQGTTVTVSSTRGMRTEDLPKAVVFLEPQWYRVLEKDSVTLKCQGAYSPEDNSTQWFHNESLISSQASSYFIDAATVDDSGEYRCQTNLSTLSDPVQLEVHIGWLLLQAPRWVFKEEDPIHLRCHSWKNTALHKVTYLQNGKGRKYFHHNSDFYIPKATLKDSGSYFCRGLVGSKNVSSETVNITITQGLAVPTISSFFPPGYQVSFCLVMVLLFAVDTGLYFSV

SEQ ID NO: 9910 - protein, 484 aa, synthetic construct
MALPVTALLLPLALLLHAARPQLVLTQSPSASASLGSSVKLTCTLSSGHKTDTIDWYQQQPGKAPRYLMKLEGSGSYNKGSGVPDRFSGSSSGADWYLTISSLQSEDEADYYCGTDYPGNYLFGGGTQLTVLGGGGGSGGGGSGGGGSQEQLVESGGGLVQPGGSLRLSCAASGFTFSDYYMSWIRQAPGKGLEWVATIYPSSGKTYYADSAKGRLTISSDNAKDSLYLQMNSLRAEDTAVYYCTRDSYADDAALFDIWGQGTTVTVSSTRGMRTEDLPKAVVFLEPQWYRVLEKDSVTLKCQGAYSPEDNSTQWFHNESLISSQASSYFIDAATVDDSGEYRCQTNLSTLSDPVQLEVHIGWLLLQAPRWVFKEEDPIHLRCHSWKNTALHKVTYLQNGKGRKYFHHNSDFYIPKATLKDSGSYFCRGLVGSKNVSSETVNITITQGLAVPTISSFFPPGYQVSFCLVMVLLFAVDTGLYFSV

SEQ ID NO: 9911 - protein, 479 aa, synthetic construct
MALPVTALLLPLALLLHAARPDIVLTQSPPSLAMSLGKRATISCRASESVTILGSHLIHWYQQKPGQPPTLLIQLASNVQTGVPARFSGSGSRTDFTLTIDPVEEDDVAVYYCLQSRTIPRTFGGGTKLEIKGGGGSGGGGSGGGGSQIQLVQSGPELKKPGETVKISCKASGYTFTDYSINWVKRAPGKGLKWMGWINTETREPAYAYDFRGRFAFSLETSASTAYLQINNLKYEDTATYFCALDYSYAMDYWGQGTSVTVSSTRGMRTEDLPKAVVFLEPQWYRVLEKDSVTLKCQGAYSPEDNSTQWFHNESLISSQASSYFIDAATVDDSGEYRCQTNLSTLSDPVQLEVHIGWLLLQAPRWVFKEEDPIHLRCHSWKNTALHKVTYLQNGKGRKYFHHNSDFYIPKATLKDSGSYFCRGLVGSKNVSSETVNITITQGLAVPTISSFFPPGYQVSFCLVMVLLFAVDTGLYFSV

SEQ ID NO: 9912 - protein, 483 aa, synthetic construct
MALPVTALLLPLALLLHAARPQVQLQESGPGLVKPSQTLSLTCTVSGGSISSGGFYWSWIRQHPGKGLEWIGYIHHSGSTHYNPSLKSRVTISIDTSKNLFSLRLSSVTAADTAVYYCASLVYCGGDCYSGFDYWGQGTLVTVSSGGGGSGGGGSGGGGSDIQLTQSPSSLSASVGDRVSFTCQASQDINNFLNWYQQKPGKAPKLLIYDASNLETGVPSRFSGSGSGTDFTFTISSLQPEDIATYYCQQYGNLPFTFGGGTKVEIKRTRGMRTEDLPKAVVFLEPQWYRVLEKDSVTLKCQGAYSPEDNSTQWFHNESLISSQASSYFIDAATVDDSGEYRCQTNLSTLSDPVQLEVHIGWLLLQAPRWVFKEEDPIHLRCHSWKNTALHKVTYLQNGKGRKYFHHNSDFYIPKATLKDSGSYFCRGLVGSKNVSSETVNITITQGLAVPTISSFFPPGYQVSFCLVMVLLFAVDTGLYFSV

SEQ ID NO: 9913 - protein, 481 aa, synthetic construct
MALPVTALLLPLALLLHAARPQVQLQESGPGLVKPSETLSLTCTVSGGSISSYYWSWIRQPPGKGLEWIGYIYYSGSTNYNPSLKSRVTISVDTSKNQFSLKLSSVTAADTAVYYCVSLVYCGGDCYSGFDYWGQGTLVTVSSGGGGSGGGGSGGGGSDIQLTQSPSSLSASVGDRVSFTCQASQDINNFLNWYQQKPGKAPKLLIYDASNLETGVPSRFSGSGSGTDFTFTISSLQPEDIATYYCQQYGNLPFTFGGGTKVEIKRTRGMRTEDLPKAVVFLEPQWYRVLEKDSVTLKCQGAYSPEDNSTQWFHNESLISSQASSYFIDAATVDDSGEYRCQTNLSTLSDPVQLEVHIGWLLLQAPRWVFKEEDPIHLRCHSWKNTALHKVTYLQNGKGRKYFHHNSDFYIPKATLKDSGSYFCRGLVGSKNVSSETVNITITQGLAVPTISSFFPPGYQVSFCLVMVLLFAVDTGLYFSV

SEQ ID NO: 9914 - protein, 486 aa, synthetic construct
MALPVTALLLPLALLLHAARPQVTLKESGPVLVKPTETLTLTCTVSGFSLINARMGVSWIRQPPGKALEWLAHIFSNAEKSYRTSLKSRLTISKDTSKSQVVLTMTNMDPVDTATYYCARIPGYGGNGDYHYYGMDVWGQGTTVTVSSGGGGSGGGGSGGGGSDIQMTQSPSSLSASLGDRVTITCRASQGIRNDLGWYQQKPGKAPKRLIYASSTLQSGVPSRFSGSGSGTEFTLTISSLQPEDFATYYCLQHNNFPWTFGQGTKVEIKRTRGMRTEDLPKAVVFLEPQWYRVLEKDSVTLKCQGAYSPEDNSTQWFHNESLISSQASSYFIDAATVDDSGEYRCQTNLSTLSDPVQLEVHIGWLLLQAPRWVFKEEDPIHLRCHSWKNTALHKVTYLQNGKGRKYFHHNSDFYIPKATLKDSGSYFCRGLVGSKNVSSETVNITITQGLAVPTISSFFPPGYQVSFCLVMVLLFAVDTGLYFSV

SEQ ID NO: 9915 - protein, 480 aa, synthetic construct
MALPVTALLLPLALLLHAARPQIQLVESGGGVVQPGRSLRLSCVASGFTFKNYGMHWVRQAPGKGLEWVAVIWYDGSNEYYGDPVKGRFTISRDNSKNMLYLQMNSLRADDTAVYYCARSGIAVAGAFDYWGQGTLVTVSSGGGGSGGGGSGGGGSEIVLTQSPDTLSLSPGEKATLSCRASQSVSSSFLAWYQQKPGQAPSLLIYVASRRAAGIPDRFSGSGSGTDFTLTISRLEPEDFGMFYCQHYGRTPFTFGPGTKVDIKRTRGMRTEDLPKAVVFLEPQWYRVLEKDSVTLKCQGAYSPEDNSTQWFHNESLISSQASSYFIDAATVDDSGEYRCQTNLSTLSDPVQLEVHIGWLLLQAPRWVFKEEDPIHLRCHSWKNTALHKVTYLQNGKGRKYFHHNSDFYIPKATLKDSGSYFCRGLVGSKNVSSETVNITITQGLAVPTISSFFPPGYQVSFCLVMVLLFAVDTGLYFSV

SEQ ID NO: 9916 - protein, 481 aa, synthetic construct
MALPVTALLLPLALLLHAARPDIQLTQSPSFLSASVGDRVTITCRASQGISSYLAWYQQKPGKAPKLLIYAASTLQSGVPSRFSGSGSGTEFTLTISSLQPEDFATYYCQQVNSYPLTFGGGTKVEIKRGGGGSGGGGSGGGGSQLQLQESGPGLVKPSETLSLTCTVSGGSISSSTYYWGWIRQPPGKGLEWIGSIYFTGSTDYNPSLKSRVSISVDTSKNQFSLKLSSVTAADTAVYYCAKEDDSSGYYSFDYWGQGNLVTVSSTRGMRTEDLPKAVVFLEPQWYRVLEKDSVTLKCQGAYSPEDNSTQWFHNESLISSQASSYFIDAATVDDSGEYRCQTNLSTLSDPVQLEVHIGWLLLQAPRWVFKEEDPIHLRCHSWKNTALHKVTYLQNGKGRKYFHHNSDFYIPKATLKDSGSYFCRGLVGSKNVSSETVNITITQGLAVPTISSFFPPGYQVSFCLVMVLLFAVDTGLYFSV

SEQ ID NO: 9917 - protein, 484 aa, synthetic construct
MALPVTALLLPLALLLHAARPQSALTQPRSVSGSPGHSVTISCTGTSSDVGDYNYVSWYQQRPGKVPKLLIYDVSKRPSGVPDRFSGSKSGNTASLTISGLQAEDEAIYFCASYAGNYNVVFGGGTKLTVLGQGGGGSGGGGSGGGGSQVQLVQSGSELKKPGASVKVSCKASGYTFNTYAMNWVRQAPGQGLEWMGWINTNTGNPTYAQGFTGRFVFSLDTSVSTAYLQISSLKAEDTAVYYCARRYFDWLLGAFDIWGQGTMVTVSSTRGMRTEDLPKAVVFLEPQWYRVLEKDSVTLKCQGAYSPEDNSTQWFHNESLISSQASSYFIDAATVDDSGEYRCQTNLSTLSDPVQLEVHIGWLLLQAPRWVFKEEDPIHLRCHSWKNTALHKVTYLQNGKGRKYFHHNSDFYIPKATLKDSGSYFCRGLVGSKNVSSETVNITITQGLAVPTISSFFPPGYQVSFCLVMVLLFAVDTGLYFSV

SEQ ID NO: 9918 - protein, 476 aa, synthetic construct
MALPVTALLLPLALLLHAARPDIQMTQSPSSLSASVGDRVTITCSASQGINNYLNWYQQKPGKAPKLLIHYTSGLHAGVPSRFSGSGSGTDYTLTISSLQPEDVATYYCQQYSILPWTFGGGTKVEIKRGGGGSGGGGSGGGGSQVQLVQSGAEVKKPGSSVKVSCKASGYAFSSSWMNWVRQAPGQGLEWMGRIYPGDGNTHYAQKFQGRVTLTADKSTSTAYMELSSLRSEDTAVYYCGEGYLDPMDYWGQGTLVTVSSTRGMRTEDLPKAVVFLEPQWYRVLEKDSVTLKCQGAYSPEDNSTQWFHNESLISSQASSYFIDAATVDDSGEYRCQTNLSTLSDPVQLEVHIGWLLLQAPRWVFKEEDPIHLRCHSWKNTALHKVTYLQNGKGRKYFHHNSDFYIPKATLKDSGSYFCRGLVGSKNVSSETVNITITQGLAVPTISSFFPPGYQVSFCLVMVLLFAVDTGLYFSV

SEQ ID NO: 9919 - protein, 479 aa, synthetic construct
MALPVTALLLPLALLLHAARPEVQLVESGGGLVQPGGSLRLSCAASGYTFTTYWMHWVRQAPGKGLEWVGYIRPSTGYTEYNQKFKDRFTISADTSKNTAYLQMNSLRAEDTAVYYCARSRWLLDYWGQGTLVTVSGGGGSGGGGSGGGGSDIQMTQSPSSLSASVGDRVTITCKSSQSVLYSSNQKNYLAWFQQKPGKAPKLLIYWASTRESGVPSRFSGSGSGTDFTLTISSLQPEDFATYFCHQYLSSYTFGQGTKVEIKRTRGMRTEDLPKAVVFLEPQWYRVLEKDSVTLKCQGAYSPEDNSTQWFHNESLISSQASSYFIDAATVDDSGEYRCQTNLSTLSDPVQLEVHIGWLLLQAPRWVFKEEDPIHLRCHSWKNTALHKVTYLQNGKGRKYFHHNSDFYIPKATLKDSGSYFCRGLVGSKNVSSETVNITITQGLAVPTISSFFPPGYQVSFCLVMVLLFAVDTGLYFSV

SEQ ID NO: 9920 - protein, 476 aa, synthetic construct
MALPVTALLLPLALLLHAARPDIQMTQSPSSLSASVGDRVTITCRASQDISNYLNWYQQKPGKAPKLLIYYTSRLHSGVPSRFSGSGSGTDFTLTISSLQPEDFATYYCQQGNTLPYTFGQGTKVEIKRGGGGSGGGGSGGGGSEVQLVESGGGLVQPGGSLRLSCAASGFTFSDYFMSWVRQAPGKGLEWVATISNGGTYTYYPDSVKGRFTISRDNSKNTLYLQMNSLRAEDTAVYYCARFDGYIFDYWGQGTLVTVSSTRGMRTEDLPKAVVFLEPQWYRVLEKDSVTLKCQGAYSPEDNSTQWFHNESLISSQASSYFIDAATVDDSGEYRCQTNLSTLSDPVQLEVHIGWLLLQAPRWVFKEEDPIHLRCHSWKNTALHKVTYLQNGKGRKYFHHNSDFYIPKATLKDSGSYFCRGLVGSKNVSSETVNITITQGLAVPTISSFFPPGYQVSFCLVMVLLFAVDTGLYFSV

SEQ ID NO: 9921 - protein, 483 aa, synthetic construct
MALPVTALLLPLALLLHAARPDIQMTQSPSSLSASVGDRVTITCTASSRVSSSYLHWFQQKPGKAPKLLIYSTSNLASGVPSRFSGSGSGTDFTLTISSLQPEDFATYYCHQYHRSPYTFGQGTKVEIKRGGGGSGGGGSGGGGSEVQLVESGGGLVQPGGSLRLSCAASGYAFSNSWINWVRQAPGKGLEWVGQIYPGDYDTNYNGKFKGRFTISRDKSKNTAYLQMNSLRAEDTAVYYCARGGSIYYGNLGFFDVWGQGTLVTVSSTRGMRTEDLPKAVVFLEPQWYRVLEKDSVTLKCQGAYSPEDNSTQWFHNESLISSQASSYFIDAATVDDSGEYRCQTNLSTLSDPVQLEVHIGWLLLQAPRWVFKEEDPIHLRCHSWKNTALHKVTYLQNGKGRKYFHHNSDFYIPKATLKDSGSYFCRGLVGSKNVSSETVNITITQGLAVPTISSFFPPGYQVSFCLVMVLLFAVDTGLYFSV

SEQ ID NO: 9922 - protein, 473 aa, synthetic construct
MALPVTALLLPLALLLHAARPDIQMTQSPSSLSASVGDRVTITCSASSSVTYMYWYQQKPGKAPKLLIYDTSNLASGVPSRFSGSGSGTDYTLTISSLQPEDFATYYCQQWSNYPLTFGQGTKVEIKGGGGSGGGGSGGGGSQVQLVQSGAEVKKPGASVKVSCKASGYSFIEYTINWVRQAPGQGLEWIGNIDPYYGTTYYNQMFTGRATLTVDTSISTAYMELSRLRSDDTAVYYCARGSAWFPYWGQGTLVTVSSTRGMRTEDLPKAVVFLEPQWYRVLEKDSVTLKCQGAYSPEDNSTQWFHNESLISSQASSYFIDAATVDDSGEYRCQTNLSTLSDPVQLEVHIGWLLLQAPRWVFKEEDPIHLRCHSWKNTALHKVTYLQNGKGRKYFHHNSDFYIPKATLKDSGSYFCRGLVGSKNVSSETVNITITQGLAVPTISSFFPPGYQVSFCLVMVLLFAVDTGLYFSV

SEQ ID NO: 9923 - protein, 473 aa, synthetic construct
MALPVTALLLPLALLLHAARPEIVLTQSPSSLSASVGDRVTITCRASENIYSYLAWYQQKPGKAPKLLIYNTKTLGEGVPSRFSGSGSGTDFTLTISSLQPEDFATYYCQHHYGTPFTFGPGTKVDIKGGGGSGGGGSGGGGSQVQLVQSGAEVKKPGASVKVSCKASGYTFSDYWVHWVRQAPGQGLEWMGAIDGSDTFNDYSQKFKGRVTMTRDTSISTAYMELSRLRSDDTAVYYCARGGLLQYWGQGTLVTVSSTRGMRTEDLPKAVVFLEPQWYRVLEKDSVTLKCQGAYSPEDNSTQWFHNESLISSQASSYFIDAATVDDSGEYRCQTNLSTLSDPVQLEVHIGWLLLQAPRWVFKEEDPIHLRCHSWKNTALHKVTYLQNGKGRKYFHHNSDFYIPKATLKDSGSYFCRGLVGSKNVSSETVNITITQGLAVPTISSFFPPGYQVSFCLVMVLLFAVDTGLYFSV

SEQ ID NO: 9924 - protein, 477 aa, synthetic construct
MALPVTALLLPLALLLHAARPQVQLQQSGPELVKPGASVKISCKASGYAFSSSWMNWVKQRPGKGLEWIGRIYPGDEDTNYSGKFKDKATLTADKSSTTAYMQLSSLTSEDSAVYFCARSLLYGDYLDYWGQGTTLTVSSGGGGSGGGGSGGGGSQIVLTQSPAIMSASPGEKVTMTCSASSSVSYMHWYQQKSGTSPKRWIYDTSKLASGVPDRFSGSGSGTSYFLTINNMEAEDAATYYCQQWNINPLTFGAGTKLELKRTRGMRTEDLPKAVVFLEPQWYRVLEKDSVTLKCQGAYSPEDNSTQWFHNESLISSQASSYFIDAATVDDSGEYRCQTNLSTLSDPVQLEVHIGWLLLQAPRWVFKEEDPIHLRCHSWKNTALHKVTYLQNGKGRKYFHHNSDFYIPKATLKDSGSYFCRGLVGSKNVSSETVNITITQGLAVPTISSFFPPGYQVSFCLVMVLLFAVDTGLYFSV

SEQ ID NO: 9925 - protein, 480 aa, synthetic construct
MALPVTALLLPLALLLHAARPDIQMTQSSAYLSVSLGGRVTITCKASDHINNWLAWYQHKPGNAPRLLISGATTLETGVPSRFSGSGSGKDYTLSITSLQTEDVATYYCQQSWNTPWTFGGGTKLEIKRGGGGSGGGGSGGGGSQVQLQQSGAELVRPGSSVKISCKASGYAFSSYWVNWMKQRPGQGLEWIGQIYPGDGDTNYNGKFKGRATVTADKSSSTSYMQFSSLTSEDSAVYFCARSITTVVGCAMDYWGQGTSVTVSSTRGMRTEDLPKAVVFLEPQWYRVLEKDSVTLKCQGAYSPEDNSTQWFHNESLISSQASSYFIDAATVDDSGEYRCQTNLSTLSDPVQLEVHIGWLLLQAPRWVFKEEDPIHLRCHSWKNTALHKVTYLQNGKGRKYFHHNSDFYIPKATLKDSGSYFCRGLVGSKNVSSETVNITITQGLAVPTISSFFPPGYQVSFCLVMVLLFAVDTGLYFSV

SEQ ID NO: 9926 - protein, 479 aa, synthetic construct
MALPVTALLLPLALLLHAARPEVQLLESGGGLVQPGGSLRLSCAASGFTFSSYAMSWVRQAPGKGLEWVSVISGSGGRPNYADSVKGRFTISRDNSKNTLYLQMNSLRDEDTAVYYCAKVDYSNYLFFDYWGQGTLVTVSSGGGGSGGGGSGGGGSEIVLTQSPGTLSLSPGEGATLSCRAGQSVRSSYLGWYQQKPGQAPRLLIYGASSRATGIPDRFSGSGSGTDFTLTISRLEPEDFAVYYCQQYGYSPPTFGGGTKLEIKTRGMRTEDLPKAVVFLEPQWYRVLEKDSVTLKCQGAYSPEDNSTQWFHNESLISSQASSYFIDAATVDDSGEYRCQTNLSTLSDPVQLEVHIGWLLLQAPRWVFKEEDPIHLRCHSWKNTALHKVTYLQNGKGRKYFHHNSDFYIPKATLKDSGSYFCRGLVGSKNVSSETVNITITQGLAVPTISSFFPPGYQVSFCLVMVLLFAVDTGLYFSV

SEQ ID NO: 9927 - protein, 482 aa, synthetic construct
MALPVTALLLPLALLLHAARPDIVLTQSPPSLAMSLGKRATISCRASESVTILGSHLIHWYQQKPGQPPTLLIQLASNVQTGVPARFSGSGSRTDFTLTIDPVEEDDVAVYYCLQSRTIPRTFGGGTKLEIKGSTSGSGKPGSGEGSTKGQIQLVQSGPELKKPGETVKISCKASGYTFTDYSINWVKRAPGKGLKWMGWINTETREPAYAYDFRGRFAFSLETSASTAYLQINNLKYEDTATYFCALDYSYAMDYWGQGTSVTVSSTRGMRTEDLPKAVVFLEPQWYRVLEKDSVTLKCQGAYSPEDNSTQWFHNESLISSQASSYFIDAATVDDSGEYRCQTNLSTLSDPVQLEVHIGWLLLQAPRWVFKEEDPIHLRCHSWKNTALHKVTYLQNGKGRKYFHHNSDFYIPKATLKDSGSYFCRGLVGSKNVSSETVNITITQGLAVPTISSFFPPGYQVSFCLVMVLLFAVDTGLYFSV

SEQ ID NO: 9928 - protein, 482 aa, synthetic construct
MALPVTALLLPLALLLHAARPDIQMTQSPSSLSASVGDRVTITCRASSSVSYMHWYQQKPGKAPKLLIYATSNLASGVPSRFSGSGSGTDFTLTISSLQPEDFATYYCQQWTFNPPTFGQGTKLEIKRTVAAGGGGSGGGGSGGGGSQVQLVQSGAEVKKPGASVKVSCKASGYTFTSYNMHWVRQAPGQRLEWMGGIYPGNGDTSYNQKFKGRVTITRDTSASTAYMELSSLRSEDTAVYYCARYDYNYAMDYWGQGTLVTVSSASTRGMRTEDLPKAVVFLEPQWYRVLEKDSVTLKCQGAYSPEDNSTQWFHNESLISSQASSYFIDAATVDDSGEYRCQTNLSTLSDPVQLEVHIGWLLLQAPRWVFKEEDPIHLRCHSWKNTALHKVTYLQNGKGRKYFHHNSDFYIPKATLKDSGSYFCRGLVGSKNVSSETVNITITQGLAVPTISSFFPPGYQVSFCLVMVLLFAVDTGLYFSV

SEQ ID NO: 9929 - protein, 477 aa, synthetic construct
MALPVTALLLPLALLLHAARPEIVLTQSPGTLSLSPGERATLSCRASQSVSSSYLAWYQQKPGQAPRLLIYGASSRATGIPDRFSGSGSGTDFTLTISRLEPEDFAVYYCQQYHHSPLTFGGGTKVEIKRGGGGSGGGGSGGGGSEVQLVESGGGLVQPGGSLRLSCAASGFTFSGRSMNWVRQAPGKGLEWVSYISSDSRTIYYADSVKGRFTISRDNAKNSLYLQMNSLRAEDTAVYYCARGGHGYFDLWGRGTLVTVSSTRGMRTEDLPKAVVFLEPQWYRVLEKDSVTLKCQGAYSPEDNSTQWFHNESLISSQASSYFIDAATVDDSGEYRCQTNLSTLSDPVQLEVHIGWLLLQAPRWVFKEEDPIHLRCHSWKNTALHKVTYLQNGKGRKYFHHNSDFYIPKATLKDSGSYFCRGLVGSKNVSSETVNITITQGLAVPTISSFFPPGYQVSFCLVMVLLFAVDTGLYFSV

SEQ ID NO: 9930 - protein, 480 aa, synthetic construct
MALPVTALLLPLALLLHAARPEIVLTQSPGTLSLSPGERATLSCRASQSVSSDYLAWYQQKPGQAPRLLIYGASRRATGIPDRFSGSGSGTDFTLTISRLEPEDFAVYYCQQYVSYWTFGGGTKVEIKRGGGGSGGGGSGGGGSQVQLVESGGGVVQPGRSLRLSCAASGFTFSSYGMHWVRQAPGKGLEWVAGIWWDGSNEKYADSVKGRFTISRDNSKNTLYLQMNSLRAEDTAVYYCAKEAPYYAKDYMDVWGKGTTVTVSSTRGMRTEDLPKAVVFLEPQWYRVLEKDSVTLKCQGAYSPEDNSTQWFHNESLISSQASSYFIDAATVDDSGEYRCQTNLSTLSDPVQLEVHIGWLLLQAPRWVFKEEDPIHLRCHSWKNTALHKVTYLQNGKGRKYFHHNSDFYIPKATLKDSGSYFCRGLVGSKNVSSETVNITITQGLAVPTISSFFPPGYQVSFCLVMVLLFAVDTGLYFSV

SEQ ID NO: 9931 - protein, 480 aa, synthetic construct
MALPVTALLLPLALLLHAARPDIQMTQSPSSLSASVGDRVTITCRASQDVNTAVAWYQQKPGKAPKLLIYSASFLYSGVPSRFSGSRSGTDFTLTISSLQPEDFATYYCQQHYTTPPTFGQGTKVEIKRTGGGGSGGGGSGGGGSEVQLVESGGGLVQPGGSLRLSCAASGFNIKDTYIHWVRQAPGKGLEWVARIYPTNGYTRYADSVKGRFTISADTSKNTAYLQMNSLRAEDTAVYYCSRWGGWGFYAMDYWGQGTLVTVSSTRGMRTEDLPKAVVFLEPQWYRVLEKDSVTLKCQGAYSPEDNSTQWFHNESLISSQASSYFIDAATVDDSGEYRCQTNLSTLSDPVQLEVHIGWLLLQAPRWVFKEEDPIHLRCHSWKNTALHKVTYLQNGKGRKYFHHNSDFYIPKATLKDSGSYFCRGLVGSKNVSSETVNITITQGLAVPTISSFFPPGYQVSFCLVMVLLFAVDTGLYFSV

SEQ ID NO: 9932 - protein, 475 aa, synthetic construct
MALPVTALLLPLALLLHAARPQVQLVESGGGLVKPGGSLRLSCAASGFTFSDYYMTWIRQAPGKGLEWISYISSSGSTIYYADSVKGRFTISRDNAKNSLYLQMNSLRAEDTAVYYCARDRNSHFDYWGQGTLVTVSSGGGGSGGGGSGGGGSDIQMTQSPSSVSASVGDRVTITCRASQGITRWLAWYQQKPGKAPKLLIYAASVLQSGVPSRFSGSGSGTDFTLTISSLQPEDFATYYCQQSNSFPRTFGQGTKVEIKTRGMRTEDLPKAVVFLEPQWYRVLEKDSVTLKCQGAYSPEDNSTQWFHNESLISSQASSYFIDAATVDDSGEYRCQTNLSTLSDPVQLEVHIGWLLLQAPRWVFKEEDPIHLRCHSWKNTALHKVTYLQNGKGRKYFHHNSDFYIPKATLKDSGSYFCRGLVGSKNVSSETVNITITQGLAVPTISSFFPPGYQVSFCLVMVLLFAVDTGLYFSV

SEQ ID NO: 9933 - protein, 475 aa, synthetic construct
MALPVTALLLPLALLLHAARPQVQLVESGGGLVKPGGSLRLSCAASGFTFSDHYMSWIRQAPGKGLEWFSYISSSGGIIYYADSVKGRFTISRDNAKNSLYLQMNSLRAEDTAVYYCARDVGSHFDYWGQGTLVTVSSGGGGSGGGGSGGGGSDIQMTQSPSSVSASVGDRVTITCRASQDISRWLAWYQQKPGKAPKLLISAASRLQSGVPSRFSGSGSGTDFTLTISSLQPEDFAIYYCQQAKSFPRTFGQGTKVEIKTRGMRTEDLPKAVVFLEPQWYRVLEKDSVTLKCQGAYSPEDNSTQWFHNESLISSQASSYFIDAATVDDSGEYRCQTNLSTLSDPVQLEVHIGWLLLQAPRWVFKEEDPIHLRCHSWKNTALHKVTYLQNGKGRKYFHHNSDFYIPKATLKDSGSYFCRGLVGSKNVSSETVNITITQGLAVPTISSFFPPGYQVSFCLVMVLLFAVDTGLYFSV

SEQ ID NO: 9934 - protein, 487 aa, synthetic construct
MALPVTALLLPLALLLHAARPQVQLVESGGGVVQSGRSLRLSCAASGFTFRNYGMHWVRQAPGKGLEWVAVIWYDGSDKYYADSVRGRFTISRDNSKNTLYLQMNSLRAEDTAVYYCARDGYDILTGNPRDFDYWGQGTLVTVSSGGGGSGGGGSGGGGSDTVMTQTPLSSHVTLGQPASISCRSSQSLVHSDGNTYLSWLQQRPGQPPRLLIYRISRRFSGVPDRFSGSGAGTDFTLEISRVEAEDVGVYYCMQSTHVPRTFGQGTKVEIKTRGMRTEDLPKAVVFLEPQWYRVLEKDSVTLKCQGAYSPEDNSTQWFHNESLISSQASSYFIDAATVDDSGEYRCQTNLSTLSDPVQLEVHIGWLLLQAPRWVFKEEDPIHLRCHSWKNTALHKVTYLQNGKGRKYFHHNSDFYIPKATLKDSGSYFCRGLVGSKNVSSETVNITITQGLAVPTISSFFPPGYQVSFCLVMVLLFAVDTGLYFSV

SEQ ID NO: 9935 - protein, 480 aa, synthetic construct
MALPVTALLLPLALLLHAARPEVQLVESGGGLVQPGGSLRLSCAASGFPFSSYDMHWVRQATGKGLEWVSAIGTAGATYYPGSVKGRFTISRENAKNSLYLQMNSLRAGDTAVYYCARGDYVWGTYRPLFDYWGQGTLVTVSSGGGGSGGGGSGGGGSDIQLTQSPSFLSASVGDRVTITCWASQGINNYLAWYQQKPGKAPKLLIYAASTLQTGVPSRFSGSGSGTEFTLTISSLQPEDFATYYCQQLNSYPLTFGGGTKVEIKTRGMRTEDLPKAVVFLEPQWYRVLEKDSVTLKCQGAYSPEDNSTQWFHNESLISSQASSYFIDAATVDDSGEYRCQTNLSTLSDPVQLEVHIGWLLLQAPRWVFKEEDPIHLRCHSWKNTALHKVTYLQNGKGRKYFHHNSDFYIPKATLKDSGSYFCRGLVGSKNVSSETVNITITQGLAVPTISSFFPPGYQVSFCLVMVLLFAVDTGLYFSV

SEQ ID NO: 9936 - protein, 477 aa, synthetic construct
MALPVTALLLPLALLLHAARPQVQLQESGPGLVKPSETLSLTCTVSGASISSFYWSWIRQPPGKGLEWIGYIYYSGTTNYNPSLKSRVTISVDTSKNQFSLKLSSVTAADTAVYYCARIAVAGFFFDYWGQGTLVTVSSGGGGSGGGGSGGGGSEIVLTQSPGTLSLSPGERATLSCRASQSVNKNYLAWYQQKPGQAPRLLIYGASSRATGIPDRFSGSGSGTDFTLTISRLEPEDFAVYYCQQYDRSPLTFGGGTKVEIKTRGMRTEDLPKAVVFLEPQWYRVLEKDSVTLKCQGAYSPEDNSTQWFHNESLISSQASSYFIDAATVDDSGEYRCQTNLSTLSDPVQLEVHIGWLLLQAPRWVFKEEDPIHLRCHSWKNTALHKVTYLQNGKGRKYFHHNSDFYIPKATLKDSGSYFCRGLVGSKNVSSETVNITITQGLAVPTISSFFPPGYQVSFCLVMVLLFAVDTGLYFSV

SEQ ID NO: 9937 - protein, 486 aa, synthetic construct
MALPVTALLLPLALLLHAARPQVQLVQSGAEVKKPGASVKVSCKASGYTFTNYYMHWVRQAPGLGLEWMGIINPSDGSTSYAQKFQGRVTMTRDTSTNTVYMDLSSLRSEDTAVYYCARGGNSAFYSYYDMDVWGQGTTVTVSSGGGGSGGGGSGGGGSDVVMTQTPLSLPVTLGQPASISCRSSQSLVYRDGNTYLSWFQQRPGQSPRRLIYKVSNWQSGVPDRFSGGGSGTDFTLKISRVEAEDVGVYYCMQGTHWPPTFGQGTKVEIKTRGMRTEDLPKAVVFLEPQWYRVLEKDSVTLKCQGAYSPEDNSTQWFHNESLISSQASSYFIDAATVDDSGEYRCQTNLSTLSDPVQLEVHIGWLLLQAPRWVFKEEDPIHLRCHSWKNTALHKVTYLQNGKGRKYFHHNSDFYIPKATLKDSGSYFCRGLVGSKNVSSETVNITITQGLAVPTISSFFPPGYQVSFCLVMVLLFAVDTGLYFSV

SEQ ID NO: 9938 - protein, 473 aa, synthetic construct
MALPVTALLLPLALLLHAARPQVQLQQSGPELVKPGASVRISCKASGYTFTTYYIHWVKQRPGQGLEWIGWIYPGNVNTNYNEKFKGKATLTADKSSSTAYMQLTSLTSEDSAVYFCARGVYYFDYWGQGTILTVSSGGGGSGGGGSGGGGSIVMTQTPKFLLVSAGDRVTITCKASQSVNNDVSWFQQKPGQSPTLLIYYASNRYTGVPDRFTGSGYGTDFTFTISTVQAEDLAVYFCQQDYSSPYTFGGGTKLEIKTRGMRTEDLPKAVVFLEPQWYRVLEKDSVTLKCQGAYSPEDNSTQWFHNESLISSQASSYFIDAATVDDSGEYRCQTNLSTLSDPVQLEVHIGWLLLQAPRWVFKEEDPIHLRCHSWKNTALHKVTYLQNGKGRKYFHHNSDFYIPKATLKDSGSYFCRGLVGSKNVSSETVNITITQGLAVPTISSFFPPGYQVSFCLVMVLLFAVDTGLYFSV

SEQ ID NO: 9939 - protein, 476 aa, synthetic construct
MALPVTALLLPLALLLHAARPQVQLQESGPGLVKPSQTLSLTCTVSGGSINNNNYYWTWIRQHPGKGLEWIGYIYYSGSTFYNPSLKSRVTISVDTSKTQFSLKLSSVTAADTAVYYCAREDTMTGLDVWGQGTTVTVSSGGGGSGGGGSGGGGSDIQMTQSPSSLSASVGDRVTITCRASQSINNYLNWYQQKPGKAPTLLIYAASSLQSGVPSRFSGSRSGTDFTLTISSLQPEDFAAYFCQQTYSNPTFGQGTKVEVKTRGMRTEDLPKAVVFLEPQWYRVLEKDSVTLKCQGAYSPEDNSTQWFHNESLISSQASSYFIDAATVDDSGEYRCQTNLSTLSDPVQLEVHIGWLLLQAPRWVFKEEDPIHLRCHSWKNTALHKVTYLQNGKGRKYFHHNSDFYIPKATLKDSGSYFCRGLVGSKNVSSETVNITITQGLAVPTISSFFPPGYQVSFCLVMVLLFAVDTGLYFSV

SEQ ID NO: 9940 - protein, 481 aa, synthetic construct
MALPVTALLLPLALLLHAARPSYELTQPPSVSVSPGQTASITCSGDKLGDKYASWYQQKPGQSPVLVIYQDNRRPSGIPERFSGSNSGNTATLTISGTQAMDEADYYCQAWDSDTYVFGTGTKVTVLGQGGGGSGGGGSGGGGSEVQLVQSGAEVKKPGASVKVSCKASGDTFKRYYVHWVRQAPGQGLEWMGIINPSGVSTTYAQKFQGRVTMTRDTSTSTVYMELSSLRSEDTAVYYCAEVRGSGFNYFGMDVWGQGTLVTVSSTRGMRTEDLPKAVVFLEPQWYRVLEKDSVTLKCQGAYSPEDNSTQWFHNESLISSQASSYFIDAATVDDSGEYRCQTNLSTLSDPVQLEVHIGWLLLQAPRWVFKEEDPIHLRCHSWKNTALHKVTYLQNGKGRKYFHHNSDFYIPKATLKDSGSYFCRGLVGSKNVSSETVNITITQGLAVPTISSFFPPGYQVSFCLVMVLLFAVDTGLYFSV

SEQ ID NO: 9941 - protein, 480 aa, synthetic construct
MALPVTALLLPLALLLHAARPEVQLLESGGGLVQPGGSLRLSCAASGFTFSSYAMSWVRQAPGKGLEVVVSAISGGGGRTYYADSVKGRFTISRDNSKNTLYLQMNSLRAEDTAVYYCAREEMAFRAYRFDIWGQGTLVTVSSGGGGSGGGGSGGGGSDIQMTQSPSSLSASVGDRVTITCRASQSISSYLNWYQQKPGKAPKLLIYAASSLQSGVPSRFSGSGSGTDFTLTISSLQPEDFATYYCQQSYITPLTFGGGTKVEIKTRGMRTEDLPKAVVFLEPQWYRVLEKDSVTLKCQGAYSPEDNSTQWFHNESLISSQASSYFIDAATVDDSGEYRCQTNLSTLSDPVQLEVHIGWLLLQAPRWVFKEEDPIHLRCHSWKNTALHKVTYLQNGKGRKYFHHNSDFYIPKATLKDSGSYFCRGLVGSKNVSSETVNITITQGLAVPTISSFFPPGYQVSFCLVMVLLFAVDTGLYFSV

SEQ ID NO: 9942 - protein, 488 aa, synthetic construct
MALPVTALLLPLALLLHAARPDIVLTQSPASLAVSLGQGATISCRASKSVSTSGYTYMHWYQQKPGQPPKLLIYLASNLESGVPARFSGSGSGTDFTLNIHPVEEEDAATYYCQHSGELPPSFGGGTKLEIKRAGGGGSGGGGSGGGGSEVQLVESGGDLVKPGGSLKLSCAVSGFTFSSYGMSWVRQTPDKRLEWVATVSSGGTYTYYPDSVKGRFTISRDNAKNTLYLQMSSLKSEDSAMYYCARHRGNYYATYYYAMDYWGQGTSVTVSSTRGMRTEDLPKAVVFLEPQWYRVLEKDSVTLKCQGAYSPEDNSTQWFHNESLISSQASSYFIDAATVDDSGEYRCQTNLSTLSDPVQLEVHIGWLLLQAPRWVFKEEDPIHLRCHSWKNTALHKVTYLQNGKGRKYFHHNSDFYIPKATLKDSGSYFCRGLVGSKNVSSETVNITITQGLAVPTISSFFPPGYQVSFCLVMVLLFAVDTGLYFSV

SEQ ID NO: 9943 - protein, 482 aa, synthetic construct
MALPVTALLLPLALLLHAARPDIQMTQSPSSLSASVGDRVTITCSASQGIRNYLNWYQQKPGKVPKLLIYYTSRLHSGVPSRFSGSGSGTDFTLTISSLQPEDVATYYCQQYGKLPYTFGQGTKLEIKRTVAAGGGGSGGGGSGGGGSEVQLVESGGGLVQPGGSLRLSCAASGFTFSDAWMDWVRQAPGKGLEWVGEIRSKVNNHETYYAESVKGRFTISRDDSKNSLYLQMNSLKTEDTAVYYCARNDYFDYWGQGTTVTVSSASTRGMRTEDLPKAVVFLEPQWYRVLEKDSVTLKCQGAYSPEDNSTQWFHNESLISSQASSYFIDAATVDDSGEYRCQTNLSTLSDPVQLEVHIGWLLLQAPRWVFKEEDPIHLRCHSWKNTALHKVTYLQNGKGRKYFHHNSDFYIPKATLKDSGSYFCRGLVGSKNVSSETVNITITQGLAVPTISSFFPPGYQVSFCLVMVLLFAVDTGLYFSV

SEQ ID NO: 9944 - protein, 490 aa, synthetic construct
MALPVTALLLPLALLLHAARPEVQLQESGAEVKKPGSSVKVSCKASGFNIKDTYMHWVRQAPGQGLEWMGRIDPANGNSKYVPKFQGRVTITADESTSTAYMELSSLRSEDTAVYYCAPFGYYVSDYAMAYWGQGTTVTVSSASGGGGSGGGGSGGGGSDIVMTQSPDSLAVSLGERATINCRAGESVDIFGVGFLHWYQQKPGQPPKLLIYRASNLESGVPDRFSGSGSGTDFTLTIRPLQAEDVAVYYCQQTNEDPYTFGQGTKLEIKRTVAATRGMRTEDLPKAVVFLEPQWYRVLEKDSVTLKCQGAYSPEDNSTQWFHNESLISSQASSYFIDAATVDDSGEYRCQTNLSTLSDPVQLEVHIGWLLLQAPRWVFKEEDPIHLRCHSWKNTALHKVTYLQNGKGRKYFHHNSDFYIPKATLKDSGSYFCRGLVGSKNVSSETVNITITQGLAVPTISSFFPPGYQVSFCLVMVLLFAVDTGLYFSV

SEQ ID NO: 9945 - protein, 483 aa, synthetic construct
MALPVTALLLPLALLLHAARPQVQLVQSGAEVKKPGSSVKVSCKASGGTFSSYAISWVRQAPGQGLEWMGLIIPRYGKARYAQKFQGRVTITADESTSTAYMELSSLRSEDTAVYYCARNWPYYYMDFWGQGTLVTVSSASGGGGSGGGGSGGGGSDIVLTQSPATLSLSPGERATLSCRASQNIVFNLAWYQQKPGQAPRLLIYDASNRATGVPARFSGSGSGTDFTLTISSLEPEDFAVYYCQQKKSMPLTFGQGTKVEIKRTVAATRGMRTEDLPKAVVFLEPQWYRVLEKDSVTLKCQGAYSPEDNSTQWFHNESLISSQASSYFIDAATVDDSGEYRCQTNLSTLSDPVQLEVHIGWLLLQAPRWVFKEEDPIHLRCHSWKNTALHKVTYLQNGKGRKYFHHNSDFYIPKATLKDSGSYFCRGLVGSKNVSSETVNITITQGLAVPTISSFFPPGYQVSFCLVMVLLFAVDTGLYFSV

SEQ ID NO: 9946 - protein, 486 aa, synthetic construct
MALPVTALLLPLALLLHAARPEVQLVESGGGLVKPGGSLRLSCAASGFTFSNAWMSWVRQAPGKGLEWVGRIKSKTEGGTTDYAAPVKGRFTISRDDSKNTLYLQMNSLKTEDTAVYYCTTPYEWSWYDYWGQGTLVTVSSASGGGGSGGGGSGGGGSQTVVTQEPSLTVSPGGTVTLTCGSSTGAVTTSNYANWVQQKPGQAPRGLIGGTNKRAPGTPARFSGSLLGGKAALTLSGVQPEDEAEYYCALWYSNLWVFGGGTKLTVLTVAATRGMRTEDLPKAVVFLEPQWYRVLEKDSVTLKCQGAYSPEDNSTQWFHNESLISSQASSYFIDAATVDDSGEYRCQTNLSTLSDPVQLEVHIGWLLLQAPRWVFKEEDPIHLRCHSWKNTALHKVTYLQNGKGRKYFHHNSDFYIPKATLKDSGSYFCRGLVGSKNVSSETVNITITQGLAVPTISSFFPPGYQVSFCLVMVLLFAVDTGLYFSV

SEQ ID NO: 9947 - protein, 486 aa, synthetic construct
MALPVTALLLPLALLLHAARPQVQLVQSGAEVKKPGASVKVSCKASGYTFTSYYMHWVRQAPGQGLEWMGIINPSGGSTSYAQKFQGRVTMTHDTSTSTVYMELSSLRSEDTAVYYCARSFFTGFHLDYWGQGTLVTVSSASGGGGSGGGGSGGGGSEIVLTQSPGTLSLSPGERATLSCRASQSVSSSYLAWYQQKPGQAPRLLIYGASSRATGIPDRFSGSGSGTDFTLTISRLEPEDFAVYYCQQYTNEHYYTFGQGTKVEIKRTVAATRGMRTEDLPKAVVFLEPQWYRVLEKDSVTLKCQGAYSPEDNSTQWFHNESLISSQASSYFIDAATVDDSGEYRCQTNLSTLSDPVQLEVHIGWLLLQAPRWVFKEEDPIHLRCHSWKNTALHKVTYLQNGKGRKYFHHNSDFYIPKATLKDSGSYFCRGLVGSKNVSSETVNITITQGLAVPTISSFFPPGYQVSFCLVMVLLFAVDTGLYFSV

SEQ ID NO: 9948 - protein, 492 aa, synthetic construct
MALPVTALLLPLALLLHAARPEIVLTQSPATLSLSPGERATLSCSVSSSISSSNLHWYQQKPGQAPRLLIYGTSNLASGIPARFSGSGSGTDFTLTISSLEPEDFAVYYCQQWSSYPHTFGGGTKVEIKRTVAAGGGGSGGGGSGGGGSQVQLVQSGAEVKKPGASVKVSCKASGYTFTNYLIEWVRQAPGQGLEWMGLINPGSGGTNYNEKFKGRVTMTTDTSTSTAYMELRSLRSDDTAVYYCARRSPLGSWIYYAYDGVAYWGQGTLVTVSSASTRGMRTEDLPKAVVFLEPQWYRVLEKDSVTLKCQGAYSPEDNSTQWFHNESLISSQASSYFIDAATVDDSGEYRCQTNLSTLSDPVQLEVHIGWLLLQAPRWVFKEEDPIHLRCHSWKNTALHKVTYLQNGKGRKYFHHNSDFYIPKATLKDSGSYFCRGLVGSKNVSSETVNITITQGLAVPTISSFFPPGYQVSFCLVMVLLFAVDTGLYFSV

SEQ ID NO: 9949 - protein, 477 aa, synthetic construct
MALPVTALLLPLALLLHAARPDIQMTQSPSSLSASVGDRVTITCKAGQNVGTSVAWYQQKPGKAPKLLIYSASYRYSGVPSRFSGSGSGTDFTLTISSLQPEDFATYYCQQYITYPYTFGQGTKVEIKRTVAAGGGGSGGGGSGGGGSEVQLVESGGGLVQPGGSLRLSCAASGFTFSRYWMSWVRQAPGKGLEWVAEINPDSSTIQYTPSLKARFTLSVDRSKNTLYLQMNSLRAEDTAVYYCARPAYWGQGTLVTVSSASTRGMRTEDLPKAVVFLEPQWYRVLEKDSVTLKCQGAYSPEDNSTQWFHNESLISSQASSYFIDAATVDDSGEYRCQTNLSTLSDPVQLEVHIGWLLLQAPRWVFKEEDPIHLRCHSWKNTALHKVTYLQNGKGRKYFHHNSDFYIPKATLKDSGSYFCRGLVGSKNVSSETVNITITQGLAVPTISSFFPPGYQVSFCLVMVLLFAVDTGLYFSV

SEQ ID NO: 9950 - protein, 484 aa, synthetic construct
MALPVTALLLPLALLLHAARPDIQMTQSPSSLSASVGDRVTITCSASQDIGNFLNWYQQKPGKAPKLLIYYTSSLYSGVPSRFSGSGSGTDFTLTISSLQPEDFATYYCQQYSKLPLTFGQGTKLEIKRTVAAGGGGSGGGGSGGGGSQVQLVQSGAEVKKPGASVKVSCKASGYTFTGYNIHWVRQAPGQRLEWMGAIYPGNGDTSYKQKFRGRVTITRDTSASTAYMELSSLRSEDTAVYYCARGETARATFAYWGQGTLVTVSSASTRGMRTEDLPKAVVFLEPQWYRVLEKDSVTLKCQGAYSPEDNSTQWFHNESLISSQASSYFIDAATVDDSGEYRCQTNLSTLSDPVQLEVHIGWLLLQAPRWVFKEEDPIHLRCHSWKNTALHKVTYLQNGKGRKYFHHNSDFYIPKATLKDSGSYFCRGLVGSKNVSSETVNITITQGLAVPTISSFFPPGYQVSFCLVMVLLFAVDTGLYFSV

SEQ ID NO: 9951 - protein, 348 aa, synthetic construct
MALPVTALLLPLALLLHAARPDVQVTQSPSSLSASVGDRVTITCRSSQSLANSYGNTFLSWYLHKPGKAPQLLIYGISNRFSGVPDRFSGSGSGTDFTLTISSLQPEDFATYYCLQGTHQPYTFGQGTKVEIKTRGMRTEDLPKAVVFLEPQWYRVLEKDSVTLKCQGAYSPEDNSTQWFHNESLISSQASSYFIDAATVDDSGEYRCQTNLSTLSDPVQLEVHIGWLLLQAPRWVFKEEDPIHLRCHSWKNTALHKVTYLQNGKGRKYFHHNSDFYIPKATLKDSGSYFCRGLVGSKNVSSETVNITITQGLAVPTISSFFPPGYQVSFCLVMVLLFAVDTGLYFSV

SEQ ID NO: 9952 - protein, 343 aa, synthetic construct
MALPVTALLLPLALLLHAARPDIQMTQSPSSLSASVGDRVTITCRASQDISNYLNWYQQKPGKAVKLLIYYTSILHSGVPSRFSGSGSGTDYTLTISSLQPEDFATYFCQQGNTLPWTFGGGTKVEIKTRGMRTEDLPKAVVFLEPQWYRVLEKDSVTLKCQGAYSPEDNSTQWFHNESLISSQASSYFIDAATVDDSGEYRCQTNLSTLSDPVQLEVHIGWLLLQAPRWVFKEEDPIHLRCHSWKNTALHKVTYLQNGKGRKYFHHNSDFYIPKATLKDSGSYFCRGLVGSKNVSSETVNITITQGLAVPTISSFFPPGYQVSFCLVMVLLFAVDTGLYFSV

SEQ ID NO: 9953 - protein, 344 aa, synthetic construct
MALPVTALLLPLALLLHAARPDIVMTQSQRFMTTSVGDRVSVTCKASQSVDSNVAWYQQKPRQSPKALIFSASLRFSGVPARFTGSGSGTDFTLTISNLQSEDLAEYFCQQYNNYPLTFGAGTKLELKRTRGMRTEDLPKAVVFLEPQWYRVLEKDSVTLKCQGAYSPEDNSTQWFHNESLISSQASSYFIDAATVDDSGEYRCQTNLSTLSDPVQLEVHIGWLLLQAPRWVFKEEDPIHLRCHSWKNTALHKVTYLQNGKGRKYFHHNSDFYIPKATLKDSGSYFCRGLVGSKNVSSETVNITITQGLAVPTISSFFPPGYQVSFCLVMVLLFAVDTGLYFSV

SEQ ID NO: 9954 - protein, 344 aa, synthetic construct
MALPVTALLLPLALLLHAARPDIQMTQSPSSLSASVGDRVTITCRASQDISNYLNWYQQKPGKAPKLLIYYTSILHSGVPSRFSGSGSGTDFTLTISSLQPEDFATYYCQQGNTLPWTFGQGTKVEIKRTRGMRTEDLPKAVVFLEPQWYRVLEKDSVTLKCQGAYSPEDNSTQWFHNESLISSQASSYFIDAATVDDSGEYRCQTNLSTLSDPVQLEVHIGWLLLQAPRWVFKEEDPIHLRCHSWKNTALHKVTYLQNGKGRKYFHHNSDFYIPKATLKDSGSYFCRGLVGSKNVSSETVNITITQGLAVPTISSFFPPGYQVSFCLVMVLLFAVDTGLYFSV

SEQ ID NO: 9955 - protein, 344 aa, synthetic construct
MALPVTALLLPLALLLHAARPDIQMTQSPSSLSASVGDRVTITCKASDHINNWLAWYQQKPGKAPKLLIYGATTLETGVPSRFSGSGSGTDFTLTISSLQPEDFATYYCQQSWNTPWTFGQGTKVEIKRTRGMRTEDLPKAVVFLEPQWYRVLEKDSVTLKCQGAYSPEDNSTQWFHNESLISSQASSYFIDAATVDDSGEYRCQTNLSTLSDPVQLEVHIGWLLLQAPRWVFKEEDPIHLRCHSWKNTALHKVTYLQNGKGRKYFHHNSDFYIPKATLKDSGSYFCRGLVGSKNVSSETVNITITQGLAVPTISSFFPPGYQVSFCLVMVLLFAVDTGLYFSV

SEQ ID NO: 9956 - protein, 344 aa, synthetic construct
MALPVTALLLPLALLLHAARPSYVLTQPPSVSVAPGQTARITCGGNNIGSKSVHWYQQPPGQAPVVVVYDDSDRPSGIPERFSGSNSGNTATLTISRVEAGDEAVYYCQVWDSSSDHVVFGGGTKLTVLTRGMRTEDLPKAVVFLEPQWYRVLEKDSVTLKCQGAYSPEDNSTQWFHNESLISSQASSYFIDAATVDDSGEYRCQTNLSTLSDPVQLEVHIGWLLLQAPRWVFKEEDPIHLRCHSWKNTALHKVTYLQNGKGRKYFHHNSDFYIPKATLKDSGSYFCRGLVGSKNVSSETVNITITQGLAVPTISSFFPPGYQVSFCLVMVLLFAVDTGLYFSV

SEQ ID NO: 9957 - protein, 344 aa, synthetic construct
MALPVTALLLPLALLLHAARPDIQMTQSPSSLSASVGDRVTITCMASEDIYIRLAWYQQKPGKAPKLLIYAATSLETGVPSRFSGSGSGTDFTLTISSLQPEDFATYYCQQYWSSPWTFGQGTKVEIKRTRGMRTEDLPKAVVFLEPQWYRVLEKDSVTLKCQGAYSPEDNSTQWFHNESLISSQASSYFIDAATVDDSGEYRCQTNLSTLSDPVQLEVHIGWLLLQAPRWVFKEEDPIHLRCHSWKNTALHKVTYLQNGKGRKYFHHNSDFYIPKATLKDSGSYFCRGLVGSKNVSSETVNITITQGLAVPTISSFFPPGYQVSFCLVMVLLFAVDTGLYFSV

SEQ ID NO: 9958 - protein, 348 aa, synthetic construct
MALPVTALLLPLALLLHAARPDIQMTQSPSSVSASVGDRVTITCRASESVDNYGISFMNWYQQKPGKAPKLLISAASNRATGVPSRFSGSGSGTDFTLTISSLQPEDFAIYYCQQSKEVPWTFGQGTKVEIKRTRGMRTEDLPKAVVFLEPQWYRVLEKDSVTLKCQGAYSPEDNSTQWFHNESLISSQASSYFIDAATVDDSGEYRCQTNLSTLSDPVQLEVHIGWLLLQAPRWVFKEEDPIHLRCHSWKNTALHKVTYLQNGKGRKYFHHNSDFYIPKATLKDSGSYFCRGLVGSKNVSSETVNITITQGLAVPTISSFFPPGYQVSFCLVMVLLFAVDTGLYFSV

SEQ ID NO: 9959 - protein, 348 aa, synthetic construct
MALPVTALLLPLALLLHAARPDIQLTQSPSSLSASVGDRVTITCRASKSVSTSGYSYMHWYQQKPGKAPKLLIYLVSNLESGVPSRFSGSGSGTDFTLTISSLQPEDFATYYCQQFSELPWTFGQGTKVEIKRTRGMRTEDLPKAVVFLEPQWYRVLEKDSVTLKCQGAYSPEDNSTQWFHNESLISSQASSYFIDAATVDDSGEYRCQTNLSTLSDPVQLEVHIGWLLLQAPRWVFKEEDPIHLRCHSWKNTALHKVTYLQNGKGRKYFHHNSDFYIPKATLKDSGSYFCRGLVGSKNVSSETVNITITQGLAVPTISSFFPPGYQVSFCLVMVLLFAVDTGLYFSV

SEQ ID NO: 9960 - protein, 345 aa, synthetic construct
MALPVTALLLPLALLLHAARPDIQMTQSPSSVSASVGDRVTITCRASQFISSSYLSWYQQKPGKAPKLLISGSSSRATGVPSRFSGSGSGTDFTLTISSLQPEDFAIYYCQQLYSSPMTFGQGTKVEIKRTRGMRTEDLPKAVVFLEPQWYRVLEKDSVTLKCQGAYSPEDNSTQWFHNESLISSQASSYFIDAATVDDSGEYRCQTNLSTLSDPVQLEVHIGWLLLQAPRWVFKEEDPIHLRCHSWKNTALHKVTYLQNGKGRKYFHHNSDFYIPKATLKDSGSYFCRGLVGSKNVSSETVNITITQGLAVPTISSFFPPGYQVSFCLVMVLLFAVDTGLYFSV

SEQ ID NO: 9961 - protein, 359 aa, synthetic construct
MALPVTALLLPLALLLHAARPQVQLVESGGGLVQAGDSVTLSCTASGRTFSSYALAWFRQRPGKEREFVAGLRWGGPTNYADSVKDRFTISGDSAKHTMYLQMNSLKPEDTAVYYCGYNPGGWAVPSQYEYDSWGQGTQVTVSSTRGMRTEDLPKAVVFLEPQWYRVLEKDSVTLKCQGAYSPEDNSTQWFHNESLISSQASSYFIDAATVDDSGEYRCQTNLSTLSDPVQLEVHIGWLLLQAPRWVFKEEDPIHLRCHSWKNTALHKVTYLQNGKGRKYFHHNSDFYIPKATLKDSGSYFCRGLVGSKNVSSETVNITITQGLAVPTISSFFPPGYQVSFCLVMVLLFAVDTGLYFSV

SEQ ID NO: 9962 - protein, 354 aa, synthetic construct
MALPVTALLLPLALLLHAARPQVQLQESGGGLAQAGGSLRLSCAASGRTFSMGWFRQAPGKEREFVAAITYSGGSPYYASSVRGRFTISRDNAKNTVYLQMNSLKPEDTAVYYCAANPTYGSDWNAENWGQGTQVTVSSTRGMRTEDLPKAVVFLEPQWYRVLEKDSVTLKCQGAYSPEDNSTQWFHNESLISSQASSYFIDAATVDDSGEYRCQTNLSTLSDPVQLEVHIGWLLLQAPRWVFKEEDPIHLRCHSWKNTALHKVTYLQNGKGRKYFHHNSDFYIPKATLKDSGSYFCRGLVGSKNVSSETVNITITQGLAVPTISSFFPPGYQVSFCLVMVLLFAVDTGLYFSV

SEQ ID NO: 9963 - protein, 352 aa, synthetic construct
MALPVTALLLPLALLLHAARPEVQLVESGGGLVQPGGSLRLSCAASGFSFSDFWMSWVRQAPGKGLEWVATISQAGSEKDYVDSVKGRFTISRDNAKKSLYLQMNSLRAEDTAVYYCASGVYSFDYRGQGTLVTVSSTRGMRTEDLPKAVVFLEPQWYRVLEKDSVTLKCQGAYSPEDNSTQWFHNESLISSQASSYFIDAATVDDSGEYRCQTNLSTLSDPVQLEVHIGWLLLQAPRWVFKEEDPIHLRCHSWKNTALHKVTYLQNGKGRKYFHHNSDFYIPKATLKDSGSYFCRGLVGSKNVSSETVNITITQGLAVPTISSFFPPGYQVSFCLVMVLLFAVDTGLYFSV

SEQ ID NO: 9964 - protein, 352 aa, synthetic construct
MALPVTALLLPLALLLHAARPEVQLVESGGGLVQPGGSLRLSCAASGFTFSNYWMSWVRQAPGKGQEWVATINQDGSDKDYVDSVKGRFTISRDNAKKSLYLQMNSLRAEDTAVYYCASGVYSFDYRGQGTLVTVSSTRGMRTEDLPKAVVFLEPQWYRVLEKDSVTLKCQGAYSPEDNSTQWFHNESLISSQASSYFIDAATVDDSGEYRCQTNLSTLSDPVQLEVHIGWLLLQAPRWVFKEEDPIHLRCHSWKNTALHKVTYLQNGKGRKYFHHNSDFYIPKATLKDSGSYFCRGLVGSKNVSSETVNITITQGLAVPTISSFFPPGYQVSFCLVMVLLFAVDTGLYFSV

SEQ ID NO: 9965 - protein, 352 aa, synthetic construct
MALPVTALLLPLALLLHAARPEVQLVESGGGLVQPGGSLRLSCAASGIDFSRYWMSWVRQAPGKGLEWVATISQAGSEKDYVDSVKGRFTISRDNAKKSLYLQMNSLRAEDTAVYYCASGVYSFDYRGQGTLVTVSSTRGMRTEDLPKAVVFLEPQWYRVLEKDSVTLKCQGAYSPEDNSTQWFHNESLISSQASSYFIDAATVDDSGEYRCQTNLSTLSDPVQLEVHIGWLLLQAPRWVFKEEDPIHLRCHSWKNTALHKVTYLQNGKGRKYFHHNSDFYIPKATLKDSGSYFCRGLVGSKNVSSETVNITITQGLAVPTISSFFPPGYQVSFCLVMVLLFAVDTGLYFSV

SEQ ID NO: 9966 - protein, 352 aa, synthetic construct
MALPVTALLLPLALLLHAARPEVQLVESGGGLVQPGGSLRLSCAASGIDFSRYWMSWVRQAPGKGQEWVATINQDGSDKDYVDSVKGRFTISRDNAKKSLYLQMNSLRAEDTAVYYCASGVYSFDYRGQGTLVTVSSTRGMRTEDLPKAVVFLEPQWYRVLEKDSVTLKCQGAYSPEDNSTQWFHNESLISSQASSYFIDAATVDDSGEYRCQTNLSTLSDPVQLEVHIGWLLLQAPRWVFKEEDPIHLRCHSWKNTALHKVTYLQNGKGRKYFHHNSDFYIPKATLKDSGSYFCRGLVGSKNVSSETVNITITQGLAVPTISSFFPPGYQVSFCLVMVLLFAVDTGLYFSV

SEQ ID NO: 9967 - protein, 356 aa, synthetic construct
MALPVTALLLPLALLLHAARPEVQLVESGGGLVQPGGSLRLSCTFSGGTFSSYTMGWFRQAPGKEREFVAEVRWGGVTTYSNSLKDRFSISEDSVKNAVYLQMNSLKPEDTAVYYCAAVRQMYMTVVPDYWGQGTLVTVSSTRGMRTEDLPKAVVFLEPQWYRVLEKDSVTLKCQGAYSPEDNSTQWFHNESLISSQASSYFIDAATVDDSGEYRCQTNLSTLSDPVQLEVHIGWLLLQAPRWVFKEEDPIHLRCHSWKNTALHKVTYLQNGKGRKYFHHNSDFYIPKATLKDSGSYFCRGLVGSKNVSSETVNITITQGLAVPTISSFFPPGYQVSFCLVMVLLFAVDTGLYFSV

SEQ ID NO: 9968 - protein, 354 aa, synthetic construct
MALPVTALLLPLALLLHAARPEVQLVESGGGLVQAGGSLRLSCAASGRTFSMGWFRQAPGKEREFVAAITYSGGSPYYADSVKGRFTISRDNAKNTVYLQMNSLKPEDTAVYYCAANPTYGSDWNAENWGQGTQVTVSSTRGMRTEDLPKAVVFLEPQWYRVLEKDSVTLKCQGAYSPEDNSTQWFHNESLISSQASSYFIDAATVDDSGEYRCQTNLSTLSDPVQLEVHIGWLLLQAPRWVFKEEDPIHLRCHSWKNTALHKVTYLQNGKGRKYFHHNSDFYIPKATLKDSGSYFCRGLVGSKNVSSETVNITITQGLAVPTISSFFPPGYQVSFCLVMVLLFAVDTGLYFSV

SEQ ID NO: 9969 - protein, 354 aa, synthetic construct
MALPVTALLLPLALLLHAARPQLQLQESGPGLVKPSETLSLTCTVSGGSISSGDYYWGWIRQPPGKGLEWIGHIYYSGATYYNPSLKSRVTISVDTSRNQFSLKLSSVTAADTAVYYCTRDDSSNWRSRGQGTLVTVSSTRGMRTEDLPKAVVFLEPQWYRVLEKDSVTLKCQGAYSPEDNSTQWFHNESLISSQASSYFIDAATVDDSGEYRCQTNLSTLSDPVQLEVHIGWLLLQAPRWVFKEEDPIHLRCHSWKNTALHKVTYLQNGKGRKYFHHNSDFYIPKATLKDSGSYFCRGLVGSKNVSSETVNITITQGLAVPTISSFFPPGYQVSFCLVMVLLFAVDTGLYFSV

SEQ ID NO: 9970 - protein, 354 aa, synthetic construct
MALPVTALLLPLALLLHAARPQLQLQESGPGLVKPSETLSLTCTVSGDSISSGDYYWGWIRQPPGKGLEWIGHIYYSGVTYYNPSLKSRVTISVDTSRNQFSLKLSSVTAADTAVYYCTREDSSNWRSRGQGTLVTVSSTRGMRTEDLPKAVVFLEPQWYRVLEKDSVTLKCQGAYSPEDNSTQWFHNESLISSQASSYFIDAATVDDSGEYRCQTNLSTLSDPVQLEVHIGWLLLQAPRWVFKEEDPIHLRCHSWKNTALHKVTYLQNGKGRKYFHHNSDFYIPKATLKDSGSYFCRGLVGSKNVSSETVNITITQGLAVPTISSFFPPGYQVSFCLVMVLLFAVDTGLYFSV

SEQ ID NO: 9971 - protein, 354 aa, synthetic construct
MALPVTALLLPLALLLHAARPQLQLQESGPGLVKPSETLSLTCTVSGGSISSGDYYWGWIRQPPGKGLEWIGSISYSGSTYYNPSLKSRVTISVDTSRNQFSLKLSSVTAADTAVYYCTREDSSNWRSRGQGTLVTVSSTRGMRTEDLPKAVVFLEPQWYRVLEKDSVTLKCQGAYSPEDNSTQWFHNESLISSQASSYFIDAATVDDSGEYRCQTNLSTLSDPVQLEVHIGWLLLQAPRWVFKEEDPIHLRCHSWKNTALHKVTYLQNGKGRKYFHHNSDFYIPKATLKDSGSYFCRGLVGSKNVSSETVNITITQGLAVPTISSFFPPGYQVSFCLVMVLLFAVDTGLYFSV

SEQ ID NO: 9972 - protein, 360 aa, synthetic construct
MALPVTALLLPLALLLHAARPQLQLQESGPGLVKPSETLALTCNVSGGSISSSSYYWGWIRQPPGKRLEWIGSIYYSGSTYFNPSLKSRVTISVDTSKNQFSLKLSSVTAADTAVYYCAGGDYYGPVGQWPSDYRGQGTLVTVSSTRGMRTEDLPKAVVFLEPQWYRVLEKDSVTLKCQGAYSPEDNSTQWFHNESLISSQASSYFIDAATVDDSGEYRCQTNLSTLSDPVQLEVHIGWLLLQAPRWVFKEEDPIHLRCHSWKNTALHKVTYLQNGKGRKYFHHNSDFYIPKATLKDSGSYFCRGLVGSKNVSSETVNITITQGLAVPTISSFFPPGYQVSFCLVMVLLFAVDTGLYFSV

SEQ ID NO: 9973 - protein, 366 aa, synthetic construct
MALPVTALLLPLALLLHAARPEVQLLESGGGLVQPGGSLRLSCAASGFIFSSYAMSWVRQAPGKGQEWVSGVSGTGVNTYYADSVKGRFTISRDNSKNTLYLQMNSLRAEDTAVYYCASGKGWDSGSWYEDYRGQGTLVTVSSTRPRLCLLTRGMRTEDLPKAVVFLEPQWYRVLEKDSVTLKCQGAYSPEDNSTQWFHNESLISSQASSYFIDAATVDDSGEYRCQTNLSTLSDPVQLEVHIGWLLLQAPRWVFKEEDPIHLRCHSWKNTALHKVTYLQNGKGRKYFHHNSDFYIPKATLKDSGSYFCRGLVGSKNVSSETVNITITQGLAVPTISSFFPPGYQVSFCLVMVLLFAVDTGLYFSV

SEQ ID NO: 9974 - protein, 360 aa, synthetic construct
MALPVTALLLPLALLLHAARPQLQLQESGPGLVKPSETLSLTCTVSGGSVSSSSYYWGWIRQPPGKRLELIGSIYYGGSTYFNPSLKSRVTISVDTSKNQFSLKLSSVTAADTAVYYCAGGDTYGPVGQWPSDYRGQGTLVTVSSTRGMRTEDLPKAVVFLEPQWYRVLEKDSVTLKCQGAYSPEDNSTQWFHNESLISSQASSYFIDAATVDDSGEYRCQTNLSTLSDPVQLEVHIGWLLLQAPRWVFKEEDPIHLRCHSWKNTALHKVTYLQNGKGRKYFHHNSDFYIPKATLKDSGSYFCRGLVGSKNVSSETVNITITQGLAVPTISSFFPPGYQVSFCLVMVLLFAVDTGLYFSV

SEQ ID NO: 9975 - protein, 358 aa, synthetic construct
MALPVTALLLPLALLLHAARPEVQLLESGGGLVQPGGSLRLSCAASGFIFSIYAMSWVRQAPGKGLEWVSGISGSGVNTYYADSVKGRFIISRDNSRNTVYLQMNSLRADDTAVYHCANGKGWDGNTWYEDYRGQGTLVTVSSTRGMRTEDLPKAVVFLEPQWYRVLEKDSVTLKCQGAYSPEDNSTQWFHNESLISSQASSYFIDAATVDDSGEYRCQTNLSTLSDPVQLEVHIGWLLLQAPRWVFKEEDPIHLRCHSWKNTALHKVTYLQNGKGRKYFHHNSDFYIPKATLKDSGSYFCRGLVGSKNVSSETVNITITQGLAVPTISSFFPPGYQVSFCLVMVLLFAVDTGLYFSV

SEQ ID NO: 9976 - protein, 353 aa, synthetic construct
MALPVTALLLPLALLLHAARPEVQVLESGGGLVQPGGSLRLSCAASGFTFSNFAMSWVRQAPGKGLEWVSTISGSAGTTDYADSVKGRFTISRDNSKKTLYLQMNSLRVEDTAVYYCADGRGPFFDYRGQGTLVTVSSTRGMRTEDLPKAVVFLEPQWYRVLEKDSVTLKCQGAYSPEDNSTQWFHNESLISSQASSYFIDAATVDDSGEYRCQTNLSTLSDPVQLEVHIGWLLLQAPRWVFKEEDPIHLRCHSWKNTALHKVTYLQNGKGRKYFHHNSDFYIPKATLKDSGSYFCRGLVGSKNVSSETVNITITQGLAVPTISSFFPPGYQVSFCLVMVLLFAVDTGLYFSV

SEQ ID NO: 9977 - protein, 355 aa, synthetic construct
MALPVTALLLPLALLLHAARPEVQLVESGGGLVQPGGSLRLSCAASGFNIKDTCIGWVRRAPGKEEELVAKICKYSGHTRYADSVKGRFTISADTSKNTAYLQMNSLRAEDTAVYYCAAVSVRDGHYNYWGQGTTVTVSSTRGMRTEDLPKAVVFLEPQWYRVLEKDSVTLKCQGAYSPEDNSTQWFHNESLISSQASSYFIDAATVDDSGEYRCQTNLSTLSDPVQLEVHIGWLLLQAPRWVFKEEDPIHLRCHSWKNTALHKVTYLQNGKGRKYFHHNSDFYIPKATLKDSGSYFCRGLVGSKNVSSETVNITITQGLAVPTISSFFPPGYQVSFCLVMVLLFAVDTGLYFSV

SEQ ID NO: 9978 - protein, 355 aa, synthetic construct
MALPVTALLLPLALLLHAARPEVQLVESGGGLVQPGGSLRLSCAASGFNIKDTCIGWVRRAPGKEEELVADICPYKGSTRYADSVKGRFTISADTSKNTAYLQMNSLRAEDTAVYYCAIVSARDGYYNYWGQGTTVTVSSTRGMRTEDLPKAVVFLEPQWYRVLEKDSVTLKCQGAYSPEDNSTQWFHNESLISSQASSYFIDAATVDDSGEYRCQTNLSTLSDPVQLEVHIGWLLLQAPRWVFKEEDPIHLRCHSWKNTALHKVTYLQNGKGRKYFHHNSDFYIPKATLKDSGSYFCRGLVGSKNVSSETVNITITQGLAVPTISSFFPPGYQVSFCLVMVLLFAVDTGLYFSV

SEQ ID NO: 9979 - protein, 355 aa, synthetic construct
MALPVTALLLPLALLLHAARPEVQLLESGGGLVQPGGSLRLSCAASGFTFSSYAMSWVRQAPGKGLEWVSAITGSGGSTYYADSVKGRFTISRDNSKNTLYLQMNSLRAEDTAVYYCAKDEDGGSLLGHRGQGTLVTVSSTRGMRTEDLPKAVVFLEPQWYRVLEKDSVTLKCQGAYSPEDNSTQWFHNESLISSQASSYFIDAATVDDSGEYRCQTNLSTLSDPVQLEVHIGWLLLQAPRWVFKEEDPIHLRCHSWKNTALHKVTYLQNGKGRKYFHHNSDFYIPKATLKDSGSYFCRGLVGSKNVSSETVNITITQGLAVPTISSFFPPGYQVSFCLVMVLLFAVDTGLYFSV

SEQ ID NO: 9980 - protein, 355 aa, synthetic construct
MALPVTALLLPLALLLHAARPEVQLLESGGGLIQPGGSLRLSCAASGFTFSSHAMTWVRQAPGKGLEWVSAISSGGSYTYYADSVKGRFTISRDNSKNTLYLQMNSLRAEDTAVYYCAKDEDGGSLLGHRGQGTLVTVSSTRGMRTEDLPKAVVFLEPQWYRVLEKDSVTLKCQGAYSPEDNSTQWFHNESLISSQASSYFIDAATVDDSGEYRCQTNLSTLSDPVQLEVHIGWLLLQAPRWVFKEEDPIHLRCHSWKNTALHKVTYLQNGKGRKYFHHNSDFYIPKATLKDSGSYFCRGLVGSKNVSSETVNITITQGLAVPTISSFFPPGYQVSFCLVMVLLFAVDTGLYFSV

SEQ ID NO: 9981 - protein, 355 aa, synthetic construct
MALPVTALLLPLALLLHAARPEVQLVESGGGLVQPGGSLRLSCAASGFSFSDFWMSWVRQAPGKGLEWVSAISGSGDYTHYADSVKGRFTISRDNSKNTVYLQMNSLRAEDSAVYYCAKDEDGGSLLGHRGQGTLVTVSSTRGMRTEDLPKAVVFLEPQWYRVLEKDSVTLKCQGAYSPEDNSTQWFHNESLISSQASSYFIDAATVDDSGEYRCQTNLSTLSDPVQLEVHIGWLLLQAPRWVFKEEDPIHLRCHSWKNTALHKVTYLQNGKGRKYFHHNSDFYIPKATLKDSGSYFCRGLVGSKNVSSETVNITITQGLAVPTISSFFPPGYQVSFCLVMVLLFAVDTGLYFSV

SEQ ID NO: 9982 - protein, 357 aa, synthetic construct
MALPVTALLLPLALLLHAARPEVQLLESGGGLVQPGGSLRLSCAASGFAFSIYDMSWVRQAPGKGLEWVSSISGSGDYIYYADSVKGRFTISRDISKNTLYLQMNSLRAEDTAVYYCAKEGTGANSSLADYRGQGTLVTVSSTRGMRTEDLPKAVVFLEPQWYRVLEKDSVTLKCQGAYSPEDNSTQWFHNESLISSQASSYFIDAATVDDSGEYRCQTNLSTLSDPVQLEVHIGWLLLQAPRWVFKEEDPIHLRCHSWKNTALHKVTYLQNGKGRKYFHHNSDFYIPKATLKDSGSYFCRGLVGSKNVSSETVNITITQGLAVPTISSFFPPGYQVSFCLVMVLLFAVDTGLYFSV

SEQ ID NO: 9983 - protein, 357 aa, synthetic construct
MALPVTALLLPLALLLHAARPEVQLLESGGGLVQPGGSLRLSCAASGFTFSSYAMSWVRQAPGKGLEWVSSISGSGDYIYYADSVKGRFTISRDISKNTLYLQMNSLRAEDTAVYYCAKEGTGANSSLADYRGQGTLVTVSSTRGMRTEDLPKAVVFLEPQWYRVLEKDSVTLKCQGAYSPEDNSTQWFHNESLISSQASSYFIDAATVDDSGEYRCQTNLSTLSDPVQLEVHIGWLLLQAPRWVFKEEDPIHLRCHSWKNTALHKVTYLQNGKGRKYFHHNSDFYIPKATLKDSGSYFCRGLVGSKNVSSETVNITITQGLAVPTISSFFPPGYQVSFCLVMVLLFAVDTGLYFSV

SEQ ID NO: 9984 - protein, 354 aa, synthetic construct
MALPVTALLLPLALLLHAARPQVQLVESGGGLVQPGGSLRLSCAASGFTFTNHAMSWVRQAPGKGLELVSSISGNGRTTYYADSVKGRFTISRDISKNTLDLQMNSLRAEDTAVYYCAKDGGETLVDSRGQGTLVTVSSTRGMRTEDLPKAVVFLEPQWYRVLEKDSVTLKCQGAYSPEDNSTQWFHNESLISSQASSYFIDAATVDDSGEYRCQTNLSTLSDPVQLEVHIGWLLLQAPRWVFKEEDPIHLRCHSWKNTALHKVTYLQNGKGRKYFHHNSDFYIPKATLKDSGSYFCRGLVGSKNVSSETVNITITQGLAVPTISSFFPPGYQVSFCLVMVLLFAVDTGLYFSV

SEQ ID NO: 9985 - protein, 355 aa, synthetic construct
MALPVTALLLPLALLLHAARPEVQLLESGGGLIQPGGSLRLSCAASGFTFSSHAMTWVRQAPGKGLEWVSAISGSGDYTHYADSVKGRFTISRDNSKNTVYLQMNSLRAEDSAVYYCAKDEDGGSLLGHRGQGTLVTVSSTRGMRTEDLPKAVVFLEPQWYRVLEKDSVTLKCQGAYSPEDNSTQWFHNESLISSQASSYFIDAATVDDSGEYRCQTNLSTLSDPVQLEVHIGWLLLQAPRWVFKEEDPIHLRCHSWKNTALHKVTYLQNGKGRKYFHHNSDFYIPKATLKDSGSYFCRGLVGSKNVSSETVNITITQGLAVPTISSFFPPGYQVSFCLVMVLLFAVDTGLYFSV

SEQ ID NO: 9986 - protein, 356 aa, synthetic construct
MALPVTALLLPLALLLHAARPQVQLQESGGGLVQAGDSLRLSCAASGRAVSSLFMGWFRRAPGKERELVAAISRYSLYTYYADSVKGRFTISADNAKNAVYLQMNSLKPEDTAVYYCASKLEYTSNDYDSWGQGTQVTVSSTRGMRTEDLPKAVVFLEPQWYRVLEKDSVTLKCQGAYSPEDNSTQWFHNESLISSQASSYFIDAATVDDSGEYRCQTNLSTLSDPVQLEVHIGWLLLQAPRWVFKEEDPIHLRCHSWKNTALHKVTYLQNGKGRKYFHHNSDFYIPKATLKDSGSYFCRGLVGSKNVSSETVNITITQGLAVPTISSFFPPGYQVSFCLVMVLLFAVDTGLYFSV

SEQ ID NO: 9987 - protein, 356 aa, synthetic construct
MALPVTALLLPLALLLHAARPEVQLQESGGGLVQPGGSLRLSCAASGRTFSSLFMGWFRQAPGKERELVAAISRYSLYTYYADSVKGRFTISADNAKNAVYLQMNSLKPEDTAVYYCASKLEYTSNDYDSWGQGTQVTVSSTRGMRTEDLPKAVVFLEPQWYRVLEKDSVTLKCQGAYSPEDNSTQWFHNESLISSQASSYFIDAATVDDSGEYRCQTNLSTLSDPVQLEVHIGWLLLQAPRWVFKEEDPIHLRCHSWKNTALHKVTYLQNGKGRKYFHHNSDFYIPKATLKDSGSYFCRGLVGSKNVSSETVNITITQGLAVPTISSFFPPGYQVSFCLVMVLLFAVDTGLYFSV

SEQ ID NO: 9988 - protein, 356 aa, synthetic construct
MALPVTALLLPLALLLHAARPEVQLQESGGGLVQPGGSLRLSCAASGRTFSSLFMGWVRQAPGKGLELVSAISRYSLYTYYADSVKGRFTISRDNAKNTLYLQMNSLRPEDTAVYYCASKLEYTSNDYDSWGQGTLVTVSSTRGMRTEDLPKAVVFLEPQWYRVLEKDSVTLKCQGAYSPEDNSTQWFHNESLISSQASSYFIDAATVDDSGEYRCQTNLSTLSDPVQLEVHIGWLLLQAPRWVFKEEDPIHLRCHSWKNTALHKVTYLQNGKGRKYFHHNSDFYIPKATLKDSGSYFCRGLVGSKNVSSETVNITITQGLAVPTISSFFPPGYQVSFCLVMVLLFAVDTGLYFSV

SEQ ID NO: 9989 - protein, 364 aa, synthetic construct
MALPVTALLLPLALLLHAARPEVQLVESGGGLVQPGGSLRLSCEASGFASDDYIIGWFRQAPGKEREGVSCISSKYANTVYTDSVKGRFRLSRGTAKNTVYLQMSALKPEDTAVYYCAMDSRRVTCPEISTMHRNFDSWGQGTLVTVSSTRGMRTEDLPKAVVFLEPQWYRVLEKDSVTLKCQGAYSPEDNSTQWFHNESLISSQASSYFIDAATVDDSGEYRCQTNLSTLSDPVQLEVHIGWLLLQAPRWVFKEEDPIHLRCHSWKNTALHKVTYLQNGKGRKYFHHNSDFYIPKATLKDSGSYFCRGLVGSKNVSSETVNITITQGLAVPTISSFFPPGYQVSFCLVMVLLFAVDTGLYFSV

SEQ ID NO: 9990 - protein, 364 aa, synthetic construct
MALPVTALLLPLALLLHAARPEVQLVESGGGLVQPGGSLRLSCAASGFASDYYIIGWFRQAPGKEREGVSCISSRYANTNYADSVKGRFTISRDNAKNTVYLQMNSLKPEDTAVYYCAADTRRYTCPDIATMHRNFDSWGQGTLVTVSSTRGMRTEDLPKAVVFLEPQWYRVLEKDSVTLKCQGAYSPEDNSTQWFHNESLISSQASSYFIDAATVDDSGEYRCQTNLSTLSDPVQLEVHIGWLLLQAPRWVFKEEDPIHLRCHSWKNTALHKVTYLQNGKGRKYFHHNSDFYIPKATLKDSGSYFCRGLVGSKNVSSETVNITITQGLAVPTISSFFPPGYQVSFCLVMVLLFAVDTGLYFSV

SEQ ID NO: 9991 - protein, 360 aa, synthetic construct
MALPVTALLLPLALLLHAARPEVQLVESGGSLVQPGGSLRLSCAASGFTFDDYAMSWVRQVPGKGLEWVSSINWSGTHTDYADSVKGRFTISRNNANNTLYLQMNSLKSEDTAVYYCAKNWRDAGTTWFEKSGSAGQGTQVTVSSTRGMRTEDLPKAVVFLEPQWYRVLEKDSVTLKCQGAYSPEDNSTQWFHNESLISSQASSYFIDAATVDDSGEYRCQTNLSTLSDPVQLEVHIGWLLLQAPRWVFKEEDPIHLRCHSWKNTALHKVTYLQNGKGRKYFHHNSDFYIPKATLKDSGSYFCRGLVGSKNVSSETVNITITQGLAVPTISSFFPPGYQVSFCLVMVLLFAVDTGLYFSV

SEQ ID NO: 9992 - protein, 354 aa, synthetic construct
MALPVTALLLPLALLLHAARPEVQLVESGGGLVQAGGSLRLSCAASGITFSINTMGWYRQAPGKQRELVALISSIGDTYYADSVKGRFTISRDNAKNTVYLQMNSLKPEDTAVYYCKRFRTAAQGTDYWGQGTQVTVSSTRGMRTEDLPKAVVFLEPQWYRVLEKDSVTLKCQGAYSPEDNSTQWFHNESLISSQASSYFIDAATVDDSGEYRCQTNLSTLSDPVQLEVHIGWLLLQAPRWVFKEEDPIHLRCHSWKNTALHKVTYLQNGKGRKYFHHNSDFYIPKATLKDSGSYFCRGLVGSKNVSSETVNITITQGLAVPTISSFFPPGYQVSFCLVMVLLFAVDTGLYFSV

SEQ ID NO: 9993 - protein, 355 aa, synthetic construct
MALPVTALLLPLALLLHAARPEVQLVESGGGLVQPGGSLRLSCAASGSIFGFNDMAWYRQAPGKQRELVALISRVGVTSSADSVKGRFTISRVNAKDTVYLQMNSLKPEDTAVYYCYMDQRLDGSTLAYWGQGTQVTVSSTRGMRTEDLPKAVVFLEPQWYRVLEKDSVTLKCQGAYSPEDNSTQWFHNESLISSQASSYFIDAATVDDSGEYRCQTNLSTLSDPVQLEVHIGWLLLQAPRWVFKEEDPIHLRCHSWKNTALHKVTYLQNGKGRKYFHHNSDFYIPKATLKDSGSYFCRGLVGSKNVSSETVNITITQGLAVPTISSFFPPGYQVSFCLVMVLLFAVDTGLYFSV

SEQ ID NO: 9994 - protein, 356 aa, synthetic construct
MALPVTALLLPLALLLHAARPDVQLVESGGGLVQPGGSLRLSCAASGSIGGLNAMAWYRQAPGKERELVAGIFGVGSTRYADSVKGRFTISRDNSKNTVYLQMNSLRPEDTAVYYCRMSSVTRGSSDYWGQGTLVTVSSLETRGMRTEDLPKAVVFLEPQWYRVLEKDSVTLKCQGAYSPEDNSTQWFHNESLISSQASSYFIDAATVDDSGEYRCQTNLSTLSDPVQLEVHIGWLLLQAPRWVFKEEDPIHLRCHSWKNTALHKVTYLQNGKGRKYFHHNSDFYIPKATLKDSGSYFCRGLVGSKNVSSETVNITITQGLAVPTISSFFPPGYQVSFCLVMVLLFAVDTGLYFSV

SEQ ID NO: 9995 - protein, 361 aa, synthetic construct
MALPVTALLLPLALLLHAARPEVQLVESGGGLVQPGGSLRLSCAASGRTYYLNAMGWFRQAPGKEREFVAAIDWSEGNKDYADSVKGRFTISRDNSKNTVYLQMNSLRPEDTAVYYCAADTPPWGPLIYIESYDSWGQGTLVTVSSTRGMRTEDLPKAVVFLEPQWYRVLEKDSVTLKCQGAYSPEDNSTQWFHNESLISSQASSYFIDAATVDDSGEYRCQTNLSTLSDPVQLEVHIGWLLLQAPRWVFKEEDPIHLRCHSWKNTALHKVTYLQNGKGRKYFHHNSDFYIPKATLKDSGSYFCRGLVGSKNVSSETVNITITQGLAVPTISSFFPPGYQVSFCLVMVLLFAVDTGLYFSV

SEQ ID NO: 9996 - protein, 359 aa, synthetic construct
MALPVTALLLPLALLLHAARPEVQLVESGGGSVQAGGSLRLSCAASGDTYGSYWMGWFRQAPGKEREGVAAINRGGGYTVYADSVKGRFTISRDTAKNTVYLQMNSLRPDDTADYYCAASGVLGGLHEDWFNYWGQGTLVTVSSTRGMRTEDLPKAVVFLEPQWYRVLEKDSVTLKCQGAYSPEDNSTQWFHNESLISSQASSYFIDAATVDDSGEYRCQTNLSTLSDPVQLEVHIGWLLLQAPRWVFKEEDPIHLRCHSWKNTALHKVTYLQNGKGRKYFHHNSDFYIPKATLKDSGSYFCRGLVGSKNVSSETVNITITQGLAVPTISSFFPPGYQVSFCLVMVLLFAVDTGLYFSV

SEQ ID NO: 9997 - protein, 358 aa, synthetic construct
MALPVTALLLPLALLLHAARPVQLVESGGGSVQAGGSLRLSCAASGDTYGSYWMGWFRQAPGQEREAVAAINRGGGYTVYADSVKGRFTISRDNAKNTLYLQMNSLRPDDTADYYCAASGVLGGLHEDWFNYWGQGTLVTVSSTRGMRTEDLPKAVVFLEPQWYRVLEKDSVTLKCQGAYSPEDNSTQWFHNESLISSQASSYFIDAATVDDSGEYRCQTNLSTLSDPVQLEVHIGWLLLQAPRWVFKEEDPIHLRCHSWKNTALHKVTYLQNGKGRKYFHHNSDFYIPKATLKDSGSYFCRGLVGSKNVSSETVNITITQGLAVPTISSFFPPGYQVSFCLVMVLLFAVDTGLYFSV

SEQ ID NO: 9998 - protein, 360 aa, synthetic construct
MALPVTALLLPLALLLHAARPEVQLVESGGGSVQTGGSLRLTCAASGRTSRSYGMGWFRQAPGKEREFVSGISWRGDSTGYADSVKGRFTISRDNAKNTVDLQMNSLKPEDTAIYYCAAAAGSAWYGTLYEYDYWGQGTLVTVSSTRGMRTEDLPKAVVFLEPQWYRVLEKDSVTLKCQGAYSPEDNSTQWFHNESLISSQASSYFIDAATVDDSGEYRCQTNLSTLSDPVQLEVHIGWLLLQAPRWVFKEEDPIHLRCHSWKNTALHKVTYLQNGKGRKYFHHNSDFYIPKATLKDSGSYFCRGLVGSKNVSSETVNITITQGLAVPTISSFFPPGYQVSFCLVMVLLFAVDTGLYFSV

SEQ ID NO: 9999 - protein, 360 aa, synthetic construct
MALPVTALLLPLALLLHAARPEVQLVESGGGSVQAGGSLRLTCAASGSTSRSYGMGWFRQAPGKEREFVSGISWRGDSTGYADSVKGRFTISRDNAKNTVDLQMNSLKPEDTAIYYCAAAAGSTWYGTLYEYDYWGQGTLVTVSSTRGMRTEDLPKAVVFLEPQWYRVLEKDSVTLKCQGAYSPEDNSTQWFHNESLISSQASSYFIDAATVDDSGEYRCQTNLSTLSDPVQLEVHIGWLLLQAPRWVFKEEDPIHLRCHSWKNTALHKVTYLQNGKGRKYFHHNSDFYIPKATLKDSGSYFCRGLVGSKNVSSETVNITITQGLAVPTISSFFPPGYQVSFCLVMVLLFAVDTGLYFSV

SEQ ID NO: 10000 - protein, 361 aa, synthetic construct
MALPVTALLLPLALLLHAARPDVQLVESGGGLVQPGGSLRLSCAASGFILDYYAIGWFRQAPGKEREGVLCIDASDDITYYADSVKGRFTISRDNSKNTVYLQMNSLRPEDTAVYYCATPIGLSSSCLLEYDYDYWGQGTLVTVSSTRGMRTEDLPKAVVFLEPQWYRVLEKDSVTLKCQGAYSPEDNSTQWFHNESLISSQASSYFIDAATVDDSGEYRCQTNLSTLSDPVQLEVHIGWLLLQAPRWVFKEEDPIHLRCHSWKNTALHKVTYLQNGKGRKYFHHNSDFYIPKATLKDSGSYFCRGLVGSKNVSSETVNITITQGLAVPTISSFFPPGYQVSFCLVMVLLFAVDTGLYFSV

SEQ ID NO: 10001 - protein, 362 aa, synthetic construct
MALPVTALLLPLALLLHAARPEVQLVESGGGLVQAGDSLRLSCAASGRAFSRYAMGWFRQAPGKEREFVAAIGWGPSKTNYADSVKGRFTISRDNAKNTVYLQMNTLKPEDTAVYSCAAKFVNTDSTWSRSEMYTYWGQGTLVTVSSTRGMRTEDLPKAVVFLEPQWYRVLEKDSVTLKCQGAYSPEDNSTQWFHNESLISSQASSYFIDAATVDDSGEYRCQTNLSTLSDPVQLEVHIGWLLLQAPRWVFKEEDPIHLRCHSWKNTALHKVTYLQNGKGRKYFHHNSDFYIPKATLKDSGSYFCRGLVGSKNVSSETVNITITQGLAVPTISSFFPPGYQVSFCLVMVLLFAVDTGLYFSV

SEQ ID NO: 10002 - protein, 358 aa, synthetic construct
MALPVTALLLPLALLLHAARPEVQLVESGGGLVQAGGSLRLSCVASGISSSKRNMGWYRQAPGKQRESVATISSGGNKDYTDAVKDRFTISRDTTKNTVYLQMNSLKPEDTAVYYCKIEAGTGWATRRGYTYWGQGTLVTVSSTRGMRTEDLPKAVVFLEPQWYRVLEKDSVTLKCQGAYSPEDNSTQWFHNESLISSQASSYFIDAATVDDSGEYRCQTNLSTLSDPVQLEVHIGWLLLQAPRWVFKEEDPIHLRCHSWKNTALHKVTYLQNGKGRKYFHHNSDFYIPKATLKDSGSYFCRGLVGSKNVSSETVNITITQGLAVPTISSFFPPGYQVSFCLVMVLLFAVDTGLYFSV

SEQ ID NO: 10003 - protein, 348 aa, synthetic construct
MALPVTALLLPLALLLHAARPQVQLVQSGGGLVQPGGSLRLSCAASDFDFAAYEMSWVRQAPGQGLEWVAIISHDGIDKYYTDSVKGRFTISRDNSKNTLYLQMNTLRAEDTATYYCLRLGAVGQGTLVTVSSTRGMRTEDLPKAVVFLEPQWYRVLEKDSVTLKCQGAYSPEDNSTQWFHNESLISSQASSYFIDAATVDDSGEYRCQTNLSTLSDPVQLEVHIGWLLLQAPRWVFKEEDPIHLRCHSWKNTALHKVTYLQNGKGRKYFHHNSDFYIPKATLKDSGSYFCRGLVGSKNVSSETVNITITQGLAVPTISSFFPPGYQVSFCLVMVLLFAVDTGLYFSV

SEQ ID NO: 10004 - protein, 356 aa, synthetic construct
MALPVTALLLPLALLLHAARPQVQLVQSGGGLVQPGGSLRLSCAASDFAFDDYEMSWVRQAPGKALEWIGDINHSGTTIYNPSLKSRVTISRDNSKNTLYLQMNTLRAEDTAIYYCARPHYGDYSDAFDIWGQGTMVTVSSTRGMRTEDLPKAVVFLEPQWYRVLEKDSVTLKCQGAYSPEDNSTQWFHNESLISSQASSYFIDAATVDDSGEYRCQTNLSTLSDPVQLEVHIGWLLLQAPRWVFKEEDPIHLRCHSWKNTALHKVTYLQNGKGRKYFHHNSDFYIPKATLKDSGSYFCRGLVGSKNVSSETVNITITQGLAVPTISSFFPPGYQVSFCLVMVLLFAVDTGLYFSV

SEQ ID NO: 10005 - protein, 351 aa, synthetic construct
MALPVTALLLPLALLLHAARPEVQLVESGGGLVQPGNSLRLSCAASGFTFSSFGMSWVRQAPGKGLEWVSSISGSGSDTLYADSVKGRFTISRDNAKTTLYLQMNSLRPEDTAVYYCTIGGSLSRSSQGTLVTVSSTRGMRTEDLPKAVVFLEPQWYRVLEKDSVTLKCQGAYSPEDNSTQWFHNESLISSQASSYFIDAATVDDSGEYRCQTNLSTLSDPVQLEVHIGWLLLQAPRWVFKEEDPIHLRCHSWKNTALHKVTYLQNGKGRKYFHHNSDFYIPKATLKDSGSYFCRGLVGSKNVSSETVNITITQGLAVPTISSFFPPGYQVSFCLVMVLLFAVDTGLYFSV

SEQ ID NO: 10006 - protein, 352 aa, synthetic construct
MALPVTALLLPLALLLHAARPEVQLVESGGGLVQAGGSLRLSCAASGSIFSGNVMGWYRRQAPGKEREWVAAIASGGSIYYRDSVKGRFTISRDNAKNTVYLQMNSLKPEDTAVYYCNSHPPTLPYWGLGTQVTVSSTRGMRTEDLPKAVVFLEPQWYRVLEKDSVTLKCQGAYSPEDNSTQWFHNESLISSQASSYFIDAATVDDSGEYRCQTNLSTLSDPVQLEVHIGWLLLQAPRWVFKEEDPIHLRCHSWKNTALHKVTYLQNGKGRKYFHHNSDFYIPKATLKDSGSYFCRGLVGSKNVSSETVNITITQGLAVPTISSFFPPGYQVSFCLVMVLLFAVDTGLYFSV

SEQ ID NO: 10007 - protein, 362 aa, synthetic construct
MALPVTALLLPLALLLHAARPEVQLVESGGGSVQAGGSLRLSCTTSGRALNMYVMGWFRQAPGNEREFVAATSSSGGSTSYPDSVKGRFTISRDNAKNTVYLQMNSLKPEDTAAYRCAASPYVSTPTMNILEEYRYWGLGTQVTVSSTRGMRTEDLPKAVVFLEPQWYRVLEKDSVTLKCQGAYSPEDNSTQWFHNESLISSQASSYFIDAATVDDSGEYRCQTNLSTLSDPVQLEVHIGWLLLQAPRWVFKEEDPIHLRCHSWKNTALHKVTYLQNGKGRKYFHHNSDFYIPKATLKDSGSYFCRGLVGSKNVSSETVNITITQGLAVPTISSFFPPGYQVSFCLVMVLLFAVDTGLYFSV

SEQ ID NO: 10008 - protein, 357 aa, synthetic construct
MALPVTALLLPLALLLHAARPEVQLVESGGGLVQPGGSLRLSCAASGSVFKINVMAWYRQAPGKGRELVAGIISGGSTSYADSVKGRFTISRDNAKNTLYLQMNSLRPEDTAVYYCAFITTESDYDLGRRYWGQGTLVTVSSTRGMRTEDLPKAVVFLEPQWYRVLEKDSVTLKCQGAYSPEDNSTQWFHNESLISSQASSYFIDAATVDDSGEYRCQTNLSTLSDPVQLEVHIGWLLLQAPRWVFKEEDPIHLRCHSWKNTALHKVTYLQNGKGRKYFHHNSDFYIPKATLKDSGSYFCRGLVGSKNVSSETVNITITQGLAVPTISSFFPPGYQVSFCLVMVLLFAVDTGLYFSV

SEQ ID NO: 10009 - protein, 502 aa, synthetic construct
MALPVTALLLPLALLLHAARPEVQLVESGGGSVQTGGSLRLTCAASGRTSRSYGMGWFRQAPGKEREFVSGISWRGDSTGYADSVKGRFTISRDNAKNTVDLQMNSLKPEDTAIYYCAAAAGSAWYGTLYEYDYWGQGTLVTVSSLEGGGGSGGGGSGGGGSFEEVQLVESGGGSVQAGGSLRLSCAASGDTYGSYWMGWFRQAPGKEREGVAAINRGGGYTVYADSVKGRFTISRDTAKNTVYLQMNSLRPDDTADYYCAASGVLGGLHEDWFNYWGQGTLVTVSSTRGMRTEDLPKAVVFLEPQWYRVLEKDSVTLKCQGAYSPEDNSTQWFHNESLISSQASSYFIDAATVDDSGEYRCQTNLSTLSDPVQLEVHIGWLLLQAPRWVFKEEDPIHLRCHSWKNTALHKVTYLQNGKGRKYFHHNSDFYIPKATLKDSGSYFCRGLVGSKNVSSETVNITITQGLAVPTISSFFPPGYQVSFCLVMVLLFAVDTGLYFSV

SEQ ID NO: 10010 - protein, 521 aa, synthetic construct
MALPVTALLLPLALLLHAARPEVQLVESGGGSVQAGGSLRLTCAASGSTSRSYGMGWFRQAPGKEREFVSGISWRGDSTGYADSVKGRFTISRDNAKNTVDLQMNSLKPEDTAIYYCAAAAGSTWYGTLYEYDYWGQGTLVTVSSLEGGGGSGGGGSGGGGSGSGGSGSGGSGSGGSGSGGSFEVQLVESGGGSVQAGGSLRLSCAASGDTYGSYWMGWFRQAPGQEREAVAAINRGGGYTVYADSVKGRFTISRDNAKNTLYLQMNSLRPDDTADYYCAASGVLGGLHEDWFNYWGQGTLVTVSSTRGMRTEDLPKAVVFLEPQWYRVLEKDSVTLKCQGAYSPEDNSTQWFHNESLISSQASSYFIDAATVDDSGEYRCQTNLSTLSDPVQLEVHIGWLLLQAPRWVFKEEDPIHLRCHSWKNTALHKVTYLQNGKGRKYFHHNSDFYIPKATLKDSGSYFCRGLVGSKNVSSETVNITITQGLAVPTISSFFPPGYQVSFCLVMVLLFAVDTGLYFSV

SEQ ID NO: 10011 - protein, 511 aa, synthetic construct
MALPVTALLLPLALLLHAARPEVQLVESGGGLVQAGGSLRLSCAASGITFSINTMGWYRQAPGKQRELVALISSIGDTYYADSVKGRFTISRDNAKNTVYLQMNSLKPEDTAVYYCKRFRTAAQGTDYWGQGTQVTVSSLEGGGGSGGGGSGGGGSGSGGSGSGGSGSGGSGSGGSFEVQLVESGGGLVQPGGSLRLSCAASGSIFGFNDMAWYRQAPGKQRELVALISRVGVTSSADSVKGRFTISRVNAKDTVYLQMNSLKPEDTAVYYCYMDQRLDGSTLAYWGQGTQVTVSSTRGMRTEDLPKAVVFLEPQWYRVLEKDSVTLKCQGAYSPEDNSTQWFHNESLISSQASSYFIDAATVDDSGEYRCQTNLSTLSDPVQLEVHIGWLLLQAPRWVFKEEDPIHLRCHSWKNTALHKVTYLQNGKGRKYFHHNSDFYIPKATLKDSGSYFCRGLVGSKNVSSETVNITITQGLAVPTISSFFPPGYQVSFCLVMVLLFAVDTGLYFSV

SEQ ID NO: 10012 - protein, 478 aa, synthetic construct; identical to SEQ ID NO: 9827

SEQ ID NO: 10013 - protein, 516 aa, synthetic construct
MALPVTALLLPLALLLHAARPDVQLVESGGGLVQPGGSLRLSCAASGSIGGLNAMAWYRQAPGKERELVAGIFGVGSTRYADSVKGRFTISRDNSKNTVYLQMNSLRPEDTAVYYCRMSSVTRGSSDYWGQGTLVTVSSLEGGGGSGGGGSGGGGSGSGGSGSGGSGSGGSGSGGSFEVQLVESGGSLVQPGGSLRLSCAASGFTFDDYAMSWVRQVPGKGLEWVSSINWSGTHTDYADSVKGRFTISRNNANNTLYLQMNSLKSEDTAVYYCAKNWRDAGTTWFEKSGSAGQGTQVTVSSTRGMRTEDLPKAVVFLEPQWYRVLEKDSVTLKCQGAYSPEDNSTQWFHNESLISSQASSYFIDAATVDDSGEYRCQTNLSTLSDPVQLEVHIGWLLLQAPRWVFKEEDPIHLRCHSWKNTALHKVTYLQNGKGRKYFHHNSDFYIPKATLKDSGSYFCRGLVGSKNVSSETVNITITQGLAVPTISSFFPPGYQVSFCLVMVLLFAVDTGLYFSV

SEQ ID NO: 10014 - protein, 524 aa, synthetic construct
MALPVTALLLPLALLLHAARPDVQLVESGGGLVQPGGSLRLSCAASGFILDYYAIGWFRQAPGKEREGVLCIDASDDITYYADSVKGRFTISRDNSKNTVYLQMNSLRPEDTAVYYCATPIGLSSSCLLEYDYDYWGQGTLVTVSSLEGGSGSGGGGSGGGGSGSGGSGSGGSGSGGSGSGGSFEVQLVESGGGLVQPGGSLRLSCAASGRTYYLNAMGWFRQAPGKEREFVAAIDWSEGNKDYADSVKGRFTISRDNSKNTVYLQMNSLRPEDTAVYYCAADTPPWGPLIYIESYDSWGQGTLVTVSSTRGMRTEDLPKAVVFLEPQWYRVLEKDSVTLKCQGAYSPEDNSTQWFHNESLISSQASSYFIDAATVDDSGEYRCQTNLSTLSDPVQLEVHIGWLLLQAPRWVFKEEDPIHLRCHSWKNTALHKVTYLQNGKGRKYFHHNSDFYIPKATLKDSGSYFCRGLVGSKNVSSETVNITITQGLAVPTISSFFPPGYQVSFCLVMVLLFAVDTGLYFSV

SEQ ID NO: 10015 - protein, 507 aa, synthetic construct
MALPVTALLLPLALLLHAARPQVQLVQSGGGLVQPGGSLRLSCAASDFDFAAYEMSWVRQAPGQGLEWVAIISHDGIDKYYTDSVKGRFTISRDNSKNTLYLQMNTLRAEDTATYYCLRLGAVGQGTLVTVSSLEGGGGSGGGGSGGGGSGSGGSGSGGSGSGGSGSGGSFEQVQLVQSGGGLVQPGGSLRLSCAASDFAFDDYEMSWVRQAPGKALEWIGDINHSGTTIYNPSLKSRVTISRDNSKNTLYLQMNTLRAEDTAIYYCARPHYGDYSDAFDIWGQGTMVTVSSTRGMRTEDLPKAVVFLEPQWYRVLEKDSVTLKCQGAYSPEDNSTQWFHNESLISSQASSYFIDAATVDDSGEYRCQTNLSTLSDPVQLEVHIGWLLLQAPRWVFKEEDPIHLRCHSWKNTALHKVTYLQNGKGRKYFHHNSDFYIPKATLKDSGSYFCRGLVGSKNVSSETVNITITQGLAVPTISSFFPPGYQVSFCLVMVLLFAVDTGLYFSV

SEQ ID NO: 10016 - protein, 355 aa, synthetic construct
MALPVTALLLPLALLLHAARPQVKLEESGGGLVQAGRSLRLSCAASEHTFSSHVMGWFRQAPGKERESVAVIGWRDISTSYADSVKGRFTISRDNAKKTLYLQMNSLKPEDTAVYYCAARRIDAADFDSWGQGTQVTVSSTRGMRTEDLPKAVVFLEPQWYRVLEKDSVTLKCQGAYSPEDNSTQWFHNESLISSQASSYFIDAATVDDSGEYRCQTNLSTLSDPVQLEVHIGWLLLQAPRWVFKEEDPIHLRCHSWKNTALHKVTYLQNGKGRKYFHHNSDFYIPKATLKDSGSYFCRGLVGSKNVSSETVNITITQGLAVPTISSFFPPGYQVSFCLVMVLLFAVDTGLYFSV

SEQ ID NO: 10017 - protein, 354 aa, synthetic construct
MALPVTALLLPLALLLHAARPEVQLVESGGGLVQAGGSLRLSCAASGRTFTMGWFRQAPGKEREFVAAISLSPTLAYYAESVKGRFTISRDNAKNTVVLQMNSLKPEDTALYYCAADRKSVMSIRPDYWGQGTQVTVSSTRGMRTEDLPKAVVFLEPQWYRVLEKDSVTLKCQGAYSPEDNSTQWFHNESLISSQASSYFIDAATVDDSGEYRCQTNLSTLSDPVQLEVHIGWLLLQAPRWVFKEEDPIHLRCHSWKNTALHKVTYLQNGKGRKYFHHNSDFYIPKATLKDSGSYFCRGLVGSKNVSSETVNITITQGLAVPTISSFFPPGYQVSFCLVMVLLFAVDTGLYFSV

SEQ ID NO: 10018 - protein, 488 aa, synthetic construct
MALPVTALLLPLALLLHAARPQVKLEESGGGLVQAGRSLRLSCAASEHTFSSHVMGWFRQAPGKERESVAVIGWRDISTSYADSVKGRFTISRDNAKKTLYLQMNSLKPEDTAVYYCAARRIDAADFDSWGQGTQVTVSSGGGGSGGGGSGGGGSEVQLVESGGGLVQAGGSLRLSCAASGRTFTMGWFRQAPGKEREFVAAISLSPTLAYYAESVKGRFTISRDNAKNTVVLQMNSLKPEDTALYYCAADRKSVMSIRPDYWGQGTQVTVSSTRGMRTEDLPKAVVFLEPQWYRVLEKDSVTLKCQGAYSPEDNSTQWFHNESLISSQASSYFIDAATVDDSGEYRCQTNLSTLSDPVQLEVHIGWLLLQAPRWVFKEEDPIHLRCHSWKNTALHKVTYLQNGKGRKYFHHNSDFYIPKATLKDSGSYFCRGLVGSKNVSSETVNITITQGLAVPTISSFFPPGYQVSFCLVMVLLFAVDTGLYFSV

SEQ ID NO: 10019 - protein, 352 aa, synthetic construct
MALPVTALLLPLALLLHAARPEVQLVESGGGLVQAGGSLRLSCIATGKVFSIYDMGWYRQAPGKQRELVAEITSSGTTHYDDFVSGRFTISRDNAKNTVYLQMNTLKAEDTAVYYCRANHVFGGSYWGQGTQVTVSSTRGMRTEDLPKAVVFLEPQWYRVLEKDSVTLKCQGAYSPEDNSTQWFHNESLISSQASSYFIDAATVDDSGEYRCQTNLSTLSDPVQLEVHIGWLLLQAPRWVFKEEDPIHLRCHSWKNTALHKVTYLQNGKGRKYFHHNSDFYIPKATLKDSGSYFCRGLVGSKNVSSETVNITITQGLAVPTISSFFPPGYQVSFCLVMVLLFAVDTGLYFSV

SEQ ID NO: 10020 - protein, 358 aa, synthetic construct
MALPVTALLLPLALLLHAARPQVQLVESGGGLVQPGGSLRLSCEASGFTLDYYAIGWFRQAPGKEREGVICISRSDGSTYYADSVKGRFTISRDNAKKTVYLQMISLKPEDTAAYYCAAGADCSGYLRDYEFRGQGTQVTVSSTRGMRTEDLPKAVVFLEPQWYRVLEKDSVTLKCQGAYSPEDNSTQWFHNESLISSQASSYFIDAATVDDSGEYRCQTNLSTLSDPVQLEVHIGWLLLQAPRWVFKEEDPIHLRCHSWKNTALHKVTYLQNGKGRKYFHHNSDFYIPKATLKDSGSYFCRGLVGSKNVSSETVNITITQGLAVPTISSFFPPGYQVSFCLVMVLLFAVDTGLYFSV

SEQ ID NO: 10021 - protein, 481 aa, synthetic construct
MALPVTALLLPLALLLHAARPEVQLVESGGGLVQAGGSLRLSCIATGKVFSIYDMGWYRQAPGKQRELVAEITSSGTTHYDDFVSGRFTISRDNAKNTVYLQMNTLKAEDTAVYYCRANHVFGGSYWGQGTQVTVSSEVAALEKQVQLVESGGGLVQPGGSLRLSCEASGFTLDYYAIGWFRQAPGKEREGVICISRSDGSTYYADSVKGRFTISRDNAKKTVYLQMISLKPEDTAAYYCAAGADCSGYLRDYEFRGQGTQVTVSSTRGMRTEDLPKAVVFLEPQWYRVLEKDSVTLKCQGAYSPEDNSTQWFHNESLISSQASSYFIDAATVDDSGEYRCQTNLSTLSDPVQLEVHIGWLLLQAPRWVFKEEDPIHLRCHSWKNTALHKVTYLQNGKGRKYFHHNSDFYIPKATLKDSGSYFCRGLVGSKNVSSETVNITITQGLAVPTISSFFPPGYQVSFCLVMVLLFAVDTGLYFSV

SEQ ID NO: 10022 - protein, 364 aa, synthetic construct
MALPVTALLLPLALLLHAARPQVKLEESGGRLVQPRGSLRLSCAGSGRTFSTYGMAWFRQAPGKEREFVASKASMNYSGRTYYADSVKGRFTIARDNAKNMVFLQMNNLKPEDTAVYYCAAGTGCSTYGCFDAQIIDYWGKGTLVTVSSTRGMRTEDLPKAVVFLEPQWYRVLEKDSVTLKCQGAYSPEDNSTQWFHNESLISSQASSYFIDAATVDDSGEYRCQTNLSTLSDPVQLEVHIGWLLLQAPRWVFKEEDPIHLRCHSWKNTALHKVTYLQNGKGRKYFHHNSDFYIPKATLKDSGSYFCRGLVGSKNVSSETVNITITQGLAVPTISSFFPPGYQVSFCLVMVLLFAVDTGLYFSV

SEQ ID NO: 10023 - protein, 355 aa, synthetic construct
MALPVTALLLPLALLLHAARPQVKLEESGGGLVQPGESLRLSCSASGSIFKVFRVFAMSWYRQGPGKQRELVASISSGETTTYADSVKGRFTISRDNAKNTAYLQMDSLKPEDTAVYYCNADHTFTGDFWGQGTQVTVSSTRGMRTEDLPKAVVFLEPQWYRVLEKDSVTLKCQGAYSPEDNSTQWFHNESLISSQASSYFIDAATVDDSGEYRCQTNLSTLSDPVQLEVHIGWLLLQAPRWVFKEEDPIHLRCHSWKNTALHKVTYLQNGKGRKYFHHNSDFYIPKATLKDSGSYFCRGLVGSKNVSSETVNITITQGLAVPTISSFFPPGYQVSFCLVMVLLFAVDTGLYFSV

SEQ ID NO: 10024 - protein, 490 aa, synthetic construct
MALPVTALLLPLALLLHAARPQVKLEESGGRLVQPRGSLRLSCAGSGRTFSTYGMAWFRQAPGKEREFVASKASMNYSGRTYYADSVKGRFTIARDNAKNMVFLQMNNLKPEDTAVYYCAAGTGCSTYGCFDAQIIDYWGKGTLVTVSSEVAALEKQVKLEESGGGLVQPGESLRLSCSASGSIFKVFRVFAMSWYRQGPGKQRELVASISSGETTTYADSVKGRFTISRDNAKNTAYLQMDSLKPEDTAVYYCNADHTFTGDFWGQGTQVTVSSTRGMRTEDLPKAVVFLEPQWYRVLEKDSVTLKCQGAYSPEDNSTQWFHNESLISSQASSYFIDAATVDDSGEYRCQTNLSTLSDPVQLEVHIGWLLLQAPRWVFKEEDPIHLRCHSWKNTALHKVTYLQNGKGRKYFHHNSDFYIPKATLKDSGSYFCRGLVGSKNVSSETVNITITQGLAVPTISSFFPPGYQVSFCLVMVLLFAVDTGLYFSV

SEQ ID NO: 10025 - protein, 353 aa, synthetic construct
MALPVTALLLPLALLLHAARPQVKLEESGGELVQPGGPLRLSCAASGNIFSINRMGWYRQAPGKQRAFVASITVRGITNYADSVKGRFTISVDKSKNTIYLQMNALKPEDTAVYYCNAVSSNRDPDYWGQGTQVTVSSTRGMRTEDLPKAVVFLEPQWYRVLEKDSVTLKCQGAYSPEDNSTQWFHNESLISSQASSYFIDAATVDDSGEYRCQTNLSTLSDPVQLEVHIGWLLLQAPRWVFKEEDPIHLRCHSWKNTALHKVTYLQNGKGRKYFHHNSDFYIPKATLKDSGSYFCRGLVGSKNVSSETVNITITQGLAVPTISSFFPPGYQVSFCLVMVLLFAVDTGLYFSV

SEQ ID NO: 10026 - protein, 365 aa, synthetic construct
MALPVTALLLPLALLLHAARPPVQLVESGGGLVQAGDSLRLSCAASGRTFGIGTMGWFRQPPGKEREFVAAIRWSTGGTRYADSVKGRFTISRDNAKLTVDLQMDSLKPEDTAVYYCAADRLSLDLSGRYHYNPAVYDYWGQGTQVTVSSTRGMRTEDLPKAVVFLEPQWYRVLEKDSVTLKCQGAYSPEDNSTQWFHNESLISSQASSYFIDAATVDDSGEYRCQTNLSTLSDPVQLEVHIGWLLLQAPRWVFKEEDPIHLRCHSWKNTALHKVTYLQNGKGRKYFHHNSDFYIPKATLKDSGSYFCRGLVGSKNVSSETVNITITQGLAVPTISSFFPPGYQVSFCLVMVLLFAVDTGLYFSV

SEQ ID NO: 10027 - protein, 497 aa, synthetic construct
MALPVTALLLPLALLLHAARPQVKLEESGGELVQPGGPLRLSCAASGNIFSINRMGWYRQAPGKQRAFVASITVRGITNYADSVKGRFTISVDKSKNTIYLQMNALKPEDTAVYYCNAVSSNRDPDYWGQGTQVTVSSGGGGSGGGGSGGGGSPVQLVESGGGLVQAGDSLRLSCAASGRTFGIGTMGWFRQPPGKEREFVAAIRWSTGGTRYADSVKGRFTISRDNAKLTVDLQMDSLKPEDTAVYYCAADRLSLDLSGRYHYNPAVYDYWGQGTQVTVSSTRGMRTEDLPKAVVFLEPQWYRVLEKDSVTLKCQGAYSPEDNSTQWFHNESLISSQASSYFIDAATVDDSGEYRCQTNLSTLSDPVQLEVHIGWLLLQAPRWVFKEEDPIHLRCHSWKNTALHKVTYLQNGKGRKYFHHNSDFYIPKATLKDSGSYFCRGLVGSKNVSSETVNITITQGLAVPTISSFFPPGYQVSFCLVMVLLFAVDTGLYFSV

SEQ ID NO: 10028 - protein, 355 aa, synthetic construct
MALPVTALLLPLALLLHAARPAVQLVESGGGLVQAGDSLRLTCTASGRAFSTYFMAWFRQAPGKEREFVAGIAWSGGSTAYADSVKGRFTISRDNAKNTVYLQMNSLKSEDTAVYYCASRGIEVEEFGAWGQGTQVTVSSTRGMRTEDLPKAVVFLEPQWYRVLEKDSVTLKCQGAYSPEDNSTQWFHNESLISSQASSYFIDAATVDDSGEYRCQTNLSTLSDPVQLEVHIGWLLLQAPRWVFKEEDPIHLRCHSWKNTALHKVTYLQNGKGRKYFHHNSDFYIPKATLKDSGSYFCRGLVGSKNVSSETVNITITQGLAVPTISSFFPPGYQVSFCLVMVLLFAVDTGLYFSV

SEQ ID NO: 10029 - protein, 356 aa, synthetic construct
MALPVTALLLPLALLLHAARPQVQLVESGGGLVQAGGSLRLSCAASGGTLSKNTVAWFRQAPGKERGFVASITWDGRTTYYADSVKGRFTISRDNAKNTVYLQMNSLKPEDTAVYVCADLGKWPAGPADYWGQGTQVTVSSTRGMRTEDLPKAVVFLEPQWYRVLEKDSVTLKCQGAYSPEDNSTQWFHNESLISSQASSYFIDAATVDDSGEYRCQTNLSTLSDPVQLEVHIGWLLLQAPRWVFKEEDPIHLRCHSWKNTALHKVTYLQNGKGRKYFHHNSDFYIPKATLKDSGSYFCRGLVGSKNVSSETVNITITQGLAVPTISSFFPPGYQVSFCLVMVLLFAVDTGLYFSV

SEQ ID NO: 10030 - protein, 360 aa, synthetic construct
MALPVTALLLPLALLLHAARPGSDLGIKLLFAAAKGQDDEVRILLAAGADVNAKDFEGYTPLHVAAYDGHLEIVEVLLKAGADVNAKDSQGRTPLHEAAYSGHLEIVEVLLKAGADVNAQDDAGETPADLAAAWGHEDIAEVLQKTRGMRTEDLPKAVVFLEPQWYRVLEKDSVTLKCQGAYSPEDNSTQWFHNESLISSQASSYFIDAATVDDSGEYRCQTNLSTLSDPVQLEVHIGWLLLQAPRWVFKEEDPIHLRCHSWKNTALHKVTYLQNGKGRKYFHHNSDFYIPKATLKDSGSYFCRGLVGSKNVSSETVNITITQGLAVPTISSFFPPGYQVSFCLVMVLLFAVDTGLYFSV

SEQ ID NO: 10031 - protein, 362 aa, synthetic construct
MALPVTALLLPLALLLHAARPRSDLGKKLLEAARAGQDDEVRILMANGADVNAKDEYGLTPLYLATAHGHLEIVEVLLKNGADVNAVDAIGFTPLHLAAFIGHLEIAEVLLKHGADVNAQDKFGKTAFDISIGNGNEDLAEILQKLNTRGMRTEDLPKAVVFLEPQWYRVLEKDSVTLKCQGAYSPEDNSTQWFHNESLISSQASSYFIDAATVDDSGEYRCQTNLSTLSDPVQLEVHIGWLLLQAPRWVFKEEDPIHLRCHSWKNTALHKVTYLQNGKGRKYFHHNSDFYIPKATLKDSGSYFCRGLVGSKNVSSETVNITITQGLAVPTISSFFPPGYQVSFCLVMVLLFAVDTGLYFSV

SEQ ID NO: 10032 - protein, 294 aa, synthetic construct
MALPVTALLLPLALLLHAARPVDNKFNKERYSAYYEIWQLPNLNVRQKAAFIGSLQDDPSQSANLLAEAKKLNDAQAPKTRGMRTEDLPKAVVFLEPQWYRVLEKDSVTLKCQGAYSPEDNSTQWFHNESLISSQASSYFIDAATVDDSGEYRCQTNLSTLSDPVQLEVHIGWLLLQAPRWVFKEEDPIHLRCHSWKNTALHKVTYLQNGKGRKYFHHNSDFYIPKATLKDSGSYFCRGLVGSKNVSSETVNITITQGLAVPTISSFFPPGYQVSFCLVMVLLFAVDTGLYFSV

SEQ ID NO: 10033 - protein, 287 aa, synthetic construct
MALPVTALLLPLALLLHAARPYAKEMRNAYWEIALLPNLTNQQKRAPIRKLYDDPSQSSELLSEAKKLNDSQTRGMRTEDLPKAVVFLEPQWYRVLEKDSVTLKCQGAYSPEDNSTQWFHNESLISSQASSYFIDAATVDDSGEYRCQTNLSTLSDPVQLEVHIGWLLLQAPRWVFKEEDPIHLRCHSWKNTALHKVTYLQNGKGRKYFHHNSDFYIPKATLKDSGSYFCRGLVGSKNVSSETVNITITQGLAVPTISSFFPPGYQVSFCLVMVLLFAVDTGLYFSV

SEQ ID NO: 10034 - protein, 287 aa, synthetic construct
MALPVTALLLPLALLLHAARPYAKEMWIAWEEIRNLPNLNGWQMTAFIAKLLDDPSQSSELLSEAKKLNDSQTRGMRTEDLPKAVVFLEPQWYRVLEKDSVTLKCQGAYSPEDNSTQWFHNESLISSQASSYFIDAATVDDSGEYRCQTNLSTLSDPVQLEVHIGWLLLQAPRWVFKEEDPIHLRCHSWKNTALHKVTYLQNGKGRKYFHHNSDFYIPKATLKDSGSYFCRGLVGSKNVSSETVNITITQGLAVPTISSFFPPGYQVSFCLVMVLLFAVDTGLYFSV

SEQ ID NO: 10035 - protein, 325 aa, synthetic construct
MALPVTALLLPLALLLHAARPLPAPKNLVVSRVTEDSARLSWTAPDAAFDSFAIGYWEWDDDGEAIVLTVPGSERSYDLTGLKPGTEYPVYIAGVKGGQWSFPLSAIFTTTRGMRTEDLPKAVVFLEPQWYRVLEKDSVTLKCQGAYSPEDNSTQWFHNESLISSQASSYFIDAATVDDSGEYRCQTNLSTLSDPVQLEVHIGWLLLQAPRWVFKEEDPIHLRCHSWKNTALHKVTYLQNGKGRKYFHHNSDFYIPKATLKDSGSYFCRGLVGSKNVSSETVNITITQGLAVPTISSFFPPGYQVSFCLVMVLLFAVDTGLYFSV

SEQ ID NO: 10036 - protein, 327 aa, synthetic construct
MALPVTALLLPLALLLHAARPLPAPKNLVVSRVTEDSARLSWAIDEQRDWFESFLIQYQESEKVGEAIVLTVPGSERSYDLTGLKPGTEYTVSIYGVYHVYRSNPLSAIFTTTRGMRTEDLPKAVVFLEPQWYRVLEKDSVTLKCQGAYSPEDNSTQWFHNESLISSQASSYFIDAATVDDSGEYRCQTNLSTLSDPVQLEVHIGWLLLQAPRWVFKEEDPIHLRCHSWKNTALHKVTYLQNGKGRKYFHHNSDFYIPKATLKDSGSYFCRGLVGSKNVSSETVNITITQGLAVPTISSFFPPGYQVSFCLVMVLLFAVDTGLYFSV

SEQ ID NO: 10037 - protein, 325 aa, synthetic construct
MALPVTALLLPLALLLHAARPLPAPKNLVVSRVTEDSARLSWTAPDAAFDSFPIGYWEWDDDGEAIVLTVPGSERSYDLTGLKPGTEYHVYIAGVKGGQWSFPLSAIFTTTRGMRTEDLPKAVVFLEPQWYRVLEKDSVTLKCQGAYSPEDNSTQWFHNESLISSQASSYFIDAATVDDSGEYRCQTNLSTLSDPVQLEVHIGWLLLQAPRWVFKEEDPIHLRCHSWKNTALHKVTYLQNGKGRKYFHHNSDFYIPKATLKDSGSYFCRGLVGSKNVSSETVNITITQGLAVPTISSFFPPGYQVSFCLVMVLLFAVDTGLYFSV

SEQ ID NO: 10038 - protein, 330 aa, synthetic construct
MALPVTALLLPLALLLHAARPLPAPKNLVVSEVTEDSARLSWDDPWAFYESFLIQYQESEKVGEAIVLTVPGSERSYDLTGLKPGTEYTVSIYGVHNVYKDTNMRGLPLSAIFTTTRGMRTEDLPKAVVFLEPQWYRVLEKDSVTLKCQGAYSPEDNSTQWFHNESLISSQASSYFIDAATVDDSGEYRCQTNLSTLSDPVQLEVHIGWLLLQAPRWVFKEEDPIHLRCHSWKNTALHKVTYLQNGKGRKYFHHNSDFYIPKATLKDSGSYFCRGLVGSKNVSSETVNITITQGLAVPTISSFFPPGYQVSFCLVMVLLFAVDTGLYFSV

SEQ ID NO: 10039 - protein, 325 aa, synthetic construct
MALPVTALLLPLALLLHAARPLPAPKNLVVSRVTEDSARLSWTAPDAAFDSFWIRYFEFLGSGEAIVLTVPGSERSYDLTGLKPGTEYVVNIMGVKGGKISPPLSAIFTTTRGMRTEDLPKAVVFLEPQWYRVLEKDSVTLKCQGAYSPEDNSTQWFHNESLISSQASSYFIDAATVDDSGEYRCQTNLSTLSDPVQLEVHIGWLLLQAPRWVFKEEDPIHLRCHSWKNTALHKVTYLQNGKGRKYFHHNSDFYIPKATLKDSGSYFCRGLVGSKNVSSETVNITITQGLAVPTISSFFPPGYQVSFCLVMVLLFAVDTGLYFSV

SEQ ID NO: 10040 - protein, 429 aa, synthetic construct
MALPVTALLLPLALLLHAARPLPAPKNLVVSEVTEDSARLSWDDPWAFYESFLIQYQESEKVGEAIVLTVPGSERSYDLTGLKPGTEYTVSIYGVHNVYKDTNMRGLPLSAIFTTAPAPAPAPAPLPAPKNLVVSRVTEDSARLSWTAPDAAFDSFWIRYFEFLGSGEAIVLTVPGSERSYDLTGLKPGTEYVVNIMGVKGGKISPPLSAIFTTTRGMRTEDLPKAVVFLEPQWYRVLEKDSVTLKCQGAYSPEDNSTQWFHNESLISSQASSYFIDAATVDDSGEYRCQTNLSTLSDPVQLEVHIGWLLLQAPRWVFKEEDPIHLRCHSWKNTALHKVTYLQNGKGRKYFHHNSDFYIPKATLKDSGSYFCRGLVGSKNVSSETVNITITQGLAVPTISSFFPPGYQVSFCLVMVLLFAVDTGLYFSV

SEQ ID NO: 10041 - protein, 326 aa, synthetic construct
MALPVTALLLPLALLLHAARPMLPAPKNLVVSRITEDSARLSWTAPDAAFDSFPIRYIETLIWGEAIWLDVPGSERSYDLTGLKPGTEYAVVITGVKGGRFSSPLVASFTTTRGMRTEDLPKAVVFLEPQWYRVLEKDSVTLKCQGAYSPEDNSTQWFHNESLISSQASSYFIDAATVDDSGEYRCQTNLSTLSDPVQLEVHIGWLLLQAPRWVFKEEDPIHLRCHSWKNTALHKVTYLQNGKGRKYFHHNSDFYIPKATLKDSGSYFCRGLVGSKNVSSETVNITITQGLAVPTISSFFPPGYQVSFCLVMVLLFAVDTGLYFSV

SEQ ID NO: 10042 - protein, 802 aa, synthetic construct
MALPVTALLLPLALLLHAARPEWVKFAKPCREGEDNSKRNPIAKITSDYQATQKITYRISGVGIDQPPFGIFVVDKNTGDINITAIVDREETPSFLITCRALNAQGLDVEKPLILTVKILDINDNPPVFSQQIFMGEIEENSASNSLVMILNATDADEPNHLNSKIAFKIVSQEPAGTPMFLLSRNTGEVRTLTNSLDREQASSYRLVVSGADKDGEGLSTQCECNIKVKDVNDNFPMFRDSQYSARIEENILSSELLRFQVTDLDEEYTDNWLAVYFFTSGNEGNWFEIQTDPRTNEGILKVVKALDYEQLQSVKLSIAVKNKAEFHQSVISRYRVQSTPVTIQVINVREGIAFRPASKTFTVQKGISSKKLVDYILGTYQAIDEDTNKAASNVKYVMGRNDGGYLMIDSKTAEIKFVKNMNRDSTFIVNKTITAEVLAIDEYTGKTSTGTVYVRVPDFNDNCPTAVLEKDAVCSSSPSVVVSARTLNNRYTGPYTFALEDQPVKLPAVWSITTLNATSALLRAQEQIPPGVYHISLVLTDSQNNRCEMPRSLTLEVCQCDNRGICGTSYPTTSPGTRYGRPHSGRTRGMRTEDLPKAVVFLEPQWYRVLEKDSVTLKCQGAYSPEDNSTQWFHNESLISSQASSYFIDAATVDDSGEYRCQTNLSTLSDPVQLEVHIGWLLLQAPRWVFKEEDPIHLRCHSWKNTALHKVTYLQNGKGRKYFHHNSDFYIPKATLKDSGSYFCRGLVGSKNVSSETVNITITQGLAVPTISSFFPPGYQVSFCLVMVLLFAVDTGLYFSV

SEQ ID NO: 10043 - protein, 543 aa, synthetic construct
MALPVTALLLPLALLLHAARPMALPVTALLLPLALLLHAARPLFNQEVQIPLTESYCGPCPKNWICYKNNCYQFFDESKNWYESQASCMSQNASLLKVYSKEDQDLLKLVKSYHWMGLVHIPTNGSWQWEDGSILSPNLLTIIEMQKGDCALYASSFKGYIENCSTPNTYICMQRTVGGGGSGGGGSGGGGSDLFNQEVQIPLTESYCGPCPKNWICYKNNCYQFFDESKNWYESQASCMSQNASLLKVYSKEDQDLLKLVKSYHWMGLVHIPTNGSWQWEDGSILSPNLLTIIEMQKGDCALYASSFKGYIENCSTPNTYICMQRTVTRGMRTEDLPKAVVFLEPQWYRVLEKDSVTLKCQGAYSPEDNSTQWFHNESLISSQASSYFIDAATVDDSGEYRCQTNLSTLSDPVQLEVHIGWLLLQAPRWVFKEEDPIHLRCHSWKNTALHKVTYLQNGKGRKYFHHNSDFYIPKATLKDSGSYFCRGLVGSKNVSSETVNITITQGLAVPTISSFFPPGYQVSFCLVMVLLFAVDTGLYFSV

SEQ ID NO: 10044 - protein, 423 aa, synthetic construct
MALPVTALLLPLALLLHAARPMELTDLLLAAMLLAVARLTLSSPVAPACDPRLLNKLLRDSHLLHSRLSQCPDVDPLSIPVLLPAVDFSLGEWKTQTEQSKAQDILGAVSLLLEGVMAARGQLEPSCLSSLLGQLSGQVRLLLGALQGLLGTQLPLQGRTTAHKDPNALFLSLQQLLRGKVRFLLLVEGPTLCVRRTLPTTAVPSSTSTRGMRTEDLPKAVVFLEPQWYRVLEKDSVTLKCQGAYSPEDNSTQWFHNESLISSQASSYFIDAATVDDSGEYRCQTNLSTLSDPVQLEVHIGWLLLQAPRWVFKEEDPIHLRCHSWKNTALHKVTYLQNGKGRKYFHHNSDFYIPKATLKDSGSYFCRGLVGSKNVSSETVNITITQGLAVPTISSFFPPGYQVSFCLVMVLLFAVDTGLYFSV

SEQ ID NO: 10045 - protein, 289 aa, synthetic construct
MALPVTALLLPLALLLHAARPMDPDLEIRAAFLRQRNTALRTEVAELEQEVQRLENEVSQYETRYGPLGGGKTRTRGMRTEDLPKAVVFLEPQWYRVLEKDSVTLKCQGAYSPEDNSTQWFHNESLISSQASSYFIDAATVDDSGEYRCQTNLSTLSDPVQLEVHIGWLLLQAPRWVFKEEDPIHLRCHSWKNTALHKVTYLQNGKGRKYFHHNSDFYIPKATLKDSGSYFCRGLVGSKNVSSETVNITITQGLAVPTISSFFPPGYQVSFCLVMVLLFAVDTGLYFSV

SEQ ID NO: 10046 - protein, 264 aa, synthetic construct
MALPVTALLLPLALLLHAARPEVAALEKEVAALEKEVAALEKEVAALEKTRGMRTEDLPKAVVFLEPQWYRVLEKDSVTLKCQGAYSPEDNSTQWFHNESLISSQASSYFIDAATVDDSGEYRCQTNLSTLSDPVQLEVHIGWLLLQAPRWVFKEEDPIHLRCHSWKNTALHKVTYLQNGKGRKYFHHNSDFYIPKATLKDSGSYFCRGLVGSKNVSSETVNITITQGLAVPTISSFFPPGYQVSFCLVMVLLFAVDTGLYFSV

SEQ ID NO: 10047 - protein, 522 aa, synthetic construct
MALPVTALLLPLALLLHAARPLFNQEVQIPLTESYCGPCPKNWICYKNNCYQFFDESKNWYESQASCMSQNASLLKVYSKEDQDLLKLVKSAHWMGLVHIPTNGSWQWEDGSILSPNLLTIIEMQKGDCALYASSFKGFIENCSTPNTYICMQRTVGGGGSGGGGSGGGGSDLFNQEVQIPLTESYCGPCPKNWICYKNNCYQFFDESKNWYESQASCMSQNASLLKVYSKEDQDLLKLVKSAHWMGLVHIPTNGSWQWEDGSILSPNLLTIIEMQKGDCALYASSFKGFIENCSTPNTYICMQRTVTRGMRTEDLPKAVVFLEPQWYRVLEKDSVTLKCQGAYSPEDNSTQWFHNESLISSQASSYFIDAATVDDSGEYRCQTNLSTLSDPVQLEVHIGWLLLQAPRWVFKEEDPIHLRCHSWKNTALHKVTYLQNGKGRKYFHHNSDFYIPKATLKDSGSYFCRGLVGSKNVSSETVNITITQGLAVPTISSFFPPGYQVSFCLVMVLLFAVDTGLYFSV

SEQ ID NO: 10048 - protein, 522 aa, synthetic construct
MALPVTALLLPLALLLHAARPLFNQEVQIPLTESYCGPCPKNWICYKNNCYQFFDESKNWYESQASCMSQNASLLKVYSKEDQDLLKLVKSAHWMGLVHIPTNGSWQWEDGSILSPNLLTIIEMQKGDCALYASSFKGYIENCSTPNTYICMQRTVSGGGGSGGGGSGGGGDLFNQEVQIPLTESYCGPCPKNWICYKNNCYQFFDESKNWYESQASCMSQNASLLKVYSKEDQDLLKLVKSAHWMGLVHIPTNGSWQWEDGSILSPNLLTIIEMQKGDCALYASSFKGYIENCSTPNTYICMQRTVTRGMRTEDLPKAVVFLEPQWYRVLEKDSVTLKCQGAYSPEDNSTQWFHNESLISSQASSYFIDAATVDDSGEYRCQTNLSTLSDPVQLEVHIGWLLLQAPRWVFKEEDPIHLRCHSWKNTALHKVTYLQNGKGRKYFHHNSDFYIPKATLKDSGSYFCRGLVGSKNVSSETVNITITQGLAVPTISSFFPPGYQVSFCLVMVLLFAVDTGLYFSV

SEQ ID NO: 10049 - protein, 708 aa, synthetic construct
MALPVTALLLPLALLLHAARPDIQMTQSPSSLSASVGDRVTITCKASQDVGTAVDWYQQKPGKAPKLLIYWASTRHTGVPSRFSGSGSGTDFTLTISSLQPEDFATYYCQQYNSYPLTFGQGTKVEIKRLEDLKNVFPPEVAVFEPSEAEISHTQKATLVCLATGFYPDHVELSWWVNGKEVHSGVSTDPQPLKEQPALNDSRYCLSSRLRVSATFWQNPRNHFRCQVQFYGLSENDEWTQDRAKPVTQIVSAEAWGRADCGSQSFGLLDPKLCYLLDGILFIYGVILTALFLRVKFSRSADAPAYQQGQNQLYNELNLGRREEYDVLDKRRGRDPEMGGKPQRRKNPQEGLYNELQKDKMAEAYSEIGMKGERRRGKGHDGLYQGLSTATKDTYDALHMQALPPRRAKRSGSGATNFSLLKQAGDVEENPGPTSMDWIWRILFLVGAATGAHSFEVQLVESGGGLVQPGGSLRLSCAASGYTFTEYTIHWVRQAPGKGLEWVANINPNNGGTTYNQKFEDRFTISRDNSKNTLYLQMNSLRAEDTAVYYCARGWNFDYWGQGTLVTVSSTRIQNPDPAVYQLRDSKSSDKSVCLFTDFDSQTNVSQSKDSDVYITDKTVLDMRSMDFKSNSAVAWSNKSDFACANAFNNSIIPEDTFFPSPESSCGTITQGLAVPTISSFFPPGYQVSFCLVMVLLFAVDTGLYFSV

SEQ ID NO: 10050 - protein, 633 aa, synthetic construct
MALPVTALLLPLALLLHAARPDIQMTQSPSSLSASVGDRVTITCKASQDVGTAVDWYQQKPGKAPKLLIYWASTRHTGVPSRFSGSGSGTDFTLTISSLQPEDFATYYCQQYNSYPLTFGQGTKVEIKRLEDLKNVFPPEVAVFEPSEAEISHTQKATLVCLATGFYPDHVELSWWVNGKEVHSGVSTDPQPLKEQPALNDSRYCLSSRLRVSATFWQNPRNHFRCQVQFYGLSENDEWTQDRAKPVTQIVSAEAWGRADCGSLGEPQLCYILDAILFLYGIVLTLLYCRLKIQVRKAAITSYEKSDGVYTGLSTRNQETYETLKHEKPPQRAKRSGSGATNFSLLKQAGDVEENPGPTSMDWIWRILFLVGAATGAHSFEVQLVESGGGLVQPGGSLRLSCAASGYTFTEYTIHWVRQAPGKGLEWVANINPNNGGTTYNQKFEDRFTISRDNSKNTLYLQMNSLRAEDTAVYYCARGWNFDYWGQGTLVTVSSTRIQNPDPAVYQLRDSKSSDKSVCLFTDFDSQTNVSQSKDSDVYITDKTVLDMRSMDFKSNSAVAWSNKSDFACANAFNNSIIPEDTFFPSPESSCGTITQGLAVPTISSFFPPGYQVSFCLVMVLLFAVDTGLYFSV

SEQ ID NO: 10051 - protein, 609 aa, synthetic construct
MALPVTALLLPLALLLHAARPDIQMTQSPSSLSASVGDRVTITCKASQDVGTAVDWYQQKPGKAPKLLIYWASTRHTGVPSRFSGSGSGTDFTLTISSLQPEDFATYYCQQYNSYPLTFGQGTKVEIKRLEGQPKANPTVTLFPPSSEELQANKATLVCLISDFYPGAVTVAWKADGSPVKAGVETTKPSKQSNNKYAASSYLSLTPEQWKSHRSYSCQVTHEGSTVEKTVAPTECSGSLGEPQLCYILDAILFLYGIVLTLLYCRLKIQVRKAAITSYEKSDGVYTGLSTRNQETYETLKHEKPPQRAKRSGSGATNFSLLKQAGDVEENPGPTSMDWIWRILFLVGAATGAHSFEVQLVESGGGLVQPGGSLRLSCAASGYTFTEYTIHWVRQAPGKGLEWVANINPNNGGTTYNQKFEDRFTISRDNSKNTLYLQMNSLRAEDTAVYYCARGWNFDYWGQGTLVTVSSTRIQNPDPAVYQLRDSKSSDKSVCLFTDFDSQTNVSQSKDSDVYITDKTVLDMRSMDFKSNSAVAWSNKSDFACANAFNNSIIPEDTFFPSPESSCGTITQGLAVPTISSFFPPGYQVSFCLVMVLLFAVDTGLYFSV

SEQ ID NO: 10052 - protein, 618 aa, synthetic construct
MALPVTALLLPLALLLHAARPDIQMTQSPSSLSASVGDRVTITCKASQDVGTAVDWYQQKPGKAPKLLIYWASTRHTGVPSRFSGSGSGTDFTLTISSLQPEDFATYYCQQYNSYPLTFGQGTKVEIKRLEGQPKANPTVTLFPPSSEELQANKATLVCLISDFYPGAVTVAWKADGSPVKAGVETTKPSKQSNNKYAASSYLSLTPEQWKSHRSYSCQVTHEGSTVEKTVAPTECSGSLGEPQLCYILDAILFLYGIVLTLLYCRLKIQVRKAAITSYEKSDGVYTGLSTRNQETYETLKHEKPPQRAKRSGSGATNFSLLKQAGDVEENPGPTSMDWIWRILFLVGAATGAHSFEVQLVESGGGLVQPGGSLRLSCAASGYTFTEYTIHWVRQAPGKGLEWVANINPNNGGTTYNQKFEDRFTISRDNSKNTLYLQMNSLRAEDTAVYYCARGWNFDYWGQGTLVTVSSTRASTKGPSVFPLAPSSKSTSGGTAALGCLVKDYFPEPVTVSWNSGALTSGVHTFPAVLQSSGLYSLSSVVTVPSSSLGTQTYICNVNHKPSNTKVDKRVEPKSCGTITQGLAVPTISSFFPPGYQVSFCLVMVLLFAVDTGLYFSV

SEQ ID NO: 10053 - protein, 486 aa, synthetic construct
MALPVTALLLPLALLLHAARPDVQMIQTPDSLAVSLGQRATISCRASESVDNYGISFMHWYQQKPGQSPKLLIYRASNLESGIPARFSGSGSRTDFTLTINPVETDDVATYYCQQNNKDPPTFGGGTKLEIKGGGGSGGGGSGGGGSGGGGSQVQLQQSGAELVKPGASVKISCKASGYAFSSYWMNWVKQRPGKGLEWIGQIYPGDGDTTYNGKFKGKATLTADKSSSTVYMQLNSLTSEDSAVYFCVRYYYGSSGYFDYWGQGTTLTVSSTRGMRTEDLPKAVVFLEPQWYRVLEKDSVTLKCQGAYSPEDNSTQWFHNESLISSQASSYFIDAATVDDSGEYRCQTNLSTLSDPVQLEVHIGWLLLQAPRWVFKEEDPIHLRCHSWKNTALHKVTYLQNGKGRKYFHHNSDFYIPKATLKDSGSYFCRGLVGSKNVSSETVNITITQGLAVPTISSFFPPGYQVSFCLVMVLLFAVDTGLYFS

SEQ ID NO: 10054 - protein, 477 aa, synthetic construct
MALPVTALLLPLALLLHAARPDVQMIQTPSSLSASLGDRVTISCRASQDIGNYLNWYQQKPDGTVKLLIYYTSRLHSGVPSRFSGSGSGTEYSLTISNLEQEDIATYFCQQGSALPPTFGGGTKLEINGGGGSGGGGSGGGGSALQLQQSGAELVRPGASVTLSCKASGYTFTDYEMHWVKQTPVHGLEWIGAIDPETGGTAYNQKFEGKAILTADKSSSTAYMELRSLTSEDSPVYYCARRRYYGSSSFDYWGQGTTLTVSSTRGMRTEDLPKAVVFLEPQWYRVLEKDSVTLKCQGAYSPEDNSTQWFHNESLISSQASSYFIDAATVDDSGEYRCQTNLSTLSDPVQLEVHIGWLLLQAPRWVFKEEDPIHLRCHSWKNTALHKVTYLQNGKGRKYFHHNSDFYIPKATLKDSGSYFCRGLVGSKNVSSETVNITITQGLAVPTISSFFPPGYQVSFCLVMVLLFAVDTGLYFS

SEQ ID NO: 10055 - protein, 479 aa, synthetic construct
MALPVTALLLPLALLLHAARPDIVLTQSPATLSLSPGDRATISCRASESVTILGSHLIYWYQQKPGQPPRLLIQLASNVQTGVPARFSGSGSRTDFTLTISSVEPEDFAVYYCLQSRTIPRTFGQGTKLEIKRGGGGSGGGGSGGGGSQVQLVQSGPEVKKPGESVKISCKASGYTFRHYSMNWVKQAPGQGLKWMGRINTESGVPIYADDFKGRFSFTVDTSASTAYLEISSLTSEDTAVYFCSNDYLYSLDFWGQGTTLTVSSTRGMRTEDLPKAVVFLEPQWYRVLEKDSVTLKCQGAYSPEDNSTQWFHNESLISSQASSYFIDAATVDDSGEYRCQTNLSTLSDPVQLEVHIGWLLLQAPRWVFKEEDPIHLRCHSWKNTALHKVTYLQNGKGRKYFHHNSDFYIPKATLKDSGSYFCRGLVGSKNVSSETVNITITQGLAVPTISSFFPPGYQVSFCLVMVLLFAVDTGLYFS

SEQ ID NO: 10056 - protein, 479 aa, synthetic construct
MALPVTALLLPLALLLHAARPDIQMTQSPSSLSASVGDRVTITCSASQDISNYLNWYQQKPGKAPKLLIYYTSNLHSGVPSRFSGSGSGTDFTLTISSLQPEDFATYYCQQYRKLPWTFGQGTKLEIKRGGGGSGGGGSGGGGSQVQLVQSGAEVKKPGSSVKVSCKASGGTFSNYWMHWVRQAPGQGLEWMGATYRGHSDTYYNQKFKGRVTITADKSTSTAYMELSSLRSEDTAVYYCARGAIYDGYDVLDNWGQGTLVTVSSTRGMRTEDLPKAVVFLEPQWYRVLEKDSVTLKCQGAYSPEDNSTQWFHNESLISSQASSYFIDAATVDDSGEYRCQTNLSTLSDPVQLEVHIGWLLLQAPRWVFKEEDPIHLRCHSWKNTALHKVTYLQNGKGRKYFHHNSDFYIPKATLKDSGSYFCRGLVGSKNVSSETVNITITQGLAVPTISSFFPPGYQVSFCLVMVLLFAVDTGLYFS

SEQ ID NO: 10057 - protein, 484 aa, synthetic construct
MALPVTALLLPLALLLHAARPDIVMTQSPDSLAVSLGERATINCESSQSLLNSGNQKNYLTWYQQKPGQPPKPLIYWASTRESGVPDRFSGSGSGTDFTLTISSLQAEDVAVYYCQNDYSYPYTFGQGTKLEIKRGGGGSGGGGSGGGGSEVQLVQSGAEVKKPGESLKISCKGSGYSFTDYYMKWARQMPGKGLEWMGDIIPSNGATFYNQKFKGQVTISADKSISTTYLQWSSLKASDTAMYYCARSHLLRASWFAYWGQGTMVTVSSTRGMRTEDLPKAVVFLEPQWYRVLEKDSVTLKCQGAYSPEDNSTQWFHNESLISSQASSYFIDAATVDDSGEYRCQTNLSTLSDPVQLEVHIGWLLLQAPRWVFKEEDPIHLRCHSWKNTALHKVTYLQNGKGRKYFHHNSDFYIPKATLKDSGSYFCRGLVGSKNVSSETVNITITQGLAVPTISSFFPPGYQVSFCLVMVLLFAVDTGLYFS

SEQ ID NO: 10058 - protein, 479 aa, synthetic construct
MALPVTALLLPLALLLHAARPDIQMTQSTSSLSASLGDRVTISCSASQGINNYLNWYQQKPDGTVELLIYYTSTLQSGVPSRFSGSGSGTDYSLTISNLEPEDIGTYYCQQYSKLPRTFGGGTKLEIKGGGGSGGGGSGGGGSQVQLQQSGSELMMPGASVKISCKATGYTFSNYWIEWVKQRPGHGLEWIGEILPGTGRTIYNEKFKGKATFTADISSNTVQMQLSSLTSEDSAVYYCARRDYYGNFYYAMDYWGQGTSVTVSSTRGMRTEDLPKAVVFLEPQWYRVLEKDSVTLKCQGAYSPEDNSTQWFHNESLISSQASSYFIDAATVDDSGEYRCQTNLSTLSDPVQLEVHIGWLLLQAPRWVFKEEDPIHLRCHSWKNTALHKVTYLQNGKGRKYFHHNSDFYIPKATLKDSGSYFCRGLVGSKNVSSETVNITITQGLAVPTISSFFPPGYQVSFCLVMVLLFAVDTGLYFS

SEQ ID NO: 10059 - protein, 474 aa, synthetic construct
MALPVTALLLPLALLLHAARPDIQMTQSPASLSVSVGETVTITCRASENIYSNLAWYQQKQGKSPQLLVYAATNLADGVPSRFSGSGSGTQYSLKINSLQSEDFGSYYCQHFWGTWTFGGGTTLEIKGGGGSGGGGSGGGGSEVQLQQSGPELVKPGASVKMSCKASGYTFTDYYMKWMKQSHGKSLEWIGDINPNNGGTTYNQKFKGKATLTVDKSSSTAYMQLNSLTSEDSAVYYCARDYGYGYFDYWGQGTTLTVSSTRGMRTEDLPKAVVFLEPQWYRVLEKDSVTLKCQGAYSPEDNSTQWFHNESLISSQASSYFIDAATVDDSGEYRCQTNLSTLSDPVQLEVHIGWLLLQAPRWVFKEEDPIHLRCHSWKNTALHKVTYLQNGKGRKYFHHNSDFYIPKATLKDSGSYFCRGLVGSKNVSSETVNITITQGLAVPTISSFFPPGYQVSFCLVMVLLFAVDTGLYFS

SEQ ID NO: 10060 - protein, 478 aa, synthetic construct
MALPVTALLLPLALLLHAARPDEIVLTQSPATLSLSPGERATLSCSASSSVSYMHWYQQKPGQAPRLLIYDTSKLASGIPARFSGSGSGTDFTLTISSLEPEDVAVYYCFQGSVYPFTFGQGTKLEIKRGGGGSGGGGSGGGGSQVQLQESGPGLVKPSQTLSLTCTVSGGSISTSGMGVGWIRQHPGKGLEWIGHIWWDDDKRYNPALKSRVTISVDTSKNQFSLKLSSVTAADTAVYYCARMELWSYYFDYWGQGTLVTVSSTRGMRTEDLPKAVVFLEPQWYRVLEKDSVTLKCQGAYSPEDNSTQWFHNESLISSQASSYFIDAATVDDSGEYRCQTNLSTLSDPVQLEVHIGWLLLQAPRWVFKEEDPIHLRCHSWKNTALHKVTYLQNGKGRKYFHHNSDFYIPKATLKDSGSYFCRGLVGSKNVSSETVNITITQGLAVPTISSFFPPGYQVSFCLVMVLLFAVDTGLYFS

SEQ ID NO: 10061 - protein, 477 aa, synthetic construct
MALPVTALLLPLALLLHAARPDIQMTQTTSSLSASLGDRVTISCRASQDISKYLNWYQQKPDGTVKLLIYHTSRLHSGVPSRFSGSGSGTDYSLTISNLEQEDIATYFCQQGNTLPYTFGGGTKLEITGGGGSGGGGSGGGGSEVKLQESGPGLVAPSQSLSVTCTVSGVSLPDYGVSWIRQPPRKGLEWLGVIWGSETTYYNSALKSRLTIIKDNSKSQVFLKMNSLQTDDTAIYYCAKHYYYGGSYAMDYWGQGTSVTVSSTRGMRTEDLPKAVVFLEPQWYRVLEKDSVTLKCQGAYSPEDNSTQWFHNESLISSQASSYFIDAATVDDSGEYRCQTNLSTLSDPVQLEVHIGWLLLQAPRWVFKEEDPIHLRCHSWKNTALHKVTYLQNGKGRKYFHHNSDFYIPKATLKDSGSYFCRGLVGSKNVSSETVNITITQGLAVPTISSFFPPGYQVSFCLVMVLLFAVDTGLYFS

SEQ ID NO: 10062 - protein, 477 aa, synthetic construct
MALPVTALLLPLALLLHAARPEIVMTQSPATLSLSPGERATLSCRASQDISKYLNWYQQKPGQAPRLLIYHTSRLHSGIPARFSGSGSGTDYTLTISSLQPEDFAVYFCQQGNTLPYTFGQGTKLEIKGGGGSGGGGSGGGGSQVQLQESGPGLVKPSETLSLTCTVSGVSLPDYGVSWIRQPPGKGLEWIGVIWGSETTYYNSSLKSRVTISKDNSKNQVSLKLSSVTAADTAVYYCAKHYYYGGSYAMDYWGQGTLVTVSSTRGMRTEDLPKAVVFLEPQWYRVLEKDSVTLKCQGAYSPEDNSTQWFHNESLISSQASSYFIDAATVDDSGEYRCQTNLSTLSDPVQLEVHIGWLLLQAPRWVFKEEDPIHLRCHSWKNTALHKVTYLQNGKGRKYFHHNSDFYIPKATLKDSGSYFCRGLVGSKNVSSETVNITITQGLAVPTISSFFPPGYQVSFCLVMVLLFAVDTGLYFS

SEQ ID NO: 10063 - protein, 479 aa, synthetic construct
MALPVTALLLPLALLLHAARPEIVLTQSPATLSLSPGERATLSCRASQSVSSYLAWYQQKPGQAPRLLIYDASNRATGIPARFSGSGSGTDFTLTISSLEPEDFAVYYCQQRSNWPITFGQGTRLEIKGGGGSGGGGSGGGGSEVQLVESGGGLVQPGRSLRLSCAASGFTFNDYAMHWVRQAPGKGLEWVSTISWNSGSIGYADSVKGRFTISRDNAKKSLYLQMNSLRAEDTALYYCAKDIQYGNYYYGMDVWGQGTTVTVSSTRGMRTEDLPKAVVFLEPQWYRVLEKDSVTLKCQGAYSPEDNSTQWFHNESLISSQASSYFIDAATVDDSGEYRCQTNLSTLSDPVQLEVHIGWLLLQAPRWVFKEEDPIHLRCHSWKNTALHKVTYLQNGKGRKYFHHNSDFYIPKATLKDSGSYFCRGLVGSKNVSSETVNITITQGLAVPTISSFFPPGYQVSFCLVMVLLFAVDTGLYFS

SEQ ID NO: 10064 - protein, 482 aa, synthetic construct
MALPVTALLLPLALLLHAARPDIVMTQTPLSLPVTPGEPASISCRSSKSLLHSNGITYLYWYLQKPGQSPQLLIYQMSNLVSGVPDRFSGSGSGTDFTLKISRVEAEDVGVYYCAQNLELPYTFGGGTKVEIKRGGGGSGGGGSGGGGSQVQLVQSGAEVKKPGSSVKVSCKASGYAFSYSWINWVRQAPGQGLEWMGRIFPGDGDTDYNGKFKGRVTITADKSTSTAYMELSSLRSEDTAVYYCARNVFDGYWLVYWGQGTLVTVSSTRGMRTEDLPKAVVFLEPQWYRVLEKDSVTLKCQGAYSPEDNSTQWFHNESLISSQASSYFIDAATVDDSGEYRCQTNLSTLSDPVQLEVHIGWLLLQAPRWVFKEEDPIHLRCHSWKNTALHKVTYLQNGKGRKYFHHNSDFYIPKATLKDSGSYFCRGLVGSKNVSSETVNITITQGLAVPTISSFFPPGYQVSFCLVMVLLFAVDTGLYFS

SEQ ID NO: 10065 - protein, 483 aa, synthetic construct
MALPVTALLLPLALLLHAARPDIQMTQSPSSLSASVGDRVTITCRSSQSIVHSVGNTFLEWYQQKPGKAPKLLIYKVSNRFSGVPSRFSGSGSGTDFTLTISSLQPEDFATYYCFQGSQFPYTFGQGTKVEIKRGGGGSGGGGSGGGGSEVQLVESGGGLVQPGGSLRLSCAASGYEFSRSWMNWVRQAPGKGLEWVGRIYPGDGDTNYSGKFKGRFTISADTSKNTAYLQMNSLRAEDTAVYYCARDGSSWDWYFDVWGQGTLVTVSSTRGMRTEDLPKAVVFLEPQWYRVLEKDSVTLKCQGAYSPEDNSTQWFHNESLISSQASSYFIDAATVDDSGEYRCQTNLSTLSDPVQLEVHIGWLLLQAPRWVFKEEDPIHLRCHSWKNTALHKVTYLQNGKGRKYFHHNSDFYIPKATLKDSGSYFCRGLVGSKNVSSETVNITITQGLAVPTISSFFPPGYQVSFCLVMVLLFAVDTGLYFS

SEQ ID NO: 10066 - protein, 477 aa, synthetic construct
MALPVTALLLPLALLLHAARPEIVLTQSPGTLSLSPGERATLSCRASQSVGGYLAWYQQKPGQAPRLLIYDASNRATGIPARFSGSGSGTDFTLTISSLEPEDFAVYYCQQRNNWPPMYTFGQGTKLEIKRGGGGSGGGGSGGGGSQVQLVQSGAEVKKPGSSVKVSCKASGGTFSSYAISWVRQAPGQGLEWMGGIIPILGTANYAQKFQGRVTITADESTSTAYMELSSLRSEDTAVYYCARWGGGAFDIWGQGTMVTVSSTRGMRTEDLPKAVVFLEPQWYRVLEKDSVTLKCQGAYSPEDNSTQWFHNESLISSQASSYFIDAATVDDSGEYRCQTNLSTLSDPVQLEVHIGWLLLQAPRWVFKEEDPIHLRCHSWKNTALHKVTYLQNGKGRKYFHHNSDFYIPKATLKDSGSYFCRGLVGSKNVSSETVNITITQGLAVPTISSFFPPGYQVSFCLVMVLLFAVDTGLYFS

SEQ ID NO: 10067 - protein, 474 aa, synthetic construct
MALPVTALLLPLALLLHAARPDIQMTQSPATIENTSLSASVGDRVTITCRASQGISSWLTWYQQKPEKAPKSLIYAASSLQSGVPSRFSGSGSGTDFTLTISSLQPEDFATYYCQQYDSYPITFGQGTRLEIKGGGGSGGGGSGGGGSQVQLQQWGAGLLKPSETLSLTCAVYGGSFSAYYWSWIRQPPGKGLEWIGDINHGGGTNYNPSLKSRVTISVDTSKNQFSLKLNSVTAADTAVYYCASLTAYWGQGSLVTVSSTRGMRTEDLPKAVVFLEPQWYRVLEKDSVTLKCQGAYSPEDNSTQWFHNESLISSQASSYFIDAATVDDSGEYRCQTNLSTLSDPVQLEVHIGWLLLQAPRWVFKEEDPIHLRCHSWKNTALHKVTYLQNGKGRKYFHHNSDFYIPKATLKDSGSYFCRGLVGSKNVSSETVNITITQGLAVPTISSFFPPGYQVSFCLVMVLLFAVDTGLYFS

SEQ ID NO: 10068 - protein, 478 aa, synthetic construct
MALPVTALLLPLALLLHAARPEIVLTQSPDSLAVSLGERATINCKASQSVDFDGDSYLNWYQQKPGQPPKVLIYAASTLQSGVPSRFSGSGSGTDFTLTINSLEAEDAATYYCQQSNEDPWTFGGGTKVEIKGGGGSGGGGSGGGGSQVQLVQSGAEVKKPGASVKVSCKVSGYTFTDYYITWVRQAPGQALEWMGWIYPGSGNTKYSQKFQGRFVFSVDTSASTAYLQLSSLKAEDTAVYYCANYGNYWFAYWGQGTLVTVSSTRGMRTEDLPKAVVFLEPQWYRVLEKDSVTLKCQGAYSPEDNSTQWFHNESLISSQASSYFIDAATVDDSGEYRCQTNLSTLSDPVQLEVHIGWLLLQAPRWVFKEEDPIHLRCHSWKNTALHKVTYLQNGKGRKYFHHNSDFYIPKATLKDSGSYFCRGLVGSKNVSSETVNITITQGLAVPTISSFFPPGYQVSFCLVMVLLFAVDTGLYFS

SEQ ID NO: 10069 - protein, 476 aa, synthetic construct
MALPVTALLLPLALLLHAARPDIQMTQSPSSLSASVGDRVTITCRASQGISSWLAWYQQKPEKAPKSLIYAASSLQSGVPSRFSGSGSGTDFTLTISSLQPEDFATYYCQQYNSYPPTFGGGTKVEIKGGGGSGGGGSGGGGSEVQLVQSGGGLVHPGGSLRLSCAGSGFAFSSSTMHWIRQAPGKGLEWISLIGSGGGIYYGDSVKGRFTISRDNAKNSLYLQMNSLRAEDMAVYYCVRGYFDWVDYFDYWGQGTLVTVSSTRGMRTEDLPKAVVFLEPQWYRVLEKDSVTLKCQGAYSPEDNSTQWFHNESLISSQASSYFIDAATVDDSGEYRCQTNLSTLSDPVQLEVHIGWLLLQAPRWVFKEEDPIHLRCHSWKNTALHKVTYLQNGKGRKYFHHNSDFYIPKATLKDSGSYFCRGLVGSKNVSSETVNITITQGLAVPTISSFFPPGYQVSFCLVMVLLFAVDTGLYFS

SEQ ID NO: 10070 - protein, 482 aa, synthetic construct
MALPVTALLLPLALLLHAARPDVVMTQSPLSLPVTLGQPASISCRSSQSIVHSDGNTYLEWYQQRPGQSPRRLIYKVSNRFSGVPDRFSGSGSGTDFTLKISRVEAEDVGVYYCFQGSHAPWTFGGGTKVEIKGGGGSGGGGSGGGGSEVQLVESGGGLVQPGGSLRLSCAASGFTFSSYGMHWVRQAPGKGLEWVAYITTRSSTIYYADSVKGRFTISRDNAKNSLYLQMNSLRAEDTAVYYCTREPLTGYYAMDYWGQGTSVTVSSTRGMRTEDLPKAVVFLEPQWYRVLEKDSVTLKCQGAYSPEDNSTQWFHNESLISSQASSYFIDAATVDDSGEYRCQTNLSTLSDPVQLEVHIGWLLLQAPRWVFKEEDPIHLRCHSWKNTALHKVTYLQNGKGRKYFHHNSDFYIPKATLKDSGSYFCRGLVGSKNVSSETVNITITQGLAVPTISSFFPPGYQVSFCLVMVLLFAVDTGLYFS

SEQ ID NO: 10071 - protein, 472 aa, synthetic construct
MALPVTALLLPLALLLHAARPQIVLTQSPALMSASPGEKVTMTCSASSSVRYMYWYQQKPRSSPKPWIHLTSNLASGVPARFSGSGSGTSYSLTISSMEAEDAATYYCQQWSSHPFTFGSGTKLEIKGGGGSGGGGSGGGGSDVQLQESGPGLVKPSQSLSLTCTVTGFSITSDYSWNWIRQFPGNKLEWMGYISYSGHTSYNPSLESRISITRDTSKNQFFLQLNSVTTEDTATYYCTRGNWDVVYWGQGTLVTVSATRGMRTEDLPKAVVFLEPQWYRVLEKDSVTLKCQGAYSPEDNSTQWFHNESLISSQASSYFIDAATVDDSGEYRCQTNLSTLSDPVQLEVHIGWLLLQAPRWVFKEEDPIHLRCHSWKNTALHKVTYLQNGKGRKYFHHNSDFYIPKATLKDSGSYFCRGLVGSKNVSSETVNITITQGLAVPTISSFFPPGYQVSFCLVMVLLFAVDTGLYFS

SEQ ID NO: 10072 - protein, 481 aa, synthetic construct
MALPVTALLLPLALLLHAARPEIVLTQSPGSLAVSPGERVTMSCKSSQSVFFSSSQKNYLAWYQQIPGQSPRLLIYWASTRESGVPDRFTGSGSGTDFTLTISSVQPEDLAIYYCHQYLSSRTFGQGTKLEIKRGGGGSGGGGSGGGGSQVQLQQPGAEVVKPGASVKMSCKASGYTFTSYYIHWIKQTPGQGLEWVGVIYPGNDDISYNQKFQGKATLTADKSSTTAYMQLSSLTSEDSAVYYCAREVRLRYFDVWGQGTTVTVSSTRGMRTEDLPKAVVFLEPQWYRVLEKDSVTLKCQGAYSPEDNSTQWFHNESLISSQASSYFIDAATVDDSGEYRCQTNLSTLSDPVQLEVHIGWLLLQAPRWVFKEEDPIHLRCHSWKNTALHKVTYLQNGKGRKYFHHNSDFYIPKATLKDSGSYFCRGLVGSKNVSSETVNITITQGLAVPTISSFFPPGYQVSFCLVMVLLFAVDTGLYFS

SEQ ID NO: 10073 - protein, 485 aa, synthetic construct
MALPVTALLLPLALLLHAARPDIVMTQSPDSLTVSLGERTTINCKSSQSVLDSSKNKNSLAWYQQKPGQPPKLLLSWASTRESGIPDRFSGSGSGTDFTLTIDSLQPEDSATYYCQQSAHFPITFGQGTRLEIKGGGGSGGGGSGGGGSQVQLVQSGAEVKKPGASVKVSCKASGYTFTNYGMNWVKQAPGQGLKWMGWINTYTGEPTYADDFKGRVTMTSDTSTSTAYLELHNLRSDDTAVYYCARWSWSDGYYVYFDYWGQGTTVTVSSTRGMRTEDLPKAVVFLEPQWYRVLEKDSVTLKCQGAYSPEDNSTQWFHNESLISSQASSYFIDAATVDDSGEYRCQTNLSTLSDPVQLEVHIGWLLLQAPRWVFKEEDPIHLRCHSWKNTALHKVTYLQNGKGRKYFHHNSDFYIPKATLKDSGSYFCRGLVGSKNVSSETVNITITQGLAVPTISSFFPPGYQVSFCLVMVLLFAVDTGLYFS

SEQ ID NO: 10074 - protein, 485 aa, synthetic construct
MALPVTALLLPLALLLHAARPDVLLTQSPLSLPVTLGQPASISCRSSQTIVHSNGNTYLEWFQQRPGQSPRLLIYQVSNRFSGVPDRFSGSGSGTDFTLKISRVEAEDVGVYYCFQGSHVPRTFGGGTKVEIKRGGGGSGGGGSGGGGSQIQLVQSGSELKKPGASVKVSCKASGYTFTNYGMNWVRQAPGQGLKWMGWINTNTGEPKYAEEFKGRFALSLDTSVSTAYLQINSLKAEDTAVYFCARGYGNYARGAWLAYWGQGTLVTVSSTRGMRTEDLPKAVVFLEPQWYRVLEKDSVTLKCQGAYSPEDNSTQWFHNESLISSQASSYFIDAATVDDSGEYRCQTNLSTLSDPVQLEVHIGWLLLQAPRWVFKEEDPIHLRCHSWKNTALHKVTYLQNGKGRKYFHHNSDFYIPKATLKDSGSYFCRGLVGSKNVSSETVNITITQGLAVPTISSFFPPGYQVSFCLVMVLLFAVDTGLYFS

SEQ ID NO: 10075 - protein, 480 aa, synthetic construct
MALPVTALLLPLALLLHAARPDHIVLTQSPSSLSASLGDRVTISCRASQDISTYLNWYQQKPDGTVKLLIFYTSRLHAGVPSRFSGSGSGTHHSLTISNLEQEDIATYFCQQGNSLPFTFGSGTKLEIKRGGGGSGGGGSGGGGSQVQLKESGPELEKPGASVKISCKASGYSFTAYSMNWVKQNNGMSLEWIGSIDPYYGDTKYAQKFKGKATLTVDKASSTAYLQLKSLTSEDSAVYYCARRMITTGDWYFDVWGAGTTVTVSSTRGMRTEDLPKAVVFLEPQWYRVLEKDSVTLKCQGAYSPEDNSTQWFHNESLISSQASSYFIDAATVDDSGEYRCQTNLSTLSDPVQLEVHIGWLLLQAPRWVFKEEDPIHLRCHSWKNTALHKVTYLQNGKGRKYFHHNSDFYIPKATLKDSGSYFCRGLVGSKNVSSETVNITITQGLAVPTISSFFPPGYQVSFCLVMVLLFAVDTGLYFS

SEQ ID NO: 10076 - protein, 480 aa, synthetic construct; identical to SEQ ID NO: 10075

SEQ ID NO: 10077 - protein, 480 aa, synthetic construct
MALPVTALLLPLALLLHAARPDIVMTQSPDSLAVSLGERATINCRASKSVSTSGYSFMHWYQQKPGQPPKLLIYLASNLESGVPDRFSGSGSGTDFTLTISSLQAEDVAVYYCQHSREVPWTFGQGTKVEIKRGGGGSGGGGSGGGGSQVQLVQSGAEVKKPGASVKVSCKASGYTFTNYGMNWVRQAPGQGLEWMGWINTYTGEPTYADAFKGRFAFSLDTSTSTAYLQINSLRSDDTAVYYCARDYGDYGMDYWGQGTTVTVSSTRGMRTEDLPKAVVFLEPQWYRVLEKDSVTLKCQGAYSPEDNSTQWFHNESLISSQASSYFIDAATVDDSGEYRCQTNLSTLSDPVQLEVHIGWLLLQAPRWVFKEEDPIHLRCHSWKNTALHKVTYLQNGKGRKYFHHNSDFYIPKATLKDSGSYFCRGLVGSKNVSSETVNITITQGLAVPTISSFFPPGYQVSFCLVMVLLFAVDTGLYFS

SEQ ID NO: 10078 - protein, 476 aa, synthetic construct
MALPVTALLLPLALLLHAARPDIVMTQTPLTLSVTIGQPASISCKSSQSLLDSDGKTYLNWLLQRPGQSPERLIYLVSKLDSGVPDRFTGSGSGTDFTLKISRVEAEDLGVYCCWQGTHFPYTFGGGTKVEIKGGGGGSGGGGSGGGGSQVQLQQPGAELVRPGASVKLSCKASGYTFTSYWMNWVKQRPGQGLEWIGMIDPSDSETHYNHIFKDKATLTVDKSSSTAYLQLSSLTSEDSAVYYCARNLYLWGQGTSVTVSSTRGMRTEDLPKAVVFLEPQWYRVLEKDSVTLKCQGAYSPEDNSTQWFHNESLISSQASSYFIDAATVDDSGEYRCQTNLSTLSDPVQLEVHIGWLLLQAPRWVFKEEDPIHLRCHSWKNTALHKVTYLQNGKGRKYFHHNSDFYIPKATLKDSGSYFCRGLVGSKNVSSETVNITITQGLAVPTISSFFPPGYQVSFCLVMVLLFAVDTGLYFS

SEQ ID NO: 10079 - protein, 479 aa, synthetic construct
MALPVTALLLPLALLLHAARPDIQLTQSPSSLSASVGDRVTITCKASQSVDYEGDSFLNWYQQKPGKAPKLLIYAASNLESGVPSRFSGSGSGTDFTLTISSLQPEDFATYYCQQSNEDPLTFGQGTKVEIKRGGGGSGGGGSGGGGSEVQLVESGGGLVQPGGSLRLSCAASGYTFSSYWIEWVRQAPGKGLEWIGEILPGGGDTNYNEIFKGRATFSADTSKNTAYLQMNSLRAEDTAVYYCTRRVPIRLDYWGQGTLVTVSSTRGMRTEDLPKAVVFLEPQWYRVLEKDSVTLKCQGAYSPEDNSTQWFHNESLISSQASSYFIDAATVDDSGEYRCQTNLSTLSDPVQLEVHIGWLLLQAPRWVFKEEDPIHLRCHSWKNTALHKVTYLQNGKGRKYFHHNSDFYIPKATLKDSGSYFCRGLVGSKNVSSETVNITITQGLAVPTISSFFPPGYQVSFCLVMVLLFAVDTGLYFS

SEQ ID NO: 10080 - protein, 487 aa, synthetic construct
MALPVTALLLPLALLLHAARPDIVMSQSPSSLAVSVGEKVTMSCKSSQSLLHSSNQKNYLAWYQQKPGQSPKVLIYWASTRESGVPDRFTGSGSGTDFTLTITSVKSEDLAVYYCQQYYSYPWTFGGGTRLEIKRGGGGSGGGGSGGGGSEVQLQQSVAELVKPGASVKMSCKVSGYTLTDHTIHWMKQRPEQGLEWIGYIYPRDGITGYNEKFKGKATLTADTSSSTAYMQLNSLTSEDSAVYFCARWGYSYRNYAYYYDYWGQGTTLTVSSTRGMRTEDLPKAVVFLEPQWYRVLEKDSVTLKCQGAYSPEDNSTQWFHNESLISSQASSYFIDAATVDDSGEYRCQTNLSTLSDPVQLEVHIGWLLLQAPRWVFKEEDPIHLRCHSWKNTALHKVTYLQNGKGRKYFHHNSDFYIPKATLKDSGSYFCRGLVGSKNVSSETVNITITQGLAVPTISSFFPPGYQVSFCLVMVLLFAVDTGLYFS

SEQ ID NO: 10081 - protein, 484 aa, synthetic construct
MALPVTALLLPLALLLHAARPEIVLTQSPGTLSLSPGERATLSCRASQSVSSSYLAWYQQKPGQAPRLLIYGTSSRATGIPDRFSGSGSGTDFTLTISRLEPEDFAVYYCQQYGSSPFTFGGGTKVEIKRGGGGSGGGGSGGGGSQVQLQESGPGLAKPSETLSLTCTVSGDSITSYYWSWIRQPPGKGLEWIGYIYYSGSTNYNPSLKSRVTISVDTSKNQFSLKLSSVTAADTAVYYCARDQRRIAAAGTHFYGMDVWGQGTTVTVSSTRGMRTEDLPKAVVFLEPQWYRVLEKDSVTLKCQGAYSPEDNSTQWFHNESLISSQASSYFIDAATVDDSGEYRCQTNLSTLSDPVQLEVHIGWLLLQAPRWVFKEEDPIHLRCHSWKNTALHKVTYLQNGKGRKYFHHNSDFYIPKATLKDSGSYFCRGLVGSKNVSSETVNITITQGLAVPTISSFFPPGYQVSFCLVMVLLFAVDTGLYFS

SEQ ID NO: 10082 - protein, 474 aa, synthetic construct
MALPVTALLLPLALLLHAARPDIQMTQSPSSLSASVGDRVTITCRASQSISLWLNWYQQKPGKAPKLLIYAASTLQSGVPSRFSGSGSGTDFTLTISSLQPEDFATYYCQQYYTSPYTFGQGTKVEIKRGGGGSGGGGSGGGGSQVQLLESGGGLVQPGGSLRLSCAASGFTFSSYAMSWVRQAPGKGLEWVSVIRSSGSSTYYADSVKGRFTISRDNSKNTLYLQMNSLRAEDTAVYYCARGGGYFDYWGQGTLVTVSSTRGMRTEDLPKAVVFLEPQWYRVLEKDSVTLKCQGAYSPEDNSTQWFHNESLISSQASSYFIDAATVDDSGEYRCQTNLSTLSDPVQLEVHIGWLLLQAPRWVFKEEDPIHLRCHSWKNTALHKVTYLQNGKGRKYFHHNSDFYIPKATLKDSGSYFCRGLVGSKNVSSETVNITITQGLAVPTISSFFPPGYQVSFCLVMVLLFAVDTGLYFS

SEQ ID NO: 10083 - protein, 477 aa, synthetic construct
MALPVTALLLPLALLLHAARPDIQMTQSPSSLSASVGDRVTITCRASQSISSYLNWYQQKPGKAPKLLIYAVSTLQSGVPSRFSGSGSGTDFTLTISSLQPEDFATYYCQQSGTFPPTTFGQGTKVEIKRGGGGSGGGGSGGGGSQVQLLESGGGLVQPGGSLRLSCAASGFTFSSHGMHWVRQAPGKGLEWVSVISGSGSNTGYADSVKGRFTISRDNSKNTLYLQMNSLRAEDTAVYYCARQWGSYAFDSWGQGTLVTVSSTRGMRTEDLPKAVVFLEPQWYRVLEKDSVTLKCQGAYSPEDNSTQWFHNESLISSQASSYFIDAATVDDSGEYRCQTNLSTLSDPVQLEVHIGWLLLQAPRWVFKEEDPIHLRCHSWKNTALHKVTYLQNGKGRKYFHHNSDFYIPKATLKDSGSYFCRGLVGSKNVSSETVNITITQGLAVPTISSFFPPGYQVSFCLVMVLLFAVDTGLYFS

SEQ ID NO: 10084 - protein, 469 aa, synthetic construct
MALPVTALLLPLALLLHAARPMTQSPKFLLVSAGDRVTLTCKASQSVNNDVYWYQQEPGQSPKLLIYWASTRESGVPDRFTGSGSGTDFTLTISSVQAEDLAVYYCKQSYNLYTFGGGTKLEIKRGGGGSGGGGSGGGGSESGRGLVQPGGSRKLSCAASGFTFSTSGMHWVRQAPEKGLEWVAYISSGSTTIYHADTVKGRFTISRDNPKNTLFLQMTSLRSEDTAMYYCCARSGQFGNYFDYWGQGTTLTVSSTRGMRTEDLPKAVVFLEPQWYRVLEKDSVTLKCQGAYSPEDNSTQWFHNESLISSQASSYFIDAATVDDSGEYRCQTNLSTLSDPVQLEVHIGWLLLQAPRWVFKEEDPIHLRCHSWKNTALHKVTYLQNGKGRKYFHHNSDFYIPKATLKDSGSYFCRGLVGSKNVSSETVNITITQGLAVPTISSFFPPGYQVSFCLVMVLLFAVDTGLYFS

SEQ ID NO: 10085 - protein, 474 aa, synthetic construct
MALPVTALLLPLALLLHAARPQSPSSLAVSAGEKVTMSCKSSQSLLNSRTRKNYLAWYQQKPGQSPKLLIYWASTRESGVPDRFTGSGSGTDFTLTISSVQAEDLAVYYCKQSNLYTFGGGTKLEIKGGGGSGGGGSGGGGSQVQLEESGPELVKPGASVKLSCKASGYTFTEYIIHWVKQRSGQGLEWIGWFYPGSGSIKYNEKFKDKATLTADKSSSTVYMELSGLTSEDSAVYFCARHDGYSYFDYWGQGTTLTVSSTRGMRTEDLPKAVVFLEPQWYRVLEKDSVTLKCQGAYSPEDNSTQWFHNESLISSQASSYFIDAATVDDSGEYRCQTNLSTLSDPVQLEVHIGWLLLQAPRWVFKEEDPIHLRCHSWKNTALHKVTYLQNGKGRKYFHHNSDFYIPKATLKDSGSYFCRGLVGSKNVSSETVNITITQGLAVPTISSFFPPGYQVSFCLVMVLLFAVDTGLYFS

SEQ ID NO: 10086 - protein, 477 aa, synthetic construct
MALPVTALLLPLALLLHAARPDIQMTQSPSSLSASLGERVSLTCRATQELSGYLSWLQQKPDGTIKRLIYAASTLDSGVPKRFSGNRSGSDYSLTISSLESEDFADYYCLQYAIYPYTFGGGTKLEIKGGGGSGGGGSGGGGSEVQLQQSGPELVKPGASVKMSCKASGYTFTSYFIHWVKQKPGQGLEWIGFINPYNDGSKYNEKFKGKATLTSDKSSSTAYMELSSLTSEDSAVYYCTRDDGYYGYAMDYWGQGTSVTVSSTRGMRTEDLPKAVVFLEPQWYRVLEKDSVTLKCQGAYSPEDNSTQWFHNESLISSQASSYFIDAATVDDSGEYRCQTNLSTLSDPVQLEVHIGWLLLQAPRWVFKEEDPIHLRCHSWKNTALHKVTYLQNGKGRKYFHHNSDFYIPKATLKDSGSYFCRGLVGSKNVSSETVNITITQGLAVPTISSFFPPGYQVSFCLVMVLLFAVDTGLYFS

SEQ ID NO: 10087 - protein, 482 aa, synthetic construct
MALPVTALLLPLALLLHAARPDTIVLTQSPASLAVSLGQRATISCRASESVDSYGNSFMHWYQQKPGQPPKLLIYLASNLESGVPARFSGSGSRTDFTLTIDPVEADDAATYYCQQNNYDPWTFGGGTKLEIKGGGGSGGGGSGGGGSEVQLQQSGPELVKPGASVKMSCKASGYTFTSYVMHWVKQKPGQGLEWIGYINPYNDGTKYNEKFKGKATLTSDTSSSTAYMELNSLTSEDSAVYFCARPIYFDNDYFDYWGQGTTLKVSSTRGMRTEDLPKAVVFLEPQWYRVLEKDSVTLKCQGAYSPEDNSTQWFHNESLISSQASSYFIDAATVDDSGEYRCQTNLSTLSDPVQLEVHIGWLLLQAPRWVFKEEDPIHLRCHSWKNTALHKVTYLQNGKGRKYFHHNSDFYIPKATLKDSGSYFCRGLVGSKNVSSETVNITITQGLAVPTISSFFPPGYQVSFCLVMVLLFAVDTGLYFS

SEQ ID NO: 10088 - protein, 476 aa, synthetic construct
MALPVTALLLPLALLLHAARPDIQMTQSPSSLSASVGDRVTITCKASQDVGIAVAWYQQKPGKVPKLLIYWASTRHTGVPDRFSGSGSGTDFTLTISSLQPEDVATYYCQQYSSYPYTFGQGTKVEIKGGGGSGGGGSGGGGSEVQLVESGGGLVQPGGSLRLSCAASGFDFSRYWMSWVRQAPGKGLEWIGEINPDSSTINYAPSLKDKFIISRDNAKNSLYLQMNSLRAEDTAVYYCARPDGNYWYFDVWGQGTLVTVSSTRGMRTEDLPKAVVFLEPQWYRVLEKDSVTLKCQGAYSPEDNSTQWFHNESLISSQASSYFIDAATVDDSGEYRCQTNLSTLSDPVQLEVHIGWLLLQAPRWVFKEEDPIHLRCHSWKNTALHKVTYLQNGKGRKYFHHNSDFYIPKATLKDSGSYFCRGLVGSKNVSSETVNITITQGLAVPTISSFFPPGYQVSFCLVMVLLFAVDTGLYFS

SEQ ID NO: 10089 - protein, 477 aa, synthetic construct
MALPVTALLLPLALLLHAARPDIVMTQSQKSMSTSVGDRVSITCKASQDVITGVAWYQQKPGQSPKLLIYSASYRYTGVPDRFTGSGSGTDFTFTISNVQAEDLAVYYCQQHYSTPLTFGAGTKLELKGGGGSGGGGSGGGGSQVQLQQPGAELVRPGASVKLSCKASGYSFTTYWMNWVKQRPGQGLEWIGMIHPSDSETRLNQKFKDKATLTVDKSSSTAYMQLSSPTSEDSAVYYCARSTMIATRAMDYWGQGTSVTVSSTRGMRTEDLPKAVVFLEPQWYRVLEKDSVTLKCQGAYSPEDNSTQWFHNESLISSQASSYFIDAATVDDSGEYRCQTNLSTLSDPVQLEVHIGWLLLQAPRWVFKEEDPIHLRCHSWKNTALHKVTYLQNGKGRKYFHHNSDFYIPKATLKDSGSYFCRGLVGSKNVSSETVNITITQGLAVPTISSFFPPGYQVSFCLVMVLLFAVDTGLYFS

SEQ ID NO: 10090 - protein, 483 aa, synthetic construct
MALPVTALLLPLALLLHAARPQSVLTQPPSVSGAPGQRVTISCTGSGSNIGAPYDVSWYQQLPGTAPKLLIYHNNKRPSGVPDRFSGSKSGTSASLAITGLQAEDEADYYCATVEAGLSGSVFGGGTKLTVLGAGGGGSGGGGSGGGGSQVQLVQSGAEVKKPGASVKVSCKVSGYTLTELSIHWVRQAPGKGLEWMGGFDPEENEIVYAQRFQGRVTMTEDTSTDTAYMELSSLRSEDTAVYYCAIVGSFSPLTLGLWGQGTMVTVSSTRGMRTEDLPKAVVFLEPQWYRVLEKDSVTLKCQGAYSPEDNSTQWFHNESLISSQASSYFIDAATVDDSGEYRCQTNLSTLSDPVQLEVHIGWLLLQAPRWVFKEEDPIHLRCHSWKNTALHKVTYLQNGKGRKYFHHNSDFYIPKATLKDSGSYFCRGLVGSKNVSSETVNITITQGLAVPTISSFFPPGYQVSFCLVMVLLFAVDTGLYFS

SEQ ID NO: 10091 - protein, 483 aa, synthetic construct
MALPVTALLLPLALLLHAARPQSVLTQPPSVSGAPGQRVTISCTGSGSNIGAPYDVSWYQQLPGTAPKLLIYHNNKRPSGVPDRFSGSKSGTSASLAITGLQAEDEADYYCQSYDSSSISTIFGGGTKLTVLGAGGGGSGGGGSGGGGSQVQLVQSGAEVKKPGASVKVSCKVSGYTLTELSIHWVRQAPGKGLEWMGGFDPEENEIVYAQRFQGRVTMTEDTSTDTAYMELSSLRSEDTAVYYCAIVGSFSGIAYRPWGQGTMVTVSSTRGMRTEDLPKAVVFLEPQWYRVLEKDSVTLKCQGAYSPEDNSTQWFHNESLISSQASSYFIDAATVDDSGEYRCQTNLSTLSDPVQLEVHIGWLLLQAPRWVFKEEDPIHLRCHSWKNTALHKVTYLQNGKGRKYFHHNSDFYIPKATLKDSGSYFCRGLVGSKNVSSETVNITITQGLAVPTISSFFPPGYQVSFCLVMVLLFAVDTGLYFS

SEQ ID NO: 10092 - protein, 481 aa, synthetic construct
MALPVTALLLPLALLLHAARPDIQMTQSPSSLSASVGDRVTITCSASSSVSYMYWYQQKPGKAPKLLIYLTSNLASGVPSRFSGSGSGTDFTLTISSLQPEDFATYYCQQWRSNPFTFGQGTKLEIKRGGGGSGGGGSGGGGSQITLKESGPTLVKPTQTLTLTCTFSGFSLSTSGMGVGWIRQPPGKALEWLAHIWWDDVKRYSPSLKSRLTITKDTSKNQVVLTMTNMDPVDTATYYCARIVSFDNDVVSAMDYWGQGTLVTVSSTRGMRTEDLPKAVVFLEPQWYRVLEKDSVTLKCQGAYSPEDNSTQWFHNESLISSQASSYFIDAATVDDSGEYRCQTNLSTLSDPVQLEVHIGWLLLQAPRWVFKEEDPIHLRCHSWKNTALHKVTYLQNGKGRKYFHHNSDFYIPKATLKDSGSYFCRGLVGSKNVSSETVNITITQGLAVPTISSFFPPGYQVSFCLVMVLLFAVDTGLYFS

SEQ ID NO: 10093 - protein, 476 aa, synthetic construct
MALPVTALLLPLALLLHAARPEIVMTQSPATLSVSPGERATLSCKASQSVSNDVVWYQQKPGQAPRLLIYYASNRYTGIPARFSGSGSGTEFTLTISSLQSEDFAVYYCQQDYTSPWTFGQGTKLEIKRGGGGSGGGGSGGGGSQVQLVQSGAEVKKPGASVKVSCKASGYTFTNYGMNWVRQAPGQGLEWMGWINTYTGEPTYADDFKGRVTMTTDTSTSTAYMELRSLRSDDTAVYYCARIGDSSPSDYWGQGTLVTVSSTRGMRTEDLPKAVVFLEPQWYRVLEKDSVTLKCQGAYSPEDNSTQWFHNESLISSQASSYFIDAATVDDSGEYRCQTNLSTLSDPVQLEVHIGWLLLQAPRWVFKEEDPIHLRCHSWKNTALHKVTYLQNGKGRKYFHHNSDFYIPKATLKDSGSYFCRGLVGSKNVSSETVNITITQGLAVPTISSFFPPGYQVSFCLVMVLLFAVDTGLYFS

SEQ ID NO: 10094 - protein, 476 aa, synthetic construct
MALPVTALLLPLALLLHAARPDILLTQSPVILSVSPGERVSFSCRASQSIGTNIHWYQQRTNGSPRLLIKYASESISGIPSRFSGSGSGTDFTLSINSVESEDIADYYCQQNNNWPTTFGAGTKLELKGGGGSGGGGSGGGGSQVQLKQSGPGLVQPSQSLSITCTVSGFSLTNYGVHWVRQSPGKGLEWLGVIWSGGNTDYNTPFTSRLSINKDNSKSQVFFKMNSLQSNDTAIYYCARALTYYDYEFAYWGQGTLVTVSATRGMRTEDLPKAVVFLEPQWYRVLEKDSVTLKCQGAYSPEDNSTQWFHNESLISSQASSYFIDAATVDDSGEYRCQTNLSTLSDPVQLEVHIGWLLLQAPRWVFKEEDPIHLRCHSWKNTALHKVTYLQNGKGRKYFHHNSDFYIPKATLKDSGSYFCRGLVGSKNVSSETVNITITQGLAVPTISSFFPPGYQVSFCLVMVLLFAVDTGLYFS

SEQ ID NO: 10095 - protein, 476 aa, synthetic construct
MALPVTALLLPLALLLHAARPEIQLVQSGAEVKKPGESLRISCKGSGFNIEDYYIHWVRQMPGKGLEWMGRIDPENDETKYGPIFQGHVTISADTSINTVYLQWSSLKASDTAMYYCAFRGGVYWGQGTTVTVSSGGGGSGGGGSGGGGSDVVMTQSPDSLAVSLGERATINCKSSQSLLDSDGKTYLNWLQQKPGQPPKRLISLVSKLDSGVPDRFSGSGSGTDFTLTISSLQAEDVAVYYCWQGTHFPGTFGGGTKVEIKTRGMRTEDLPKAVVFLEPQWYRVLEKDSVTLKCQGAYSPEDNSTQWFHNESLISSQASSYFIDAATVDDSGEYRCQTNLSTLSDPVQLEVHIGWLLLQAPRWVFKEEDPIHLRCHSWKNTALHKVTYLQNGKGRKYFHHNSDFYIPKATLKDSGSYFCRGLVGSKNVSSETVNITITQGLAVPTISSFFPPGYQVSFCLVMVLLFAVDTGLYFS

SEQ ID NO: 10096 - protein, 484 aa, synthetic construct
MALPVTALLLPLALLLHAARPELQMTQSPSSLSASVGDRVTITCRASQSISSYLNWYQQKPGQPPKLLIYWASTRESGVPDRFSGSESGTNYTLTISSLQPEDFATYFCQQSDSLPITFGQGTRLDIQGGGGSGGGGSGGGGSEVQLLESGGGVVQPGRSLRLSCAASGFTFSSYGMHWVRQAPGKGLEWVAVISYDGSNKYYADSVKGRFTISRDNSKNTLYLQMNSLRAEDTAVYYCAKDMGWGSGWRPYYYYGMDVWGQGTTVTVSSTRGMRTEDLPKAVVFLEPQWYRVLEKDSVTLKCQGAYSPEDNSTQWFHNESLISSQASSYFIDAATVDDSGEYRCQTNLSTLSDPVQLEVHIGWLLLQAPRWVFKEEDPIHLRCHSWKNTALHKVTYLQNGKGRKYFHHNSDFYIPKATLKDSGSYFCRGLVGSKNVSSETVNITITQGLAVPTISSFFPPGYQVSFCLVMVLLFAVDTGLYFS

SEQ ID NO: 10097 - protein, 483 aa, synthetic construct
MALPVTALLLPLALLLHAARPELVMTQSPSSLTVTAGEKVTMSCKSSQSLLNSGNQKNYLTWYQQKPGQPPKLLIYWASTRESGVPDRFTGSGSGTDFTLTISSVQAEDLAVYYCQNDYSYPLTFGAGTKLEIKGGGGSGGGGSGGGGSEVQLLEQSGAELVRPGTSVKISCKASGYAFTNYWLGWVKQRPGHGLEWIGDIFPGSGNIHYNEKFKGKATLTADKSSSTAYMQLSSLTFEDSAVYFCARLRNWDEPMDYWGQGTTVTVSSTRGMRTEDLPKAVVFLEPQWYRVLEKDSVTLKCQGAYSPEDNSTQWFHNESLISSQASSYFIDAATVDDSGEYRCQTNLSTLSDPVQLEVHIGWLLLQAPRWVFKEEDPIHLRCHSWKNTALHKVTYLQNGKGRKYFHHNSDFYIPKATLKDSGSYFCRGLVGSKNVSSETVNITITQGLAVPTISSFFPPGYQVSFCLVMVLLFAVDTGLYFS

SEQ ID NO: 10098 - protein, 481 aa, synthetic construct
MALPVTALLLPLALLLHAARPDIQMTQSPSSLSASVGDRVTITCRASQSISSYLNWYQQKPGKAPKLLIYAASSLQSGVPSRFSGSGSGTDFTLTISSLQPEDLATYYCQQSYSTPFTFGPGTKVDIKGGGGSGGGGSGGGGSVHEVQLVQSGAEVKKPGSSVKVSCKASGGTFSSYAISWVRQAPGQGLEWMGGIIPIFGTANYAQKFQGRVTITADKSTSTAYMELSSLRSEDTAVYYCATFALFGFREQAFDIWGQGTTVTVSSTRGMRTEDLPKAVVFLEPQWYRVLEKDSVTLKCQGAYSPEDNSTQWFHNESLISSQASSYFIDAATVDDSGEYRCQTNLSTLSDPVQLEVHIGWLLLQAPRWVFKEEDPIHLRCHSWKNTALHKVTYLQNGKGRKYFHHNSDFYIPKATLKDSGSYFCRGLVGSKNVSSETVNITITQGLAVPTISSFFPPGYQVSFCLVMVLLFAVDTGLYFS

SEQ ID NO: 10099 - protein, 475 aa, synthetic construct
MALPVTALLLPLALLLHAARPYIHVTQSPSSLSVSIGDRVTINCQTSQGVGSDLHWYQHKPGRAPKLLIHHASSVEDGVPSRFSGTGFHTSFNLTINDLQADDIGTYYCQVLQSFGRGSRLDTKGGGGSGGGGSGGGGSRAHLVQSGTAMKKPGASVRVSCQTSGYTFTAHILFWFRQAPGRGLEWVGWIKPQYGAVNFGGGFRDRVTLTRDVYREIAYMDIRGLKPDDTAVYYCARDRSYGDSSWALDAWGQGTTVVVSATRGMRTEDLPKAVVFLEPQWYRVLEKDSVTLKCQGAYSPEDNSTQWFHNESLISSQASSYFIDAATVDDSGEYRCQTNLSTLSDPVQLEVHIGWLLLQAPRWVFKEEDPIHLRCHSWKNTALHKVTYLQNGKGRKYFHHNSDFYIPKATLKDSGSYFCRGLVGSKNVSSETVNITITQGLAVPTISSFFPPGYQVSFCLVMVLLFAVDTGLYFS

SEQ ID NO: 10100 - protein, 480 aa, synthetic construct
MALPVTALLLPLALLLHAARPDIVLTQSPLSLAVSLGQPAIISCKASQSVSFAGTSLMHWYHQKPGQQPRLLIYRASNLEAGVPDRFSGSGSKTDFTLTISPVEAEDAATYYCQQSREYPYTFGGGTKLEIKRGGGGSGGGGSGGGGSQVQLVQSGAEVVKPGASVKISCKASGYTFTGYFMNWVKQSPGQSLEWIGRIHPYDGDTFYNQKFQGKATLTVDKSSNTAHMELLSLTSEDFAVYYCTRYDGSRAMDYWGQGTTVTVSSTRGMRTEDLPKAVVFLEPQWYRVLEKDSVTLKCQGAYSPEDNSTQWFHNESLISSQASSYFIDAATVDDSGEYRCQTNLSTLSDPVQLEVHIGWLLLQAPRWVFKEEDPIHLRCHSWKNTALHKVTYLQNGKGRKYFHHNSDFYIPKATLKDSGSYFCRGLVGSKNVSSETVNITITQGLAVPTISSFFPPGYQVSFCLVMVLLFAVDTGLYFS

SEQ ID NO: 10101 - protein, 476 aa, synthetic construct
MALPVTALLLPLALLLHAARPDVVMTQTPLSLPVTPGEPASISCRSSQSLVHRNGNTYLHWYLQKPGQSPKLLIHKVSNRFSGVPDRFSGSGSGTDFTLKISRVEAEDLGVYFCSQSTHVPPLTFGAGTKLELKGGGGSGGGGSGGGGSEVQLVQSGAEVEKPGASVKISCKASGSSFTGYNMNWVRQNIGKSLEWIGAIDPYYGGTSYNQKFKGRATLTVDKSTSTAYMHLKSLRSEDTAVYYCVSGMEYWGQGTSVTVSSTRGMRTEDLPKAVVFLEPQWYRVLEKDSVTLKCQGAYSPEDNSTQWFHNESLISSQASSYFIDAATVDDSGEYRCQTNLSTLSDPVQLEVHIGWLLLQAPRWVFKEEDPIHLRCHSWKNTALHKVTYLQNGKGRKYFHHNSDFYIPKATLKDSGSYFCRGLVGSKNVSSETVNITITQGLAVPTISSFFPPGYQVSFCLVMVLLFAVDTGLYFS

SEQ ID NO: 10102 - protein, 474 aa, synthetic construct
MALPVTALLLPLALLLHAARPEIVMTQTPATLSVSAGERVTITCKASQSVSNDVTWYQQKPGQAPRLLIYSASNRYSGVPARFSGSGYGTEFTFTISSVQSEDFAVYFCQQDYSSFGQGTKLEIKRGGGGSGGGGSGGGGSQVQLVESGPGVVQPGRSLRISCAVSGFSVTNYGVHWVRQPPGKGLEWLGVIWAGGITNYNSAFMSRLTISKDNSKNTVYLQMNSLRAEDTAMYYCASRGGHYGYALDYWGQGTLVTVSSTRGMRTEDLPKAVVFLEPQWYRVLEKDSVTLKCQGAYSPEDNSTQWFHNESLISSQASSYFIDAATVDDSGEYRCQTNLSTLSDPVQLEVHIGWLLLQAPRWVFKEEDPIHLRCHSWKNTALHKVTYLQNGKGRKYFHHNSDFYIPKATLKDSGSYFCRGLVGSKNVSSETVNITITQGLAVPTISSFFPPGYQVSFCLVMVLLFAVDTGLYFS

SEQ ID NO: 10103 - protein, 477 aa, synthetic construct
MALPVTALLLPLALLLHAARPDIQMTQTASSLPASLGDRVTISCSASQDISNYLNWYQQKPDGTVKLLIFYSSNLHSGVPSRFSGGGSGTDYSLTISNLEPEDIATYFCHQYSKLPWTFGGGTKLEIKRGGGGSGGGGSGGGGSEVTLVESGGDFVKPGGSLKVSCAASGFAFSHYAMSWVRQTPAKRLEWVAYISSGGSGTYYSDSVKGRFTISRDNAKNTLYLQMRSLRSEDSAMYFCTRVKLGTYYFDSWGQGTTLTVSSTRGMRTEDLPKAVVFLEPQWYRVLEKDSVTLKCQGAYSPEDNSTQWFHNESLISSQASSYFIDAATVDDSGEYRCQTNLSTLSDPVQLEVHIGWLLLQAPRWVFKEEDPIHLRCHSWKNTALHKVTYLQNGKGRKYFHHNSDFYIPKATLKDSGSYFCRGLVGSKNVSSETVNITITQGLAVPTISSFFPPGYQVSFCLVMVLLFAVDTGLYFS

SEQ ID NO: 10104 - protein, 479 aa, synthetic construct
MALPVTALLLPLALLLHAARPQFVLTQSPSASAALGASAKLTCTLSSAHKTYTIDWYQQQKGKAPRYLIQVKSDGTYTKATGVPDRFSGSSSGADRYLIIPSVQADDEADYYCGTDYTGGYVFGGGTQLTVTGGGGSGGGGSGGGGSEQLKESGGGLFKPTDTLTLTCTVSGFSLSYYGVNWVRQAPGNGLEWIGTIGGSGDTYYASWAKSRSTIIRNTNENTVTLKMTSLTAADTATYFCVRYANIGYEYFNVWGPGTLVTVSSTRGMRTEDLPKAVVFLEPQWYRVLEKDSVTLKCQGAYSPEDNSTQWFHNESLISSQASSYFIDAATVDDSGEYRCQTNLSTLSDPVQLEVHIGWLLLQAPRWVFKEEDPIHLRCHSWKNTALHKVTYLQNGKGRKYFHHNSDFYIPKATLKDSGSYFCRGLVGSKNVSSETVNITITQGLAVPTISSFFPPGYQVSFCLVMVLLFAVDTGLYFS

SEQ ID NO: 10105 - protein, 478 aa, synthetic construct
MALPVTALLLPLALLLHAARPDIQMTQSPSSLSASVGDRVTITCRASQGISSWLAWYQQKPEKAPKSLIYAASSLQSGVPSRFSGSGSGTDFTLTISSLQPEDFATYYCQQYNSYPPTFGGGTKVEIKGGGGSGGGGSGGGGSEVQLVESGGGLVQPGESLRLSCVASGFTFSRYKMNWVRQAPGKGLEWVSYISRSGRDIYYADSVKGRFTISRDNAKNSLYLQMNSLRDEDTAVYYCAGTVTTYYYFGMDVWGHGTTVTVSSTRGMRTEDLPKAVVFLEPQWYRVLEKDSVTLKCQGAYSPEDNSTQWFHNESLISSQASSYFIDAATVDDSGEYRCQTNLSTLSDPVQLEVHIGWLLLQAPRWVFKEEDPIHLRCHSWKNTALHKVTYLQNGKGRKYFHHNSDFYIPKATLKDSGSYFCRGLVGSKNVSSETVNITITQGLAVPTISSFFPPGYQVSFCLVMVLLFAVDTGLYFS

SEQ ID NO: 10106 - protein, 477 aa, synthetic construct
MALPVTALLLPLALLLHAARPQSVVTQPPSMSAAPGQQVTISCSGGNSNIERNYVSWYLQLPGTAPKLVIFDNDRRPSGIPDRFSGSKSGTSATLGITGLQTGDEADYYCGTWDSSLRGWVFGGGTKLTVLGGGGGSGGGGSGGGGSEVQLVESGGGLIQPGGSLRLSCAASGFTFSNYAMNWVRQAPGKGLEWVSTINGRGSSTIYADSVKGRFTISRDNSKNTLYLQMNSLRAEDTATYYCARYISRGLGDSWGQGTLVTVTRGMRTEDLPKAVVFLEPQWYRVLEKDSVTLKCQGAYSPEDNSTQWFHNESLISSQASSYFIDAATVDDSGEYRCQTNLSTLSDPVQLEVHIGWLLLQAPRWVFKEEDPIHLRCHSWKNTALHKVTYLQNGKGRKYFHHNSDFYIPKATLKDSGSYFCRGLVGSKNVSSETVNITITQGLAVPTISSFFPPGYQVSFCLVMVLLFAVDTGLYFS

SEQ ID NO: 10107 - protein, 478 aa, synthetic construct
MALPVTALLLPLALLLHAARPQSVLTQPPSASGTPGQRVTISCSGSRSNVGGNYVFWYQQVPGATPKLLIYRSNQRPSGVPDRFAGSKSGSSASLAISGLRSEDEADYYCATWDDSLSGFVFGTGTKVTVLGGGGGSGGGGSGGGGSEVQLVESGGGLVKPGGSLRLSCAASGFTFSDYYMSWIRQAPGKGLEWVSYISSSGSTIYYADSVKGRFTISRDNAKNSLYLQMNSLRAEDTAVYYCARGYGKAYDQWGQGTLVTVSSTRGMRTEDLPKAVVFLEPQWYRVLEKDSVTLKCQGAYSPEDNSTQWFHNESLISSQASSYFIDAATVDDSGEYRCQTNLSTLSDPVQLEVHIGWLLLQAPRWVFKEEDPIHLRCHSWKNTALHKVTYLQNGKGRKYFHHNSDFYIPKATLKDSGSYFCRGLVGSKNVSSETVNITITQGLAVPTISSFFPPGYQVSFCLVMVLLFAVDTGLYFS

SEQ ID NO: 10108 - protein, 477 aa, synthetic construct
MALPVTALLLPLALLLHAARPDIQMTQSPSSLSASVGDRVTITCRASQDVNTAVAWYQQKPGKAPKLLIYSASFLESGVPSRFSGSRSGTDFTLTISSLQPEDFATYYCQQHYTTPPTFGQTKVEIKRGGGGSGGGGSGGGGSEVQLVESGGGLVQPGGSLRLSCAASGFNIKDTYIHWVRQAPGKGLEWVARIYPTNGYTRYADSVKGRFTISADTSKNTAYLQMNSLRAEDTAVYYCSRWGGDGFYAMDVWGQGTLVTVSSTRGMRTEDLPKAVVFLEPQWYRVLEKDSVTLKCQGAYSPEDNSTQWFHNESLISSQASSYFIDAATVDDSGEYRCQTNLSTLSDPVQLEVHIGWLLLQAPRWVFKEEDPIHLRCHSWKNTALHKVTYLQNGKGRKYFHHNSDFYIPKATLKDSGSYFCRGLVGSKNVSSETVNITITQGLAVPTISSFFPPGYQVSFCLVMVLLFAVDTGLYFS

SEQ ID NO: 10109 - protein, 490 aa, synthetic construct
MALPVTALLLPLALLLHAARPQSALTQPPSASGSPGQSITISCTGTSNNFVSWYQQHAGKAPKLVIYDVNKRPSGVPDRFSGSKSGNTASLTVSGLQTDDEAVYYCGSLVGNWDVIFGGGTKLTVLGGGGSGGGGSGGGGSQPQLQESGPTLVEASETLSLTCAVSGDSTAACNSFWGWVRQPPGKGLEWVGSLSHCASYWNRGWTYHNPSLKSRLTLALDTPKNLVFLKLNSVTAADTATYYCARFGGEVLRYTDWPKPAWVDLWGRGTLVTVSSTRGMRTEDLPKAVVFLEPQWYRVLEKDSVTLKCQGAYSPEDNSTQWFHNESLISSQASSYFIDAATVDDSGEYRCQTNLSTLSDPVQLEVHIGWLLLQAPRWVFKEEDPIHLRCHSWKNTALHKVTYLQNGKGRKYFHHNSDFYIPKATLKDSGSYFCRGLVGSKNVSSETVNITITQGLAVPTISSFFPPGYQVSFCLVMVLLFAVDTGLYFS

SEQ ID NO: 10110 - protein, 485 aa, synthetic construct
MALPVTALLLPLALLLHAARPELVLTQSPGTLSLSAGERATLSCRASQSVSSGSLAWYQQKPGQAPRLLIYGASTRATGIPDRFSGSGSGTDFTLTIGRLEPEDLAVYYCQQYGTSPYTFGQGTKLEIGGGGSGGGGSGGGGSLEQSGAEVKKPGSSVQVSCKASGGTFSMYGFNWVRQAPGHGLEWMGGIIPIFGTSNYAQKFRGRVTFTADQATSTAYMELTNLRSDDTAVYYCARDFGPDWEDGDSYDGSGRGFFDFWGQGTLVTVSSTRGMRTEDLPKAVVFLEPQWYRVLEKDSVTLKCQGAYSPEDNSTQWFHNESLISSQASSYFIDAATVDDSGEYRCQTNLSTLSDPVQLEVHIGWLLLQAPRWVFKEEDPIHLRCHSWKNTALHKVTYLQNGKGRKYFHHNSDFYIPKATLKDSGSYFCRGLVGSKNVSSETVNITITQGLAVPTISSFFPPGYQVSFCLVMVLLFAVDTGLYFS

SEQ ID NO: 10111 - protein, 465 aa, synthetic construct
MALPVTALLLPLALLLHAARPDIQMTQSPSSLSASVGDRVTITCQASQDINNYLNWYQQKPGKAPKLLIYDASNLQTGVPSRFSGSGSGTDFTFTIEDIATYYCQQYTFGPGTKVDIKGGGGSGGGGSGGGGSEVQLLESGGGLVQPGGSLRLSCAASGFTFSWYSMTWVRQAPGKGLEWVSSIVPWGDFTQYADSVKGRFTISRDNSKNTLYLQMNSLRAEDTAVYYCAKGPGWGSFDLWGRGTLVTVSSTRGMRTEDLPKAVVFLEPQWYRVLEKDSVTLKCQGAYSPEDNSTQWFHNESLISSQASSYFIDAATVDDSGEYRCQTNLSTLSDPVQLEVHIGWLLLQAPRWVFKEEDPIHLRCHSWKNTALHKVTYLQNGKGRKYFHHNSDFYIPKATLKDSGSYFCRGLVGSKNVSSETVNITITQGLAVPTISSFFPPGYQVSFCLVMVLLFAVDTGLYFS

SEQ ID NO: 10112 - protein, 475 aa, synthetic construct
MALPVTALLLPLALLLHAARPDIQMTQSPSSLSASVGDRVTITCTASLSVSSTYLHWYQQKPGSSPKLWIYSTSNLASGVPSRFSGSGSGTSYTLTISSLQPEDFATYYCHQYHRSPLTFGGGTKVEIKRGGGGSGGGGSGGGGSEVQLVESGGGLVQPGGSLRLSCAASGFSLTKYGVHWVRQAPGKGLEWVGVKWAGGSTDYNSALMSRFTISKDNAKNSLYLQMNSLRAEDTAVYYCARDHRDAMDYWGQGTLVTVSSTRGMRTEDLPKAVVFLEPQWYRVLEKDSVTLKCQGAYSPEDNSTQWFHNESLISSQASSYFIDAATVDDSGEYRCQTNLSTLSDPVQLEVHIGWLLLQAPRWVFKEEDPIHLRCHSWKNTALHKVTYLQNGKGRKYFHHNSDFYIPKATLKDSGSYFCRGLVGSKNVSSETVNITITQGLAVPTISSFFPPGYQVSFCLVMVLLFAVDTGLYFS

SEQ ID NO: 10113 - protein, 479 aa, synthetic construct
MALPVTALLLPLALLLHAARPDIQMTQSPSSLSASVGDRVTITCKASQDVGTAVAWYQQKPGKAPKLLIYSASYRSTGVPSRFSGSGSGTDFTLTISSLQPEDFATYYCQHHYSAPWTFGGGTKVEIKGGGGSGGGGSGGGGSEVQLVESGGGLVQPGGSLRLSCAASGFTFSRNGMSWVRQAPGKGLEWVATVSSGGSYIYYADSVKGRFTISRDNAKNSLYLQMNSLRAEDTAVYYCARQGTTALATRFFDVWGQGTLVTVSSTRGMRTEDLPKAVVFLEPQWYRVLEKDSVTLKCQGAYSPEDNSTQWFHNESLISSQASSYFIDAATVDDSGEYRCQTNLSTLSDPVQLEVHIGWLLLQAPRWVFKEEDPIHLRCHSWKNTALHKVTYLQNGKGRKYFHHNSDFYIPKATLKDSGSYFCRGLVGSKNVSSETVNITITQGLAVPTISSFFPPGYQVSFCLVMVLLFAVDTGLYFS

SEQ ID NO: 10114 - protein, 475 aa, synthetic construct
MALPVTALLLPLALLLHAARPDIQMTQSFSSLSASVGDRVTITCRASQDISNYLNWYQQKPGKAPKLLIYYTSRLHSGVPSRFSGSGSGTDYTLTISSLQPEDFATYFCQQGNTLPWTFGGGTKLEIKRGGGGSGGGGSGGGGSEVQLVQSGGGLVQSGGSLRLSCRASGYTFTRYWMLWVRQRPGKGLEWVAEINPRNDRTNYNEKFKTRFTISVDRSKNTLYLQMDSLRAEDTAVYFCALGGGYAMDYWGQGTLVTVSSTRGMRTEDLPKAVVFLEPQWYRVLEKDSVTLKCQGAYSPEDNSTQWFHNESLISSQASSYFIDAATVDDSGEYRCQTNLSTLSDPVQLEVHIGWLLLQAPRWVFKEEDPIHLRCHSWKNTALHKVTYLQNGKGRKYFHHNSDFYIPKATLKDSGSYFCRGLVGSKNVSSETVNITITQGLAVPTISSFFPPGYQVSFCLVMVLLFAVDTGLYFS

SEQ ID NO: 10115 - protein, 475 aa, synthetic construct
MALPVTALLLPLALLLHAARPDIQMTQSPPSLSASVGGKVTITCKASQDIDRYMAWYQDKPGKGPKLLIHDTSTLQPGIPSRFSGSGSGRDYSFSISNLEPEDIATYYCLQYDNLWTFGGGTKLEIKRGGGGSGGGGSGGGGSQVQLVQSGAELVKPGASVKMSCKASGYIFTNYNIHWVKKSPGQGLEWIGAIYPGNGDAPYSQKFQDRATLTADTSSSTTYMELSSLTSEDSAVYYCVRANWDVAFAYWGQGTLVSVSSTRGMRTEDLPKAVVFLEPQWYRVLEKDSVTLKCQGAYSPEDNSTQWFHNESLISSQASSYFIDAATVDDSGEYRCQTNLSTLSDPVQLEVHIGWLLLQAPRWVFKEEDPIHLRCHSWKNTALHKVTYLQNGKGRKYFHHNSDFYIPKATLKDSGSYFCRGLVGSKNVSSETVNITITQGLAVPTISSFFPPGYQVSFCLVMVLLFAVDTGLYFS

SEQ ID NO: 10116 - protein, 476 aa, synthetic construct
MALPVTALLLPLALLLHAARPDIQMTQSPASLSASVGETVTITCRVSGNIHNYLAWYQQKQGKSPQLLVYNAKTLADGVPSRFSGSGSGTQYSLKINSLQPEDFGSYYCQHFWSNPYTFGGGTKLEIKGGGGSGGGGSGGGGSQVQLQQSGASVKVSCKASELVRPGTGYAFTNYLIEWVKQRPGQGLEWIGVINPGSGGTNYNEKFKGKATLTADKSSSTAYMQLSSLTSDDSAVYFCARYRSYDWYFDVWGAGTTVTVSSTRGMRTEDLPKAVVFLEPQWYRVLEKDSVTLKCQGAYSPEDNSTQWFHNESLISSQASSYFIDAATVDDSGEYRCQTNLSTLSDPVQLEVHIGWLLLQAPRWVFKEEDPIHLRCHSWKNTALHKVTYLQNGKGRKYFHHNSDFYIPKATLKDSGSYFCRGLVGSKNVSSETVNITITQGLAVPTISSFFPPGYQVSFCLVMVLLFAVDTGLYFS

SEQ ID NO: 10117 - protein, 476 aa, synthetic construct
MALPVTALLLPLALLLHAARPDIQMTQSPASLSASVGETVTIICRASVNIYSYLAWYQQKQGKSPQLLVYNAKILAEGVPSRFSGSGSGTQFSLKINSLQPEDFGSYYCQHHYGTFTFGSGTKLEIKRGGGGSGGGGSGGGGSQVQLKESGPGLVAPSQSLSITCTISGFSLTSYGVHWVRQPPGKGLEWLVVIWSDGSTTYNSALKSRLSISKDNSKSQVFLKMNSLQTDDTAIYYCASHYGSTLAFASWGHGTLVTVSAATRGMRTEDLPKAVVFLEPQWYRVLEKDSVTLKCQGAYSPEDNSTQWFHNESLISSQASSYFIDAATVDDSGEYRCQTNLSTLSDPVQLEVHIGWLLLQAPRWVFKEEDPIHLRCHSWKNTALHKVTYLQNGKGRKYFHHNSDFYIPKATLKDSGSYFCRGLVGSKNVSSETVNITITQGLAVPTISSFFPPGYQVSFCLVMVLLFAVDTGLYFS

SEQ ID NO: 10118 - protein, 484 aa, synthetic construct
MALPVTALLLPLALLLHAARPDIVMTQSHKFMSTSVGDRVSVTCKASQNVGNNVAWYQQKPGQSPKVLIYSASYRYSGVPDRFTGSGSGTDFTLTISNVQSEDLAEYFCQQYNTYPFTFGSGTKLEIKGGGGSGGGGSGGGGSEVQLEESGGGLVQPGGSMKLSCVASGFTFSNYWMNWVRQSPEKGLEWVAEIRFKSHNYATHFAESVKGRFTISRDDSKSSVYLQMNNLRAEDTGIYYCTRRIGNSDYDWWYFDVWGAGTSVTVSSASTRGMRTEDLPKAVVFLEPQWYRVLEKDSVTLKCQGAYSPEDNSTQWFHNESLISSQASSYFIDAATVDDSGEYRCQTNLSTLSDPVQLEVHIGWLLLQAPRWVFKEEDPIHLRCHSWKNTALHKVTYLQNGKGRKYFHHNSDFYIPKATLKDSGSYFCRGLVGSKNVSSETVNITITQGLAVPTISSFFPPGYQVSFCLVMVLLFAVDTGLYFS

SEQ ID NO: 10119 - protein, 476 aa, synthetic construct
MALPVTALLLPLALLLHAARPDIQMTQSSSSFSVSLGDRVTITCKASEDIYIRLAWYQQKPGNAPRLLISAATSLETGIPSRFSGSGSGEDYTLTITSLQTEDVATYYCQQYWTTPWTFGGGTKLEIKRGGGGSGGGGSGGGGSDVQLQESGPGLVKPSQSLSLTCTVTGYSITIDYTWNWIRQFPGNKLEWMGYITYSGSTDYNPSLKSRSSITRDTSMNQFFLQLNSVTTEDTATYYCARLGRRYALDYWGQGTSVTVSSTRGMRTEDLPKAVVFLEPQWYRVLEKDSVTLKCQGAYSPEDNSTQWFHNESLISSQASSYFIDAATVDDSGEYRCQTNLSTLSDPVQLEVHIGWLLLQAPRWVFKEEDPIHLRCHSWKNTALHKVTYLQNGKGRKYFHHNSDFYIPKATLKDSGSYFCRGLVGSKNVSSETVNITITQGLAVPTISSFFPPGYQVSFCLVMVLLFAVDTGLYFS

SEQ ID NO: 10120 - protein, 475 aa, synthetic construct
MALPVTALLLPLALLLHAARPDVQLQESGPGLVKPSQSLSLTCTVTGYSITSDYTWNWIRQFPGNKLEWMGYITYSGSTSYNPSLKSRNSITRDTSKNQFFLQLNSVTTEDTATYYCARLGRRYTMDYWGQGTSVTVSSGGGGSGGGGSGGGGSDIQMTQSSSSFSVSLGDRVTITCMASEDIYIRLAWYQQKPGNAPRLLISAATSLETGVPSRFSGSGSGKDYTLSITSLQTEDVGTYYCQQYWSSPWTFGGGTKLEINTRGMRTEDLPKAVVFLEPQWYRVLEKDSVTLKCQGAYSPEDNSTQWFHNESLISSQASSYFIDAATVDDSGEYRCQTNLSTLSDPVQLEVHIGWLLLQAPRWVFKEEDPIHLRCHSWKNTALHKVTYLQNGKGRKYFHHNSDFYIPKATLKDSGSYFCRGLVGSKNVSSETVNITITQGLAVPTISSFFPPGYQVSFCLVMVLLFAVDTGLYFS

SEQ ID NO: 10121 - protein, 475 aa, synthetic construct
MALPVTALLLPLALLLHAARPDIQMTQSSSSFSVSLGDRVTITCMASEDIYIRLAWYQQKPGNAPRLLISAATSLETGVPSRFSGSGSGKDYTLSITSLQTEDVGTYYCQQYWSSPWTFGGGTKLEINGGGGSGGGGSGGGGSDVQLQESGPGLVKPSQSLSLTCTVTGYSITSDYTWNWIRQFPGNKLEWMGYITYSGSTSYNPSLKSRNSITRDTSKNQFFLQLNSVTTEDTATYYCARLGRRYTMDYWGQGTSVTVSSTRGMRTEDLPKAVVFLEPQWYRVLEKDSVTLKCQGAYSPEDNSTQWFHNESLISSQASSYFIDAATVDDSGEYRCQTNLSTLSDPVQLEVHIGWLLLQAPRWVFKEEDPIHLRCHSWKNTALHKVTYLQNGKGRKYFHHNSDFYIPKATLKDSGSYFCRGLVGSKNVSSETVNITITQGLAVPTISSFFPPGYQVSFCLVMVLLFAVDTGLYFS

SEQ ID NO: 10122 - protein, 477 aa, synthetic construct
MALPVTALLLPLALLLHAARPDQIVLTQSPAIMSASPGEKVTISCSASSSVSYMYWYQQKPGSSPKPWIYRTSNLASGVPARFSGSGSGTSYSLTISNMEAEDAAAYYCQQYHSYPTTFGGGTKLEVKGGGGSGGGGSGGGGSEVQLVESGGGLVQPKGSLKLSCAASGFSFNTYAMNWVRQAPGKGLEWIAHIRSKSNNFATYYADSVKDRFSISRDASENILFLQMNNLKTEDTAMYYCVRQGGDFPMDYWGQGTSVTVSSTRGMRTEDLPKAVVFLEPQWYRVLEKDSVTLKCQGAYSPEDNSTQWFHNESLISSQASSYFIDAATVDDSGEYRCQTNLSTLSDPVQLEVHIGWLLLQAPRWVFKEEDPIHLRCHSWKNTALHKVTYLQNGKGRKYFHHNSDFYIPKATLKDSGSYFCRGLVGSKNVSSETVNITITQGLAVPTISSFFPPGYQVSFCLVMVLLFAVDTGLYFS

SEQ ID NO: 10123 - protein, 478 aa, synthetic construct
MALPVTALLLPLALLLHAARPDIQMTQSPSSLSASVGDRVTITCRASQSISSYLNWYQQKPGKAPKLLIYDASNLETGVPSRFSGSGSGTDFTFTISSLQPEDIATYYCQQYDNLPLTFGGGTKVDIKRGGGGSGGGGSGGGGSQVQLVESGGGVVQPGRSLRLSCAASGFTFSSYAMHWVRQAPGKGLEWVAVISYDGSNKYYADSVKGRFTISRDNSKNTLYLQMNSLRAEDTAVYYCARAHNSSSWSFDYWGQGTLVTVSSTRGMRTEDLPKAVVFLEPQWYRVLEKDSVTLKCQGAYSPEDNSTQWFHNESLISSQASSYFIDAATVDDSGEYRCQTNLSTLSDPVQLEVHIGWLLLQAPRWVFKEEDPIHLRCHSWKNTALHKVTYLQNGKGRKYFHHNSDFYIPKATLKDSGSYFCRGLVGSKNVSSETVNITITQGLAVPTISSFFPPGYQVSFCLVMVLLFAVDTGLYFS

SEQ ID NO: 10124 - protein, 487 aa, synthetic construct
MALPVTALLLPLALLLHAARPDVVMTQSPLSLPVSLGDQASISCRSSQRLVHSNGNTYLHWYLQKPGQSPKLLIYRVSNRFPGVPDRFSGSGSGTDFTLKISRVEAEDLGIYFCSQSTHVPYTFGGGTKLEIKRGGGGSGGGGSGGGGSEVRLQQSGPDLIKPGASVKMSCKASGYTFTGYVMHWVKQRPGQGLEWIGFINPYNDDIQSNERFRGKATLTSDKSSTTAYMELSSLTSEDSAVYYCARGAGYNFDGAYRFFDFWGQGTTLTVSSTRGMRTEDLPKAVVFLEPQWYRVLEKDSVTLKCQGAYSPEDNSTQWFHNESLISSQASSYFIDAATVDDSGEYRCQTNLSTLSDPVQLEVHIGWLLLQAPRWVFKEEDPIHLRCHSWKNTALHKVTYLQNGKGRKYFHHNSDFYIPKATLKDSGSYFCRGLVGSKNVSSETVNITITQGLAVPTISSFFPPGYQVSFCLVMVLLFAVDTGLYFS

SEQ ID NO: 10125 - protein, 478 aa, synthetic construct
MALPVTALLLPLALLLHAARPSYELTQPPSVSVSPGQTATISCSGDQLGGKYGHWYQKKPGQSPVLVLYQDRKRPAGIPERFSGSSSGNTITLTISGTQAVDEADYYCQAWDTNLGGVFGGGTKVTVLGQGGGGSGGGGSGGGGSQVQLVESGAEVKKPGASVKVSCKASGYTFTGYYMHWVRQAPGQGLEWMGRINPNSGGTNYAQKFQGRVTMTRDTSISTAYMELSRLRSDDTAVYYCASPRGRGSAFDIWGQGTLVTVSSTRGMRTEDLPKAVVFLEPQWYRVLEKDSVTLKCQGAYSPEDNSTQWFHNESLISSQASSYFIDAATVDDSGEYRCQTNLSTLSDPVQLEVHIGWLLLQAPRWVFKEEDPIHLRCHSWKNTALHKVTYLQNGKGRKYFHHNSDFYIPKATLKDSGSYFCRGLVGSKNVSSETVNITITQGLAVPTISSFFPPGYQVSFCLVMVLLFAVDTGLYFS

SEQ ID NO: 10126 - protein, 481 aa, synthetic construct
MALPVTALLLPLALLLHAARPNFMLTQPHSVSESPGKTVTISCTRSSGSIASKYVQWYQQRPGSSPTTVIYEDNQRPSGVPDRFSGSIDTSSNSASLTISGLRTEDEADYYCHSYDSNNHSVFGGGTKVTVLGQGGGGSGGGGSGGGGSEVQLVESGGGVVQPGGSLRLSCAASGFTFSSYAMSWVRQAPGKGLEWVSAISGSGGSTYYADSVKGRFSISRDNSKNTLYLQMNSLRAEDTAVYYCARTRSSGAFDIWGQGTLVTVSSTRGMRTEDLPKAVVFLEPQWYRVLEKDSVTLKCQGAYSPEDNSTQWFHNESLISSQASSYFIDAATVDDSGEYRCQTNLSTLSDPVQLEVHIGWLLLQAPRWVFKEEDPIHLRCHSWKNTALHKVTYLQNGKGRKYFHHNSDFYIPKATLKDSGSYFCRGLVGSKNVSSETVNITITQGLAVPTISSFFPPGYQVSFCLVMVLLFAVDTGLYFS

SEQ ID NO: 10127 - protein, 477 aa, synthetic construct
MALPVTALLLPLALLLHAARPDIQMNQSPSSLSASLGDTITITCHASQNINVWLSWYQQKPGNIPKLLIYKASNLHTGVPSRFSGSGSGTGFTITISSLQPEDIATYYCQQGQSYPWTFGGGTKLEIKRGGGGSGGGGSGGGGSEVQLQQSGPELVKPGASVKISCKASGYSFTGYFMNWVKQSHGKSLEYIGRFNPYNGETLYNQKFKGKATLTVDKSSSTVHMELLSVTSEDSAVYYCGRSGNDDAMDYWGQGTSVTVSSATRGMRTEDLPKAVVFLEPQWYRVLEKDSVTLKCQGAYSPEDNSTQWFHNESLISSQASSYFIDAATVDDSGEYRCQTNLSTLSDPVQLEVHIGWLLLQAPRWVFKEEDPIHLRCHSWKNTALHKVTYLQNGKGRKYFHHNSDFYIPKATLKDSGSYFCRGLVGSKNVSSETVNITITQGLAVPTISSFFPPGYQVSFCLVMVLLFAVDTGLYFS

SEQ ID NO: 10128 - protein, 474 aa, synthetic construct
MALPVTALLLPLALLLHAARPDILLTQSPAILSVSPGERVSFSCRASQNIGTSIHWYQQRTNGSPRLLIKYASESVSGIPSRFSGSGSGTDFTLSINSVESEDIADYYCQHTNSWPTTFGGGTKLEIKRGGGGSGGGGSGGGGSQVQLQQSDAELVKPGASVKISCKASGYTFTDHAIHWVKQKPEQGLEWIGYFSPGNGDIKYNEKFKGKATLTADKSSSTAYMQLNSLTSEDSAVYFCKRSYGNYDYWGQGTTLTVSSTRGMRTEDLPKAVVFLEPQWYRVLEKDSVTLKCQGAYSPEDNSTQWFHNESLISSQASSYFIDAATVDDSGEYRCQTNLSTLSDPVQLEVHIGWLLLQAPRWVFKEEDPIHLRCHSWKNTALHKVTYLQNGKGRKYFHHNSDFYIPKATLKDSGSYFCRGLVGSKNVSSETVNITITQGLAVPTISSFFPPGYQVSFCLVMVLLFAVDTGLYFS

SEQ ID NO: 10129 - protein, 479 aa, synthetic construct
MALPVTALLLPLALLLHAARPDIVMTQSPDSLAVSLGERATINCKSSQSLLNSGDQKNYLTWYQQKPGQPPKLLIYWASTRESGVPDRFSGSGSGTDFTLTISSLQAEDVAVYYCQNDYSYPLTFGQGTKVEIKGGGGSGGGGSGGGGSQVQLVQSGAEVKKTGSSVKVSCKASGYTFTDHAIHVWRQAPGQALEWMGHFSPGNTDIKYNDKFKGRVTLTVDRSMSTAYMELSSLRSEDTAMYYCKTSTFFFDYWGQGTMVTVSSTRGMRTEDLPKAVVFLEPQWYRVLEKDSVTLKCQGAYSPEDNSTQWFHNESLISSQASSYFIDAATVDDSGEYRCQTNLSTLSDPVQLEVHIGWLLLQAPRWVFKEEDPIHLRCHSWKNTALHKVTYLQNGKGRKYFHHNSDFYIPKATLKDSGSYFCRGLVGSKNVSSETVNITITQGLAVPTISSFFPPGYQVSFCLVMVLLFAVDTGLYFS

SEQ ID NO: 10130 - protein, 478 aa, synthetic construct
MALPVTALLLPLALLLHAARPDIQMTQSPSSLSASVGDRVTITCKASQDVSIAVAWYQQKPGKAPKVLIYSASYRYTGVPDRFSGSGSGTDFTFTISSLQPEDIAVYYCQQHYITPLTFGGGTKVEIKGGGGSGGGGSGGGGSQIQLVQSGHEVKKPGASVKVSCKASGYTFTNYGMNWVRQAPGQGLEWMGWINTKTGEPTYAEEFKGRFVFSLETSASTAYLQISSLKAEDTAMYFCGRGGYGSSYWYFDVWGQGTTVTVSSTRGMRTEDLPKAVVFLEPQWYRVLEKDSVTLKCQGAYSPEDNSTQWFHNESLISSQASSYFIDAATVDDSGEYRCQTNLSTLSDPVQLEVHIGWLLLQAPRWVFKEEDPIHLRCHSWKNTALHKVTYLQNGKGRKYFHHNSDFYIPKATLKDSGSYFCRGLVGSKNVSSETVNITITQGLAVPTISSFFPPGYQVSFCLVMVLLFAVDTGLYFS

SEQ ID NO: 10131 - protein, 481 aa, synthetic construct
MALPVTALLLPLALLLHAARPQAVVTQPPSASGTPGQRVTISCSGSSSNIGSNTVNWYQQVPGTAPKLLIYSNNQRPSGVPDRFSGSKSGTSASLAISGLQSEDEADYYCAAWDDSLNGWVFGGGTKLTVLGGGGSGGGGSGGGGSQMQLVQSGAEVKEPGESLRISCKGSGYSFTNFWISWVRQMPGKGLEWMGRVDPGYSYSTYSPSFQGHVTISADKSTSTAYLQWNSLKASDTAMYYCARVQYSGYYDWFDPWGQGTLVTVSSTRGMRTEDLPKAVVFLEPQWYRVLEKDSVTLKCQGAYSPEDNSTQWFHNESLISSQASSYFIDAATVDDSGEYRCQTNLSTLSDPVQLEVHIGWLLLQAPRWVFKEEDPIHLRCHSWKNTALHKVTYLQNGKGRKYFHHNSDFYIPKATLKDSGSYFCRGLVGSKNVSSETVNITITQGLAVPTISSFFPPGYQVSFCLVMVLLFAVDTGLYFS

SEQ ID NO: 10132 - protein, 475 aa, synthetic construct
MALPVTALLLPLALLLHAARPDIQMTQSPSTLSASVGDRVTITCRASQNINKWLAWYQQRPGKAPQLLIYKASSLESGVPSRFSGSGSGTEYTLTISSLQPDDFATYYCQQYNSYATFGQGTKVEIKRGGGGSGGGGSGGGGSQVQLVQSGAEVKKPGESLKISCKGSGYNFSNKWIGWVRQLPGRGLEWIAIIYPGYSDITYSPSFQGRVTISADTSINTAYLHWHSLKASDTAMYYCVRHTALAGFDYWGLGTLVTVSSTRGMRTEDLPKAVVFLEPQWYRVLEKDSVTLKCQGAYSPEDNSTQWFHNESLISSQASSYFIDAATVDDSGEYRCQTNLSTLSDPVQLEVHIGWLLLQAPRWVFKEEDPIHLRCHSWKNTALHKVTYLQNGKGRKYFHHNSDFYIPKATLKDSGSYFCRGLVGSKNVSSETVNITITQGLAVPTISSFFPPGYQVSFCLVMVLLFAVDTGLYFS

SEQ ID NO: 10133 - protein, 480 aa, synthetic construct
MALPVTALLLPLALLLHAARPQSVVTQPPSVSVAPGKTARITCGRNNIGSKSVHWYQQKPGQAPVLVVYDDSDRPSGIPERFSGSNSGNTATLTISRVEAGDEADYYCQVWDSSSDHVVFGGGTKLTVLGGGGGSGGGGSGGGGSEVQLVQSGGGVVRPGGSLRLSCAASGFTFDDYGMSWVRQAPGKGLEWVSGINWNGGSTGYADSVRGRFTISRDNAKNSLYLQMNSLRAEDTALYYCARERGYGYHDPHDYWGQGTLVTVSSTRGMRTEDLPKAVVFLEPQWYRVLEKDSVTLKCQGAYSPEDNSTQWFHNESLISSQASSYFIDAATVDDSGEYRCQTNLSTLSDPVQLEVHIGWLLLQAPRWVFKEEDPIHLRCHSWKNTALHKVTYLQNGKGRKYFHHNSDFYIPKATLKDSGSYFCRGLVGSKNVSSETVNITITQGLAVPTISSFFPPGYQVSFCLVMVLLFAVDTGLYFS

SEQ ID NO: 10134 - protein, 479 aa, synthetic construct
MALPVTALLLPLALLLHAARPDIVLTQSPASLAVSLGQRATISCRASESVDNYGNTFMHWYQQKPGQPPKLLIYRASNLESGIPARFSGSGSRTDFTLTINPVEADDVATYYCQQSNEDPPTFGAGTKLELKGGGGSGGGGSGGGGSQIQLVQSGPELKKPGETVKISCKASGYIFTNYGMNWVKQAPGKSFKWMGWINTYTGESTYSADFKGRFAFSLETSASTAYLHINDLKNEDTATYFCARSGGYDPMDYWGQGTSVTVSSTRGMRTEDLPKAVVFLEPQWYRVLEKDSVTLKCQGAYSPEDNSTQWFHNESLISSQASSYFIDAATVDDSGEYRCQTNLSTLSDPVQLEVHIGWLLLQAPRWVFKEEDPIHLRCHSWKNTALHKVTYLQNGKGRKYFHHNSDFYIPKATLKDSGSYFCRGLVGSKNVSSETVNITITQGLAVPTISSFFPPGYQVSFCLVMVLLFAVDTGLYFS

SEQ ID NO: 10135 - protein, 477 aa, synthetic construct
MALPVTALLLPLALLLHAARPEIVLTQSPGTLSLSPGERATLSCRASQSVSNTYLAWYHQRPGQAPRLLIYGASSRATGIPDRFSGSGSGTDFALTISSLEPEDFAVYYCQQYSNSWTFGQGTKVEIKRGGGGSGGGGSGGGGSQVQLVESGGGVVQPGRSLRLSCAASGFTFSSYDMHWVRQAPGKGLEWVAVISYDGTNEYYADSVKGRFTISRDTSKNTLYLQMNSLRAEDTAVYYCARERYFDWSFDYWGQGTLVSVSSTRGMRTEDLPKAVVFLEPQWYRVLEKDSVTLKCQGAYSPEDNSTQWFHNESLISSQASSYFIDAATVDDSGEYRCQTNLSTLSDPVQLEVHIGWLLLQAPRWVFKEEDPIHLRCHSWKNTALHKVTYLQNGKGRKYFHHNSDFYIPKATLKDSGSYFCRGLVGSKNVSSETVNITITQGLAVPTISSFFPPGYQVSFCLVMVLLFAVDTGLYFS

SEQ ID NO: 10136 - protein, 476 aa, synthetic construct
MALPVTALLLPLALLLHAARPELTQDPAVSVALGQTVRITCQGDSLRSNYANWYQQKPGQAPVLVIYGQNNRPSGIPDRFSGSSSGNTASLTITGAQAADEADYYCDSRVSTGNHVVFGGGTKLTVLGQGGGGSGGGGSGGGGSEVQLVQSGAEVKKPGASVKVSCKASGYTFTSYAMHWVRQAPGQRLEWMGWINAGNGNTKYSQKFQGRVTITRDTSASTAYMELSSLRSEDTAVYYCARDISYGSFDYWGQGTLVTVSSTRGMRTEDLPKAVVFLEPQWYRVLEKDSVTLKCQGAYSPEDNSTQWFHNESLISSQASSYFIDAATVDDSGEYRCQTNLSTLSDPVQLEVHIGWLLLQAPRWVFKEEDPIHLRCHSWKNTALHKVTYLQNGKGRKYFHHNSDFYIPKATLKDSGSYFCRGLVGSKNVSSETVNITITQGLAVPTISSFFPPGYQVSFCLVMVLLFAVDTGLYFS

SEQ ID NO: 10137 - protein, 472 aa, synthetic construct
MALPVTALLLPLALLLHAARPDIQMTQSPSSLSASVGDRVTITCSATSSISYMHWYQQKPGKAPKGWIYDTSKLAHGVPSRFSGSGSGTDFTLTISSLQPEDFATYYCHQRRSYPFTFGQGTKVEIKGGGGSGGGGSGGGGSEVQLVQSGAEVKKPGASVKVSCKASGYTFTNFWIHWVRQAPGQGLEWIGEIDPSDSYTNYNQKFKGRVTITRDTSTSTAYLELSSLRSEDTAVYYCAREITTVDYWGQGTLVTVSSTRGMRTEDLPKAVVFLEPQWYRVLEKDSVTLKCQGAYSPEDNSTQWFHNESLISSQASSYFIDAATVDDSGEYRCQTNLSTLSDPVQLEVHIGWLLLQAPRWVFKEEDPIHLRCHSWKNTALHKVTYLQNGKGRKYFHHNSDFYIPKATLKDSGSYFCRGLVGSKNVSSETVNITITQGLAVPTISSFFPPGYQVSFCLVMVLLFAVDTGLYFS

SEQ ID NO: 10138 - protein, 479 aa, synthetic construct
MALPVTALLLPLALLLHAARPDIQMTQSPSSLSASVGDRVTITCKASQGFNKYVAWYQQKPGKAPKLLIYYTSTLQPGVPSRFSGSGSGRDYTLTISSLQPEDFATYYCLQYGNLLYAFGQGTKVEIKRGGGGSGGGGSGGGGSEVQLVQSGAEVKKPGASVKVSCKASGYTFTSYWIGWVRQAPGQGLEWIGDIYPGGGYTNYNEKFKGRVTITRDTSTSTAYLELSSLRSEDTAVYYCARLDGSSYRGAMDSWGQGTLVTVSSTRGMRTEDLPKAVVFLEPQWYRVLEKDSVTLKCQGAYSPEDNSTQWFHNESLISSQASSYFIDAATVDDSGEYRCQTNLSTLSDPVQLEVHIGWLLLQAPRWVFKEEDPIHLRCHSWKNTALHKVTYLQNGKGRKYFHHNSDFYIPKATLKDSGSYFCRGLVGSKNVSSETVNITITQGLAVPTISSFFPPGYQVSFCLVMVLLFAVDTGLYFS

SEQ ID NO: 10139 - protein, 475 aa, synthetic construct
MALPVTALLLPLALLLHAARPDIQMTQSPSSLSASVGDRVTITCRASQDIRYYLNWYQQKPGKAPKLLIYVASSLQSGVPSRFSGSGSGTEFTLTVSSLQPEDFATYYCLQVYSTPRTFGQGTKVEIKGGGGSGGGGSGGGGSEVQLVESGGGLAKPGGSLRLSCAASGFRFTFNNYYMDWVRQAPGQGLEWVSRISSSGDPTWYADSVKGRFTISRENAKNTLFLQMNSLRAEDTAVYYCASLTTGSDSWGQGVLVTVSSTRGMRTEDLPKAVVFLEPQWYRVLEKDSVTLKCQGAYSPEDNSTQWFHNESLISSQASSYFIDAATVDDSGEYRCQTNLSTLSDPVQLEVHIGWLLLQAPRWVFKEEDPIHLRCHSWKNTALHKVTYLQNGKGRKYFHHNSDFYIPKATLKDSGSYFCRGLVGSKNVSSETVNITITQGLAVPTISSFFPPGYQVSFCLVMVLLFAVDTGLYFS

SEQ ID NO: 10140 - protein, 476 aa, synthetic construct
MALPVTALLLPLALLLHAARPEIVMTQSPATLSVSPGERATLSCRASQSVSRNLAWYQQKPGQAPRLLIYGASTRATGIPARFSGSGSGTEFTLTIGSLQSEDFAVYYCQQYKTWPRTFGQGTNVEIKGGGGSGGGGSGGGGSQVQLQQWGAGLLKPSETLSLTCAVFGGSFSGYYWSWIRQPPGKGLEWIGEINHRGNTNDNPSLKSRVTISVDTSKNQFALKLSSVTAADTAVYYCARERGYTYGNFDHWGQGTLVTVSSTRGMRTEDLPKAVVFLEPQWYRVLEKDSVTLKCQGAYSPEDNSTQWFHNESLISSQASSYFIDAATVDDSGEYRCQTNLSTLSDPVQLEVHIGWLLLQAPRWVFKEEDPIHLRCHSWKNTALHKVTYLQNGKGRKYFHHNSDFYIPKATLKDSGSYFCRGLVGSKNVSSETVNITITQGLAVPTISSFFPPGYQVSFCLVMVLLFAVDTGLYFS

SEQ ID NO: 10141 - protein, 482 aa, synthetic construct
MALPVTALLLPLALLLHAARPDIQMTQSPSSLSASVGDRVTITCKASKNIRSYLAWYQQKPGKAPKLLIYSGSTLHSGVPSRFSGSGSGTDFTLTISSLQPEDFATYYCQQHHEYPLTFGQGTKVEIKRGGGGSGGGGSGGGGSQVQLQESGPGLVKPSETLSLTCTVSGYTITSGYDWSWIRQPPGKGLEWIGYINYGGSTNYKPSLGSRVTISVDTSKNQFSLKLSSVTAADTAVYYCARYNEYKSYIYDWYFDFWGQGTLVTVSSTRGMRTEDLPKAVVFLEPQWYRVLEKDSVTLKCQGAYSPEDNSTQWFHNESLISSQASSYFIDAATVDDSGEYRCQTNLSTLSDPVQLEVHIGWLLLQAPRWVFKEEDPIHLRCHSWKNTALHKVTYLQNGKGRKYFHHNSDFYIPKATLKDSGSYFCRGLVGSKNVSSETVNITITQGLAVPTISSFFPPGYQVSFCLVMVLLFAVDTGLYFS

SEQ ID NO: 10142 - protein, 484 aa, synthetic construct
MALPVTALLLPLALLLHAARPQSVVTQPPSVSAAPGQKVTISCSGSSSNIGNNYVSWYQQLPGTAPKLLIYDNNKRPSGIPDRFSGSKSGTSATLGITGLQTGDEADYYCGTWDGSLYTMLFGGGTKLTVLGGGGSGGGGSGGGGSEVQLVESGGGLVKPGGSLRLSCAASGFTFSNAWMSWVRQAPGKGLEWVGFIRSKAYGGTTEYAASVKGRFTISRDDSKSIAYLQMNNLKTEDTAVYYCARDGLYSSSWYDSDYWGQGTLVTVSSTRGMRTEDLPKAVVFLEPQWYRVLEKDSVTLKCQGAYSPEDNSTQWFHNESLISSQASSYFIDAATVDDSGEYRCQTNLSTLSDPVQLEVHIGWLLLQAPRWVFKEEDPIHLRCHSWKNTALHKVTYLQNGKGRKYFHHNSDFYIPKATLKDSGSYFCRGLVGSKNVSSETVNITITQGLAVPTISSFFPPGYQVSFCLVMVLLFAVDTGLYFS

SEQ ID NO: 10143 - protein, 489 aa, synthetic construct
MALPVTALLLPLALLLHAARPQSVLTQPPSVSGAPGQRVTISCTGSSSNIGAGYDVHWYQQLPGTAPKLLIFGNSNRPSGVPDRFSGFKSGTSASLAITGLQAEDEADYFCQSYDSSLSGSGVFGTGTKVTVLGGGGGSGGGGSGGGGSQMQLVQSGGGLVQPGRSLRLSCAASGFTFDDYAMHWVRQAPGKGLEWVSGISWNSGSIGYADSVKGRFTISRDNAKNSLYLQMNSLRAEDTALYYCAKDIHSGSYYGLLYYAMDVWGQGTTVTVSSTRGMRTEDLPKAVVFLEPQWYRVLEKDSVTLKCQGAYSPEDNSTQWFHNESLISSQASSYFIDAATVDDSGEYRCQTNLSTLSDPVQLEVHIGWLLLQAPRWVFKEEDPIHLRCHSWKNTALHKVTYLQNGKGRKYFHHNSDFYIPKATLKDSGSYFCRGLVGSKNVSSETVNITITQGLAVPTISSFFPPGYQVSFCLVMVLLFAVDTGLYFS

SEQ ID NO: 10144 - protein, 489 aa, synthetic construct
MALPVTALLLPLALLLHAARPLPVLTQPPSASGTPGQRVTISCSGRSSNIGSNSVNWYRQLPGAAPKLLIYSNNQRPPGVPVRFSGSKSGTSASLAISGLQSEDEATYYCATWDDNLNVHYVFGTGTKVTVLGSRGGGGSGGGGSGGGGSLEMAQVQLVQSGAEVKKPGSSVKVSCKASGGTFSSYAISWVRQAPGQGLEWMGRIIPILGIANYAQKFQGRVTITADKSTSTAYMELSSLRSEDTAVYYCARGGYYSHDMWSEDWGQGTLVTVSSTRGMRTEDLPKAVVFLEPQWYRVLEKDSVTLKCQGAYSPEDNSTQWFHNESLISSQASSYFIDAATVDDSGEYRCQTNLSTLSDPVQLEVHIGWLLLQAPRWVFKEEDPIHLRCHSWKNTALHKVTYLQNGKGRKYFHHNSDFYIPKATLKDSGSYFCRGLVGSKNVSSETVNITITQGLAVPTISSFFPPGYQVSFCLVMVLLFAVDTGLYFS

SEQ ID NO: 10145 - protein, 478 aa, synthetic construct
MALPVTALLLPLALLLHAARPDIVLTQSPASLAVSLGERATINCRASESVSVIGAHLIHWYQQKPGQPPKLLIYLASNLETGVPARFSGSGSGTDFTLTISSLQAEDAAIYYCLQSRIFPRTFGQGTKLEIKGGGGSGGGGSGGGGSQVQLVQSGSELKKPGESVKISCKASGYTFTDYSINWVKQAPGQGLKWMGWINTETREPAYAYDFRGRFVFSLDTSASTAYLQISSLKAEDTAVYFCALDYSYAMDYWGQGTLVTVSSTRGMRTEDLPKAVVFLEPQWYRVLEKDSVTLKCQGAYSPEDNSTQWFHNESLISSQASSYFIDAATVDDSGEYRCQTNLSTLSDPVQLEVHIGWLLLQAPRWVFKEEDPIHLRCHSWKNTALHKVTYLQNGKGRKYFHHNSDFYIPKATLKDSGSYFCRGLVGSKNVSSETVNITITQGLAVPTISSFFPPGYQVSFCLVMVLLFAVDTGLYFS

SEQ ID NO: 10146 - protein, 479 aa, synthetic construct
MALPVTALLLPLALLLHAARPDIVLTQSPATLSLSPGDRATLSCRASESVTILGSHLIYWYQQKPGQAPRLLIQLASNVQTGIPARFSGSGSRTDFTLTISSLEPEDFAVYYCLQSRTIPRTFGQGTKLEIKRGGGGSGGGGSGGGGSQVQLVQSGSELKKPGESVKISCKASGYTFTHYSMNWVRQAPGQGLEWMGRINTETGEPLYADDFKGRFVFSLDTSASTAYLQISSLKAEDTAVYYCSNDYLYSLDYWGQGTLVTVSSTRGMRTEDLPKAVVFLEPQWYRVLEKDSVTLKCQGAYSPEDNSTQWFHNESLISSQASSYFIDAATVDDSGEYRCQTNLSTLSDPVQLEVHIGWLLLQAPRWVFKEEDPIHLRCHSWKNTALHKVTYLQNGKGRKYFHHNSDFYIPKATLKDSGSYFCRGLVGSKNVSSETVNITITQGLAVPTISSFFPPGYQVSFCLVMVLLFAVDTGLYFS

SEQ ID NO: 10147 - protein, 483 aa, synthetic construct
MALPVTALLLPLALLLHAARPDFVMTQSPDSLAVSLGERVTMSCKSSQSLLNSGNQKNYLTWYQQKPGQPPKLLIYWASTRESGVPDRFSGSGSGTDFTLTISSLQAEDVAVYYCQNDYSYPYTFGQGTKLEIKGGGGSGGGGSGGGGSEVQLVQSGAELKKPGASVKVSCKASGYTFTDYYMKWVRQAPGQGLEWIGDIIPSNGATFYNQKFKGRVTITVDKSTSTAYMELSSLRSEDTAVYYCARSHLLRASWFAYWGQGTLVTVSSTRGMRTEDLPKAVVFLEPQWYRVLEKDSVTLKCQGAYSPEDNSTQWFHNESLISSQASSYFIDAATVDDSGEYRCQTNLSTLSDPVQLEVHIGWLLLQAPRWVFKEEDPIHLRCHSWKNTALHKVTYLQNGKGRKYFHHNSDFYIPKATLKDSGSYFCRGLVGSKNVSSETVNITITQGLAVPTISSFFPPGYQVSFCLVMVLLFAVDTGLYFS

SEQ ID NO: 10148 - protein, 483 aa, synthetic construct
MALPVTALLLPLALLLHAARPDFVMTQSPDSLAVSLGERVTMSCKSSQSLLNSGNQKNYLTWYQQKPGQPPKLLIYWASTRESGVPDRFSGSGSGTDFTLTISSLQAEDVAVYYCQNDYSYPYTFGQGTKLEIKGGGGSGGGGSGGGGSQVQLVQSGAELKKPGASVKVSCKASGYTFTDYYMKWVRQAPGQGLEWIGDIIPSNGATFYNQKFKGRVTITVDKSTSTAYMELSSLRSEDTAVYYCARSHLLRASWFAYWGQGTLVTVSSTRGMRTEDLPKAVVFLEPQWYRVLEKDSVTLKCQGAYSPEDNSTQWFHNESLISSQASSYFIDAATVDDSGEYRCQTNLSTLSDPVQLEVHIGWLLLQAPRWVFKEEDPIHLRCHSWKNTALHKVTYLQNGKGRKYFHHNSDFYIPKATLKDSGSYFCRGLVGSKNVSSETVNITITQGLAVPTISSFFPPGYQVSFCLVMVLLFAVDTGLYFS

SEQ ID NO: 10149 - protein, 473 aa, synthetic construct
MALPVTALLLPLALLLHAARPDVQITQSPSYLAASPGETITINCRASKSISKDLAWYQEKPGKTNKLLIYSGSTLQSGIPSRFSGSGSGTDFTLTISSLEPEDFAMYYCQQHNKYPYTFGGGTKLEIKRGGGGSGGGGSGGGGSQVQLQQPGAELVRPGASVKLSCKASGYTFTSYWMNWVKQRPDQGLEWIGRIDPYDSETHYNQKFKDKAILTVDKSSSTAYMQLSSLTSEDSAVYYCARGNWDDYWGQGTTLTVSSTRGMRTEDLPKAVVFLEPQWYRVLEKDSVTLKCQGAYSPEDNSTQWFHNESLISSQASSYFIDAATVDDSGEYRCQTNLSTLSDPVQLEVHIGWLLLQAPRWVFKEEDPIHLRCHSWKNTALHKVTYLQNGKGRKYFHHNSDFYIPKATLKDSGSYFCRGLVGSKNVSSETVNITITQGLAVPTISSFFPPGYQVSFCLVMVLLFAVDTGLYFS

SEQ ID NO: 10150 - protein, 475 aa, synthetic construct
MALPVTALLLPLALLLHAARPEIVLTQSPTSMTASPGEQVTITCRASSSINYMHWYQQKPGASPRPWIYETSKLASGVPDRFSGSASGTSYSLTINNMEAEDAATYYCQQWNYPSWTFGGGTKLELKGGGGSGGGGSGGGGSEVQLVESGGGLVQPGRSLKLSCAASGFTFSDYNMAWVRQAPKKGLEWVATILYDGGRTYYRGSVKGRFTISRDNAKSTLYLRMDSLRSEDTATYYCATHSRGTDYFDYWGQGVMVTVSSTRGMRTEDLPKAVVFLEPQWYRVLEKDSVTLKCQGAYSPEDNSTQWFHNESLISSQASSYFIDAATVDDSGEYRCQTNLSTLSDPVQLEVHIGWLLLQAPRWVFKEEDPIHLRCHSWKNTALHKVTYLQNGKGRKYFHHNSDFYIPKATLKDSGSYFCRGLVGSKNVSSETVNITITQGLAVPTISSFFPPGYQVSFCLVMVLLFAVDTGLYFS

SEQ ID NO: 10151 - protein, 484 aa, synthetic construct
MALPVTALLLPLALLLHAARPDIVMTQSPSSLAVSEGETVTINCKSSQSFLSSGDGKNYVAWYQYKPGQSPKLLIYWASTRQSGVPDRFIGSGSGTDFTLTISTVQAEDLAIYYCQQYYDTPLTFGSGTKLEIKGGGGSGGGGSGGGGSEVKLQESGPSLVQSSQTLSLTCTVSGFSLTSYHIHWVRQTPGKGLEWMGVMWSDGDTSYNSALKSRLSISRDTSQSQVFLKMNSLQTEDTATYYCARGYYSSYLYLWFAYWGQGTLVTVSSTRGMRTEDLPKAVVFLEPQWYRVLEKDSVTLKCQGAYSPEDNSTQWFHNESLISSQASSYFIDAATVDDSGEYRCQTNLSTLSDPVQLEVHIGWLLLQAPRWVFKEEDPIHLRCHSWKNTALHKVTYLQNGKGRKYFHHNSDFYIPKATLKDSGSYFCRGLVGSKNVSSETVNITITQGLAVPTISSFFPPGYQVSFCLVMVLLFAVDTGLYFS

SEQ ID NO: 10152 - protein, 488 aa, synthetic construct
MALPVTALLLPLALLLHAARPDVLMTQTPVSLPVSLGGQVSISCRSSQSLVHSDGDTYLHWYLQKPGQSPQLLIYRVSNRFSGVPDRFSGSGSGTDFTLKISRVEPEDLGLYYCLQTTHFPPWTFGGGTKLEMKGGGGSGGGGSGGGGSQVQLQQSGPELRRPGSSVRLSCKASGYRIKDFLIHWIKNRPEHGLEWIGWIDPEDGETKYAQKFQTKATLTADTSSNTAYMQLSSLTSEDTATYFCARWGDVYYGLMRGHVMDAWGQGTSVTVSSTRGMRTEDLPKAVVFLEPQWYRVLEKDSVTLKCQGAYSPEDNSTQWFHNESLISSQASSYFIDAATVDDSGEYRCQTNLSTLSDPVQLEVHIGWLLLQAPRWVFKEEDPIHLRCHSWKNTALHKVTYLQNGKGRKYFHHNSDFYIPKATLKDSGSYFCRGLVGSKNVSSETVNITITQGLAVPTISSFFPPGYQVSFCLVMVLLFAVDTGLYFS

SEQ ID NO: 10153 - protein, 484 aa, synthetic construct
MALPVTALLLPLALLLHAARPDIVMTQAAPSIPVTPGESVSISCRSSKSLLNSNGNTYLYWFLQRPGQSPQLLIYRMSNLASGVPDRFSGSGSGTAFTLRISRVEAEDVGVYYCMQHLEYPFTFGAGTKLELKRGGGGSGGGGSGGGGSEVQLQQSGPELIKPGASVKMSCKASGYTFTSYVMHWVKQKPGQGLEWIGYINPYNDGTKYNEKFKGKATLTSDKSSSTAYMELSSLTSEDSAVYYCARGTYYYGSRVFDYWGQGTTLTVSSTRGMRTEDLPKAVVFLEPQWYRVLEKDSVTLKCQGAYSPEDNSTQWFHNESLISSQASSYFIDAATVDDSGEYRCQTNLSTLSDPVQLEVHIGWLLLQAPRWVFKEEDPIHLRCHSWKNTALHKVTYLQNGKGRKYFHHNSDFYIPKATLKDSGSYFCRGLVGSKNVSSETVNITITQGLAVPTISSFFPPGYQVSFCLVMVLLFAVDTGLYFS

SEQ ID NO: 10154 - protein, 484 aa, synthetic construct; identical to SEQ ID NO: 10153

SEQ ID NO: 10155 - protein, 502 aa, synthetic construct
MALPVTALLLPLALLLHAARPINIYNAEPANPSEKNSPEFDIVMTQSPATLSLSPGERATLSCRSSKSLQNVNGNTYLYWFQQKPGQSPQLLIYRMSNLNSGVPDRFSGSGSGTEFTLTISSLEPEDFAVYYCMQHLEYPITFGAGTKLEIKGGGGSGGGGSGGGGSEVQLVESGGGLVKPGGSLKLSCAASGYTFTSYVMHWVRQAPGKGLEWIGYINPYNDGTKYNEKFQGRVTISSDKSISTAYMELSSLRSEDTAMYYCARGTYYYGTRVFDYWGQGTLVTVSSTRGMRTEDLPKAVVFLEPQWYRVLEKDSVTLKCQGAYSPEDNSTQWFHNESLISSQASSYFIDAATVDDSGEYRCQTNLSTLSDPVQLEVHIGWLLLQAPRWVFKEEDPIHLRCHSWKNTALHKVTYLQNGKGRKYFHHNSDFYIPKATLKDSGSYFCRGLVGSKNVSSETVNITITQGLAVPTISSFFPPGYQVSFCLVMVLLFAVDTGLYFS

SEQ ID NO: 10156 - protein, 479 aa, synthetic construct
MALPVTALLLPLALLLHAARPDIQMTQSPSSLSASVGDRVTITCKASDHINNWLAWYQQKPGQAPKLLIYGATTLETGVPSRFSGSGSGTDYTLTISSLQPEDFATYYCQQSWNTPWTFGQGTKLEIKRGGGGSGGGGSGGGGSQVQLQQPGAELVKPGASVKMSCKASGYAFSSYWINWMKQKPGQGLEWIGQIYPGDGDTNYNGKFKGRATLTADTSSSTAYMQLSSLTSEDSAVYFCARSITTVVGCAMDYWGQGTSVTVSSTRGMRTEDLPKAVVFLEPQWYRVLEKDSVTLKCQGAYSPEDNSTQWFHNESLISSQASSYFIDAATVDDSGEYRCQTNLSTLSDPVQLEVHIGWLLLQAPRWVFKEEDPIHLRCHSWKNTALHKVTYLQNGKGRKYFHHNSDFYIPKATLKDSGSYFCRGLVGSKNVSSETVNITITQGLAVPTISSFFPPGYQVSFCLVMVLLFAVDTGLYFS

SEQ ID NO: 10157 - protein, 481 aa, synthetic construct
MALPVTALLLPLALLLHAARPQIVLSQSPAILSASPGEKVTMTCRASSSVSYMHWYQQKPGSSPKPWIYATSNLASGVPARFSGSGSGTSYSFTISRVEAEDAATYYCQQWTFNPPTFGGGTRLEIKRTVAAGGGGSGGGGSGGGGSQAYLQQSGAELVRPGASVKMSCKASGYTFTSYNMHWVKQTPRQGLEWIGGIYPGNGDTSYNQKFKGKATLTVGKSSSTAYMQLSSLTSEDSAVYFCARYDYNYAMDYWGQGTSVTVSSASTRGMRTEDLPKAVVFLEPQWYRVLEKDSVTLKCQGAYSPEDNSTQWFHNESLISSQASSYFIDAATVDDSGEYRCQTNLSTLSDPVQLEVHIGWLLLQAPRWVFKEEDPIHLRCHSWKNTALHKVTYLQNGKGRKYFHHNSDFYIPKATLKDSGSYFCRGLVGSKNVSSETVNITITQGLAVPTISSFFPPGYQVSFCLVMVLLFAVDTGLYFS

SEQ ID NO: 10158 - protein, 480 aa, synthetic construct
MALPVTALLLPLALLLHAARPDEIVLTQSPATLSLSPGERATLSCRASQSVSSYLAWYQQKPGQAPRLLIYDASNRATGIPARFSGSGSGTDFTLTISSLEPEDFAVYYCQQRSNWPITFGQGTRLEIKGGGGSGGGGSGGGGSEVQLVESGGGLVQPDRSLRLSCAASGFTFHDYAMHWVRQAPGKGLEWVSTISWNSGTIGYADSVKGRFTISRDNAKNSLYLQMNSLRAEDTALYYCAKDIQYGNYYYGMDVWGQGTTVTVSSTRGMRTEDLPKAVVFLEPQWYRVLEKDSVTLKCQGAYSPEDNSTQWFHNESLISSQASSYFIDAATVDDSGEYRCQTNLSTLSDPVQLEVHIGWLLLQAPRWVFKEEDPIHLRCHSWKNTALHKVTYLQNGKGRKYFHHNSDFYIPKATLKDSGSYFCRGLVGSKNVSSETVNITITQGLAVPTISSFFPPGYQVSFCLVMVLLFAVDTGLYFS

SEQ ID NO: 10159 - protein, 474 aa, synthetic construct
MALPVTALLLPLALLLHAARPDIQMTQSPSSLSASVGDRVTINCKASQDINSYLSWFQQKPGKAPKTLIYRANRLVDGVPSRFSGSGSGQDYTLTISSLQPEDFATYYCLQYDEFPLTFGGGTKVEIKGGGGSGGGGSGGGGSQVQLVQSGAEVKKPGASVKVSCKASGYTFTNYDINWVRQAPGQGLEWIGWIYPGDGSTKYNEKFKAKATLTADTSTSTAYMELRSLRSDDTAVYYCASGYEDAMDYWGQGTTVTVSSTRGMRTEDLPKAVVFLEPQWYRVLEKDSVTLKCQGAYSPEDNSTQWFHNESLISSQASSYFIDAATVDDSGEYRCQTNLSTLSDPVQLEVHIGWLLLQAPRWVFKEEDPIHLRCHSWKNTALHKVTYLQNGKGRKYFHHNSDFYIPKATLKDSGSYFCRGLVGSKNVSSETVNITITQGLAVPTISSFFPPGYQVSFCLVMVLLFAVDTGLYFS

SEQ ID NO: 10160 - protein, 476 aa, synthetic construct
MALPVTALLLPLALLLHAARPDIVMTQTPLSLSVTPGQPASISCKSSQSLLDGDGKTYLNWLLQKPGQSPQRLIYLVSKLDSGVPDRFSGSGSGTDFTLKISRVEAEDVGVYYCWQGTHFPRTFGQGTKLEIKGGGGSGGGGSGGGGSQVQLVQSGAEVKKPGASVKVSCKASGYTFKDTYIHWVRQAPGQGLEWMGRIDPANGNTKYDPKFQGRVTMTRDTSISTAYMELSRLRSDDTAVYYCARRGGVDWGQGTLVTVSSTRGMRTEDLPKAVVFLEPQWYRVLEKDSVTLKCQGAYSPEDNSTQWFHNESLISSQASSYFIDAATVDDSGEYRCQTNLSTLSDPVQLEVHIGWLLLQAPRWVFKEEDPIHLRCHSWKNTALHKVTYLQNGKGRKYFHHNSDFYIPKATLKDSGSYFCRGLVGSKNVSSETVNITITQGLAVPTISSFFPPGYQVSFCLVMVLLFAVDTGLYFS

SEQ ID NO: 10161 - protein, 477 aa, synthetic construct
MALPVTALLLPLALLLHAARPDIQMTQSPSSLSASVGDRVTITCKASQDVSTAVAWFQQKPGKAPKLLIYSPSYRYTGVPSRFSGSGSGTDFTLTISSLQPEDFTYYCQQLYSTPYTFGQGTKVEIKGGGGSGGGGSGGGGSEVQLVQSGAEVKKPGASVKVSCKASGYTFTDYYLDVVVRQAPGQGLEWIGRVNPYNGGTIYNQKFKGRVTLTRDTSTSTAYLELSSLRSEDTAVYYCARDHYRYDPLLDYWGQGTLVTVSSTRGMRTEDLPKAVVFLEPQWYRVLEKDSVTLKCQGAYSPEDNSTQWFHNESLISSQASSYFIDAATVDDSGEYRCQTNLSTLSDPVQLEVHIGWLLLQAPRWVFKEEDPIHLRCHSWKNTALHKVTYLQNGKGRKYFHHNSDFYIPKATLKDSGSYFCRGLVGSKNVSSETVNITITQGLAVPTISSFFPPGYQVSFCLVMVLLFAVDTGLYFS

SEQ ID NO: 10162 - protein, 483 aa, synthetic construct
MALPVTALLLPLALLLHAARPDIQMTQSPSSLSASVGDRVTITCRASQSVSTSSYNYMHWYQQKPGKPPKLLIKYASNLESGVPSRFSGSGSGTDFTLTISSLQPEDFATYYCQHSWEIPLTFGQGTKVEIKGGGGSGGGGSGGGGSEVQLVQSGAEVKKPGASVKVSCKASGYSFTDYYMHWVRQAPGQGLEWIGRINPYNGAAFYSQNFKDRVTLTVDTSTSTAYLELSSLRSEDTAVYYCAIERGADLEGYAMDYWGQGTLVTVSSTRGMRTEDLPKAVVFLEPQWYRVLEKDSVTLKCQGAYSPEDNSTQWFHNESLISSQASSYFIDAATVDDSGEYRCQTNLSTLSDPVQLEVHIGWLLLQAPRWVFKEEDPIHLRCHSWKNTALHKVTYLQNGKGRKYFHHNSDFYIPKATLKDSGSYFCRGLVGSKNVSSETVNITITQGLAVPTISSFFPPGYQVSFCLVMVLLFAVDTGLYFS

SEQ ID NO: 10163 - protein, 481 aa, synthetic construct
MALPVTALLLPLALLLHAARPEIVLTQSPATLSASPGERVTLTCRASSNVISSYVHWYQQKPGSSPRLFLYSTSNLASGVPSRFSGSGSGTDFTFTISSLEAEDAATYYCQQYSGYPLTFGQGTRLEIKGGGGSGGGGSGGGGSQVQLQESGPGLVKPSETLSLTCAVSGYSITSAYYWNWIRQPPGKGLEWIGYISYDGRNNYNPSLKNRITINPDTSKNQFSLQLNSVTPEDTAVYYCAREGDYDVGNYYAMDYWGQGTLVTVSSTRGMRTEDLPKAVVFLEPQWYRVLEKDSVTLKCQGAYSPEDNSTQWFHNESLISSQASSYFIDAATVDDSGEYRCQTNLSTLSDPVQLEVHIGWLLLQAPRWVFKEEDPIHLRCHSWKNTALHKVTYLQNGKGRKYFHHNSDFYIPKATLKDSGSYFCRGLVGSKNVSSETVNITITQGLAVPTISSFFPPGYQVSFCLVMVLLFAVDTGLYFS

SEQ ID NO: 10164 - protein, 481 aa, synthetic construct
MALPVTALLLPLALLLHAARPEIVLTQSPATLSLSPGERATLSCRASSNVISSYVHWYQQKPGQAPRLLIYSTSNLASGIPARFSGSGSGTDFTLTISSLEPEDFAVYYCQQYSGYPLTFGQGTRLEIKGGGGSGGGGSGGGGSEVQLVESGGGLVQPGRSLRLSCAASGYSITSAYYWNWVRQAPGKGLEWVSYISYDGRNNYNPSLKNRFTISRDNAKKSLYLQMNSLRAEDTALYYCAKEGDYDVGNYYAMDYWGQGTTVTVSSTRGMRTEDLPKAVVFLEPQWYRVLEKDSVTLKCQGAYSPEDNSTQWFHNESLISSQASSYFIDAATVDDSGEYRCQTNLSTLSDPVQLEVHIGWLLLQAPRWVFKEEDPIHLRCHSWKNTALHKVTYLQNGKGRKYFHHNSDFYIPKATLKDSGSYFCRGLVGSKNVSSETVNITITQGLAVPTISSFFPPGYQVSFCLVMVLLFAVDTGLYFS

SEQ ID NO: 10165 - protein, 490 aa, synthetic construct
MALPVTALLLPLALLLHAARPDVVMTQTPLSLPVSLGDQASISCRSSQSLVHSNGNTYLRWYLQKPGQSPKVLIYKVSNRVSGVPDRFSGSGSGTDFTLKINRVEAEDLGVYFCSQSTHVPWTFGGGTKLEIKSSADDAKKDAAKKDDAKKDDAKKDGGVKLDETGGGLVQPGGAMKLSCVTSGFTFGHYWMNWVRQSPEKGLEWVAQFRNKPYNYETYYSDSVKGRFTISRDDSKSSVYLQMNNLRVEDTGIYYCTGASYGMEYLGQGTSVTVSTTRGMRTEDLPKAVVFLEPQWYRVLEKDSVTLKCQGAYSPEDNSTQWFHNESLISSQASSYFIDAATVDDSGEYRCQTNLSTLSDPVQLEVHIGWLLLQAPRWVFKEEDPIHLRCHSWKNTALHKVTYLQNGKGRKYFHHNSDFYIPKATLKDSGSYFCRGLVGSKNVSSETVNITITQGLAVPTISSFFPPGYQVSFCLVMVLLFAVDTGLYFS

SEQ ID NO: 10166 - protein, 486 aa, synthetic construct
MALPVTALLLPLALLLHAARPQVQLVESGGNLVQPGGSLRLSCAASGFTFGSFSMSWVRQAPGGGLEWVAGLSARSSLTHYADSVKGRFTISRDNAKNSVYLQMNSLRVEDTAVYYCARRSYDSSGYWGHFYSYMDVWGQGTLVTVSGGGGSGGGGSGGGGSSVLTQPSSVSAAPGQKVTISCSGSTSNIGNNYVSWYQQHPGKAPKLMIYDVSKRPSGVPDRFSGSKSGNSASLDISGLQSEDEADYYCAAWDDSLSEFLFGTGTKLTVLGTRGMRTEDLPKAVVFLEPQWYRVLEKDSVTLKCQGAYSPEDNSTQWFHNESLISSQASSYFIDAATVDDSGEYRCQTNLSTLSDPVQLEVHIGWLLLQAPRWVFKEEDPIHLRCHSWKNTALHKVTYLQNGKGRKYFHHNSDFYIPKATLKDSGSYFCRGLVGSKNVSSETVNITITQGLAVPTISSFFPPGYQVSFCLVMVLLFAVDTGLYFS

SEQ ID NO: 10167 - protein, 477 aa, synthetic construct
MALPVTALLLPLALLLHAARPQSVVTQPPSVSGAPGQRVTISCTGSSSNIGAGYDVHWYQQLPGTAPKLLIYGNSNRPSGVPDRFSGSKSGTSASLAITGLQAEDEADYYCQSYDSSLSGSYVFGTGTKLTVLGGGGGSGGGGSGGGGSEVQLVETGGNLVQPGASLRLSCAASGFSFSGTAMHWVRQAPGKGLEWVSTISSTGRSTYYRDSVKGRFTISRDNSKNTLYLQMNSLRGEDTAVYYCARVSFDYWGQGTLVTVSSTRGMRTEDLPKAVVFLEPQWYRVLEKDSVTLKCQGAYSPEDNSTQWFHNESLISSQASSYFIDAATVDDSGEYRCQTNLSTLSDPVQLEVHIGWLLLQAPRWVFKEEDPIHLRCHSWKNTALHKVTYLQNGKGRKYFHHNSDFYIPKATLKDSGSYFCRGLVGSKNVSSETVNITITQGLAVPTISSFFPPGYQVSFCLVMVLLFAVDTGLYFS

SEQ ID NO: 10168 - protein, 479 aa, synthetic construct
MALPVTALLLPLALLLHAARPQSVVTQPASVSGSPGQSITISCTGTSSDVGGYNYVSWYQQHPGKAPKLMIYDVSKRPSGVSNRFSGSKSGNTASLTISGLQAEDEADYYCSSYTSSSTLVFGGGTKLTVLGGGGGSGGGGSGGGGSEVQLVESGGAFVQPGGSLRLSCAASGFTFSSYAMTWVRQAPGKGLEWVSTISGRGRSTFYADSVKGRFTISRDNSKNTLYLQMNSLRAEDTAVYYCARYYHAGAFDLWGQGTLVTVSSTRGMRTEDLPKAVVFLEPQWYRVLEKDSVTLKCQGAYSPEDNSTQWFHNESLISSQASSYFIDAATVDDSGEYRCQTNLSTLSDPVQLEVHIGWLLLQAPRWVFKEEDPIHLRCHSWKNTALHKVTYLQNGKGRKYFHHNSDFYIPKATLKDSGSYFCRGLVGSKNVSSETVNITITQGLAVPTISSFFPPGYQVSFCLVMVLLFAVDTGLYFS

SEQ ID NO: 10169 - protein, 481 aa, synthetic construct
MALPVTALLLPLALLLHAARPDVVMTQSPSSLSASVGDRVTITCQSSLDISHYLNWYQQKPGKAPKLLIYDASNLETGVPSRFSGSGSGTHFTFTISSLQPEDFATYYCQQYDNLPLTFGGGTKLEIKRGGGGSGGGGSGGGGSQVQLVQSGGGVVQPGGSLRVSCAASGVTLSDYGMHWVRQAPGKGLEWVAFIRNDGSDKYYADSVKGRFTISRDNSEKTVSLQMSSLRAEDTAVYYCAKNGESGPLDYWYLDLWGRGTLVTVSSTRGMRTEDLPKAVVFLEPQWYRVLEKDSVTLKCQGAYSPEDNSTQWFHNESLISSQASSYFIDAATVDDSGEYRCQTNLSTLSDPVQLEVHIGWLLLQAPRWVFKEEDPIHLRCHSWKNTALHKVTYLQNGKGRKYFHHNSDFYIPKATLKDSGSYFCRGLVGSKNVSSETVNITITQGLAVPTISSFFPPGYQVSFCLVMVLLFAVDTGLYFS

SEQ ID NO: 10170 - protein, 488 aa, synthetic construct
MALPVTALLLPLALLLHAARPDVMLTQTPLSLPVSLGDQASISCRSSQSILHSTGDTYLEWYLQKPGQSPKLLINKVSNRLSGVPDRFSGSGSGTDFTLKISRVEAEDLGVYYCFQGSHVPWTFGGGTKLEIKRADAAPTVSIFPGGGGSGGGGSGGGGSQVKLQQSGPSLVKPGASVKMSCKASGYTFTDFYMKWVKQSHGKSLEWIGDINPNIGDTFYNQKFKGKATLTVDKSSSTAYMQLNSLTSEDSAVYFCSVGYFDVWGAGTTVTVSSTRGMRTEDLPKAVVFLEPQWYRVLEKDSVTLKCQGAYSPEDNSTQWFHNESLISSQASSYFIDAATVDDSGEYRCQTNLSTLSDPVQLEVHIGWLLLQAPRWVFKEEDPIHLRCHSWKNTALHKVTYLQNGKGRKYFHHNSDFYIPKATLKDSGSYFCRGLVGSKNVSSETVNITITQGLAVPTISSFFPPGYQVSFCLVMVLLFAVDTGLYFS

SEQ ID NO: 10171 - protein, 488 aa, synthetic construct
MALPVTALLLPLALLLHAARPLPVLTQPPSVSVAPGKTARITCGGNNIGSKSVHWYQQKPGQAPVLVVYDDSDRPSGIPERFSGSNSGNTATLTISRVEAGDEADYYCQVWDSSSDYVVFGGGTKLTVLGGGGSGGGGSGGGGSEVQLVQSGAEVKKPGESLKISCKGSGYSFTSYWIGWVRQMPGKGLEWMGIIYPGDSDTRYSPSFQGQVTISADKSISTAYLQWSSLKASDTAMYYCARQVWGWQGGMYPRSNWWYNLDSWGQGTLVTVSSTRGMRTEDLPKAVVFLEPQWYRVLEKDSVTLKCQGAYSPEDNSTQWFHNESLISSQASSYFIDAATVDDSGEYRCQTNLSTLSDPVQLEVHIGWLLLQAPRWVFKEEDPIHLRCHSWKNTALHKVTYLQNGKGRKYFHHNSDFYIPKATLKDSGSYFCRGLVGSKNVSSETVNITITQGLAVPTISSFFPPGYQVSFCLVMVLLFAVDTGLYFS

SEQ ID NO: 10172 - protein, 481 aa, synthetic construct
MALPVTALLLPLALLLHAARPELVMTQSPASLAVSLGQRATISCRASESVDSYGKSFMHWYQLKPGQPPKLLIYRASNLESGVPARFSGSGSRTDFTLTIDPVEADDAATYYCQQNNEDPWTFGGGTKLEIKGGGGSGGGGSGGGGSEVQLEQSGPELVKPGASVKMSCKASGYTFTNYYMKWVKQSHGKSLEWIGDLNPNNGDTFYNQKFKGKATLTVDKSSNTAYMQLNSLTSEDSAVYYCARTGRYEENAMDYWGQGTSVTVSSTRGMRTEDLPKAVVFLEPQWYRVLEKDSVTLKCQGAYSPEDNSTQWFHNESLISSQASSYFIDAATVDDSGEYRCQTNLSTLSDPVQLEVHIGWLLLQAPRWVFKEEDPIHLRCHSWKNTALHKVTYLQNGKGRKYFHHNSDFYIPKATLKDSGSYFCRGLVGSKNVSSETVNITITQGLAVPTISSFFPPGYQVSFCLVMVLLFAVDTGLYFS

SEQ ID NO: 10173 - protein, 479 aa, synthetic construct; identical to SEQ ID NO: 10146

SEQ ID NO: 10174 - protein, 479 aa, synthetic construct; identical to SEQ ID NO: 10055

SEQ ID NO: 10175 - protein, 475 aa, synthetic construct
MALPVTALLLPLALLLHAARPDVVMTQSPSSLSASVGDRVTITCMASEDIYIRLAWYQQKPGNAPKLLIYAATSLETGVPSRFSGSGSGTDFTLTISSLQPEDFATYYCQQYWSSPWTFGGGTKVEIKGGGGSGGGGSGGGGSQVQLQESGPGLVKPSQTLSLTCTVSGYSITSDYTWNWIRQPPGNGLEWIGYITYSGSTSYNPSLKSRVLISVDTSKNQVSLKLSSVTAADTAVYYCARLGRRYTMDYWGQGTTVTVSSTRGMRTEDLPKAVVFLEPQWYRVLEKDSVTLKCQGAYSPEDNSTQWFHNESLISSQASSYFIDAATVDDSGEYRCQTNLSTLSDPVQLEVHIGWLLLQAPRWVFKEEDPIHLRCHSWKNTALHKVTYLQNGKGRKYFHHNSDFYIPKATLKDSGSYFCRGLVGSKNVSSETVNITITQGLAVPTISSFFPPGYQVSFCLVMVLLFAVDTGLYFS

SEQ ID NO: 10176 - protein, 480 aa, synthetic construct
MALPVTALLLPLALLLHAARPEVQLVESGGGLVQPGRSLRLSCAASGFTFDDYAMHWVRQAPGKGLEWVSGISWNSGSIGYADSVKGRFTISRDNAKNSLYLQMNSLRAEDTALYYCAKDKGGGYYDFWSGSDYWGQGTLVTVSSGGGGSGGGGSGGGGSSSELTQDPAVSVALGQTVRITCQGDSLRSYYASWYQQKPGQAPVLVIYGKNNRPSGIPDRFSGSSSGNTASLTITGAQAEDEADYYCNSRDSSGWVFGGGTKLTVLTRGMRTEDLPKAVVFLEPQWYRVLEKDSVTLKCQGAYSPEDNSTQWFHNESLISSQASSYFIDAATVDDSGEYRCQTNLSTLSDPVQLEVHIGWLLLQAPRWVFKEEDPIHLRCHSWKNTALHKVTYLQNGKGRKYFHHNSDFYIPKATLKDSGSYFCRGLVGSKNVSSETVNITITQGLAVPTISSFFPPGYQVSFCLVMVLLFAVDTGLYFS

SEQ ID NO: 10177 - protein, 489 aa, synthetic construct
MALPVTALLLPLALLLHAARPEVQLQQSGPGLVKPSQTLSLTCAISGDSVLSNSDTWNWIRQSPSRGLEWLGRTYHRSTWYDDYASSVRGRVSINVDTSKNQYSLQLNAVTPEDTGVYYCARDRLQDGNSWSDAFDVWGQGTMVTVSSGGGGSGGGGSGGGGSQSALTQPASVSGSPGQSITISCTGTSSDVGGYNYVSWYQQHPGKAPKLMIYDVSNRPSGVSNRFSGSKSGNTASLTISGLQAEDEADYYCSSYTSSSTLVYVFGTGTKVTVLTRGMRTEDLPKAVVFLEPQWYRVLEKDSVTLKCQGAYSPEDNSTQWFHNESLISSQASSYFIDAATVDDSGEYRCQTNLSTLSDPVQLEVHIGWLLLQAPRWVFKEEDPIHLRCHSWKNTALHKVTYLQNGKGRKYFHHNSDFYIPKATLKDSGSYFCRGLVGSKNVSSETVNITITQGLAVPTISSFFPPGYQVSFCLVMVLLFAVDTGLYFS

SEQ ID NO: 10178 - protein, 487 aa, synthetic construct
MALPVTALLLPLALLLHAARPQVQLVQSGAEVKKPGASVKVSCKASGYTFTSYDINWVRQATGQGLEWMGWMNPNSGNTGYAQKFQGRVTMTRNTSISTAYMELSSLRSEDTAVYYCARGDSNYWSYYGMDVWGQGTLVTVSSGGGGSGGGGSGGGGSGGGGSQSVLTQPRSVSGSPGQSVTISCTGTSSDVGGYNYVSWYQQHPGEAPKLIIYDADKRPSGISNRFSSGKSGNTASLTISGLQVEDEADYYCCSYAGGSTWVFGGGTKVTVLTRGMRTEDLPKAVVFLEPQWYRVLEKDSVTLKCQGAYSPEDNSTQWFHNESLISSQASSYFIDAATVDDSGEYRCQTNLSTLSDPVQLEVHIGWLLLQAPRWVFKEEDPIHLRCHSWKNTALHKVTYLQNGKGRKYFHHNSDFYIPKATLKDSGSYFCRGLVGSKNVSSETVNITITQGLAVPTISSFFPPGYQVSFCLVMVLLFAVDTGLYFS

SEQ ID NO: 10179 - protein, 489 aa, synthetic construct
MALPVTALLLPLALLLHAARPEVQLQQSGPGLVKPSQTLSLTCAISGDSVSSNSAAWNWIRQSPSRGLEWLGRTYYRSKWYSDYAVSVKSRITINPDTSKNQFSLQLNSVTPEDTAVYYCARDPYDFWSGYPDAFDIWGQGTMVTVSSGGGGSGGGGSGGGGSQSALTQPASVSGSPGQSITISCTGTSSDVGGYNYVSWYQQHPGKAPKVIISEVNNRPSGVSHRFSGSKSGNTASLTISGLQAEDEADYFCSSYTSGRTLYVFGTGSKVTVLGTRGMRTEDLPKAVVFLEPQWYRVLEKDSVTLKCQGAYSPEDNSTQWFHNESLISSQASSYFIDAATVDDSGEYRCQTNLSTLSDPVQLEVHIGWLLLQAPRWVFKEEDPIHLRCHSWKNTALHKVTYLQNGKGRKYFHHNSDFYIPKATLKDSGSYFCRGLVGSKNVSSETVNITITQGLAVPTISSFFPPGYQVSFCLVMVLLFAVDTGLYFS

SEQ ID NO: 10180 - protein, 488 aa, synthetic construct
MALPVTALLLPLALLLHAARPEVQLQQSGPGLVKPSQTLSLTCAISGDSMLSNSDTWNWIRQSPSRGLEWLGRTYHRSTWYDDYASSVRGRVSINVDTSKNQYSLQLNAVTPEDTGVYYCARVRLQDGNSWSDAFDVWGQGTMVTVSSGGGGSGGGGSGGGGSQSALTQPASASGSPGQSVTISCTGTSSDVGGYNYVSWYQQHPGKAPKLMIYDVSNRPSGVSNRFSGSKSGNTASLTISGLQAEDEADYYCSSYTSSSTLYVFGTGTQLTVLTRGMRTEDLPKAVVFLEPQWYRVLEKDSVTLKCQGAYSPEDNSTQWFHNESLISSQASSYFIDAATVDDSGEYRCQTNLSTLSDPVQLEVHIGWLLLQAPRWVFKEEDPIHLRCHSWKNTALHKVTYLQNGKGRKYFHHNSDFYIPKATLKDSGSYFCRGLVGSKNVSSETVNITITQGLAVPTISSFFPPGYQVSFCLVMVLLFAVDTGLYFS

SEQ ID NO: 10181 - protein, 479 aa, synthetic construct
MALPVTALLLPLALLLHAARPEIVLTQSPATLSLSPGERATLSCSASSSVSYMYWYQQKPGQAPRLLIYRTSNLASGIPARFSGSGSGTDFTLTISSLEPEDFAVYYCQQYHSYPTTFGQGTKVEIKRTVGGGGSGGGGSGGGGSEVQLVESGGGLVQPGGSLRLSCAASGFSFNTYAMNWVRQAPGKGLEWVSHIRSKSNNFATYYADSVKDRFTISRDNAKNSLYLQMNSLRAEDTAVYYCARQGGDFPMDYWGQGTLVTVSSTRGMRTEDLPKAVVFLEPQWYRVLEKDSVTLKCQGAYSPEDNSTQWFHNESLISSQASSYFIDAATVDDSGEYRCQTNLSTLSDPVQLEVHIGWLLLQAPRWVFKEEDPIHLRCHSWKNTALHKVTYLQNGKGRKYFHHNSDFYIPKATLKDSGSYFCRGLVGSKNVSSETVNITITQGLAVPTISSFFPPGYQVSFCLVMVLLFAVDTGLYFS

SEQ ID NO: 10182 - protein, 475 aa, synthetic construct
MALPVTALLLPLALLLHAARPDVVMTQSPSSLSASVGDRVTITCKASEDIYIRLAWYQQKPGKAPKLLIYAATSLETGVPSRFSGSGSGTDFTLTISSLQPEDFATYYCQQYWTTPWTFGGGTKVEIKGGGGSGGGGSGGGGSQVQLQESGPGLVKPSQTLSLTCTVSGYSITIDYTWNWIRQPPGKGLEWIGYITYSGSTDYNPSLKSRVLISVDTSKNQVSLKLSSVTAADTAVYYCARLGRRYALDYWGQGTTVTVSSTRGMRTEDLPKAVVFLEPQWYRVLEKDSVTLKCQGAYSPEDNSTQWFHNESLISSQASSYFIDAATVDDSGEYRCQTNLSTLSDPVQLEVHIGWLLLQAPRWVFKEEDPIHLRCHSWKNTALHKVTYLQNGKGRKYFHHNSDFYIPKATLKDSGSYFCRGLVGSKNVSSETVNITITQGLAVPTISSFFPPGYQVSFCLVMVLLFAVDTGLYFS

SEQ ID NO: 10183 - protein, 480 aa, synthetic construct
MALPVTALLLPLALLLHAARPDIQLTQSPSFLSASVGDRVTITCRASQGISTDLNWYQQKPGKAPKLLIYAASNLESGVPSRFSGSGSGTEFTLTISSLQPEDFATYYCQQSYNWPYTFGGGTKVEIKRGGGGSGGGGSGGGGSEVQLVESGGGLVKPGGSLRLSCAASGFTFSNFEMNWVRQAPGKGLEWVSGISSNGRYINYADSVKGRFTISRDNAKNSLYLQMNSLRAEDTAVYYCARVVDFDQDYNGFDYWGQGTLVTVSSTRGMRTEDLPKAVVFLEPQWYRVLEKDSVTLKCQGAYSPEDNSTQWFHNESLISSQASSYFIDAATVDDSGEYRCQTNLSTLSDPVQLEVHIGWLLLQAPRWVFKEEDPIHLRCHSWKNTALHKVTYLQNGKGRKYFHHNSDFYIPKATLKDSGSYFCRGLVGSKNVSSETVNITITQGLAVPTISSFFPPGYQVSFCLVMVLLFAVDTGLYFS

SEQ ID NO: 10184 - protein, 478 aa, synthetic construct
MALPVTALLLPLALLLHAARPDIQLTQSPSFLSASVGDRVTITCSLSLGISTWRDWFPPRLGRGLEPLTYAASTLQSGVPSRFSGSGSGTEFTLTISSLQPEDFATYYCQQLNSYPLTFGGGTKVEIKRGGGGSGGGGSGGGGSEVQLVESGGGLVKPGGSLRLSCAASGFTFSTYGMSWVRQAPGKGLEWVAYINNGSGYIYYADSVKGRFTISRDNAKNSLYLQMNSLRAEDTAVYYCARGQWWSGGDFDYWGQGTLVTVSSTRGMRTEDLPKAVVFLEPQWYRVLEKDSVTLKCQGAYSPEDNSTQWFHNESLISSQASSYFIDAATVDDSGEYRCQTNLSTLSDPVQLEVHIGWLLLQAPRWVFKEEDPIHLRCHSWKNTALHKVTYLQNGKGRKYFHHNSDFYIPKATLKDSGSYFCRGLVGSKNVSSETVNITITQGLAVPTISSFFPPGYQVSFCLVMVLLFAVDTGLYFS

SEQ ID NO: 10185 - protein, 480 aa, synthetic construct
MALPVTALLLPLALLLHAARPDIQMTQTTSSLSASLGDRVTISCRASQDISNYLNWYQQKPDGTVKLLIYYTSILHSGVPSRFSGSGSGTDYSLTISNLEQEDFATYFCQQGNTLPWTFGGGTKLEIKAGGGGSGGGGSGGGGSEVQLVESGGGLVKPGGSLKLSCAASGFAFSIYDMSWVRQTPEKRLEWVAYISSGGGTYYPDTVKGRFTISRDNAKNTLYLQMSSLKSEDTAMYYCARHSGYGTHWGVLFAYWGQGTLVTVSATRGMRTEDLPKAVVFLEPQWYRVLEKDSVTLKCQGAYSPEDNSTQWFHNESLISSQASSYFIDAATVDDSGEYRCQTNLSTLSDPVQLEVHIGWLLLQAPRWVFKEEDPIHLRCHSWKNTALHKVTYLQNGKGRKYFHHNSDFYIPKATLKDSGSYFCRGLVGSKNVSSETVNITITQGLAVPTISSFFPPGYQVSFCLVMVLLFAVDTGLYFS

SEQ ID NO: 10186 - protein, 490 aa, synthetic construct
MALPVTALLLPLALLLHAARPDIVMTQSPDSLAVSLGERATINCKSSQSLLYRSNQKNYLAWYQQKPGQPPKLLIYWASTRESGVPDRFSGSGSGTDFTLTISSLQAEDVAVYYCQQYYNYPRTFGQGTKVEIKRTVGGGGSGGGGSGGGGSEVQLLESGGGLVQPGGSLRLSCAASGYSITSDYAWNWVRQAPGKGLEWVSYISNSGSTSYNPSLKSRFTISRDNSKNTLYLQMNSLRAEDTAVYYCAKERNYDYDDYYYAMDYWGQGTLVTVSSTRGMRTEDLPKAVVFLEPQWYRVLEKDSVTLKCQGAYSPEDNSTQWFHNESLISSQASSYFIDAATVDDSGEYRCQTNLSTLSDPVQLEVHIGWLLLQAPRWVFKEEDPIHLRCHSWKNTALHKVTYLQNGKGRKYFHHNSDFYIPKATLKDSGSYFCRGLVGSKNVSSETVNITITQGLAVPTISSFFPPGYQVSFCLVMVLLFAVDTGLYFS

SEQ ID NO: 10187 - protein, 483 aa, synthetic construct
MALPVTALLLPLALLLHAARPDVVMTQSPLSLPVTLGQPASISCRSSQSLLHSSGNTYLEWYQQRPGQSPRPLIYKISTRFSGVPDRFSGSGSGTDFTLKISRVEAEDVGVYYCFQGSHVPYTFGGGTKVEIKRGGGGSGGGGSGGGGSQVQLVQSGAEVKKPGASVKVSCKASGLTIEDYYMHWVRQAPGQGLEWMGWIDPENGDTEYGPKFQGRVTMTRDTSINTAYMELSRLRSDDTAVYYCAVHNAHYGTWFAYWGQGTLVTVSSTRGMRTEDLPKAVVFLEPQWYRVLEKDSVTLKCQGAYSPEDNSTQWFHNESLISSQASSYFIDAATVDDSGEYRCQTNLSTLSDPVQLEVHIGWLLLQAPRWVFKEEDPIHLRCHSWKNTALHKVTYLQNGKGRKYFHHNSDFYIPKATLKDSGSYFCRGLVGSKNVSSETVNITITQGLAVPTISSFFPPGYQVSFCLVMVLLFAVDTGLYFS

SEQ ID NO: 10188 - protein, 475 aa, synthetic construct
MALPVTALLLPLALLLHAARPDIQMTQSPSSLSASVGDRVTITCRASENIYSNLAWYQQKPGKAPKLLIYAATNLADGVPSRFSGSGSGTDFTLTISSLQPEDFATYYCQHFWGTPTFGQGTKVEIKRTVGGGGSGGGGSGGGGSEVQLVESGGGLVQPGGSLRLSCAASGFSLTNYGVHWVRQAPGKGLEWVSVIWSGGSTDYNAAFISRFTISADTSKNTAYLQMNSLRAEDTAVYYCARELIHAMDNWGQGTLVTVSSTRGMRTEDLPKAVVFLEPQWYRVLEKDSVTLKCQGAYSPEDNSTQWFHNESLISSQASSYFIDAATVDDSGEYRCQTNLSTLSDPVQLEVHIGWLLLQAPRWVFKEEDPIHLRCHSWKNTALHKVTYLQNGKGRKYFHHNSDFYIPKATLKDSGSYFCRGLVGSKNVSSETVNITITQGLAVPTISSFFPPGYQVSFCLVMVLLFAVDTGLYFS

SEQ ID NO: 10189 - protein, 482 aa, synthetic construct
MALPVTALLLPLALLLHAARPDFVMTQSPLSLPVTPGEPASISCRSSQSIVHSNGNTYLEWYLQKPGQSPQLLIYKVSNRFSGVPDRFSGSGSGTDFTLKISRVEAEDVGVYYCFQGSHVPLTFGQGTKLEIKRGGGGSGGGGSGGGGSEVQLVESGAEVKKPGASVKVSCKASGYTFTSYWIHWVRQAPGQGLEWMGENDPSNGRTNYNEKFKNRVTLTVDTSISTAYMELSRLRSDDTAVYYCARGPNYFYSMDYWGQGTMVTVSSTRGMRTEDLPKAVVFLEPQWYRVLEKDSVTLKCQGAYSPEDNSTQWFHNESLISSQASSYFIDAATVDDSGEYRCQTNLSTLSDPVQLEVHIGWLLLQAPRWVFKEEDPIHLRCHSWKNTALHKVTYLQNGKGRKYFHHNSDFYIPKATLKDSGSYFCRGLVGSKNVSSETVNITITQGLAVPTISSFFPPGYQVSFCLVMVLLFAVDTGLYFS

SEQ ID NO: 10190 - protein, 475 aa, synthetic construct
MALPVTALLLPLALLLHAARPDIQLTQSPSFLSASVGDRVTITCSARSSISFMYWYQQKPGKAPKLLIYDTSNLASGVPSRFSGSGSGTEFTLTISSLEAEDAATYYCQQWSSYPLTFGQGTKLEIKGGGGSGGGGSGGGGSQVQLVQSGAEVKKPGASVKVSCKASGYTFTGSWMNWVRQAPGQGLEWIGRIYPGDGETNYNGKFKDRVTITADKSTSTAYMELSSLRSEDTAVYYCARIYGNNVYFDVWGQGTTVTVSSTRGMRTEDLPKAVVFLEPQWYRVLEKDSVTLKCQGAYSPEDNSTQWFHNESLISSQASSYFIDAATVDDSGEYRCQTNLSTLSDPVQLEVHIGWLLLQAPRWVFKEEDPIHLRCHSWKNTALHKVTYLQNGKGRKYFHHNSDFYIPKATLKDSGSYFCRGLVGSKNVSSETVNITITQGLAVPTISSFFPPGYQVSFCLVMVLLFAVDTGLYFS

SEQ ID NO: 10191 - protein, 483 aa, synthetic construct
MALPVTALLLPLALLLHAARPQLVLTQSPSASASLGSSVKLTCTLSSGHKTDTIDWYQQQPGKAPRYLMKLEGSGSYNKGSGVPDRFSGSSSGADWYLTISSLQSEDEADYYCGTDYPGNYLFGGGTQLTVLGGGGGSGGGGSGGGGSQEQLVESGGGLVQPGGSLRLSCAASGFTFSDYYMSWIRQAPGKGLEWVATIYPSSGKTYYADSAKGRLTISSDNAKDSLYLQMNSLRAEDTAVYYCTRDSYADDAALFDIWGQGTTVTVSSTRGMRTEDLPKAVVFLEPQWYRVLEKDSVTLKCQGAYSPEDNSTQWFHNESLISSQASSYFIDAATVDDSGEYRCQTNLSTLSDPVQLEVHIGWLLLQAPRWVFKEEDPIHLRCHSWKNTALHKVTYLQNGKGRKYFHHNSDFYIPKATLKDSGSYFCRGLVGSKNVSSETVNITITQGLAVPTISSFFPPGYQVSFCLVMVLLFAVDTGLYFS

SEQ ID NO: 10192 - protein, 478 aa, synthetic construct
MALPVTALLLPLALLLHAARPDIVLTQSPPSLAMSLGKRATISCRASESVTILGSHLIHWYQQKPGQPPTLLIQLASNVQTGVPARFSGSGSRTDFTLTIDPVEEDDVAVYYCLQSRTIPRTFGGGTKLEIKGGGGSGGGGSGGGGSQIQLVQSGPELKKPGETVKISCKASGYTFTDYSINWVKRAPGKGLKWMGWINTETREPAYAYDFRGRFAFSLETSASTAYLQINNLKYEDTATYFCALDYSYAMDYWGQGTSVTVSSTRGMRTEDLPKAVVFLEPQWYRVLEKDSVTLKCQGAYSPEDNSTQWFHNESLISSQASSYFIDAATVDDSGEYRCQTNLSTLSDPVQLEVHIGWLLLQAPRWVFKEEDPIHLRCHSWKNTALHKVTYLQNGKGRKYFHHNSDFYIPKATLKDSGSYFCRGLVGSKNVSSETVNITITQGLAVPTISSFFPPGYQVSFCLVMVLLFAVDTGLYFS

SEQ ID NO: 10193 - protein, 482 aa, synthetic construct
MALPVTALLLPLALLLHAARPQVQLQESGPGLVKPSQTLSLTCTVSGGSISSGGFYWSWIRQHPGKGLEWIGYIHHSGSTHYNPSLKSRVTISIDTSKNLFSLRLSSVTAADTAVYYCASLVYCGGDCYSGFDYWGQGTLVTVSSGGGGSGGGGSGGGGSDIQLTQSPSSLSASVGDRVSFTCQASQDINNFLNWYQQKPGKAPKLLIYDASNLETGVPSRFSGSGSGTDFTFTISSLQPEDIATYYCQQYGNLPFTFGGGTKVEIKRTRGMRTEDLPKAVVFLEPQWYRVLEKDSVTLKCQGAYSPEDNSTQWFHNESLISSQASSYFIDAATVDDSGEYRCQTNLSTLSDPVQLEVHIGWLLLQAPRWVFKEEDPIHLRCHSWKNTALHKVTYLQNGKGRKYFHHNSDFYIPKATLKDSGSYFCRGLVGSKNVSSETVNITITQGLAVPTISSFFPPGYQVSFCLVMVLLFAVDTGLYFS

SEQ ID NO: 10194 - protein, 480 aa, synthetic construct
MALPVTALLLPLALLLHAARPQVQLQESGPGLVKPSETLSLTCTVSGGSISSYYWSWIRQPPGKGLEWIGYIYYSGSTNYNPSLKSRVTISVDTSKNQFSLKLSSVTAADTAVYYCVSLVYCGGDCYSGFDYWGQGTLVTVSSGGGGSGGGGSGGGGSDIQLTQSPSSLSASVGDRVSFTCQASQDINNFLNWYQQKPGKAPKLLIYDASNLETGVPSRFSGSGSGTDFTFTISSLQPEDIATYYCQQYGNLPFTFGGGTKVEIKRTRGMRTEDLPKAVVFLEPQWYRVLEKDSVTLKCQGAYSPEDNSTQWFHNESLISSQASSYFIDAATVDDSGEYRCQTNLSTLSDPVQLEVHIGWLLLQAPRWVFKEEDPIHLRCHSWKNTALHKVTYLQNGKGRKYFHHNSDFYIPKATLKDSGSYFCRGLVGSKNVSSETVNITITQGLAVPTISSFFPPGYQVSFCLVMVLLFAVDTGLYFS

SEQ ID NO: 10195 - protein, 485 aa, synthetic construct
MALPVTALLLPLALLLHAARPQVTLKESGPVLVKPTETLTLTCTVSGFSLINARMGVSWIRQPPGKALEWLAHIFSNAEKSYRTSLKSRLTISKDTSKSQVVLTMTNMDPVDTATYYCARIPGYGGNGDYHYYGMDVWGQGTTVTVSSGGGGSGGGGSGGGGSDIQMTQSPSSLSASLGDRVTITCRASQGIRNDLGWYQQKPGKAPKRLIYASSTLQSGVPSRFSGSGSGTEFTLTISSLQPEDFATYYCLQHNNFPWTFGQGTKVEIKRTRGMRTEDLPKAVVFLEPQWYRVLEKDSVTLKCQGAYSPEDNSTQWFHNESLISSQASSYFIDAATVDDSGEYRCQTNLSTLSDPVQLEVHIGWLLLQAPRWVFKEEDPIHLRCHSWKNTALHKVTYLQNGKGRKYFHHNSDFYIPKATLKDSGSYFCRGLVGSKNVSSETVNITITQGLAVPTISSFFPPGYQVSFCLVMVLLFAVDTGLYFS

SEQ ID NO: 10196 - protein, 479 aa, synthetic construct
MALPVTALLLPLALLLHAARPQIQLVESGGGVVQPGRSLRLSCVASGFTFKNYGMHWVRQAPGKGLEWVAVIWYDGSNEYYGDPVKGRFTISRDNSKNMLYLQMNSLRADDTAVYYCARSGIAVAGAFDYWGQGTLVTVSSGGGGSGGGGSGGGGSEIVLTQSPDTLSLSPGEKATLSCRASQSVSSSFLAWYQQKPGQAPSLLIYVASRRAAGIPDRFSGSGSGTDFTLTISRLEPEDFGMFYCQHYGRTPFTFGPGTKVDIKRTRGMRTEDLPKAVVFLEPQWYRVLEKDSVTLKCQGAYSPEDNSTQWFHNESLISSQASSYFIDAATVDDSGEYRCQTNLSTLSDPVQLEVHIGWLLLQAPRWVFKEEDPIHLRCHSWKNTALHKVTYLQNGKGRKYFHHNSDFYIPKATLKDSGSYFCRGLVGSKNVSSETVNITITQGLAVPTISSFFPPGYQVSFCLVMVLLFAVDTGLYFS

SEQ ID NO: 10197 - protein, 480 aa, synthetic construct
MALPVTALLLPLALLLHAARPDIQLTQSPSFLSASVGDRVTITCRASQGISSYLAWYQQKPGKAPKLLIYAASTLQSGVPSRFSGSGSGTEFTLTISSLQPEDFATYYCQQVNSYPLTFGGGTKVEIKRGGGGSGGGGSGGGGSQLQLQESGPGLVKPSETLSLTCTVSGGSISSSTYYWGWIRQPPGKGLEWIGSIYFTGSTDYNPSLKSRVSISVDTSKNQFSLKLSSVTAADTAVYYCAKEDDSSGYYSFDYWGQGNLVTVSSTRGMRTEDLPKAVVFLEPQWYRVLEKDSVTLKCQGAYSPEDNSTQWFHNESLISSQASSYFIDAATVDDSGEYRCQTNLSTLSDPVQLEVHIGWLLLQAPRWVFKEEDPIHLRCHSWKNTALHKVTYLQNGKGRKYFHHNSDFYIPKATLKDSGSYFCRGLVGSKNVSSETVNITITQGLAVPTISSFFPPGYQVSFCLVMVLLFAVDTGLYFS

SEQ ID NO: 10198 - protein, 483 aa, synthetic construct
MALPVTALLLPLALLLHAARPQSALTQPRSVSGSPGHSVTISCTGTSSDVGDYNYVSWYQQRPGKVPKLLIYDVSKRPSGVPDRFSGSKSGNTASLTISGLQAEDEAIYFCASYAGNYNVVFGGGTKLTVLGQGGGGSGGGGSGGGGSQVQLVQSGSELKKPGASVKVSCKASGYTFNTYAMNWVRQAPGQGLEWMGWINTNTGNPTYAQGFTGRFVFSLDTSVSTAYLQISSLKAEDTAVYYCARRYFDWLLGAFDIWGQGTMVTVSSTRGMRTEDLPKAVVFLEPQWYRVLEKDSVTLKCQGAYSPEDNSTQWFHNESLISSQASSYFIDAATVDDSGEYRCQTNLSTLSDPVQLEVHIGWLLLQAPRWVFKEEDPIHLRCHSWKNTALHKVTYLQNGKGRKYFHHNSDFYIPKATLKDSGSYFCRGLVGSKNVSSETVNITITQGLAVPTISSFFPPGYQVSFCLVMVLLFAVDTGLYFS

SEQ ID NO: 10199 - protein, 475 aa, synthetic construct
MALPVTALLLPLALLLHAARPDIQMTQSPSSLSASVGDRVTITCSASQGINNYLNWYQQKPGKAPKLLIHYTSGLHAGVPSRFSGSGSGTDYTLTISSLQPEDVATYYCQQYSILPWTFGGGTKVEIKRGGGGSGGGGSGGGGSQVQLVQSGAEVKKPGSSVKVSCKASGYAFSSSWMNWVRQAPGQGLEWMGRIYPGDGNTHYAQKFQGRVTLTADKSTSTAYMELSSLRSEDTAVYYCGEGYLDPMDYWGQGTLVTVSSTRGMRTEDLPKAVVFLEPQWYRVLEKDSVTLKCQGAYSPEDNSTQWFHNESLISSQASSYFIDAATVDDSGEYRCQTNLSTLSDPVQLEVHIGWLLLQAPRWVFKEEDPIHLRCHSWKNTALHKVTYLQNGKGRKYFHHNSDFYIPKATLKDSGSYFCRGLVGSKNVSSETVNITITQGLAVPTISSFFPPGYQVSFCLVMVLLFAVDTGLYFS

SEQ ID NO: 10200 - protein, 478 aa, synthetic construct
MALPVTALLLPLALLLHAARPEVQLVESGGGLVQPGGSLRLSCAASGYTFTTYWMHWVRQAPGKGLEWVGYIRPSTGYTEYNQKFKDRFTISADTSKNTAYLQMNSLRAEDTAVYYCARSRWLLDYWGQGTLVTVSGGGGSGGGGSGGGGSDIQMTQSPSSLSASVGDRVTITCKSSQSVLYSSNQKNYLAWFQQKPGKAPKLLIYWASTRESGVPSRFSGSGSGTDFTLTISSLQPEDFATYFCHQYLSSYTFGQGTKVEIKRTRGMRTEDLPKAVVFLEPQWYRVLEKDSVTLKCQGAYSPEDNSTQWFHNESLISSQASSYFIDAATVDDSGEYRCQTNLSTLSDPVQLEVHIGWLLLQAPRWVFKEEDPIHLRCHSWKNTALHKVTYLQNGKGRKYFHHNSDFYIPKATLKDSGSYFCRGLVGSKNVSSETVNITITQGLAVPTISSFFPPGYQVSFCLVMVLLFAVDTGLYFS

SEQ ID NO: 10201 - protein, 475 aa, synthetic construct
MALPVTALLLPLALLLHAARPDIQMTQSPSSLSASVGDRVTITCRASQDISNYLNWYQQKPGKAPKLLIYYTSRLHSGVPSRFSGSGSGTDFTLTISSLQPEDFATYYCQQGNTLPYTFGQGTKVEIKRGGGGSGGGGSGGGGSEVQLVESGGGLVQPGGSLRLSCAASGFTFSDYFMSWVRQAPGKGLEWVATISNGGTYTYYPDSVKGRFTISRDNSKNTLYLQMNSLRAEDTAVYYCARFDGYIFDYWGQGTLVTVSSTRGMRTEDLPKAVVFLEPQWYRVLEKDSVTLKCQGAYSPEDNSTQWFHNESLISSQASSYFIDAATVDDSGEYRCQTNLSTLSDPVQLEVHIGWLLLQAPRWVFKEEDPIHLRCHSWKNTALHKVTYLQNGKGRKYFHHNSDFYIPKATLKDSGSYFCRGLVGSKNVSSETVNITITQGLAVPTISSFFPPGYQVSFCLVMVLLFAVDTGLYFS

SEQ ID NO: 10202 - protein, 482 aa, synthetic construct
MALPVTALLLPLALLLHAARPDIQMTQSPSSLSASVGDRVTITCTASSRVSSSYLHWFQQKPGKAPKLLIYSTSNLASGVPSRFSGSGSGTDFTLTISSLQPEDFATYYCHQYHRSPYTFGQGTKVEIKRGGGGSGGGGSGGGGSEVQLVESGGGLVQPGGSLRLSCAASGYAFSNSWINWVRQAPGKGLEWVGQIYPGDYDTNYNGKFKGRFTISRDKSKNTAYLQMNSLRAEDTAVYYCARGGSIYYGNLGFFDVWGQGTLVTVSSTRGMRTEDLPKAVVFLEPQWYRVLEKDSVTLKCQGAYSPEDNSTQWFHNESLISSQASSYFIDAATVDDSGEYRCQTNLSTLSDPVQLEVHIGWLLLQAPRWVFKEEDPIHLRCHSWKNTALHKVTYLQNGKGRKYFHHNSDFYIPKATLKDSGSYFCRGLVGSKNVSSETVNITITQGLAVPTISSFFPPGYQVSFCLVMVLLFAVDTGLYFS

SEQ ID NO: 10203 - protein, 472 aa, synthetic construct
MALPVTALLLPLALLLHAARPDIQMTQSPSSLSASVGDRVTITCSASSSVTYMYWYQQKPGKAPKLLIYDTSNLASGVPSRFSGSGSGTDYTLTISSLQPEDFATYYCQQWSNYPLTFGQGTKVEIKGGGGSGGGGSGGGGSQVQLVQSGAEVKKPGASVKVSCKASGYSFIEYTINWVRQAPGQGLEWIGNIDPYYGTTYYNQMFTGRATLTVDTSISTAYMELSRLRSDDTAVYYCARGSAWFPYWGQGTLVTVSSTRGMRTEDLPKAVVFLEPQWYRVLEKDSVTLKCQGAYSPEDNSTQWFHNESLISSQASSYFIDAATVDDSGEYRCQTNLSTLSDPVQLEVHIGWLLLQAPRWVFKEEDPIHLRCHSWKNTALHKVTYLQNGKGRKYFHHNSDFYIPKATLKDSGSYFCRGLVGSKNVSSETVNITITQGLAVPTISSFFPPGYQVSFCLVMVLLFAVDTGLYFS

SEQ ID NO: 10204 - protein, 472 aa, synthetic construct
MALPVTALLLPLALLLHAARPEIVLTQSPSSLSASVGDRVTITCRASENIYSYLAWYQQKPGKAPKLLIYNTKTLGEGVPSRFSGSGSGTDFTLTISSLQPEDFATYYCQHHYGTPFTFGPGTKVDIKGGGGSGGGGSGGGGSQVQLVQSGAEVKKPGASVKVSCKASGYTFSDYWVHWVRQAPGQGLEWMGAIDGSDTFNDYSQKFKGRVTMTRDTSISTAYMELSRLRSDDTAVYYCARGGLLQYWGQGTLVTVSSTRGMRTEDLPKAVVFLEPQWYRVLEKDSVTLKCQGAYSPEDNSTQWFHNESLISSQASSYFIDAATVDDSGEYRCQTNLSTLSDPVQLEVHIGWLLLQAPRWVFKEEDPIHLRCHSWKNTALHKVTYLQNGKGRKYFHHNSDFYIPKATLKDSGSYFCRGLVGSKNVSSETVNITITQGLAVPTISSFFPPGYQVSFCLVMVLLFAVDTGLYFS

SEQ ID NO: 10205 - protein, 476 aa, synthetic construct
MALPVTALLLPLALLLHAARPQVQLQQSGPELVKPGASVKISCKASGYAFSSSWMNWVKQRPGKGLEWIGRIYPGDEDTNYSGKFKDKATLTADKSSTTAYMQLSSLTSEDSAVYFCARSLLYGDYLDYWGQGTTLTVSSGGGGSGGGGSGGGGSQIVLTQSPAIMSASPGEKVTMTCSASSSVSYMHWYQQKSGTSPKRWIYDTSKLASGVPDRFSGSGSGTSYFLTINNMEAEDAATYYCQQWNINPLTFGAGTKLELKRTRGMRTEDLPKAVVFLEPQWYRVLEKDSVTLKCQGAYSPEDNSTQWFHNESLISSQASSYFIDAATVDDSGEYRCQTNLSTLSDPVQLEVHIGWLLLQAPRWVFKEEDPIHLRCHSWKNTALHKVTYLQNGKGRKYFHHNSDFYIPKATLKDSGSYFCRGLVGSKNVSSETVNITITQGLAVPTISSFFPPGYQVSFCLVMVLLFAVDTGLYFS

SEQ ID NO: 10206 - protein, 479 aa, synthetic construct
MALPVTALLLPLALLLHAARPDIQMTQSSAYLSVSLGGRVTITCKASDHINNWLAWYQHKPGNAPRLLISGATTLETGVPSRFSGSGSGKDYTLSITSLQTEDVATYYCQQSWNTPWTFGGGTKLEIKRGGGGSGGGGSGGGGSQVQLQQSGAELVRPGSSVKISCKASGYAFSSYWVNWMKQRPGQGLEWIGQIYPGDGDTNYNGKFKGRATVTADKSSSTSYMQFSSLTSEDSAVYFCARSITTVVGCAMDYWGQGTSVTVSSTRGMRTEDLPKAVVFLEPQWYRVLEKDSVTLKCQGAYSPEDNSTQWFHNESLISSQASSYFIDAATVDDSGEYRCQTNLSTLSDPVQLEVHIGWLLLQAPRWVFKEEDPIHLRCHSWKNTALHKVTYLQNGKGRKYFHHNSDFYIPKATLKDSGSYFCRGLVGSKNVSSETVNITITQGLAVPTISSFFPPGYQVSFCLVMVLLFAVDTGLYFS

SEQ ID NO: 10207 - protein, 478 aa, synthetic construct
MALPVTALLLPLALLLHAARPEVQLLESGGGLVQPGGSLRLSCAASGFTFSSYAMSWVRQAPGKGLEWVSVISGSGGRPNYADSVKGRFTISRDNSKNTLYLQMNSLRDEDTAVYYCAKVDYSNYLFFDYWGQGTLVTVSSGGGGSGGGGSGGGGSEIVLTQSPGTLSLSPGEGATLSCRAGQSVRSSYLGWYQQKPGQAPRLLIYGASSRATGIPDRFSGSGSGTDFTLTISRLEPEDFAVYYCQQYGYSPPTFGGGTKLEIKTRGMRTEDLPKAVVFLEPQWYRVLEKDSVTLKCQGAYSPEDNSTQWFHNESLISSQASSYFIDAATVDDSGEYRCQTNLSTLSDPVQLEVHIGWLLLQAPRWVFKEEDPIHLRCHSWKNTALHKVTYLQNGKGRKYFHHNSDFYIPKATLKDSGSYFCRGLVGSKNVSSETVNITITQGLAVPTISSFFPPGYQVSFCLVMVLLFAVDTGLYFS

SEQ ID NO: 10208 - protein, 481 aa, synthetic construct
MALPVTALLLPLALLLHAARPDIVLTQSPPSLAMSLGKRATISCRASESVTILGSHLIHWYQQKPGQPPTLLIQLASNVQTGVPARFSGSGSRTDFTLTIDPVEEDDVAVYYCLQSRTIPRTFGGGTKLEIKGSTSGSGKPGSGEGSTKGQIQLVQSGPELKKPGETVKISCKASGYTFTDYSINWVKRAPGKGLKWMGWINTETREPAYAYDFRGRFAFSLETSASTAYLQINNLKYEDTATYFCALDYSYAMDYWGQGTSVTVSSTRGMRTEDLPKAVVFLEPQWYRVLEKDSVTLKCQGAYSPEDNSTQWFHNESLISSQASSYFIDAATVDDSGEYRCQTNLSTLSDPVQLEVHIGWLLLQAPRWVFKEEDPIHLRCHSWKNTALHKVTYLQNGKGRKYFHHNSDFYIPKATLKDSGSYFCRGLVGSKNVSSETVNITITQGLAVPTISSFFPPGYQVSFCLVMVLLFAVDTGLYFS

SEQ ID NO: 10209 - protein, 481 aa, synthetic construct
MALPVTALLLPLALLLHAARPDIQMTQSPSSLSASVGDRVTITCRASSSVSYMHWYQQKPGKAPKLLIYATSNLASGVPSRFSGSGSGTDFTLTISSLQPEDFATYYCQQWTFNPPTFGQGTKLEIKRTVAAGGGGSGGGGSGGGGSQVQLVQSGAEVKKPGASVKVSCKASGYTFTSYNMHWVRQAPGQRLEWMGGIYPGNGDTSYNQKFKGRVTITRDTSASTAYMELSSLRSEDTAVYYCARYDYNYAMDYWGQGTLVTVSSASTRGMRTEDLPKAVVFLEPQWYRVLEKDSVTLKCQGAYSPEDNSTQWFHNESLISSQASSYFIDAATVDDSGEYRCQTNLSTLSDPVQLEVHIGWLLLQAPRWVFKEEDPIHLRCHSWKNTALHKVTYLQNGKGRKYFHHNSDFYIPKATLKDSGSYFCRGLVGSKNVSSETVNITITQGLAVPTISSFFPPGYQVSFCLVMVLLFAVDTGLYFS

SEQ ID NO: 10210 - protein, 476 aa, synthetic construct
MALPVTALLLPLALLLHAARPEIVLTQSPGTLSLSPGERATLSCRASQSVSSSYLAWYQQKPGQAPRLLIYGASSRATGIPDRFSGSGSGTDFTLTISRLEPEDFAVYYCQQYHHSPLTFGGGTKVEIKRGGGGSGGGGSGGGGSEVQLVESGGGLVQPGGSLRLSCAASGFTFSGRSMNWVRQAPGKGLEWVSYISSDSRTIYYADSVKGRFTISRDNAKNSLYLQMNSLRAEDTAVYYCARGGHGYFDLWGRGTLVTVSSTRGMRTEDLPKAVVFLEPQWYRVLEKDSVTLKCQGAYSPEDNSTQWFHNESLISSQASSYFIDAATVDDSGEYRCQTNLSTLSDPVQLEVHIGWLLLQAPRWVFKEEDPIHLRCHSWKNTALHKVTYLQNGKGRKYFHHNSDFYIPKATLKDSGSYFCRGLVGSKNVSSETVNITITQGLAVPTISSFFPPGYQVSFCLVMVLLFAVDTGLYFS

SEQ ID NO: 10211 - protein, 479 aa, synthetic construct
MALPVTALLLPLALLLHAARPEIVLTQSPGTLSLSPGERATLSCRASQSVSSDYLAWYQQKPGQAPRLLIYGASRRATGIPDRFSGSGSGTDFTLTISRLEPEDFAVYYCQQYVSYWTFGGGTKVEIKRGGGGSGGGGSGGGGSQVQLVESGGGVVQPGRSLRLSCAASGFTFSSYGMHWVRQAPGKGLEWVAGIWWDGSNEKYADSVKGRFTISRDNSKNTLYLQMNSLRAEDTAVYYCAKEAPYYAKDYMDVWGKGTTVTVSSTRGMRTEDLPKAVVFLEPQWYRVLEKDSVTLKCQGAYSPEDNSTQWFHNESLISSQASSYFIDAATVDDSGEYRCQTNLSTLSDPVQLEVHIGWLLLQAPRWVFKEEDPIHLRCHSWKNTALHKVTYLQNGKGRKYFHHNSDFYIPKATLKDSGSYFCRGLVGSKNVSSETVNITITQGLAVPTISSFFPPGYQVSFCLVMVLLFAVDTGLYFS

SEQ ID NO: 10212 - protein, 479 aa, synthetic construct
MALPVTALLLPLALLLHAARPDIQMTQSPSSLSASVGDRVTITCRASQDVNTAVAWYQQKPGKAPKLLIYSASFLYSGVPSRFSGSRSGTDFTLTISSLQPEDFATYYCQQHYTTPPTFGQGTKVEIKRTGGGGSGGGGSGGGGSEVQLVESGGGLVQPGGSLRLSCAASGFNIKDTYIHWVRQAPGKGLEWVARIYPTNGYTRYADSVKGRFTISADTSKNTAYLQMNSLRAEDTAVYYCSRWGGWGFYAMDYWGQGTLVTVSSTRGMRTEDLPKAVVFLEPQWYRVLEKDSVTLKCQGAYSPEDNSTQWFHNESLISSQASSYFIDAATVDDSGEYRCQTNLSTLSDPVQLEVHIGWLLLQAPRWVFKEEDPIHLRCHSWKNTALHKVTYLQNGKGRKYFHHNSDFYIPKATLKDSGSYFCRGLVGSKNVSSETVNITITQGLAVPTISSFFPPGYQVSFCLVMVLLFAVDTGLYFS

SEQ ID NO: 10213 - protein, 474 aa, synthetic construct
MALPVTALLLPLALLLHAARPQVQLVESGGGLVKPGGSLRLSCAASGFTFSDYYMTWIRQAPGKGLEWISYISSSGSTIYYADSVKGRFTISRDNAKNSLYLQMNSLRAEDTAVYYCARDRNSHFDYWGQGTLVTVSSGGGGSGGGGSGGGGSDIQMTQSPSSVSASVGDRVTITCRASQGITRWLAWYQQKPGKAPKLLIYAASVLQSGVPSRFSGSGSGTDFTLTISSLQPEDFATYYCQQSNSFPRTFGQGTKVEIKTRGMRTEDLPKAVVFLEPQWYRVLEKDSVTLKCQGAYSPEDNSTQWFHNESLISSQASSYFIDAATVDDSGEYRCQTNLSTLSDPVQLEVHIGWLLLQAPRWVFKEEDPIHLRCHSWKNTALHKVTYLQNGKGRKYFHHNSDFYIPKATLKDSGSYFCRGLVGSKNVSSETVNITITQGLAVPTISSFFPPGYQVSFCLVMVLLFAVDTGLYFS

SEQ ID NO: 10214 - protein, 474 aa, synthetic construct
MALPVTALLLPLALLLHAARPQVQLVESGGGLVKPGGSLRLSCAASGFTFSDHYMSWIRQAPGKGLEWFSYISSSGGIIYYADSVKGRFTISRDNAKNSLYLQMNSLRAEDTAVYYCARDVGSHFDYWGQGTLVTVSSGGGGSGGGGSGGGGSDIQMTQSPSSVSASVGDRVTITCRASQDISRWLAWYQQKPGKAPKLLISAASRLQSGVPSRFSGSGSGTDFTLTISSLQPEDFAIYYCQQAKSFPRTFGQGTKVEIKTRGMRTEDLPKAVVFLEPQWYRVLEKDSVTLKCQGAYSPEDNSTQWFHNESLISSQASSYFIDAATVDDSGEYRCQTNLSTLSDPVQLEVHIGWLLLQAPRWVFKEEDPIHLRCHSWKNTALHKVTYLQNGKGRKYFHHNSDFYIPKATLKDSGSYFCRGLVGSKNVSSETVNITITQGLAVPTISSFFPPGYQVSFCLVMVLLFAVDTGLYFS

SEQ ID NO: 10215 - protein, 486 aa, synthetic construct
MALPVTALLLPLALLLHAARPQVQLVESGGGVVQSGRSLRLSCAASGFTFRNYGMHWVRQAPGKGLEWVAVIWYDGSDKYYADSVRGRFTISRDNSKNTLYLQMNSLRAEDTAVYYCARDGYDILTGNPRDFDYWGQGTLVTVSSGGGGSGGGGSGGGGSDTVMTQTPLSSHVTLGQPASISCRSSQSLVHSDGNTYLSWLQQRPGQPPRLLIYRISRRFSGVPDRFSGSGAGTDFTLEISRVEAEDVGVYYCMQSTHVPRTFGQGTKVEIKTRGMRTEDLPKAVVFLEPQWYRVLEKDSVTLKCQGAYSPEDNSTQWFHNESLISSQASSYFIDAATVDDSGEYRCQTNLSTLSDPVQLEVHIGWLLLQAPRWVFKEEDPIHLRCHSWKNTALHKVTYLQNGKGRKYFHHNSDFYIPKATLKDSGSYFCRGLVGSKNVSSETVNITITQGLAVPTISSFFPPGYQVSFCLVMVLLFAVDTGLYFS

SEQ ID NO: 10216 - protein, 479 aa, synthetic construct
MALPVTALLLPLALLLHAARPEVQLVESGGGLVQPGGSLRLSCAASGFPFSSYDMHWVRQATGKGLEWVSAIGTAGATYYPGSVKGRFTISRENAKNSLYLQMNSLRAGDTAVYYCARGDYVWGTYRPLFDYWGQGTLVTVSSGGGGSGGGGSGGGGSDIQLTQSPSFLSASVGDRVTITCWASQGINNYLAWYQQKPGKAPKLLIYAASTLQTGVPSRFSGSGSGTEFTLTISSLQPEDFATYYCQQLNSYPLTFGGGTKVEIKTRGMRTEDLPKAVVFLEPQWYRVLEKDSVTLKCQGAYSPEDNSTQWFHNESLISSQASSYFIDAATVDDSGEYRCQTNLSTLSDPVQLEVHIGWLLLQAPRWVFKEEDPIHLRCHSWKNTALHKVTYLQNGKGRKYFHHNSDFYIPKATLKDSGSYFCRGLVGSKNVSSETVNITITQGLAVPTISSFFPPGYQVSFCLVMVLLFAVDTGLYFS

SEQ ID NO: 10217 - protein, 476 aa, synthetic construct
MALPVTALLLPLALLLHAARPQVQLQESGPGLVKPSETLSLTCTVSGASISSFYWSWIRQPPGKGLEWIGYIYYSGTTNYNPSLKSRVTISVDTSKNQFSLKLSSVTAADTAVYYCARIAVAGFFFDYWGQGTLVTVSSGGGGSGGGGSGGGGSEIVLTQSPGTLSLSPGERATLSCRASQSVNKNYLAWYQQKPGQAPRLLIYGASSRATGIPDRFSGSGSGTDFTLTISRLEPEDFAVYYCQQYDRSPLTFGGGTKVEIKTRGMRTEDLPKAVVFLEPQWYRVLEKDSVTLKCQGAYSPEDNSTQWFHNESLISSQASSYFIDAATVDDSGEYRCQTNLSTLSDPVQLEVHIGWLLLQAPRWVFKEEDPIHLRCHSWKNTALHKVTYLQNGKGRKYFHHNSDFYIPKATLKDSGSYFCRGLVGSKNVSSETVNITITQGLAVPTISSFFPPGYQVSFCLVMVLLFAVDTGLYFS

SEQ ID NO: 10218 - protein, 485 aa, synthetic construct
MALPVTALLLPLALLLHAARPQVQLVQSGAEVKKPGASVKVSCKASGYTFTNYYMHWVRQAPGLGLEWMGIINPSDGSTSYAQKFQGRVTMTRDTSTNTVYMDLSSLRSEDTAVYYCARGGNSAFYSYYDMDVWGQGTTVTVSSGGGGSGGGGSGGGGSDVVMTQTPLSLPVTLGQPASISCRSSQSLVYRDGNTYLSWFQQRPGQSPRRLIYKVSNWQSGVPDRFSGGGSGTDFTLKISRVEAEDVGVYYCMQGTHWPPTFGQGTKVEIKTRGMRTEDLPKAVVFLEPQWYRVLEKDSVTLKCQGAYSPEDNSTQWFHNESLISSQASSYFIDAATVDDSGEYRCQTNLSTLSDPVQLEVHIGWLLLQAPRWVFKEEDPIHLRCHSWKNTALHKVTYLQNGKGRKYFHHNSDFYIPKATLKDSGSYFCRGLVGSKNVSSETVNITITQGLAVPTISSFFPPGYQVSFCLVMVLLFAVDTGLYFS

SEQ ID NO: 10219 - protein, 472 aa, synthetic construct
MALPVTALLLPLALLLHAARPQVQLQQSGPELVKPGASVRISCKASGYTFTTYYIHWVKQRPGQGLEWIGWIYPGNVNTNYNEKFKGKATLTADKSSSTAYMQLTSLTSEDSAVYFCARGVYYFDYWGQGTILTVSSGGGGSGGGGSGGGGSIVMTQTPKFLLVSAGDRVTITCKASQSVNNDVSWFQQKPGQSPTLLIYYASNRYTGVPDRFTGSGYGTDFTFTISTVQAEDLAVYFCQQDYSSPYTFGGGTKLEIKTRGMRTEDLPKAVVFLEPQWYRVLEKDSVTLKCQGAYSPEDNSTQWFHNESLISSQASSYFIDAATVDDSGEYRCQTNLSTLSDPVQLEVHIGWLLLQAPRWVFKEEDPIHLRCHSWKNTALHKVTYLQNGKGRKYFHHNSDFYIPKATLKDSGSYFCRGLVGSKNVSSETVNITITQGLAVPTISSFFPPGYQVSFCLVMVLLFAVDTGLYFS

SEQ ID NO: 10220 - protein, 475 aa, synthetic construct
MALPVTALLLPLALLLHAARPQVQLQESGPGLVKPSQTLSLTCTVSGGSINNNNYYWTWIRQHPGKGLEWIGYIYYSGSTFYNPSLKSRVTISVDTSKTQFSLKLSSVTAADTAVYYCAREDTMTGLDVWGQGTTVTVSSGGGGSGGGGSGGGGSDIQMTQSPSSLSASVGDRVTITCRASQSINNYLNWYQQKPGKAPTLLIYAASSLQSGVPSRFSGSRSGTDFTLTISSLQPEDFAAYFCQQTYSNPTFGQGTKVEVKTRGMRTEDLPKAVVFLEPQWYRVLEKDSVTLKCQGAYSPEDNSTQWFHNESLISSQASSYFIDAATVDDSGEYRCQTNLSTLSDPVQLEVHIGWLLLQAPRWVFKEEDPIHLRCHSWKNTALHKVTYLQNGKGRKYFHHNSDFYIPKATLKDSGSYFCRGLVGSKNVSSETVNITITQGLAVPTISSFFPPGYQVSFCLVMVLLFAVDTGLYFS

SEQ ID NO: 10221 - protein, 480 aa, synthetic construct
MALPVTALLLPLALLLHAARPSYELTQPPSVSVSPGQTASITCSGDKLGDKYASWYQQKPGQSPVLVIYQDNRRPSGIPERFSGSNSGNTATLTISGTQAMDEADYYCQAWDSDTYVFGTGTKVTVLGQGGGGSGGGGSGGGGSEVQLVQSGAEVKKPGASVKVSCKASGDTFKRYYVHWVRQAPGQGLEWMGIINPSGVSTTYAQKFQGRVTMTRDTSTSTVYMELSSLRSEDTAVYYCAEVRGSGFNYFGMDVWGQGTLVTVSSTRGMRTEDLPKAVVFLEPQWYRVLEKDSVTLKCQGAYSPEDNSTQWFHNESLISSQASSYFIDAATVDDSGEYRCQTNLSTLSDPVQLEVHIGWLLLQAPRWVFKEEDPIHLRCHSWKNTALHKVTYLQNGKGRKYFHHNSDFYIPKATLKDSGSYFCRGLVGSKNVSSETVNITITQGLAVPTISSFFPPGYQVSFCLVMVLLFAVDTGLYFS

SEQ ID NO: 10222 - protein, 479 aa, synthetic construct
MALPVTALLLPLALLLHAARPEVQLLESGGGLVQPGGSLRLSCAASGFTFSSYAMSWVRQAPGKGLEVVVSAISGGGGRTYYADSVKGRFTISRDNSKNTLYLQMNSLRAEDTAVYYCAREEMAFRAYRFDIWGQGTLVTVSSGGGGSGGGGSGGGGSDIQMTQSPSSLSASVGDRVTITCRASQSISSYLNWYQQKPGKAPKLLIYAASSLQSGVPSRFSGSGSGTDFTLTISSLQPEDFATYYCQQSYITPLTFGGGTKVEIKTRGMRTEDLPKAVVFLEPQWYRVLEKDSVTLKCQGAYSPEDNSTQWFHNESLISSQASSYFIDAATVDDSGEYRCQTNLSTLSDPVQLEVHIGWLLLQAPRWVFKEEDPIHLRCHSWKNTALHKVTYLQNGKGRKYFHHNSDFYIPKATLKDSGSYFCRGLVGSKNVSSETVNITITQGLAVPTISSFFPPGYQVSFCLVMVLLFAVDTGLYFS

SEQ ID NO: 10223 - protein, 487 aa, synthetic construct
MALPVTALLLPLALLLHAARPDIVLTQSPASLAVSLGQGATISCRASKSVSTSGYTYMHWYQQKPGQPPKLLIYLASNLESGVPARFSGSGSGTDFTLNIHPVEEEDAATYYCQHSGELPPSFGGGTKLEIKRAGGGGSGGGGSGGGGSEVQLVESGGDLVKPGGSLKLSCAVSGFTFSSYGMSWVRQTPDKRLEWVATVSSGGTYTYYPDSVKGRFTISRDNAKNTLYLQMSSLKSEDSAMYYCARHRGNYYATYYYAMDYWGQGTSVTVSSTRGMRTEDLPKAVVFLEPQWYRVLEKDSVTLKCQGAYSPEDNSTQWFHNESLISSQASSYFIDAATVDDSGEYRCQTNLSTLSDPVQLEVHIGWLLLQAPRWVFKEEDPIHLRCHSWKNTALHKVTYLQNGKGRKYFHHNSDFYIPKATLKDSGSYFCRGLVGSKNVSSETVNITITQGLAVPTISSFFPPGYQVSFCLVMVLLFAVDTGLYFS

SEQ ID NO: 10224 - protein, 481 aa, synthetic construct
MALPVTALLLPLALLLHAARPDIQMTQSPSSLSASVGDRVTITCSASQGIRNYLNWYQQKPGKVPKLLIYYTSRLHSGVPSRFSGSGSGTDFTLTISSLQPEDVATYYCQQYGKLPYTFGQGTKLEIKRTVAAGGGGSGGGGSGGGGSEVQLVESGGGLVQPGGSLRLSCAASGFTFSDAWMDWVRQAPGKGLEWVGEIRSKVNNHETYYAESVKGRFTISRDDSKNSLYLQMNSLKTEDTAVYYCARNDYFDYWGQGTTVTVSSASTRGMRTEDLPKAVVFLEPQWYRVLEKDSVTLKCQGAYSPEDNSTQWFHNESLISSQASSYFIDAATVDDSGEYRCQTNLSTLSDPVQLEVHIGWLLLQAPRWVFKEEDPIHLRCHSWKNTALHKVTYLQNGKGRKYFHHNSDFYIPKATLKDSGSYFCRGLVGSKNVSSETVNITITQGLAVPTISSFFPPGYQVSFCLVMVLLFAVDTGLYFS

SEQ ID NO: 10225 - protein, 489 aa, synthetic construct
MALPVTALLLPLALLLHAARPEVQLQESGAEVKKPGSSVKVSCKASGFNIKDTYMHWVRQAPGQGLEWMGRIDPANGNSKYVPKFQGRVTITADESTSTAYMELSSLRSEDTAVYYCAPFGYYVSDYAMAYWGQGTTVTVSSASGGGGSGGGGSGGGGSDIVMTQSPDSLAVSLGERATINCRAGESVDIFGVGFLHWYQQKPGQPPKLLIYRASNLESGVPDRFSGSGSGTDFTLTIRPLQAEDVAVYYCQQTNEDPYTFGQGTKLEIKRTVAATRGMRTEDLPKAVVFLEPQWYRVLEKDSVTLKCQGAYSPEDNSTQWFHNESLISSQASSYFIDAATVDDSGEYRCQTNLSTLSDPVQLEVHIGWLLLQAPRWVFKEEDPIHLRCHSWKNTALHKVTYLQNGKGRKYFHHNSDFYIPKATLKDSGSYFCRGLVGSKNVSSETVNITITQGLAVPTISSFFPPGYQVSFCLVMVLLFAVDTGLYFS

SEQ ID NO: 10226 - protein, 482 aa, synthetic construct
MALPVTALLLPLALLLHAARPQVQLVQSGAEVKKPGSSVKVSCKASGGTFSSYAISWVRQAPGQGLEWMGLIIPRYGKARYAQKFQGRVTITADESTSTAYMELSSLRSEDTAVYYCARNWPYYYMDFWGQGTLVTVSSASGGGGSGGGGSGGGGSDIVLTQSPATLSLSPGERATLSCRASQNIVFNLAWYQQKPGQAPRLLIYDASNRATGVPARFSGSGSGTDFTLTISSLEPEDFAVYYCQQKKSMPLTFGQGTKVEIKRTVAATRGMRTEDLPKAVVFLEPQWYRVLEKDSVTLKCQGAYSPEDNSTQWFHNESLISSQASSYFIDAATVDDSGEYRCQTNLSTLSDPVQLEVHIGWLLLQAPRWVFKEEDPIHLRCHSWKNTALHKVTYLQNGKGRKYFHHNSDFYIPKATLKDSGSYFCRGLVGSKNVSSETVNITITQGLAVPTISSFFPPGYQVSFCLVMVLLFAVDTGLYFS

SEQ ID NO: 10227 - protein, 485 aa, synthetic construct
MALPVTALLLPLALLLHAARPEVQLVESGGGLVKPGGSLRLSCAASGFTFSNAWMSWVRQAPGKGLEWVGRIKSKTEGGTTDYAAPVKGRFTISRDDSKNTLYLQMNSLKTEDTAVYYCTTPYEWSWYDYWGQGTLVTVSSASGGGGSGGGGSGGGGSQTVVTQEPSLTVSPGGTVTLTCGSSTGAVTTSNYANWVQQKPGQAPRGLIGGTNKRAPGTPARFSGSLLGGKAALTLSGVQPEDEAEYYCALWYSNLWVFGGGTKLTVLTVAATRGMRTEDLPKAVVFLEPQWYRVLEKDSVTLKCQGAYSPEDNSTQWFHNESLISSQASSYFIDAATVDDSGEYRCQTNLSTLSDPVQLEVHIGWLLLQAPRWVFKEEDPIHLRCHSWKNTALHKVTYLQNGKGRKYFHHNSDFYIPKATLKDSGSYFCRGLVGSKNVSSETVNITITQGLAVPTISSFFPPGYQVSFCLVMVLLFAVDTGLYFS

SEQ ID NO: 10228 - protein, 485 aa, synthetic construct
MALPVTALLLPLALLLHAARPQVQLVQSGAEVKKPGASVKVSCKASGYTFTSYYMHWVRQAPGQGLEWMGIINPSGGSTSYAQKFQGRVTMTHDTSTSTVYMELSSLRSEDTAVYYCARSFFTGFHLDYWGQGTLVTVSSASGGGGSGGGGSGGGGSEIVLTQSPGTLSLSPGERATLSCRASQSVSSSYLAWYQQKPGQAPRLLIYGASSRATGIPDRFSGSGSGTDFTLTISRLEPEDFAVYYCQQYTNEHYYTFGQGTKVEIKRTVAATRGMRTEDLPKAVVFLEPQWYRVLEKDSVTLKCQGAYSPEDNSTQWFHNESLISSQASSYFIDAATVDDSGEYRCQTNLSTLSDPVQLEVHIGWLLLQAPRWVFKEEDPIHLRCHSWKNTALHKVTYLQNGKGRKYFHHNSDFYIPKATLKDSGSYFCRGLVGSKNVSSETVNITITQGLAVPTISSFFPPGYQVSFCLVMVLLFAVDTGLYFS

SEQ ID NO: 10229 - protein, 491 aa, synthetic construct
MALPVTALLLPLALLLHAARPEIVLTQSPATLSLSPGERATLSCSVSSSISSSNLHWYQQKPGQAPRLLIYGTSNLASGIPARFSGSGSGTDFTLTISSLEPEDFAVYYCQQWSSYPHTFGGGTKVEIKRTVAAGGGGSGGGGSGGGGSQVQLVQSGAEVKKPGASVKVSCKASGYTFTNYLIEWVRQAPGQGLEWMGLINPGSGGTNYNEKFKGRVTMTTDTSTSTAYMELRSLRSDDTAVYYCARRSPLGSWIYYAYDGVAYWGQGTLVTVSSASTRGMRTEDLPKAVVFLEPQWYRVLEKDSVTLKCQGAYSPEDNSTQWFHNESLISSQASSYFIDAATVDDSGEYRCQTNLSTLSDPVQLEVHIGWLLLQAPRWVFKEEDPIHLRCHSWKNTALHKVTYLQNGKGRKYFHHNSDFYIPKATLKDSGSYFCRGLVGSKNVSSETVNITITQGLAVPTISSFFPPGYQVSFCLVMVLLFAVDTGLYFS

SEQ ID NO: 10230 - protein, 476 aa, synthetic construct
MALPVTALLLPLALLLHAARPDIQMTQSPSSLSASVGDRVTITCKAGQNVGTSVAWYQQKPGKAPKLLIYSASYRYSGVPSRFSGSGSGTDFTLTISSLQPEDFATYYCQQYITYPYTFGQGTKVEIKRTVAAGGGGSGGGGSGGGGSEVQLVESGGGLVQPGGSLRLSCAASGFTFSRYWMSWVRQAPGKGLEWVAEINPDSSTIQYTPSLKARFTLSVDRSKNTLYLQMNSLRAEDTAVYYCARPAYWGQGTLVTVSSASTRGMRTEDLPKAVVFLEPQWYRVLEKDSVTLKCQGAYSPEDNSTQWFHNESLISSQASSYFIDAATVDDSGEYRCQTNLSTLSDPVQLEVHIGWLLLQAPRWVFKEEDPIHLRCHSWKNTALHKVTYLQNGKGRKYFHHNSDFYIPKATLKDSGSYFCRGLVGSKNVSSETVNITITQGLAVPTISSFFPPGYQVSFCLVMVLLFAVDTGLYFS

SEQ ID NO: 10231 - protein, 483 aa, synthetic construct
MALPVTALLLPLALLLHAARPDIQMTQSPSSLSASVGDRVTITCSASQDIGNFLNWYQQKPGKAPKLLIYYTSSLYSGVPSRFSGSGSGTDFTLTISSLQPEDFATYYCQQYSKLPLTFGQGTKLEIKRTVAAGGGGSGGGGSGGGGSQVQLVQSGAEVKKPGASVKVSCKASGYTFTGYNIHWVRQAPGQRLEWMGAIYPGNGDTSYKQKFRGRVTITRDTSASTAYMELSSLRSEDTAVYYCARGETARATFAYWGQGTLVTVSSASTRGMRTEDLPKAVVFLEPQWYRVLEKDSVTLKCQGAYSPEDNSTQWFHNESLISSQASSYFIDAATVDDSGEYRCQTNLSTLSDPVQLEVHIGWLLLQAPRWVFKEEDPIHLRCHSWKNTALHKVTYLQNGKGRKYFHHNSDFYIPKATLKDSGSYFCRGLVGSKNVSSETVNITITQGLAVPTISSFFPPGYQVSFCLVMVLLFAVDTGLYFS

SEQ ID NO: 10232 - protein, 347 aa, synthetic construct
MALPVTALLLPLALLLHAARPDVQVTQSPSSLSASVGDRVTITCRSSQSLANSYGNTFLSWYLHKPGKAPQLLIYGISNRFSGVPDRFSGSGSGTDFTLTISSLQPEDFATYYCLQGTHQPYTFGQGTKVEIKTRGMRTEDLPKAVVFLEPQWYRVLEKDSVTLKCQGAYSPEDNSTQWFHNESLISSQASSYFIDAATVDDSGEYRCQTNLSTLSDPVQLEVHIGWLLLQAPRWVFKEEDPIHLRCHSWKNTALHKVTYLQNGKGRKYFHHNSDFYIPKATLKDSGSYFCRGLVGSKNVSSETVNITITQGLAVPTISSFFPPGYQVSFCLVMVLLFAVDTGLYFS

SEQ ID NO: 10233 - protein, 342 aa, synthetic construct
MALPVTALLLPLALLLHAARPDIQMTQSPSSLSASVGDRVTITCRASQDISNYLNWYQQKPGKAVKLLIYYTSILHSGVPSRFSGSGSGTDYTLTISSLQPEDFATYFCQQGNTLPWTFGGGTKVEIKTRGMRTEDLPKAVVFLEPQWYRVLEKDSVTLKCQGAYSPEDNSTQWFHNESLISSQASSYFIDAATVDDSGEYRCQTNLSTLSDPVQLEVHIGWLLLQAPRWVFKEEDPIHLRCHSWKNTALHKVTYLQNGKGRKYFHHNSDFYIPKATLKDSGSYFCRGLVGSKNVSSETVNITITQGLAVPTISSFFPPGYQVSFCLVMVLLFAVDTGLYFS

SEQ ID NO: 10234 - protein, 343 aa, synthetic construct
MALPVTALLLPLALLLHAARPDIVMTQSQRFMTTSVGDRVSVTCKASQSVDSNVAWYQQKPRQSPKALIFSASLRFSGVPARFTGSGSGTDFTLTISNLQSEDLAEYFCQQYNNYPLTFGAGTKLELKRTRGMRTEDLPKAVVFLEPQWYRVLEKDSVTLKCQGAYSPEDNSTQWFHNESLISSQASSYFIDAATVDDSGEYRCQTNLSTLSDPVQLEVHIGWLLLQAPRWVFKEEDPIHLRCHSWKNTALHKVTYLQNGKGRKYFHHNSDFYIPKATLKDSGSYFCRGLVGSKNVSSETVNITITQGLAVPTISSFFPPGYQVSFCLVMVLLFAVDTGLYFS

SEQ ID NO: 10235 - protein, 343 aa, synthetic construct
MALPVTALLLPLALLLHAARPDIQMTQSPSSLSASVGDRVTITCRASQDISNYLNWYQQKPGKAPKLLIYYTSILHSGVPSRFSGSGSGTDFTLTISSLQPEDFATYYCQQGNTLPWTFGQGTKVEIKRTRGMRTEDLPKAVVFLEPQWYRVLEKDSVTLKCQGAYSPEDNSTQWFHNESLISSQASSYFIDAATVDDSGEYRCQTNLSTLSDPVQLEVHIGWLLLQAPRWVFKEEDPIHLRCHSWKNTALHKVTYLQNGKGRKYFHHNSDFYIPKATLKDSGSYFCRGLVGSKNVSSETVNITITQGLAVPTISSFFPPGYQVSFCLVMVLLFAVDTGLYFS

SEQ ID NO: 10236 - protein, 343 aa, synthetic construct
MALPVTALLLPLALLLHAARPDIQMTQSPSSLSASVGDRVTITCKASDHINNWLAWYQQKPGKAPKLLIYGATTLETGVPSRFSGSGSGTDFTLTISSLQPEDFATYYCQQSWNTPWTFGQGTKVEIKRTRGMRTEDLPKAVVFLEPQWYRVLEKDSVTLKCQGAYSPEDNSTQWFHNESLISSQASSYFIDAATVDDSGEYRCQTNLSTLSDPVQLEVHIGWLLLQAPRWVFKEEDPIHLRCHSWKNTALHKVTYLQNGKGRKYFHHNSDFYIPKATLKDSGSYFCRGLVGSKNVSSETVNITITQGLAVPTISSFFPPGYQVSFCLVMVLLFAVDTGLYFS

SEQ ID NO: 10237 - protein, 343 aa, synthetic construct
MALPVTALLLPLALLLHAARPSYVLTQPPSVSVAPGQTARITCGGNNIGSKSVHWYQQPPGQAPVVVVYDDSDRPSGIPERFSGSNSGNTATLTISRVEAGDEAVYYCQVWDSSSDHVVFGGGTKLTVLTRGMRTEDLPKAVVFLEPQWYRVLEKDSVTLKCQGAYSPEDNSTQWFHNESLISSQASSYFIDAATVDDSGEYRCQTNLSTLSDPVQLEVHIGWLLLQAPRWVFKEEDPIHLRCHSWKNTALHKVTYLQNGKGRKYFHHNSDFYIPKATLKDSGSYFCRGLVGSKNVSSETVNITITQGLAVPTISSFFPPGYQVSFCLVMVLLFAVDTGLYFS

SEQ ID NO: 10238 - protein, 343 aa, synthetic construct
MALPVTALLLPLALLLHAARPDIQMTQSPSSLSASVGDRVTITCMASEDIYIRLAWYQQKPGKAPKLLIYAATSLETGVPSRFSGSGSGTDFTLTISSLQPEDFATYYCQQYWSSPWTFGQGTKVEIKRTRGMRTEDLPKAVVFLEPQWYRVLEKDSVTLKCQGAYSPEDNSTQWFHNESLISSQASSYFIDAATVDDSGEYRCQTNLSTLSDPVQLEVHIGWLLLQAPRWVFKEEDPIHLRCHSWKNTALHKVTYLQNGKGRKYFHHNSDFYIPKATLKDSGSYFCRGLVGSKNVSSETVNITITQGLAVPTISSFFPPGYQVSFCLVMVLLFAVDTGLYFS

SEQ ID NO: 10239 - protein, 347 aa, synthetic construct
MALPVTALLLPLALLLHAARPDIQMTQSPSSVSASVGDRVTITCRASESVDNYGISFMNWYQQKPGKAPKLLISAASNRATGVPSRFSGSGSGTDFTLTISSLQPEDFAIYYCQQSKEVPWTFGQGTKVEIKRTRGMRTEDLPKAVVFLEPQWYRVLEKDSVTLKCQGAYSPEDNSTQWFHNESLISSQASSYFIDAATVDDSGEYRCQTNLSTLSDPVQLEVHIGWLLLQAPRWVFKEEDPIHLRCHSWKNTALHKVTYLQNGKGRKYFHHNSDFYIPKATLKDSGSYFCRGLVGSKNVSSETVNITITQGLAVPTISSFFPPGYQVSFCLVMVLLFAVDTGLYFS

SEQ ID NO: 10240 - protein, 347 aa, synthetic construct
MALPVTALLLPLALLLHAARPDIQLTQSPSSLSASVGDRVTITCRASKSVSTSGYSYMHWYQQKPGKAPKLLIYLVSNLESGVPSRFSGSGSGTDFTLTISSLQPEDFATYYCQQFSELPWTFGQGTKVEIKRTRGMRTEDLPKAVVFLEPQWYRVLEKDSVTLKCQGAYSPEDNSTQWFHNESLISSQASSYFIDAATVDDSGEYRCQTNLSTLSDPVQLEVHIGWLLLQAPRWVFKEEDPIHLRCHSWKNTALHKVTYLQNGKGRKYFHHNSDFYIPKATLKDSGSYFCRGLVGSKNVSSETVNITITQGLAVPTISSFFPPGYQVSFCLVMVLLFAVDTGLYFS

SEQ ID NO: 10241 - protein, 344 aa, synthetic construct
MALPVTALLLPLALLLHAARPDIQMTQSPSSVSASVGDRVTITCRASQFISSSYLSWYQQKPGKAPKLLISGSSSRATGVPSRFSGSGSGTDFTLTISSLQPEDFAIYYCQQLYSSPMTFGQGTKVEIKRTRGMRTEDLPKAVVFLEPQWYRVLEKDSVTLKCQGAYSPEDNSTQWFHNESLISSQASSYFIDAATVDDSGEYRCQTNLSTLSDPVQLEVHIGWLLLQAPRWVFKEEDPIHLRCHSWKNTALHKVTYLQNGKGRKYFHHNSDFYIPKATLKDSGSYFCRGLVGSKNVSSETVNITITQGLAVPTISSFFPPGYQVSFCLVMVLLFAVDTGLYFS

SEQ ID NO: 10242 - protein, 358 aa, synthetic construct
MALPVTALLLPLALLLHAARPQVQLVESGGGLVQAGDSVTLSCTASGRTFSSYALAWFRQRPGKEREFVAGLRWGGPTNYADSVKDRFTISGDSAKHTMYLQMNSLKPEDTAVYYCGYNPGGWAVPSQYEYDSWGQGTQVTVSSTRGMRTEDLPKAVVFLEPQWYRVLEKDSVTLKCQGAYSPEDNSTQWFHNESLISSQASSYFIDAATVDDSGEYRCQTNLSTLSDPVQLEVHIGWLLLQAPRWVFKEEDPIHLRCHSWKNTALHKVTYLQNGKGRKYFHHNSDFYIPKATLKDSGSYFCRGLVGSKNVSSETVNITITQGLAVPTISSFFPPGYQVSFCLVMVLLFAVDTGLYFS

SEQ ID NO: 10243 - protein, 353 aa, synthetic construct
MALPVTALLLPLALLLHAARPQVQLQESGGGLAQAGGSLRLSCAASGRTFSMGWFRQAPGKEREFVAAITYSGGSPYYASSVRGRFTISRDNAKNTVYLQMNSLKPEDTAVYYCAANPTYGSDWNAENWGQGTQVTVSSTRGMRTEDLPKAVVFLEPQWYRVLEKDSVTLKCQGAYSPEDNSTQWFHNESLISSQASSYFIDAATVDDSGEYRCQTNLSTLSDPVQLEVHIGWLLLQAPRWVFKEEDPIHLRCHSWKNTALHKVTYLQNGKGRKYFHHNSDFYIPKATLKDSGSYFCRGLVGSKNVSSETVNITITQGLAVPTISSFFPPGYQVSFCLVMVLLFAVDTGLYFS

SEQ ID NO: 10244 - protein, 351 aa, synthetic construct
MALPVTALLLPLALLLHAARPEVQLVESGGGLVQPGGSLRLSCAASGFSFSDFWMSWVRQAPGKGLEWVATISQAGSEKDYVDSVKGRFTISRDNAKKSLYLQMNSLRAEDTAVYYCASGVYSFDYRGQGTLVTVSSTRGMRTEDLPKAVVFLEPQWYRVLEKDSVTLKCQGAYSPEDNSTQWFHNESLISSQASSYFIDAATVDDSGEYRCQTNLSTLSDPVQLEVHIGWLLLQAPRWVFKEEDPIHLRCHSWKNTALHKVTYLQNGKGRKYFHHNSDFYIPKATLKDSGSYFCRGLVGSKNVSSETVNITITQGLAVPTISSFFPPGYQVSFCLVMVLLFAVDTGLYFS

SEQ ID NO: 10245 - protein, 351 aa, synthetic construct
MALPVTALLLPLALLLHAARPEVQLVESGGGLVQPGGSLRLSCAASGFTFSNYWMSWVRQAPGKGQEWVATINQDGSDKDYVDSVKGRFTISRDNAKKSLYLQMNSLRAEDTAVYYCASGVYSFDYRGQGTLVTVSSTRGMRTEDLPKAVVFLEPQWYRVLEKDSVTLKCQGAYSPEDNSTQWFHNESLISSQASSYFIDAATVDDSGEYRCQTNLSTLSDPVQLEVHIGWLLLQAPRWVFKEEDPIHLRCHSWKNTALHKVTYLQNGKGRKYFHHNSDFYIPKATLKDSGSYFCRGLVGSKNVSSETVNITITQGLAVPTISSFFPPGYQVSFCLVMVLLFAVDTGLYFS

SEQ ID NO: 10246 - protein, 351 aa, synthetic construct
MALPVTALLLPLALLLHAARPEVQLVESGGGLVQPGGSLRLSCAASGIDFSRYWMSWVRQAPGKGLEWVATISQAGSEKDYVDSVKGRFTISRDNAKKSLYLQMNSLRAEDTAVYYCASGVYSFDYRGQGTLVTVSSTRGMRTEDLPKAVVFLEPQWYRVLEKDSVTLKCQGAYSPEDNSTQWFHNESLISSQASSYFIDAATVDDSGEYRCQTNLSTLSDPVQLEVHIGWLLLQAPRWVFKEEDPIHLRCHSWKNTALHKVTYLQNGKGRKYFHHNSDFYIPKATLKDSGSYFCRGLVGSKNVSSETVNITITQGLAVPTISSFFPPGYQVSFCLVMVLLFAVDTGLYFS

SEQ ID NO: 10247 - protein, 351 aa, synthetic construct
MALPVTALLLPLALLLHAARPEVQLVESGGGLVQPGGSLRLSCAASGIDFSRYWMSWVRQAPGKGQEWVATINQDGSDKDYVDSVKGRFTISRDNAKKSLYLQMNSLRAEDTAVYYCASGVYSFDYRGQGTLVTVSSTRGMRTEDLPKAVVFLEPQWYRVLEKDSVTLKCQGAYSPEDNSTQWFHNESLISSQASSYFIDAATVDDSGEYRCQTNLSTLSDPVQLEVHIGWLLLQAPRWVFKEEDPIHLRCHSWKNTALHKVTYLQNGKGRKYFHHNSDFYIPKATLKDSGSYFCRGLVGSKNVSSETVNITITQGLAVPTISSFFPPGYQVSFCLVMVLLFAVDTGLYFS

SEQ ID NO: 10248 - protein, 355 aa, synthetic construct
MALPVTALLLPLALLLHAARPEVQLVESGGGLVQPGGSLRLSCTFSGGTFSSYTMGWFRQAPGKEREFVAEVRWGGVTTYSNSLKDRFSISEDSVKNAVYLQMNSLKPEDTAVYYCAAVRQMYMTVVPDYWGQGTLVTVSSTRGMRTEDLPKAVVFLEPQWYRVLEKDSVTLKCQGAYSPEDNSTQWFHNESLISSQASSYFIDAATVDDSGEYRCQTNLSTLSDPVQLEVHIGWLLLQAPRWVFKEEDPIHLRCHSWKNTALHKVTYLQNGKGRKYFHHNSDFYIPKATLKDSGSYFCRGLVGSKNVSSETVNITITQGLAVPTISSFFPPGYQVSFCLVMVLLFAVDTGLYFS

SEQ ID NO: 10249 - protein, 353 aa, synthetic construct
MALPVTALLLPLALLLHAARPEVQLVESGGGLVQAGGSLRLSCAASGRTFSMGWFRQAPGKEREFVAAITYSGGSPYYADSVKGRFTISRDNAKNTVYLQMNSLKPEDTAVYYCAANPTYGSDWNAENWGQGTQVTVSSTRGMRTEDLPKAVVFLEPQWYRVLEKDSVTLKCQGAYSPEDNSTQWFHNESLISSQASSYFIDAATVDDSGEYRCQTNLSTLSDPVQLEVHIGWLLLQAPRWVFKEEDPIHLRCHSWKNTALHKVTYLQNGKGRKYFHHNSDFYIPKATLKDSGSYFCRGLVGSKNVSSETVNITITQGLAVPTISSFFPPGYQVSFCLVMVLLFAVDTGLYFS

SEQ ID NO: 10250 - protein, 353 aa, synthetic construct
MALPVTALLLPLALLLHAARPQLQLQESGPGLVKPSETLSLTCTVSGGSISSGDYYWGWIRQPPGKGLEWIGHIYYSGATYYNPSLKSRVTISVDTSRNQFSLKLSSVTAADTAVYYCTRDDSSNWRSRGQGTLVTVSSTRGMRTEDLPKAVVFLEPQWYRVLEKDSVTLKCQGAYSPEDNSTQWFHNESLISSQASSYFIDAATVDDSGEYRCQTNLSTLSDPVQLEVHIGWLLLQAPRWVFKEEDPIHLRCHSWKNTALHKVTYLQNGKGRKYFHHNSDFYIPKATLKDSGSYFCRGLVGSKNVSSETVNITITQGLAVPTISSFFPPGYQVSFCLVMVLLFAVDTGLYFS

SEQ ID NO: 10251 - protein, 353 aa, synthetic construct
MALPVTALLLPLALLLHAARPQLQLQESGPGLVKPSETLSLTCTVSGDSISSGDYYWGWIRQPPGKGLEWIGHIYYSGVTYYNPSLKSRVTISVDTSRNQFSLKLSSVTAADTAVYYCTREDSSNWRSRGQGTLVTVSSTRGMRTEDLPKAVVFLEPQWYRVLEKDSVTLKCQGAYSPEDNSTQWFHNESLISSQASSYFIDAATVDDSGEYRCQTNLSTLSDPVQLEVHIGWLLLQAPRWVFKEEDPIHLRCHSWKNTALHKVTYLQNGKGRKYFHHNSDFYIPKATLKDSGSYFCRGLVGSKNVSSETVNITITQGLAVPTISSFFPPGYQVSFCLVMVLLFAVDTGLYFS

SEQ ID NO: 10252 - protein, 353 aa, synthetic construct
MALPVTALLLPLALLLHAARPQLQLQESGPGLVKPSETLSLTCTVSGGSISSGDYYWGWIRQPPGKGLEWIGSISYSGSTYYNPSLKSRVTISVDTSRNQFSLKLSSVTAADTAVYYCTREDSSNWRSRGQGTLVTVSSTRGMRTEDLPKAVVFLEPQWYRVLEKDSVTLKCQGAYSPEDNSTQWFHNESLISSQASSYFIDAATVDDSGEYRCQTNLSTLSDPVQLEVHIGWLLLQAPRWVFKEEDPIHLRCHSWKNTALHKVTYLQNGKGRKYFHHNSDFYIPKATLKDSGSYFCRGLVGSKNVSSETVNITITQGLAVPTISSFFPPGYQVSFCLVMVLLFAVDTGLYFS

SEQ ID NO: 10253 - protein, 359 aa, synthetic construct
MALPVTALLLPLALLLHAARPQLQLQESGPGLVKPSETLALTCNVSGGSISSSSYYWGWIRQPPGKRLEWIGSIYYSGSTYFNPSLKSRVTISVDTSKNQFSLKLSSVTAADTAVYYCAGGDYYGPVGQWPSDYRGQGTLVTVSSTRGMRTEDLPKAVVFLEPQWYRVLEKDSVTLKCQGAYSPEDNSTQWFHNESLISSQASSYFIDAATVDDSGEYRCQTNLSTLSDPVQLEVHIGWLLLQAPRWVFKEEDPIHLRCHSWKNTALHKVTYLQNGKGRKYFHHNSDFYIPKATLKDSGSYFCRGLVGSKNVSSETVNITITQGLAVPTISSFFPPGYQVSFCLVMVLLFAVDTGLYFS

SEQ ID NO: 10254 - protein, 365 aa, synthetic construct
MALPVTALLLPLALLLHAARPEVQLLESGGGLVQPGGSLRLSCAASGFIFSSYAMSWVRQAPGKGQEWVSGVSGTGVNTYYADSVKGRFTISRDNSKNTLYLQMNSLRAEDTAVYYCASGKGWDSGSWYEDYRGQGTLVTVSSTRPRLCLLTRGMRTEDLPKAVVFLEPQWYRVLEKDSVTLKCQGAYSPEDNSTQWFHNESLISSQASSYFIDAATVDDSGEYRCQTNLSTLSDPVQLEVHIGWLLLQAPRWVFKEEDPIHLRCHSWKNTALHKVTYLQNGKGRKYFHHNSDFYIPKATLKDSGSYFCRGLVGSKNVSSETVNITITQGLAVPTISSFFPPGYQVSFCLVMVLLFAVDTGLYFS

SEQ ID NO: 10255 - protein, 359 aa, synthetic construct
MALPVTALLLPLALLLHAARPQLQLQESGPGLVKPSETLSLTCTVSGGSVSSSSYYWGWIRQPPGKRLELIGSIYYGGSTYFNPSLKSRVTISVDTSKNQFSLKLSSVTAADTAVYYCAGGDTYGPVGQWPSDYRGQGTLVTVSSTRGMRTEDLPKAVVFLEPQWYRVLEKDSVTLKCQGAYSPEDNSTQWFHNESLISSQASSYFIDAATVDDSGEYRCQTNLSTLSDPVQLEVHIGWLLLQAPRWVFKEEDPIHLRCHSWKNTALHKVTYLQNGKGRKYFHHNSDFYIPKATLKDSGSYFCRGLVGSKNVSSETVNITITQGLAVPTISSFFPPGYQVSFCLVMVLLFAVDTGLYFS

SEQ ID NO: 10256 - protein, 357 aa, synthetic construct
MALPVTALLLPLALLLHAARPEVQLLESGGGLVQPGGSLRLSCAASGFIFSIYAMSWVRQAPGKGLEWVSGISGSGVNTYYADSVKGRFIISRDNSRNTVYLQMNSLRADDTAVYHCANGKGWDGNTWYEDYRGQGTLVTVSSTRGMRTEDLPKAVVFLEPQWYRVLEKDSVTLKCQGAYSPEDNSTQWFHNESLISSQASSYFIDAATVDDSGEYRCQTNLSTLSDPVQLEVHIGWLLLQAPRWVFKEEDPIHLRCHSWKNTALHKVTYLQNGKGRKYFHHNSDFYIPKATLKDSGSYFCRGLVGSKNVSSETVNITITQGLAVPTISSFFPPGYQVSFCLVMVLLFAVDTGLYFS

SEQ ID NO: 10257 - protein, 352 aa, synthetic construct
MALPVTALLLPLALLLHAARPEVQVLESGGGLVQPGGSLRLSCAASGFTFSNFAMSWVRQAPGKGLEWVSTISGSAGTTDYADSVKGRFTISRDNSKKTLYLQMNSLRVEDTAVYYCADGRGPFFDYRGQGTLVTVSSTRGMRTEDLPKAVVFLEPQWYRVLEKDSVTLKCQGAYSPEDNSTQWFHNESLISSQASSYFIDAATVDDSGEYRCQTNLSTLSDPVQLEVHIGWLLLQAPRWVFKEEDPIHLRCHSWKNTALHKVTYLQNGKGRKYFHHNSDFYIPKATLKDSGSYFCRGLVGSKNVSSETVNITITQGLAVPTISSFFPPGYQVSFCLVMVLLFAVDTGLYFS

SEQ ID NO: 10258 - protein, 354 aa, synthetic construct
MALPVTALLLPLALLLHAARPEVQLVESGGGLVQPGGSLRLSCAASGFNIKDTCIGWVRRAPGKEEELVAKICKYSGHTRYADSVKGRFTISADTSKNTAYLQMNSLRAEDTAVYYCAAVSVRDGHYNYWGQGTTVTVSSTRGMRTEDLPKAVVFLEPQWYRVLEKDSVTLKCQGAYSPEDNSTQWFHNESLISSQASSYFIDAATVDDSGEYRCQTNLSTLSDPVQLEVHIGWLLLQAPRWVFKEEDPIHLRCHSWKNTALHKVTYLQNGKGRKYFHHNSDFYIPKATLKDSGSYFCRGLVGSKNVSSETVNITITQGLAVPTISSFFPPGYQVSFCLVMVLLFAVDTGLYFS

SEQ ID NO: 10259 - protein, 354 aa, synthetic construct
MALPVTALLLPLALLLHAARPEVQLVESGGGLVQPGGSLRLSCAASGFNIKDTCIGWVRRAPGKEEELVADICPYKGSTRYADSVKGRFTISADTSKNTAYLQMNSLRAEDTAVYYCAIVSARDGYYNYWGQGTTVTVSSTRGMRTEDLPKAVVFLEPQWYRVLEKDSVTLKCQGAYSPEDNSTQWFHNESLISSQASSYFIDAATVDDSGEYRCQTNLSTLSDPVQLEVHIGWLLLQAPRWVFKEEDPIHLRCHSWKNTALHKVTYLQNGKGRKYFHHNSDFYIPKATLKDSGSYFCRGLVGSKNVSSETVNITITQGLAVPTISSFFPPGYQVSFCLVMVLLFAVDTGLYFS

SEQ ID NO: 10260 - protein, 354 aa, synthetic construct
MALPVTALLLPLALLLHAARPEVQLLESGGGLVQPGGSLRLSCAASGFTFSSYAMSWVRQAPGKGLEWVSAITGSGGSTYYADSVKGRFTISRDNSKNTLYLQMNSLRAEDTAVYYCAKDEDGGSLLGHRGQGTLVTVSSTRGMRTEDLPKAVVFLEPQWYRVLEKDSVTLKCQGAYSPEDNSTQWFHNESLISSQASSYFIDAATVDDSGEYRCQTNLSTLSDPVQLEVHIGWLLLQAPRWVFKEEDPIHLRCHSWKNTALHKVTYLQNGKGRKYFHHNSDFYIPKATLKDSGSYFCRGLVGSKNVSSETVNITITQGLAVPTISSFFPPGYQVSFCLVMVLLFAVDTGLYFS

SEQ ID NO: 10261 - protein, 354 aa, synthetic construct
MALPVTALLLPLALLLHAARPEVQLLESGGGLIQPGGSLRLSCAASGFTFSSHAMTWVRQAPGKGLEWVSAISSGGSYTYYADSVKGRFTISRDNSKNTLYLQMNSLRAEDTAVYYCAKDEDGGSLLGHRGQGTLVTVSSTRGMRTEDLPKAVVFLEPQWYRVLEKDSVTLKCQGAYSPEDNSTQWFHNESLISSQASSYFIDAATVDDSGEYRCQTNLSTLSDPVQLEVHIGWLLLQAPRWVFKEEDPIHLRCHSWKNTALHKVTYLQNGKGRKYFHHNSDFYIPKATLKDSGSYFCRGLVGSKNVSSETVNITITQGLAVPTISSFFPPGYQVSFCLVMVLLFAVDTGLYFS

SEQ ID NO: 10262 - protein, 354 aa, synthetic construct
MALPVTALLLPLALLLHAARPEVQLVESGGGLVQPGGSLRLSCAASGFSFSDFWMSWVRQAPGKGLEWVSAISGSGDYTHYADSVKGRFTISRDNSKNTVYLQMNSLRAEDSAVYYCAKDEDGGSLLGHRGQGTLVTVSSTRGMRTEDLPKAVVFLEPQWYRVLEKDSVTLKCQGAYSPEDNSTQWFHNESLISSQASSYFIDAATVDDSGEYRCQTNLSTLSDPVQLEVHIGWLLLQAPRWVFKEEDPIHLRCHSWKNTALHKVTYLQNGKGRKYFHHNSDFYIPKATLKDSGSYFCRGLVGSKNVSSETVNITITQGLAVPTISSFFPPGYQVSFCLVMVLLFAVDTGLYFS

SEQ ID NO: 10263 - protein, 356 aa, synthetic construct
MALPVTALLLPLALLLHAARPEVQLLESGGGLVQPGGSLRLSCAASGFAFSIYDMSWVRQAPGKGLEWVSSISGSGDYIYYADSVKGRFTISRDISKNTLYLQMNSLRAEDTAVYYCAKEGTGANSSLADYRGQGTLVTVSSTRGMRTEDLPKAVVFLEPQWYRVLEKDSVTLKCQGAYSPEDNSTQWFHNESLISSQASSYFIDAATVDDSGEYRCQTNLSTLSDPVQLEVHIGWLLLQAPRWVFKEEDPIHLRCHSWKNTALHKVTYLQNGKGRKYFHHNSDFYIPKATLKDSGSYFCRGLVGSKNVSSETVNITITQGLAVPTISSFFPPGYQVSFCLVMVLLFAVDTGLYFS

SEQ ID NO: 10264 - protein, 356 aa, synthetic construct
MALPVTALLLPLALLLHAARPEVQLLESGGGLVQPGGSLRLSCAASGFTFSSYAMSWVRQAPGKGLEWVSSISGSGDYIYYADSVKGRFTISRDISKNTLYLQMNSLRAEDTAVYYCAKEGTGANSSLADYRGQGTLVTVSSTRGMRTEDLPKAVVFLEPQWYRVLEKDSVTLKCQGAYSPEDNSTQWFHNESLISSQASSYFIDAATVDDSGEYRCQTNLSTLSDPVQLEVHIGWLLLQAPRWVFKEEDPIHLRCHSWKNTALHKVTYLQNGKGRKYFHHNSDFYIPKATLKDSGSYFCRGLVGSKNVSSETVNITITQGLAVPTISSFFPPGYQVSFCLVMVLLFAVDTGLYFS

SEQ ID NO: 10265 - protein, 353 aa, synthetic construct
MALPVTALLLPLALLLHAARPQVQLVESGGGLVQPGGSLRLSCAASGFTFTNHAMSWVRQAPGKGLELVSSISGNGRTTYYADSVKGRFTISRDISKNTLDLQMNSLRAEDTAVYYCAKDGGETLVDSRGQGTLVTVSSTRGMRTEDLPKAVVFLEPQWYRVLEKDSVTLKCQGAYSPEDNSTQWFHNESLISSQASSYFIDAATVDDSGEYRCQTNLSTLSDPVQLEVHIGWLLLQAPRWVFKEEDPIHLRCHSWKNTALHKVTYLQNGKGRKYFHHNSDFYIPKATLKDSGSYFCRGLVGSKNVSSETVNITITQGLAVPTISSFFPPGYQVSFCLVMVLLFAVDTGLYFS

SEQ ID NO: 10266 - protein, 354 aa, synthetic construct
MALPVTALLLPLALLLHAARPEVQLLESGGGLIQPGGSLRLSCAASGFTFSSHAMTWVRQAPGKGLEWVSAISGSGDYTHYADSVKGRFTISRDNSKNTVYLQMNSLRAEDSAVYYCAKDEDGGSLLGHRGQGTLVTVSSTRGMRTEDLPKAVVFLEPQWYRVLEKDSVTLKCQGAYSPEDNSTQWFHNESLISSQASSYFIDAATVDDSGEYRCQTNLSTLSDPVQLEVHIGWLLLQAPRWVFKEEDPIHLRCHSWKNTALHKVTYLQNGKGRKYFHHNSDFYIPKATLKDSGSYFCRGLVGSKNVSSETVNITITQGLAVPTISSFFPPGYQVSFCLVMVLLFAVDTGLYFS

SEQ ID NO: 10267 - protein, 355 aa, synthetic construct
MALPVTALLLPLALLLHAARPQVQLQESGGGLVQAGDSLRLSCAASGRAVSSLFMGWFRRAPGKERELVAAISRYSLYTYYADSVKGRFTISADNAKNAVYLQMNSLKPEDTAVYYCASKLEYTSNDYDSWGQGTQVTVSSTRGMRTEDLPKAVVFLEPQWYRVLEKDSVTLKCQGAYSPEDNSTQWFHNESLISSQASSYFIDAATVDDSGEYRCQTNLSTLSDPVQLEVHIGWLLLQAPRWVFKEEDPIHLRCHSWKNTALHKVTYLQNGKGRKYFHHNSDFYIPKATLKDSGSYFCRGLVGSKNVSSETVNITITQGLAVPTISSFFPPGYQVSFCLVMVLLFAVDTGLYFS

SEQ ID NO: 10268 - protein, 355 aa, synthetic construct
MALPVTALLLPLALLLHAARPEVQLQESGGGLVQPGGSLRLSCAASGRTFSSLFMGWFRQAPGKERELVAAISRYSLYTYYADSVKGRFTISADNAKNAVYLQMNSLKPEDTAVYYCASKLEYTSNDYDSWGQGTQVTVSSTRGMRTEDLPKAVVFLEPQWYRVLEKDSVTLKCQGAYSPEDNSTQWFHNESLISSQASSYFIDAATVDDSGEYRCQTNLSTLSDPVQLEVHIGWLLLQAPRWVFKEEDPIHLRCHSWKNTALHKVTYLQNGKGRKYFHHNSDFYIPKATLKDSGSYFCRGLVGSKNVSSETVNITITQGLAVPTISSFFPPGYQVSFCLVMVLLFAVDTGLYFS

SEQ ID NO: 10269 - protein, 355 aa, synthetic construct
MALPVTALLLPLALLLHAARPEVQLQESGGGLVQPGGSLRLSCAASGRTFSSLFMGWVRQAPGKGLELVSAISRYSLYTYYADSVKGRFTISRDNAKNTLYLQMNSLRPEDTAVYYCASKLEYTSNDYDSWGQGTLVTVSSTRGMRTEDLPKAVVFLEPQWYRVLEKDSVTLKCQGAYSPEDNSTQWFHNESLISSQASSYFIDAATVDDSGEYRCQTNLSTLSDPVQLEVHIGWLLLQAPRWVFKEEDPIHLRCHSWKNTALHKVTYLQNGKGRKYFHHNSDFYIPKATLKDSGSYFCRGLVGSKNVSSETVNITITQGLAVPTISSFFPPGYQVSFCLVMVLLFAVDTGLYFS

SEQ ID NO: 10270 - protein, 363 aa, synthetic construct
MALPVTALLLPLALLLHAARPEVQLVESGGGLVQPGGSLRLSCEASGFASDDYIIGWFRQAPGKEREGVSCISSKYANTVYTDSVKGRFRLSRGTAKNTVYLQMSALKPEDTAVYYCAMDSRRVTCPEISTMHRNFDSWGQGTLVTVSSTRGMRTEDLPKAVVFLEPQWYRVLEKDSVTLKCQGAYSPEDNSTQWFHNESLISSQASSYFIDAATVDDSGEYRCQTNLSTLSDPVQLEVHIGWLLLQAPRWVFKEEDPIHLRCHSWKNTALHKVTYLQNGKGRKYFHHNSDFYIPKATLKDSGSYFCRGLVGSKNVSSETVNITITQGLAVPTISSFFPPGYQVSFCLVMVLLFAVDTGLYFS

SEQ ID NO: 10271 - protein, 363 aa, synthetic construct
MALPVTALLLPLALLLHAARPEVQLVESGGGLVQPGGSLRLSCAASGFASDYYIIGWFRQAPGKEREGVSCISSRYANTNYADSVKGRFTISRDNAKNTVYLQMNSLKPEDTAVYYCAADTRRYTCPDIATMHRNFDSWGQGTLVTVSSTRGMRTEDLPKAVVFLEPQWYRVLEKDSVTLKCQGAYSPEDNSTQWFHNESLISSQASSYFIDAATVDDSGEYRCQTNLSTLSDPVQLEVHIGWLLLQAPRWVFKEEDPIHLRCHSWKNTALHKVTYLQNGKGRKYFHHNSDFYIPKATLKDSGSYFCRGLVGSKNVSSETVNITITQGLAVPTISSFFPPGYQVSFCLVMVLLFAVDTGLYFS

SEQ ID NO: 10272 - protein, 359 aa, synthetic construct
MALPVTALLLPLALLLHAARPEVQLVESGGSLVQPGGSLRLSCAASGFTFDDYAMSWVRQVPGKGLEWVSSINWSGTHTDYADSVKGRFTISRNNANNTLYLQMNSLKSEDTAVYYCAKNWRDAGTTWFEKSGSAGQGTQVTVSSTRGMRTEDLPKAVVFLEPQWYRVLEKDSVTLKCQGAYSPEDNSTQWFHNESLISSQASSYFIDAATVDDSGEYRCQTNLSTLSDPVQLEVHIGWLLLQAPRWVFKEEDPIHLRCHSWKNTALHKVTYLQNGKGRKYFHHNSDFYIPKATLKDSGSYFCRGLVGSKNVSSETVNITITQGLAVPTISSFFPPGYQVSFCLVMVLLFAVDTGLYFS

SEQ ID NO: 10273 - protein, 353 aa, synthetic construct
MALPVTALLLPLALLLHAARPEVQLVESGGGLVQAGGSLRLSCAASGITFSINTMGWYRQAPGKQRELVALISSIGDTYYADSVKGRFTISRDNAKNTVYLQMNSLKPEDTAVYYCKRFRTAAQGTDYWGQGTQVTVSSTRGMRTEDLPKAVVFLEPQWYRVLEKDSVTLKCQGAYSPEDNSTQWFHNESLISSQASSYFIDAATVDDSGEYRCQTNLSTLSDPVQLEVHIGWLLLQAPRWVFKEEDPIHLRCHSWKNTALHKVTYLQNGKGRKYFHHNSDFYIPKATLKDSGSYFCRGLVGSKNVSSETVNITITQGLAVPTISSFFPPGYQVSFCLVMVLLFAVDTGLYFS

SEQ ID NO: 10274 - protein, 354 aa, synthetic construct
MALPVTALLLPLALLLHAARPEVQLVESGGGLVQPGGSLRLSCAASGSIFGFNDMAWYRQAPGKQRELVALISRVGVTSSADSVKGRFTISRVNAKDTVYLQMNSLKPEDTAVYYCYMDQRLDGSTLAYWGQGTQVTVSSTRGMRTEDLPKAVVFLEPQWYRVLEKDSVTLKCQGAYSPEDNSTQWFHNESLISSQASSYFIDAATVDDSGEYRCQTNLSTLSDPVQLEVHIGWLLLQAPRWVFKEEDPIHLRCHSWKNTALHKVTYLQNGKGRKYFHHNSDFYIPKATLKDSGSYFCRGLVGSKNVSSETVNITITQGLAVPTISSFFPPGYQVSFCLVMVLLFAVDTGLYFS

SEQ ID NO: 10275 - protein, 355 aa, synthetic construct
MALPVTALLLPLALLLHAARPDVQLVESGGGLVQPGGSLRLSCAASGSIGGLNAMAWYRQAPGKERELVAGIFGVGSTRYADSVKGRFTISRDNSKNTVYLQMNSLRPEDTAVYYCRMSSVTRGSSDYWGQGTLVTVSSLETRGMRTEDLPKAVVFLEPQWYRVLEKDSVTLKCQGAYSPEDNSTQWFHNESLISSQASSYFIDAATVDDSGEYRCQTNLSTLSDPVQLEVHIGWLLLQAPRWVFKEEDPIHLRCHSWKNTALHKVTYLQNGKGRKYFHHNSDFYIPKATLKDSGSYFCRGLVGSKNVSSETVNITITQGLAVPTISSFFPPGYQVSFCLVMVLLFAVDTGLYFS

SEQ ID NO: 10276 - protein, 360 aa, synthetic construct
MALPVTALLLPLALLLHAARPEVQLVESGGGLVQPGGSLRLSCAASGRTYYLNAMGWFRQAPGKEREFVAAIDWSEGNKDYADSVKGRFTISRDNSKNTVYLQMNSLRPEDTAVYYCAADTPPWGPLIYIESYDSWGQGTLVTVSSTRGMRTEDLPKAVVFLEPQWYRVLEKDSVTLKCQGAYSPEDNSTQWFHNESLISSQASSYFIDAATVDDSGEYRCQTNLSTLSDPVQLEVHIGWLLLQAPRWVFKEEDPIHLRCHSWKNTALHKVTYLQNGKGRKYFHHNSDFYIPKATLKDSGSYFCRGLVGSKNVSSETVNITITQGLAVPTISSFFPPGYQVSFCLVMVLLFAVDTGLYFS

SEQ ID NO: 10277 - protein, 358 aa, synthetic construct
MALPVTALLLPLALLLHAARPEVQLVESGGGSVQAGGSLRLSCAASGDTYGSYWMGWFRQAPGKEREGVAAINRGGGYTVYADSVKGRFTISRDTAKNTVYLQMNSLRPDDTADYYCAASGVLGGLHEDWFNYWGQGTLVTVSSTRGMRTEDLPKAVVFLEPQWYRVLEKDSVTLKCQGAYSPEDNSTQWFHNESLISSQASSYFIDAATVDDSGEYRCQTNLSTLSDPVQLEVHIGWLLLQAPRWVFKEEDPIHLRCHSWKNTALHKVTYLQNGKGRKYFHHNSDFYIPKATLKDSGSYFCRGLVGSKNVSSETVNITITQGLAVPTISSFFPPGYQVSFCLVMVLLFAVDTGLYFS

SEQ ID NO: 10278 - protein, 357 aa, synthetic construct
MALPVTALLLPLALLLHAARPVQLVESGGGSVQAGGSLRLSCAASGDTYGSYWMGWFRQAPGQEREAVAAINRGGGYTVYADSVKGRFTISRDNAKNTLYLQMNSLRPDDTADYYCAASGVLGGLHEDWFNYWGQGTLVTVSSTRGMRTEDLPKAVVFLEPQWYRVLEKDSVTLKCQGAYSPEDNSTQWFHNESLISSQASSYFIDAATVDDSGEYRCQTNLSTLSDPVQLEVHIGWLLLQAPRWVFKEEDPIHLRCHSWKNTALHKVTYLQNGKGRKYFHHNSDFYIPKATLKDSGSYFCRGLVGSKNVSSETVNITITQGLAVPTISSFFPPGYQVSFCLVMVLLFAVDTGLYFS

SEQ ID NO: 10279 - protein, 359 aa, synthetic construct
MALPVTALLLPLALLLHAARPEVQLVESGGGSVQTGGSLRLTCAASGRTSRSYGMGWFRQAPGKEREFVSGISWRGDSTGYADSVKGRFTISRDNAKNTVDLQMNSLKPEDTAIYYCAAAAGSAWYGTLYEYDYWGQGTLVTVSSTRGMRTEDLPKAVVFLEPQWYRVLEKDSVTLKCQGAYSPEDNSTQWFHNESLISSQASSYFIDAATVDDSGEYRCQTNLSTLSDPVQLEVHIGWLLLQAPRWVFKEEDPIHLRCHSWKNTALHKVTYLQNGKGRKYFHHNSDFYIPKATLKDSGSYFCRGLVGSKNVSSETVNITITQGLAVPTISSFFPPGYQVSFCLVMVLLFAVDTGLYFS

SEQ ID NO: 10280 - protein, 359 aa, synthetic construct
MALPVTALLLPLALLLHAARPEVQLVESGGGSVQAGGSLRLTCAASGSTSRSYGMGWFRQAPGKEREFVSGISWRGDSTGYADSVKGRFTISRDNAKNTVDLQMNSLKPEDTAIYYCAAAAGSTWYGTLYEYDYWGQGTLVTVSSTRGMRTEDLPKAVVFLEPQWYRVLEKDSVTLKCQGAYSPEDNSTQWFHNESLISSQASSYFIDAATVDDSGEYRCQTNLSTLSDPVQLEVHIGWLLLQAPRWVFKEEDPIHLRCHSWKNTALHKVTYLQNGKGRKYFHHNSDFYIPKATLKDSGSYFCRGLVGSKNVSSETVNITITQGLAVPTISSFFPPGYQVSFCLVMVLLFAVDTGLYFS

SEQ ID NO: 10281 - protein, 360 aa, synthetic construct
MALPVTALLLPLALLLHAARPDVQLVESGGGLVQPGGSLRLSCAASGFILDYYAIGWFRQAPGKEREGVLCIDASDDITYYADSVKGRFTISRDNSKNTVYLQMNSLRPEDTAVYYCATPIGLSSSCLLEYDYDYWGQGTLVTVSSTRGMRTEDLPKAVVFLEPQWYRVLEKDSVTLKCQGAYSPEDNSTQWFHNESLISSQASSYFIDAATVDDSGEYRCQTNLSTLSDPVQLEVHIGWLLLQAPRWVFKEEDPIHLRCHSWKNTALHKVTYLQNGKGRKYFHHNSDFYIPKATLKDSGSYFCRGLVGSKNVSSETVNITITQGLAVPTISSFFPPGYQVSFCLVMVLLFAVDTGLYFS

SEQ ID NO: 10282 - protein, 361 aa, synthetic construct
MALPVTALLLPLALLLHAARPEVQLVESGGGLVQAGDSLRLSCAASGRAFSRYAMGWFRQAPGKEREFVAAIGWGPSKTNYADSVKGRFTISRDNAKNTVYLQMNTLKPEDTAVYSCAAKFVNTDSTWSRSEMYTYWGQGTLVTVSSTRGMRTEDLPKAVVFLEPQWYRVLEKDSVTLKCQGAYSPEDNSTQWFHNESLISSQASSYFIDAATVDDSGEYRCQTNLSTLSDPVQLEVHIGWLLLQAPRWVFKEEDPIHLRCHSWKNTALHKVTYLQNGKGRKYFHHNSDFYIPKATLKDSGSYFCRGLVGSKNVSSETVNITITQGLAVPTISSFFPPGYQVSFCLVMVLLFAVDTGLYFS

SEQ ID NO: 10283 - protein, 357 aa, synthetic construct
MALPVTALLLPLALLLHAARPEVQLVESGGGLVQAGGSLRLSCVASGISSSKRNMGWYRQAPGKQRESVATISSGGNKDYTDAVKDRFTISRDTTKNTVYLQMNSLKPEDTAVYYCKIEAGTGWATRRGYTYWGQGTLVTVSSTRGMRTEDLPKAVVFLEPQWYRVLEKDSVTLKCQGAYSPEDNSTQWFHNESLISSQASSYFIDAATVDDSGEYRCQTNLSTLSDPVQLEVHIGWLLLQAPRWVFKEEDPIHLRCHSWKNTALHKVTYLQNGKGRKYFHHNSDFYIPKATLKDSGSYFCRGLVGSKNVSSETVNITITQGLAVPTISSFFPPGYQVSFCLVMVLLFAVDTGLYFS

SEQ ID NO: 10284 - protein, 347 aa, synthetic construct
MALPVTALLLPLALLLHAARPQVQLVQSGGGLVQPGGSLRLSCAASDFDFAAYEMSWVRQAPGQGLEWVAIISHDGIDKYYTDSVKGRFTISRDNSKNTLYLQMNTLRAEDTATYYCLRLGAVGQGTLVTVSSTRGMRTEDLPKAVVFLEPQWYRVLEKDSVTLKCQGAYSPEDNSTQWFHNESLISSQASSYFIDAATVDDSGEYRCQTNLSTLSDPVQLEVHIGWLLLQAPRWVFKEEDPIHLRCHSWKNTALHKVTYLQNGKGRKYFHHNSDFYIPKATLKDSGSYFCRGLVGSKNVSSETVNITITQGLAVPTISSFFPPGYQVSFCLVMVLLFAVDTGLYFS

SEQ ID NO: 10285 - protein, 355 aa, synthetic construct
MALPVTALLLPLALLLHAARPQVQLVQSGGGLVQPGGSLRLSCAASDFAFDDYEMSWVRQAPGKALEWIGDINHSGTTIYNPSLKSRVTISRDNSKNTLYLQMNTLRAEDTAIYYCARPHYGDYSDAFDIWGQGTMVTVSSTRGMRTEDLPKAVVFLEPQWYRVLEKDSVTLKCQGAYSPEDNSTQWFHNESLISSQASSYFIDAATVDDSGEYRCQTNLSTLSDPVQLEVHIGWLLLQAPRWVFKEEDPIHLRCHSWKNTALHKVTYLQNGKGRKYFHHNSDFYIPKATLKDSGSYFCRGLVGSKNVSSETVNITITQGLAVPTISSFFPPGYQVSFCLVMVLLFAVDTGLYFS

SEQ ID NO: 10286 - protein, 350 aa, synthetic construct
MALPVTALLLPLALLLHAARPEVQLVESGGGLVQPGNSLRLSCAASGFTFSSFGMSWVRQAPGKGLEWVSSISGSGSDTLYADSVKGRFTISRDNAKTTLYLQMNSLRPEDTAVYYCTIGGSLSRSSQGTLVTVSSTRGMRTEDLPKAVVFLEPQWYRVLEKDSVTLKCQGAYSPEDNSTQWFHNESLISSQASSYFIDAATVDDSGEYRCQTNLSTLSDPVQLEVHIGWLLLQAPRWVFKEEDPIHLRCHSWKNTALHKVTYLQNGKGRKYFHHNSDFYIPKATLKDSGSYFCRGLVGSKNVSSETVNITITQGLAVPTISSFFPPGYQVSFCLVMVLLFAVDTGLYFS

SEQ ID NO: 10287 - protein, 351 aa, synthetic construct
MALPVTALLLPLALLLHAARPEVQLVESGGGLVQAGGSLRLSCAASGSIFSGNVMGWYRRQAPGKEREWVAAIASGGSIYYRDSVKGRFTISRDNAKNTVYLQMNSLKPEDTAVYYCNSHPPTLPYWGLGTQVTVSSTRGMRTEDLPKAVVFLEPQWYRVLEKDSVTLKCQGAYSPEDNSTQWFHNESLISSQASSYFIDAATVDDSGEYRCQTNLSTLSDPVQLEVHIGWLLLQAPRWVFKEEDPIHLRCHSWKNTALHKVTYLQNGKGRKYFHHNSDFYIPKATLKDSGSYFCRGLVGSKNVSSETVNITITQGLAVPTISSFFPPGYQVSFCLVMVLLFAVDTGLYFS

SEQ ID NO: 10288 - protein, 361 aa, synthetic construct
MALPVTALLLPLALLLHAARPEVQLVESGGGSVQAGGSLRLSCTTSGRALNMYVMGWFRQAPGNEREFVAATSSSGGSTSYPDSVKGRFTISRDNAKNTVYLQMNSLKPEDTAAYRCAASPYVSTPTMNILEEYRYWGLGTQVTVSSTRGMRTEDLPKAVVFLEPQWYRVLEKDSVTLKCQGAYSPEDNSTQWFHNESLISSQASSYFIDAATVDDSGEYRCQTNLSTLSDPVQLEVHIGWLLLQAPRWVFKEEDPIHLRCHSWKNTALHKVTYLQNGKGRKYFHHNSDFYIPKATLKDSGSYFCRGLVGSKNVSSETVNITITQGLAVPTISSFFPPGYQVSFCLVMVLLFAVDTGLYFS

SEQ ID NO: 10289 - protein, 356 aa, synthetic construct
MALPVTALLLPLALLLHAARPEVQLVESGGGLVQPGGSLRLSCAASGSVFKINVMAWYRQAPGKGRELVAGIISGGSTSYADSVKGRFTISRDNAKNTLYLQMNSLRPEDTAVYYCAFITTESDYDLGRRYWGQGTLVTVSSTRGMRTEDLPKAVVFLEPQWYRVLEKDSVTLKCQGAYSPEDNSTQWFHNESLISSQASSYFIDAATVDDSGEYRCQTNLSTLSDPVQLEVHIGWLLLQAPRWVFKEEDPIHLRCHSWKNTALHKVTYLQNGKGRKYFHHNSDFYIPKATLKDSGSYFCRGLVGSKNVSSETVNITITQGLAVPTISSFFPPGYQVSFCLVMVLLFAVDTGLYFS

SEQ ID NO: 10290 - protein, 501 aa, synthetic construct
MALPVTALLLPLALLLHAARPEVQLVESGGGSVQTGGSLRLTCAASGRTSRSYGMGWFRQAPGKEREFVSGISWRGDSTGYADSVKGRFTISRDNAKNTVDLQMNSLKPEDTAIYYCAAAAGSAWYGTLYEYDYWGQGTLVTVSSLEGGGGSGGGGSGGGGSFEEVQLVESGGGSVQAGGSLRLSCAASGDTYGSYWMGWFRQAPGKEREGVAAINRGGGYTVYADSVKGRFTISRDTAKNTVYLQMNSLRPDDTADYYCAASGVLGGLHEDWFNYWGQGTLVTVSSTRGMRTEDLPKAVVFLEPQWYRVLEKDSVTLKCQGAYSPEDNSTQWFHNESLISSQASSYFIDAATVDDSGEYRCQTNLSTLSDPVQLEVHIGWLLLQAPRWVFKEEDPIHLRCHSWKNTALHKVTYLQNGKGRKYFHHNSDFYIPKATLKDSGSYFCRGLVGSKNVSSETVNITITQGLAVPTISSFFPPGYQVSFCLVMVLLFAVDTGLYFS

SEQ ID NO: 10291 - protein, 520 aa, synthetic construct
MALPVTALLLPLALLLHAARPEVQLVESGGGSVQAGGSLRLTCAASGSTSRSYGMGWFRQAPGKEREFVSGISWRGDSTGYADSVKGRFTISRDNAKNTVDLQMNSLKPEDTAIYYCAAAAGSTWYGTLYEYDYWGQGTLVTVSSLEGGGGSGGGGSGGGGSGSGGSGSGGSGSGGSGSGGSFEVQLVESGGGSVQAGGSLRLSCAASGDTYGSYWMGWFRQAPGQEREAVAAINRGGGYTVYADSVKGRFTISRDNAKNTLYLQMNSLRPDDTADYYCAASGVLGGLHEDWFNYWGQGTLVTVSSTRGMRTEDLPKAVVFLEPQWYRVLEKDSVTLKCQGAYSPEDNSTQWFHNESLISSQASSYFIDAATVDDSGEYRCQTNLSTLSDPVQLEVHIGWLLLQAPRWVFKEEDPIHLRCHSWKNTALHKVTYLQNGKGRKYFHHNSDFYIPKATLKDSGSYFCRGLVGSKNVSSETVNITITQGLAVPTISSFFPPGYQVSFCLVMVLLFAVDTGLYFS

SEQ ID NO: 10292 - protein, 510 aa, synthetic construct
MALPVTALLLPLALLLHAARPEVQLVESGGGLVQAGGSLRLSCAASGITFSINTMGWYRQAPGKQRELVALISSIGDTYYADSVKGRFTISRDNAKNTVYLQMNSLKPEDTAVYYCKRFRTAAQGTDYWGQGTQVTVSSLEGGGGSGGGGSGGGGSGSGGSGSGGSGSGGSGSGGSFEVQLVESGGGLVQPGGSLRLSCAASGSIFGFNDMAWYRQAPGKQRELVALISRVGVTSSADSVKGRFTISRVNAKDTVYLQMNSLKPEDTAVYYCYMDQRLDGSTLAYWGQGTQVTVSSTRGMRTEDLPKAVVFLEPQWYRVLEKDSVTLKCQGAYSPEDNSTQWFHNESLISSQASSYFIDAATVDDSGEYRCQTNLSTLSDPVQLEVHIGWLLLQAPRWVFKEEDPIHLRCHSWKNTALHKVTYLQNGKGRKYFHHNSDFYIPKATLKDSGSYFCRGLVGSKNVSSETVNITITQGLAVPTISSFFPPGYQVSFCLVMVLLFAVDTGLYFS

SEQ ID NO: 10293 - protein, 477 aa, synthetic construct; identical to SEQ ID NO: 10108

SEQ ID NO: 10294 - protein, 515 aa, synthetic construct
MALPVTALLLPLALLLHAARPDVQLVESGGGLVQPGGSLRLSCAASGSIGGLNAMAWYRQAPGKERELVAGIFGVGSTRYADSVKGRFTISRDNSKNTVYLQMNSLRPEDTAVYYCRMSSVTRGSSDYWGQGTLVTVSSLEGGGGSGGGGSGGGGSGSGGSGSGGSGSGGSGSGGSFEVQLVESGGSLVQPGGSLRLSCAASGFTFDDYAMSWVRQVPGKGLEWVSSINWSGTHTDYADSVKGRFTISRNNANNTLYLQMNSLKSEDTAVYYCAKNWRDAGTTWFEKSGSAGQGTQVTVSSTRGMRTEDLPKAVVFLEPQWYRVLEKDSVTLKCQGAYSPEDNSTQWFHNESLISSQASSYFIDAATVDDSGEYRCQTNLSTLSDPVQLEVHIGWLLLQAPRWVFKEEDPIHLRCHSWKNTALHKVTYLQNGKGRKYFHHNSDFYIPKATLKDSGSYFCRGLVGSKNVSSETVNITITQGLAVPTISSFFPPGYQVSFCLVMVLLFAVDTGLYFS

SEQ ID NO: 10295 - protein, 523 aa, synthetic construct
MALPVTALLLPLALLLHAARPDVQLVESGGGLVQPGGSLRLSCAASGFILDYYAIGWFRQAPGKEREGVLCIDASDDITYYADSVKGRFTISRDNSKNTVYLQMNSLRPEDTAVYYCATPIGLSSSCLLEYDYDYWGQGTLVTVSSLEGGSGSGGGGSGGGGSGSGGSGSGGSGSGGSGSGGSFEVQLVESGGGLVQPGGSLRLSCAASGRTYYLNAMGWFRQAPGKEREFVAAIDWSEGNKDYADSVKGRFTISRDNSKNTVYLQMNSLRPEDTAVYYCAADTPPWGPLIYIESYDSWGQGTLVTVSSTRGMRTEDLPKAVVFLEPQWYRVLEKDSVTLKCQGAYSPEDNSTQWFHNESLISSQASSYFIDAATVDDSGEYRCQTNLSTLSDPVQLEVHIGWLLLQAPRWVFKEEDPIHLRCHSWKNTALHKVTYLQNGKGRKYFHHNSDFYIPKATLKDSGSYFCRGLVGSKNVSSETVNITITQGLAVPTISSFFPPGYQVSFCLVMVLLFAVDTGLYFS

SEQ ID NO: 10296 - protein, 506 aa, synthetic construct
MALPVTALLLPLALLLHAARPQVQLVQSGGGLVQPGGSLRLSCAASDFDFAAYEMSWVRQAPGQGLEWVAIISHDGIDKYYTDSVKGRFTISRDNSKNTLYLQMNTLRAEDTATYYCLRLGAVGQGTLVTVSSLEGGGGSGGGGSGGGGSGSGGSGSGGSGSGGSGSGGSFEQVQLVQSGGGLVQPGGSLRLSCAASDFAFDDYEMSWVRQAPGKALEWIGDINHSGTTIYNPSLKSRVTISRDNSKNTLYLQMNTLRAEDTAIYYCARPHYGDYSDAFDIWGQGTMVTVSSTRGMRTEDLPKAVVFLEPQWYRVLEKDSVTLKCQGAYSPEDNSTQWFHNESLISSQASSYFIDAATVDDSGEYRCQTNLSTLSDPVQLEVHIGWLLLQAPRWVFKEEDPIHLRCHSWKNTALHKVTYLQNGKGRKYFHHNSDFYIPKATLKDSGSYFCRGLVGSKNVSSETVNITITQGLAVPTISSFFPPGYQVSFCLVMVLLFAVDTGLYFS

SEQ ID NO: 10297 - protein, 354 aa, synthetic construct
MALPVTALLLPLALLLHAARPQVKLEESGGGLVQAGRSLRLSCAASEHTFSSHVMGWFRQAPGKERESVAVIGWRDISTSYADSVKGRFTISRDNAKKTLYLQMNSLKPEDTAVYYCAARRIDAADFDSWGQGTQVTVSSTRGMRTEDLPKAVVFLEPQWYRVLEKDSVTLKCQGAYSPEDNSTQWFHNESLISSQASSYFIDAATVDDSGEYRCQTNLSTLSDPVQLEVHIGWLLLQAPRWVFKEEDPIHLRCHSWKNTALHKVTYLQNGKGRKYFHHNSDFYIPKATLKDSGSYFCRGLVGSKNVSSETVNITITQGLAVPTISSFFPPGYQVSFCLVMVLLFAVDTGLYFS

SEQ ID NO: 10298 - protein, 353 aa, synthetic construct
MALPVTALLLPLALLLHAARPEVQLVESGGGLVQAGGSLRLSCAASGRTFTMGWFRQAPGKEREFVAAISLSPTLAYYAESVKGRFTISRDNAKNTVVLQMNSLKPEDTALYYCAADRKSVMSIRPDYWGQGTQVTVSSTRGMRTEDLPKAVVFLEPQWYRVLEKDSVTLKCQGAYSPEDNSTQWFHNESLISSQASSYFIDAATVDDSGEYRCQTNLSTLSDPVQLEVHIGWLLLQAPRWVFKEEDPIHLRCHSWKNTALHKVTYLQNGKGRKYFHHNSDFYIPKATLKDSGSYFCRGLVGSKNVSSETVNITITQGLAVPTISSFFPPGYQVSFCLVMVLLFAVDTGLYFS

SEQ ID NO: 10299 - protein, 487 aa, synthetic construct
MALPVTALLLPLALLLHAARPQVKLEESGGGLVQAGRSLRLSCAASEHTFSSHVMGWFRQAPGKERESVAVIGWRDISTSYADSVKGRFTISRDNAKKTLYLQMNSLKPEDTAVYYCAARRIDAADFDSWGQGTQVTVSSGGGGSGGGGSGGGGSEVQLVESGGGLVQAGGSLRLSCAASGRTFTMGWFRQAPGKEREFVAAISLSPTLAYYAESVKGRFTISRDNAKNTVVLQMNSLKPEDTALYYCAADRKSVMSIRPDYWGQGTQVTVSSTRGMRTEDLPKAVVFLEPQWYRVLEKDSVTLKCQGAYSPEDNSTQWFHNESLISSQASSYFIDAATVDDSGEYRCQTNLSTLSDPVQLEVHIGWLLLQAPRWVFKEEDPIHLRCHSWKNTALHKVTYLQNGKGRKYFHHNSDFYIPKATLKDSGSYFCRGLVGSKNVSSETVNITITQGLAVPTISSFFPPGYQVSFCLVMVLLFAVDTGLYFS

SEQ ID NO: 10300 - protein, 351 aa, synthetic construct
MALPVTALLLPLALLLHAARPEVQLVESGGGLVQAGGSLRLSCIATGKVFSIYDMGWYRQAPGKQRELVAEITSSGTTHYDDFVSGRFTISRDNAKNTVYLQMNTLKAEDTAVYYCRANHVFGGSYWGQGTQVTVSSTRGMRTEDLPKAVVFLEPQWYRVLEKDSVTLKCQGAYSPEDNSTQWFHNESLISSQASSYFIDAATVDDSGEYRCQTNLSTLSDPVQLEVHIGWLLLQAPRWVFKEEDPIHLRCHSWKNTALHKVTYLQNGKGRKYFHHNSDFYIPKATLKDSGSYFCRGLVGSKNVSSETVNITITQGLAVPTISSFFPPGYQVSFCLVMVLLFAVDTGLYFS

SEQ ID NO: 10301 - protein, 357 aa, synthetic construct
MALPVTALLLPLALLLHAARPQVQLVESGGGLVQPGGSLRLSCEASGFTLDYYAIGWFRQAPGKEREGVICISRSDGSTYYADSVKGRFTISRDNAKKTVYLQMISLKPEDTAAYYCAAGADCSGYLRDYEFRGQGTQVTVSSTRGMRTEDLPKAVVFLEPQWYRVLEKDSVTLKCQGAYSPEDNSTQWFHNESLISSQASSYFIDAATVDDSGEYRCQTNLSTLSDPVQLEVHIGWLLLQAPRWVFKEEDPIHLRCHSWKNTALHKVTYLQNGKGRKYFHHNSDFYIPKATLKDSGSYFCRGLVGSKNVSSETVNITITQGLAVPTISSFFPPGYQVSFCLVMVLLFAVDTGLYFS

SEQ ID NO: 10302 - protein, 480 aa, synthetic construct
MALPVTALLLPLALLLHAARPEVQLVESGGGLVQAGGSLRLSCIATGKVFSIYDMGWYRQAPGKQRELVAEITSSGTTHYDDFVSGRFTISRDNAKNTVYLQMNTLKAEDTAVYYCRANHVFGGSYWGQGTQVTVSSEVAALEKQVQLVESGGGLVQPGGSLRLSCEASGFTLDYYAIGWFRQAPGKEREGVICISRSDGSTYYADSVKGRFTISRDNAKKTVYLQMISLKPEDTAAYYCAAGADCSGYLRDYEFRGQGTQVTVSSTRGMRTEDLPKAVVFLEPQWYRVLEKDSVTLKCQGAYSPEDNSTQWFHNESLISSQASSYFIDAATVDDSGEYRCQTNLSTLSDPVQLEVHIGWLLLQAPRWVFKEEDPIHLRCHSWKNTALHKVTYLQNGKGRKYFHHNSDFYIPKATLKDSGSYFCRGLVGSKNVSSETVNITITQGLAVPTISSFFPPGYQVSFCLVMVLLFAVDTGLYFS

SEQ ID NO: 10303 - protein, 363 aa, synthetic construct
MALPVTALLLPLALLLHAARPQVKLEESGGRLVQPRGSLRLSCAGSGRTFSTYGMAWFRQAPGKEREFVASKASMNYSGRTYYADSVKGRFTIARDNAKNMVFLQMNNLKPEDTAVYYCAAGTGCSTYGCFDAQIIDYWGKGTLVTVSSTRGMRTEDLPKAVVFLEPQWYRVLEKDSVTLKCQGAYSPEDNSTQWFHNESLISSQASSYFIDAATVDDSGEYRCQTNLSTLSDPVQLEVHIGWLLLQAPRWVFKEEDPIHLRCHSWKNTALHKVTYLQNGKGRKYFHHNSDFYIPKATLKDSGSYFCRGLVGSKNVSSETVNITITQGLAVPTISSFFPPGYQVSFCLVMVLLFAVDTGLYFS

SEQ ID NO: 10304 - protein, 354 aa, synthetic construct
MALPVTALLLPLALLLHAARPQVKLEESGGGLVQPGESLRLSCSASGSIFKVFRVFAMSWYRQGPGKQRELVASISSGETTTYADSVKGRFTISRDNAKNTAYLQMDSLKPEDTAVYYCNADHTFTGDFWGQGTQVTVSSTRGMRTEDLPKAVVFLEPQWYRVLEKDSVTLKCQGAYSPEDNSTQWFHNESLISSQASSYFIDAATVDDSGEYRCQTNLSTLSDPVQLEVHIGWLLLQAPRWVFKEEDPIHLRCHSWKNTALHKVTYLQNGKGRKYFHHNSDFYIPKATLKDSGSYFCRGLVGSKNVSSETVNITITQGLAVPTISSFFPPGYQVSFCLVMVLLFAVDTGLYFS

SEQ ID NO: 10305 - protein, 489 aa, synthetic construct
MALPVTALLLPLALLLHAARPQVKLEESGGRLVQPRGSLRLSCAGSGRTFSTYGMAWFRQAPGKEREFVASKASMNYSGRTYYADSVKGRFTIARDNAKNMVFLQMNNLKPEDTAVYYCAAGTGCSTYGCFDAQIIDYWGKGTLVTVSSEVAALEKQVKLEESGGGLVQPGESLRLSCSASGSIFKVFRVFAMSWYRQGPGKQRELVASISSGETTTYADSVKGRFTISRDNAKNTAYLQMDSLKPEDTAVYYCNADHTFTGDFWGQGTQVTVSSTRGMRTEDLPKAVVFLEPQWYRVLEKDSVTLKCQGAYSPEDNSTQWFHNESLISSQASSYFIDAATVDDSGEYRCQTNLSTLSDPVQLEVHIGWLLLQAPRWVFKEEDPIHLRCHSWKNTALHKVTYLQNGKGRKYFHHNSDFYIPKATLKDSGSYFCRGLVGSKNVSSETVNITITQGLAVPTISSFFPPGYQVSFCLVMVLLFAVDTGLYFS

SEQ ID NO: 10306 - protein, 352 aa, synthetic construct
MALPVTALLLPLALLLHAARPQVKLEESGGELVQPGGPLRLSCAASGNIFSINRMGWYRQAPGKQRAFVASITVRGITNYADSVKGRFTISVDKSKNTIYLQMNALKPEDTAVYYCNAVSSNRDPDYWGQGTQVTVSSTRGMRTEDLPKAVVFLEPQWYRVLEKDSVTLKCQGAYSPEDNSTQWFHNESLISSQASSYFIDAATVDDSGEYRCQTNLSTLSDPVQLEVHIGWLLLQAPRWVFKEEDPIHLRCHSWKNTALHKVTYLQNGKGRKYFHHNSDFYIPKATLKDSGSYFCRGLVGSKNVSSETVNITITQGLAVPTISSFFPPGYQVSFCLVMVLLFAVDTGLYFS

SEQ ID NO: 10307 - protein, 364 aa, synthetic construct
MALPVTALLLPLALLLHAARPPVQLVESGGGLVQAGDSLRLSCAASGRTFGIGTMGWFRQPPGKEREFVAAIRWSTGGTRYADSVKGRFTISRDNAKLTVDLQMDSLKPEDTAVYYCAADRLSLDLSGRYHYNPAVYDYWGQGTQVTVSSTRGMRTEDLPKAVVFLEPQWYRVLEKDSVTLKCQGAYSPEDNSTQWFHNESLISSQASSYFIDAATVDDSGEYRCQTNLSTLSDPVQLEVHIGWLLLQAPRWVFKEEDPIHLRCHSWKNTALHKVTYLQNGKGRKYFHHNSDFYIPKATLKDSGSYFCRGLVGSKNVSSETVNITITQGLAVPTISSFFPPGYQVSFCLVMVLLFAVDTGLYFS

SEQ ID NO: 10308 - protein, 496 aa, synthetic construct
MALPVTALLLPLALLLHAARPQVKLEESGGELVQPGGPLRLSCAASGNIFSINRMGWYRQAPGKQRAFVASITVRGITNYADSVKGRFTISVDKSKNTIYLQMNALKPEDTAVYYCNAVSSNRDPDYWGQGTQVTVSSGGGGSGGGGSGGGGSPVQLVESGGGLVQAGDSLRLSCAASGRTFGIGTMGWFRQPPGKEREFVAAIRWSTGGTRYADSVKGRFTISRDNAKLTVDLQMDSLKPEDTAVYYCAADRLSLDLSGRYHYNPAVYDYWGQGTQVTVSSTRGMRTEDLPKAVVFLEPQWYRVLEKDSVTLKCQGAYSPEDNSTQWFHNESLISSQASSYFIDAATVDDSGEYRCQTNLSTLSDPVQLEVHIGWLLLQAPRWVFKEEDPIHLRCHSWKNTALHKVTYLQNGKGRKYFHHNSDFYIPKATLKDSGSYFCRGLVGSKNVSSETVNITITQGLAVPTISSFFPPGYQVSFCLVMVLLFAVDTGLYFS

SEQ ID NO: 10309 - protein, 354 aa, synthetic construct
MALPVTALLLPLALLLHAARPAVQLVESGGGLVQAGDSLRLTCTASGRAFSTYFMAWFRQAPGKEREFVAGIAWSGGSTAYADSVKGRFTISRDNAKNTVYLQMNSLKSEDTAVYYCASRGIEVEEFGAWGQGTQVTVSSTRGMRTEDLPKAVVFLEPQWYRVLEKDSVTLKCQGAYSPEDNSTQWFHNESLISSQASSYFIDAATVDDSGEYRCQTNLSTLSDPVQLEVHIGWLLLQAPRWVFKEEDPIHLRCHSWKNTALHKVTYLQNGKGRKYFHHNSDFYIPKATLKDSGSYFCRGLVGSKNVSSETVNITITQGLAVPTISSFFPPGYQVSFCLVMVLLFAVDTGLYFS

SEQ ID NO: 10310 - protein, 355 aa, synthetic construct
MALPVTALLLPLALLLHAARPQVQLVESGGGLVQAGGSLRLSCAASGGTLSKNTVAWFRQAPGKERGFVASITWDGRTTYYADSVKGRFTISRDNAKNTVYLQMNSLKPEDTAVYVCADLGKWPAGPADYWGQGTQVTVSSTRGMRTEDLPKAVVFLEPQWYRVLEKDSVTLKCQGAYSPEDNSTQWFHNESLISSQASSYFIDAATVDDSGEYRCQTNLSTLSDPVQLEVHIGWLLLQAPRWVFKEEDPIHLRCHSWKNTALHKVTYLQNGKGRKYFHHNSDFYIPKATLKDSGSYFCRGLVGSKNVSSETVNITITQGLAVPTISSFFPPGYQVSFCLVMVLLFAVDTGLYFS

SEQ ID NO: 10311 - protein, 359 aa, synthetic construct
MALPVTALLLPLALLLHAARPGSDLGIKLLFAAAKGQDDEVRILLAAGADVNAKDFEGYTPLHVAAYDGHLEIVEVLLKAGADVNAKDSQGRTPLHEAAYSGHLEIVEVLLKAGADVNAQDDAGETPADLAAAWGHEDIAEVLQKTRGMRTEDLPKAVVFLEPQWYRVLEKDSVTLKCQGAYSPEDNSTQWFHNESLISSQASSYFIDAATVDDSGEYRCQTNLSTLSDPVQLEVHIGWLLLQAPRWVFKEEDPIHLRCHSWKNTALHKVTYLQNGKGRKYFHHNSDFYIPKATLKDSGSYFCRGLVGSKNVSSETVNITITQGLAVPTISSFFPPGYQVSFCLVMVLLFAVDTGLYFS

SEQ ID NO: 10312 - protein, 361 aa, synthetic construct
MALPVTALLLPLALLLHAARPRSDLGKKLLEAARAGQDDEVRILMANGADVNAKDEYGLTPLYLATAHGHLEIVEVLLKNGADVNAVDAIGFTPLHLAAFIGHLEIAEVLLKHGADVNAQDKFGKTAFDISIGNGNEDLAEILQKLNTRGMRTEDLPKAVVFLEPQWYRVLEKDSVTLKCQGAYSPEDNSTQWFHNESLISSQASSYFIDAATVDDSGEYRCQTNLSTLSDPVQLEVHIGWLLLQAPRWVFKEEDPIHLRCHSWKNTALHKVTYLQNGKGRKYFHHNSDFYIPKATLKDSGSYFCRGLVGSKNVSSETVNITITQGLAVPTISSFFPPGYQVSFCLVMVLLFAVDTGLYFS

SEQ ID NO: 10313 - protein, 293 aa, synthetic construct
MALPVTALLLPLALLLHAARPVDNKFNKERYSAYYEIWQLPNLNVRQKAAFIGSLQDDPSQSANLLAEAKKLNDAQAPKTRGMRTEDLPKAVVFLEPQWYRVLEKDSVTLKCQGAYSPEDNSTQWFHNESLISSQASSYFIDAATVDDSGEYRCQTNLSTLSDPVQLEVHIGWLLLQAPRWVFKEEDPIHLRCHSWKNTALHKVTYLQNGKGRKYFHHNSDFYIPKATLKDSGSYFCRGLVGSKNVSSETVNITITQGLAVPTISSFFPPGYQVSFCLVMVLLFAVDTGLYFS

SEQ ID NO: 10314 - protein, 286 aa, synthetic construct
MALPVTALLLPLALLLHAARPYAKEMRNAYWEIALLPNLTNQQKRAPIRKLYDDPSQSSELLSEAKKLNDSQTRGMRTEDLPKAVVFLEPQWYRVLEKDSVTLKCQGAYSPEDNSTQWFHNESLISSQASSYFIDAATVDDSGEYRCQTNLSTLSDPVQLEVHIGWLLLQAPRWVFKEEDPIHLRCHSWKNTALHKVTYLQNGKGRKYFHHNSDFYIPKATLKDSGSYFCRGLVGSKNVSSETVNITITQGLAVPTISSFFPPGYQVSFCLVMVLLFAVDTGLYFS

SEQ ID NO: 10315 - protein, 286 aa, synthetic construct
MALPVTALLLPLALLLHAARPYAKEMWIAWEEIRNLPNLNGWQMTAFIAKLLDDPSQSSELLSEAKKLNDSQTRGMRTEDLPKAVVFLEPQWYRVLEKDSVTLKCQGAYSPEDNSTQWFHNESLISSQASSYFIDAATVDDSGEYRCQTNLSTLSDPVQLEVHIGWLLLQAPRWVFKEEDPIHLRCHSWKNTALHKVTYLQNGKGRKYFHHNSDFYIPKATLKDSGSYFCRGLVGSKNVSSETVNITITQGLAVPTISSFFPPGYQVSFCLVMVLLFAVDTGLYFS

SEQ ID NO: 10316 - protein, 324 aa, synthetic construct
MALPVTALLLPLALLLHAARPLPAPKNLVVSRVTEDSARLSWTAPDAAFDSFAIGYWEWDDDGEAIVLTVPGSERSYDLTGLKPGTEYPVYIAGVKGGQWSFPLSAIFTTTRGMRTEDLPKAVVFLEPQWYRVLEKDSVTLKCQGAYSPEDNSTQWFHNESLISSQASSYFIDAATVDDSGEYRCQTNLSTLSDPVQLEVHIGWLLLQAPRWVFKEEDPIHLRCHSWKNTALHKVTYLQNGKGRKYFHHNSDFYIPKATLKDSGSYFCRGLVGSKNVSSETVNITITQGLAVPTISSFFPPGYQVSFCLVMVLLFAVDTGLYFS

SEQ ID NO: 10317 - protein, 326 aa, synthetic construct
MALPVTALLLPLALLLHAARPLPAPKNLVVSRVTEDSARLSWAIDEQRDWFESFLIQYQESEKVGEAIVLTVPGSERSYDLTGLKPGTEYTVSIYGVYHVYRSNPLSAIFTTTRGMRTEDLPKAVVFLEPQWYRVLEKDSVTLKCQGAYSPEDNSTQWFHNESLISSQASSYFIDAATVDDSGEYRCQTNLSTLSDPVQLEVHIGWLLLQAPRWVFKEEDPIHLRCHSWKNTALHKVTYLQNGKGRKYFHHNSDFYIPKATLKDSGSYFCRGLVGSKNVSSETVNITITQGLAVPTISSFFPPGYQVSFCLVMVLLFAVDTGLYFS

SEQ ID NO: 10318 - protein, 324 aa, synthetic construct
MALPVTALLLPLALLLHAARPLPAPKNLVVSRVTEDSARLSWTAPDAAFDSFPIGYWEWDDDGEAIVLTVPGSERSYDLTGLKPGTEYHVYIAGVKGGQWSFPLSAIFTTTRGMRTEDLPKAVVFLEPQWYRVLEKDSVTLKCQGAYSPEDNSTQWFHNESLISSQASSYFIDAATVDDSGEYRCQTNLSTLSDPVQLEVHIGWLLLQAPRWVFKEEDPIHLRCHSWKNTALHKVTYLQNGKGRKYFHHNSDFYIPKATLKDSGSYFCRGLVGSKNVSSETVNITITQGLAVPTISSFFPPGYQVSFCLVMVLLFAVDTGLYFS

SEQ ID NO: 10319 - protein, 329 aa, synthetic construct
MALPVTALLLPLALLLHAARPLPAPKNLVVSEVTEDSARLSWDDPWAFYESFLIQYQESEKVGEAIVLTVPGSERSYDLTGLKPGTEYTVSIYGVHNVYKDTNMRGLPLSAIFTTTRGMRTEDLPKAVVFLEPQWYRVLEKDSVTLKCQGAYSPEDNSTQWFHNESLISSQASSYFIDAATVDDSGEYRCQTNLSTLSDPVQLEVHIGWLLLQAPRWVFKEEDPIHLRCHSWKNTALHKVTYLQNGKGRKYFHHNSDFYIPKATLKDSGSYFCRGLVGSKNVSSETVNITITQGLAVPTISSFFPPGYQVSFCLVMVLLFAVDTGLYFS

SEQ ID NO: 10320 - protein, 324 aa, synthetic construct
MALPVTALLLPLALLLHAARPLPAPKNLVVSRVTEDSARLSWTAPDAAFDSFWIRYFEFLGSGEAIVLTVPGSERSYDLTGLKPGTEYVVNIMGVKGGKISPPLSAIFTTTRGMRTEDLPKAVVFLEPQWYRVLEKDSVTLKCQGAYSPEDNSTQWFHNESLISSQASSYFIDAATVDDSGEYRCQTNLSTLSDPVQLEVHIGWLLLQAPRWVFKEEDPIHLRCHSWKNTALHKVTYLQNGKGRKYFHHNSDFYIPKATLKDSGSYFCRGLVGSKNVSSETVNITITQGLAVPTISSFFPPGYQVSFCLVMVLLFAVDTGLYFS

SEQ ID NO: 10321 - protein, 428 aa, synthetic construct
MALPVTALLLPLALLLHAARPLPAPKNLVVSEVTEDSARLSWDDPWAFYESFLIQYQESEKVGEAIVLTVPGSERSYDLTGLKPGTEYTVSIYGVHNVYKDTNMRGLPLSAIFTTAPAPAPAPAPLPAPKNLVVSRVTEDSARLSWTAPDAAFDSFWIRYFEFLGSGEAIVLTVPGSERSYDLTGLKPGTEYVVNIMGVKGGKISPPLSAIFTTTRGMRTEDLPKAVVFLEPQWYRVLEKDSVTLKCQGAYSPEDNSTQWFHNESLISSQASSYFIDAATVDDSGEYRCQTNLSTLSDPVQLEVHIGWLLLQAPRWVFKEEDPIHLRCHSWKNTALHKVTYLQNGKGRKYFHHNSDFYIPKATLKDSGSYFCRGLVGSKNVSSETVNITITQGLAVPTISSFFPPGYQVSFCLVMVLLFAVDTGLYFS

SEQ ID NO: 10322 - protein, 325 aa, synthetic construct
MALPVTALLLPLALLLHAARPMLPAPKNLVVSRITEDSARLSWTAPDAAFDSFPIRYIETLIWGEAIWLDVPGSERSYDLTGLKPGTEYAVVITGVKGGRFSSPLVASFTTTRGMRTEDLPKAVVFLEPQWYRVLEKDSVTLKCQGAYSPEDNSTQWFHNESLISSQASSYFIDAATVDDSGEYRCQTNLSTLSDPVQLEVHIGWLLLQAPRWVFKEEDPIHLRCHSWKNTALHKVTYLQNGKGRKYFHHNSDFYIPKATLKDSGSYFCRGLVGSKNVSSETVNITITQGLAVPTISSFFPPGYQVSFCLVMVLLFAVDTGLYFS

SEQ ID NO: 10323 - protein, 801 aa, synthetic construct
MALPVTALLLPLALLLHAARPEWVKFAKPCREGEDNSKRNPIAKITSDYQATQKITYRISGVGIDQPPFGIFVVDKNTGDINITAIVDREETPSFLITCRALNAQGLDVEKPLILTVKILDINDNPPVFSQQIFMGEIEENSASNSLVMILNATDADEPNHLNSKIAFKIVSQEPAGTPMFLLSRNTGEVRTLTNSLDREQASSYRLVVSGADKDGEGLSTQCECNIKVKDVNDNFPMFRDSQYSARIEENILSSELLRFQVTDLDEEYTDNWLAVYFFTSGNEGNWFEIQTDPRTNEGILKVVKALDYEQLQSVKLSIAVKNKAEFHQSVISRYRVQSTPVTIQVINVREGIAFRPASKTFTVQKGISSKKLVDYILGTYQAIDEDTNKAASNVKYVMGRNDGGYLMIDSKTAEIKFVKNMNRDSTFIVNKTITAEVLAIDEYTGKTSTGTVYVRVPDFNDNCPTAVLEKDAVCSSSPSVVVSARTLNNRYTGPYTFALEDQPVKLPAVWSITTLNATSALLRAQEQIPPGVYHISLVLTDSQNNRCEMPRSLTLEVCQCDNRGICGTSYPTTSPGTRYGRPHSGRTRGMRTEDLPKAVVFLEPQWYRVLEKDSVTLKCQGAYSPEDNSTQWFHNESLISSQASSYFIDAATVDDSGEYRCQTNLSTLSDPVQLEVHIGWLLLQAPRWVFKEEDPIHLRCHSWKNTALHKVTYLQNGKGRKYFHHNSDFYIPKATLKDSGSYFCRGLVGSKNVSSETVNITITQGLAVPTISSFFPPGYQVSFCLVMVLLFAVDTGLYFS

SEQ ID NO: 10324 - protein, 542 aa, synthetic construct
MALPVTALLLPLALLLHAARPMALPVTALLLPLALLLHAARPLFNQEVQIPLTESYCGPCPKNWICYKNNCYQFFDESKNWYESQASCMSQNASLLKVYSKEDQDLLKLVKSYHWMGLVHIPTNGSWQWEDGSILSPNLLTIIEMQKGDCALYASSFKGYIENCSTPNTYICMQRTVGGGGSGGGGSGGGGSDLFNQEVQIPLTESYCGPCPKNWICYKNNCYQFFDESKNWYESQASCMSQNASLLKVYSKEDQDLLKLVKSYHWMGLVHIPTNGSWQWEDGSILSPNLLTIIEMQKGDCALYASSFKGYIENCSTPNTYICMQRTVTRGMRTEDLPKAVVFLEPQWYRVLEKDSVTLKCQGAYSPEDNSTQWFHNESLISSQASSYFIDAATVDDSGEYRCQTNLSTLSDPVQLEVHIGWLLLQAPRWVFKEEDPIHLRCHSWKNTALHKVTYLQNGKGRKYFHHNSDFYIPKATLKDSGSYFCRGLVGSKNVSSETVNITITQGLAVPTISSFFPPGYQVSFCLVMVLLFAVDTGLYFS

SEQ ID NO: 10325 - protein, 422 aa, synthetic construct
MALPVTALLLPLALLLHAARPMELTDLLLAAMLLAVARLTLSSPVAPACDPRLLNKLLRDSHLLHSRLSQCPDVDPLSIPVLLPAVDFSLGEWKTQTEQSKAQDILGAVSLLLEGVMAARGQLEPSCLSSLLGQLSGQVRLLLGALQGLLGTQLPLQGRTTAHKDPNALFLSLQQLLRGKVRFLLLVEGPTLCVRRTLPTTAVPSSTSTRGMRTEDLPKAVVFLEPQWYRVLEKDSVTLKCQGAYSPEDNSTQWFHNESLISSQASSYFIDAATVDDSGEYRCQTNLSTLSDPVQLEVHIGWLLLQAPRWVFKEEDPIHLRCHSWKNTALHKVTYLQNGKGRKYFHHNSDFYIPKATLKDSGSYFCRGLVGSKNVSSETVNITITQGLAVPTISSFFPPGYQVSFCLVMVLLFAVDTGLYFS

SEQ ID NO: 10326 - protein, 288 aa, synthetic construct
MALPVTALLLPLALLLHAARPMDPDLEIRAAFLRQRNTALRTEVAELEQEVQRLENEVSQYETRYGPLGGGKTRTRGMRTEDLPKAVVFLEPQWYRVLEKDSVTLKCQGAYSPEDNSTQWFHNESLISSQASSYFIDAATVDDSGEYRCQTNLSTLSDPVQLEVHIGWLLLQAPRWVFKEEDPIHLRCHSWKNTALHKVTYLQNGKGRKYFHHNSDFYIPKATLKDSGSYFCRGLVGSKNVSSETVNITITQGLAVPTISSFFPPGYQVSFCLVMVLLFAVDTGLYFS

SEQ ID NO: 10327 - protein, 263 aa, synthetic construct
MALPVTALLLPLALLLHAARPEVAALEKEVAALEKEVAALEKEVAALEKTRGMRTEDLPKAVVFLEPQWYRVLEKDSVTLKCQGAYSPEDNSTQWFHNESLISSQASSYFIDAATVDDSGEYRCQTNLSTLSDPVQLEVHIGWLLLQAPRWVFKEEDPIHLRCHSWKNTALHKVTYLQNGKGRKYFHHNSDFYIPKATLKDSGSYFCRGLVGSKNVSSETVNITITQGLAVPTISSFFPPGYQVSFCLVMVLLFAVDTGLYFS

SEQ ID NO: 10328 - protein, 521 aa, synthetic construct
MALPVTALLLPLALLLHAARPLFNQEVQIPLTESYCGPCPKNWICYKNNCYQFFDESKNWYESQASCMSQNASLLKVYSKEDQDLLKLVKSAHWMGLVHIPTNGSWQWEDGSILSPNLLTIIEMQKGDCALYASSFKGFIENCSTPNTYICMQRTVGGGGSGGGGSGGGGSDLFNQEVQIPLTESYCGPCPKNWICYKNNCYQFFDESKNWYESQASCMSQNASLLKVYSKEDQDLLKLVKSAHWMGLVHIPTNGSWQWEDGSILSPNLLTIIEMQKGDCALYASSFKGFIENCSTPNTYICMQRTVTRGMRTEDLPKAVVFLEPQWYRVLEKDSVTLKCQGAYSPEDNSTQWFHNESLISSQASSYFIDAATVDDSGEYRCQTNLSTLSDPVQLEVHIGWLLLQAPRWVFKEEDPIHLRCHSWKNTALHKVTYLQNGKGRKYFHHNSDFYIPKATLKDSGSYFCRGLVGSKNVSSETVNITITQGLAVPTISSFFPPGYQVSFCLVMVLLFAVDTGLYFS

SEQ ID NO: 10329 - protein, 521 aa, synthetic construct
MALPVTALLLPLALLLHAARPLFNQEVQIPLTESYCGPCPKNWICYKNNCYQFFDESKNWYESQASCMSQNASLLKVYSKEDQDLLKLVKSAHWMGLVHIPTNGSWQWEDGSILSPNLLTIIEMQKGDCALYASSFKGYIENCSTPNTYICMQRTVSGGGGSGGGGSGGGGDLFNQEVQIPLTESYCGPCPKNWICYKNNCYQFFDESKNWYESQASCMSQNASLLKVYSKEDQDLLKLVKSAHWMGLVHIPTNGSWQWEDGSILSPNLLTIIEMQKGDCALYASSFKGYIENCSTPNTYICMQRTVTRGMRTEDLPKAVVFLEPQWYRVLEKDSVTLKCQGAYSPEDNSTQWFHNESLISSQASSYFIDAATVDDSGEYRCQTNLSTLSDPVQLEVHIGWLLLQAPRWVFKEEDPIHLRCHSWKNTALHKVTYLQNGKGRKYFHHNSDFYIPKATLKDSGSYFCRGLVGSKNVSSETVNITITQGLAVPTISSFFPPGYQVSFCLVMVLLFAVDTGLYFS

SEQ ID NO: 10330 - protein, 707 aa, synthetic construct
MALPVTALLLPLALLLHAARPDIQMTQSPSSLSASVGDRVTITCKASQDVGTAVDWYQQKPGKAPKLLIYWASTRHTGVPSRFSGSGSGTDFTLTISSLQPEDFATYYCQQYNSYPLTFGQGTKVEIKRLEDLKNVFPPEVAVFEPSEAEISHTQKATLVCLATGFYPDHVELSWWVNGKEVHSGVSTDPQPLKEQPALNDSRYCLSSRLRVSATFWQNPRNHFRCQVQFYGLSENDEWTQDRAKPVTQIVSAEAWGRADCGSQSFGLLDPKLCYLLDGILFIYGVILTALFLRVKFSRSADAPAYQQGQNQLYNELNLGRREEYDVLDKRRGRDPEMGGKPQRRKNPQEGLYNELQKDKMAEAYSEIGMKGERRRGKGHDGLYQGLSTATKDTYDALHMQALPPRRAKRSGSGATNFSLLKQAGDVEENPGPTSMDWIWRILFLVGAATGAHSFEVQLVESGGGLVQPGGSLRLSCAASGYTFTEYTIHWVRQAPGKGLEWVANINPNNGGTTYNQKFEDRFTISRDNSKNTLYLQMNSLRAEDTAVYYCARGWNFDYWGQGTLVTVSSTRIQNPDPAVYQLRDSKSSDKSVCLFTDFDSQTNVSQSKDSDVYITDKTVLDMRSMDFKSNSAVAWSNKSDFACANAFNNSIIPEDTFFPSPESSCGTITQGLAVPTISSFFPPGYQVSFCLVMVLLFAVDTGLYFS

SEQ ID NO: 10331 - protein, 632 aa, synthetic construct
MALPVTALLLPLALLLHAARPDIQMTQSPSSLSASVGDRVTITCKASQDVGTAVDWYQQKPGKAPKLLIYWASTRHTGVPSRFSGSGSGTDFTLTISSLQPEDFATYYCQQYNSYPLTFGQGTKVEIKRLEDLKNVFPPEVAVFEPSEAEISHTQKATLVCLATGFYPDHVELSWWVNGKEVHSGVSTDPQPLKEQPALNDSRYCLSSRLRVSATFWQNPRNHFRCQVQFYGLSENDEWTQDRAKPVTQIVSAEAWGRADCGSLGEPQLCYILDAILFLYGIVLTLLYCRLKIQVRKAAITSYEKSDGVYTGLSTRNQETYETLKHEKPPQRAKRSGSGATNFSLLKQAGDVEENPGPTSMDWIWRILFLVGAATGAHSFEVQLVESGGGLVQPGGSLRLSCAASGYTFTEYTIHWVRQAPGKGLEWVANINPNNGGTTYNQKFEDRFTISRDNSKNTLYLQMNSLRAEDTAVYYCARGWNFDYWGQGTLVTVSSTRIQNPDPAVYQLRDSKSSDKSVCLFTDFDSQTNVSQSKDSDVYITDKTVLDMRSMDFKSNSAVAWSNKSDFACANAFNNSIIPEDTFFPSPESSCGTITQGLAVPTISSFFPPGYQVSFCLVMVLLFAVDTGLYFS

SEQ ID NO: 10332 - protein, 608 aa, synthetic construct
MALPVTALLLPLALLLHAARPDIQMTQSPSSLSASVGDRVTITCKASQDVGTAVDWYQQKPGKAPKLLIYWASTRHTGVPSRFSGSGSGTDFTLTISSLQPEDFATYYCQQYNSYPLTFGQGTKVEIKRLEGQPKANPTVTLFPPSSEELQANKATLVCLISDFYPGAVTVAWKADGSPVKAGVETTKPSKQSNNKYAASSYLSLTPEQWKSHRSYSCQVTHEGSTVEKTVAPTECSGSLGEPQLCYILDAILFLYGIVLTLLYCRLKIQVRKAAITSYEKSDGVYTGLSTRNQETYETLKHEKPPQRAKRSGSGATNFSLLKQAGDVEENPGPTSMDWIWRILFLVGAATGAHSFEVQLVESGGGLVQPGGSLRLSCAASGYTFTEYTIHWVRQAPGKGLEWVANINPNNGGTTYNQKFEDRFTISRDNSKNTLYLQMNSLRAEDTAVYYCARGWNFDYWGQGTLVTVSSTRIQNPDPAVYQLRDSKSSDKSVCLFTDFDSQTNVSQSKDSDVYITDKTVLDMRSMDFKSNSAVAWSNKSDFACANAFNNSIIPEDTFFPSPESSCGTITQGLAVPTISSFFPPGYQVSFCLVMVLLFAVDTGLYFS

SEQ ID NO: 10333 - protein, 617 aa, synthetic construct
MALPVTALLLPLALLLHAARPDIQMTQSPSSLSASVGDRVTITCKASQDVGTAVDWYQQKPGKAPKLLIYWASTRHTGVPSRFSGSGSGTDFTLTISSLQPEDFATYYCQQYNSYPLTFGQGTKVEIKRLEGQPKANPTVTLFPPSSEELQANKATLVCLISDFYPGAVTVAWKADGSPVKAGVETTKPSKQSNNKYAASSYLSLTPEQWKSHRSYSCQVTHEGSTVEKTVAPTECSGSLGEPQLCYILDAILFLYGIVLTLLYCRLKIQVRKAAITSYEKSDGVYTGLSTRNQETYETLKHEKPPQRAKRSGSGATNFSLLKQAGDVEENPGPTSMDWIWRILFLVGAATGAHSFEVQLVESGGGLVQPGGSLRLSCAASGYTFTEYTIHWVRQAPGKGLEWVANINPNNGGTTYNQKFEDRFTISRDNSKNTLYLQMNSLRAEDTAVYYCARGWNFDYWGQGTLVTVSSTRASTKGPSVFPLAPSSKSTSGGTAALGCLVKDYFPEPVTVSWNSGALTSGVHTFPAVLQSSGLYSLSSVVTVPSSSLGTQTYICNVNHKPSNTKVDKRVEPKSCGTITQGLAVPTISSFFPPGYQVSFCLVMVLLFAVDTGLYFS

SEQ ID NO: 10334 - protein, 487 aa, synthetic construct
MALPVTALLLPLALLLHAARPDVQMIQTPDSLAVSLGQRATISCRASESVDNYGISFMHWYQQKPGQSPKLLIYRASNLESGIPARFSGSGSRTDFTLTINPVETDDVATYYCQQNNKDPPTFGGGTKLEIKGGGGSGGGGSGGGGSGGGGSQVQLQQSGAELVKPGASVKISCKASGYAFSSYWMNWVKQRPGKGLEWIGQIYPGDGDTTYNGKFKGKATLTADKSSSTVYMQLNSLTSEDSAVYFCVRYYYGSSGYFDYWGQGTTLTVSSTRGMRTEDLPKAVVFLEPQWYRVLEKDSVTLKCQGAYSPEDNSTQWFHNESLISSQASSYFIDAATVDDSGEYRCQTNLSTLSDPVQLEVHIGWLLLQAPRWVFKEEDPIHLRCHSWKNTALHKVTYLQNGKGRKYFHHNSDFYIPKATLKDSGSYFCRGLVGSKNVSSETVNITITQGLAVPTISSFFPPGYQVSFCLVMVLLFAVDTGLYFYV

SEQ ID NO: 10335 - protein, 478 aa, synthetic construct
MALPVTALLLPLALLLHAARPDVQMIQTPSSLSASLGDRVTISCRASQDIGNYLNWYQQKPDGTVKLLIYYTSRLHSGVPSRFSGSGSGTEYSLTISNLEQEDIATYFCQQGSALPPTFGGGTKLEINGGGGSGGGGSGGGGSALQLQQSGAELVRPGASVTLSCKASGYTFTDYEMHWVKQTPVHGLEWIGAIDPETGGTAYNQKFEGKAILTADKSSSTAYMELRSLTSEDSPVYYCARRRYYGSSSFDYWGQGTTLTVSSTRGMRTEDLPKAVVFLEPQWYRVLEKDSVTLKCQGAYSPEDNSTQWFHNESLISSQASSYFIDAATVDDSGEYRCQTNLSTLSDPVQLEVHIGWLLLQAPRWVFKEEDPIHLRCHSWKNTALHKVTYLQNGKGRKYFHHNSDFYIPKATLKDSGSYFCRGLVGSKNVSSETVNITITQGLAVPTISSFFPPGYQVSFCLVMVLLFAVDTGLYFYV

SEQ ID NO: 10336 - protein, 480 aa, synthetic construct
MALPVTALLLPLALLLHAARPDIVLTQSPATLSLSPGDRATISCRASESVTILGSHLIYWYQQKPGQPPRLLIQLASNVQTGVPARFSGSGSRTDFTLTISSVEPEDFAVYYCLQSRTIPRTFGQGTKLEIKRGGGGSGGGGSGGGGSQVQLVQSGPEVKKPGESVKISCKASGYTFRHYSMNWVKQAPGQGLKWMGRINTESGVPIYADDFKGRFSFTVDTSASTAYLEISSLTSEDTAVYFCSNDYLYSLDFWGQGTTLTVSSTRGMRTEDLPKAVVFLEPQWYRVLEKDSVTLKCQGAYSPEDNSTQWFHNESLISSQASSYFIDAATVDDSGEYRCQTNLSTLSDPVQLEVHIGWLLLQAPRWVFKEEDPIHLRCHSWKNTALHKVTYLQNGKGRKYFHHNSDFYIPKATLKDSGSYFCRGLVGSKNVSSETVNITITQGLAVPTISSFFPPGYQVSFCLVMVLLFAVDTGLYFYV

SEQ ID NO: 10337 - protein, 480 aa, synthetic construct
MALPVTALLLPLALLLHAARPDIQMTQSPSSLSASVGDRVTITCSASQDISNYLNWYQQKPGKAPKLLIYYTSNLHSGVPSRFSGSGSGTDFTLTISSLQPEDFATYYCQQYRKLPWTFGQGTKLEIKRGGGGSGGGGSGGGGSQVQLVQSGAEVKKPGSSVKVSCKASGGTFSNYWMHWVRQAPGQGLEWMGATYRGHSDTYYNQKFKGRVTITADKSTSTAYMELSSLRSEDTAVYYCARGAIYDGYDVLDNWGQGTLVTVSSTRGMRTEDLPKAVVFLEPQWYRVLEKDSVTLKCQGAYSPEDNSTQWFHNESLISSQASSYFIDAATVDDSGEYRCQTNLSTLSDPVQLEVHIGWLLLQAPRWVFKEEDPIHLRCHSWKNTALHKVTYLQNGKGRKYFHHNSDFYIPKATLKDSGSYFCRGLVGSKNVSSETVNITITQGLAVPTISSFFPPGYQVSFCLVMVLLFAVDTGLYFYV

SEQ ID NO: 10338 - protein, 485 aa, synthetic construct
MALPVTALLLPLALLLHAARPDIVMTQSPDSLAVSLGERATINCESSQSLLNSGNQKNYLTWYQQKPGQPPKPLIYWASTRESGVPDRFSGSGSGTDFTLTISSLQAEDVAVYYCQNDYSYPYTFGQGTKLEIKRGGGGSGGGGSGGGGSEVQLVQSGAEVKKPGESLKISCKGSGYSFTDYYMKWARQMPGKGLEWMGDIIPSNGATFYNQKFKGQVTISADKSISTTYLQWSSLKASDTAMYYCARSHLLRASWFAYWGQGTMVTVSSTRGMRTEDLPKAVVFLEPQWYRVLEKDSVTLKCQGAYSPEDNSTQWFHNESLISSQASSYFIDAATVDDSGEYRCQTNLSTLSDPVQLEVHIGWLLLQAPRWVFKEEDPIHLRCHSWKNTALHKVTYLQNGKGRKYFHHNSDFYIPKATLKDSGSYFCRGLVGSKNVSSETVNITITQGLAVPTISSFFPPGYQVSFCLVMVLLFAVDTGLYFYV

SEQ ID NO: 10339 - protein, 480 aa, synthetic construct
MALPVTALLLPLALLLHAARPDIQMTQSTSSLSASLGDRVTISCSASQGINNYLNWYQQKPDGTVELLIYYTSTLQSGVPSRFSGSGSGTDYSLTISNLEPEDIGTYYCQQYSKLPRTFGGGTKLEIKGGGGSGGGGSGGGGSQVQLQQSGSELMMPGASVKISCKATGYTFSNYWIEWVKQRPGHGLEWIGEILPGTGRTIYNEKFKGKATFTADISSNTVQMQLSSLTSEDSAVYYCARRDYYGNFYYAMDYWGQGTSVTVSSTRGMRTEDLPKAVVFLEPQWYRVLEKDSVTLKCQGAYSPEDNSTQWFHNESLISSQASSYFIDAATVDDSGEYRCQTNLSTLSDPVQLEVHIGWLLLQAPRWVFKEEDPIHLRCHSWKNTALHKVTYLQNGKGRKYFHHNSDFYIPKATLKDSGSYFCRGLVGSKNVSSETVNITITQGLAVPTISSFFPPGYQVSFCLVMVLLFAVDTGLYFYV

SEQ ID NO: 10340 - protein, 475 aa, synthetic construct
MALPVTALLLPLALLLHAARPDIQMTQSPASLSVSVGETVTITCRASENIYSNLAWYQQKQGKSPQLLVYAATNLADGVPSRFSGSGSGTQYSLKINSLQSEDFGSYYCQHFWGTWTFGGGTTLEIKGGGGSGGGGSGGGGSEVQLQQSGPELVKPGASVKMSCKASGYTFTDYYMKWMKQSHGKSLEWIGDINPNNGGTTYNQKFKGKATLTVDKSSSTAYMQLNSLTSEDSAVYYCARDYGYGYFDYWGQGTTLTVSSTRGMRTEDLPKAVVFLEPQWYRVLEKDSVTLKCQGAYSPEDNSTQWFHNESLISSQASSYFIDAATVDDSGEYRCQTNLSTLSDPVQLEVHIGWLLLQAPRWVFKEEDPIHLRCHSWKNTALHKVTYLQNGKGRKYFHHNSDFYIPKATLKDSGSYFCRGLVGSKNVSSETVNITITQGLAVPTISSFFPPGYQVSFCLVMVLLFAVDTGLYFYV

SEQ ID NO: 10341 - protein, 479 aa, synthetic construct
MALPVTALLLPLALLLHAARPDEIVLTQSPATLSLSPGERATLSCSASSSVSYMHWYQQKPGQAPRLLIYDTSKLASGIPARFSGSGSGTDFTLTISSLEPEDVAVYYCFQGSVYPFTFGQGTKLEIKRGGGGSGGGGSGGGGSQVQLQESGPGLVKPSQTLSLTCTVSGGSISTSGMGVGWIRQHPGKGLEWIGHIWWDDDKRYNPALKSRVTISVDTSKNQFSLKLSSVTAADTAVYYCARMELWSYYFDYWGQGTLVTVSSTRGMRTEDLPKAVVFLEPQWYRVLEKDSVTLKCQGAYSPEDNSTQWFHNESLISSQASSYFIDAATVDDSGEYRCQTNLSTLSDPVQLEVHIGWLLLQAPRWVFKEEDPIHLRCHSWKNTALHKVTYLQNGKGRKYFHHNSDFYIPKATLKDSGSYFCRGLVGSKNVSSETVNITITQGLAVPTISSFFPPGYQVSFCLVMVLLFAVDTGLYFYV

SEQ ID NO: 10342 - protein, 478 aa, synthetic construct
MALPVTALLLPLALLLHAARPDIQMTQTTSSLSASLGDRVTISCRASQDISKYLNWYQQKPDGTVKLLIYHTSRLHSGVPSRFSGSGSGTDYSLTISNLEQEDIATYFCQQGNTLPYTFGGGTKLEITGGGGSGGGGSGGGGSEVKLQESGPGLVAPSQSLSVTCTVSGVSLPDYGVSWIRQPPRKGLEWLGVIWGSETTYYNSALKSRLTIIKDNSKSQVFLKMNSLQTDDTAIYYCAKHYYYGGSYAMDYWGQGTSVTVSSTRGMRTEDLPKAVVFLEPQWYRVLEKDSVTLKCQGAYSPEDNSTQWFHNESLISSQASSYFIDAATVDDSGEYRCQTNLSTLSDPVQLEVHIGWLLLQAPRWVFKEEDPIHLRCHSWKNTALHKVTYLQNGKGRKYFHHNSDFYIPKATLKDSGSYFCRGLVGSKNVSSETVNITITQGLAVPTISSFFPPGYQVSFCLVMVLLFAVDTGLYFYV

SEQ ID NO: 10343 - protein, 478 aa, synthetic construct
MALPVTALLLPLALLLHAARPEIVMTQSPATLSLSPGERATLSCRASQDISKYLNWYQQKPGQAPRLLIYHTSRLHSGIPARFSGSGSGTDYTLTISSLQPEDFAVYFCQQGNTLPYTFGQGTKLEIKGGGGSGGGGSGGGGSQVQLQESGPGLVKPSETLSLTCTVSGVSLPDYGVSWIRQPPGKGLEWIGVIWGSETTYYNSSLKSRVTISKDNSKNQVSLKLSSVTAADTAVYYCAKHYYYGGSYAMDYWGQGTLVTVSSTRGMRTEDLPKAVVFLEPQWYRVLEKDSVTLKCQGAYSPEDNSTQWFHNESLISSQASSYFIDAATVDDSGEYRCQTNLSTLSDPVQLEVHIGWLLLQAPRWVFKEEDPIHLRCHSWKNTALHKVTYLQNGKGRKYFHHNSDFYIPKATLKDSGSYFCRGLVGSKNVSSETVNITITQGLAVPTISSFFPPGYQVSFCLVMVLLFAVDTGLYFYV

SEQ ID NO: 10344 - protein, 480 aa, synthetic construct
MALPVTALLLPLALLLHAARPEIVLTQSPATLSLSPGERATLSCRASQSVSSYLAWYQQKPGQAPRLLIYDASNRATGIPARFSGSGSGTDFTLTISSLEPEDFAVYYCQQRSNWPITFGQGTRLEIKGGGGSGGGGSGGGGSEVQLVESGGGLVQPGRSLRLSCAASGFTFNDYAMHWVRQAPGKGLEWVSTISWNSGSIGYADSVKGRFTISRDNAKKSLYLQMNSLRAEDTALYYCAKDIQYGNYYYGMDVWGQGTTVTVSSTRGMRTEDLPKAVVFLEPQWYRVLEKDSVTLKCQGAYSPEDNSTQWFHNESLISSQASSYFIDAATVDDSGEYRCQTNLSTLSDPVQLEVHIGWLLLQAPRWVFKEEDPIHLRCHSWKNTALHKVTYLQNGKGRKYFHHNSDFYIPKATLKDSGSYFCRGLVGSKNVSSETVNITITQGLAVPTISSFFPPGYQVSFCLVMVLLFAVDTGLYFYV

SEQ ID NO: 10345 - protein, 483 aa, synthetic construct
MALPVTALLLPLALLLHAARPDIVMTQTPLSLPVTPGEPASISCRSSKSLLHSNGITYLYWYLQKPGQSPQLLIYQMSNLVSGVPDRFSGSGSGTDFTLKISRVEAEDVGVYYCAQNLELPYTFGGGTKVEIKRGGGGSGGGGSGGGGSQVQLVQSGAEVKKPGSSVKVSCKASGYAFSYSWINWVRQAPGQGLEWMGRIFPGDGDTDYNGKFKGRVTITADKSTSTAYMELSSLRSEDTAVYYCARNVFDGYWLVYWGQGTLVTVSSTRGMRTEDLPKAVVFLEPQWYRVLEKDSVTLKCQGAYSPEDNSTQWFHNESLISSQASSYFIDAATVDDSGEYRCQTNLSTLSDPVQLEVHIGWLLLQAPRWVFKEEDPIHLRCHSWKNTALHKVTYLQNGKGRKYFHHNSDFYIPKATLKDSGSYFCRGLVGSKNVSSETVNITITQGLAVPTISSFFPPGYQVSFCLVMVLLFAVDTGLYFYV

SEQ ID NO: 10346 - protein, 484 aa, synthetic construct
MALPVTALLLPLALLLHAARPDIQMTQSPSSLSASVGDRVTITCRSSQSIVHSVGNTFLEWYQQKPGKAPKLLIYKVSNRFSGVPSRFSGSGSGTDFTLTISSLQPEDFATYYCFQGSQFPYTFGQGTKVEIKRGGGGSGGGGSGGGGSEVQLVESGGGLVQPGGSLRLSCAASGYEFSRSWMNWVRQAPGKGLEWVGRIYPGDGDTNYSGKFKGRFTISADTSKNTAYLQMNSLRAEDTAVYYCARDGSSWDWYFDVWGQGTLVTVSSTRGMRTEDLPKAVVFLEPQWYRVLEKDSVTLKCQGAYSPEDNSTQWFHNESLISSQASSYFIDAATVDDSGEYRCQTNLSTLSDPVQLEVHIGWLLLQAPRWVFKEEDPIHLRCHSWKNTALHKVTYLQNGKGRKYFHHNSDFYIPKATLKDSGSYFCRGLVGSKNVSSETVNITITQGLAVPTISSFFPPGYQVSFCLVMVLLFAVDTGLYFYV

SEQ ID NO: 10347 - protein, 478 aa, synthetic construct
MALPVTALLLPLALLLHAARPEIVLTQSPGTLSLSPGERATLSCRASQSVGGYLAWYQQKPGQAPRLLIYDASNRATGIPARFSGSGSGTDFTLTISSLEPEDFAVYYCQQRNNWPPMYTFGQGTKLEIKRGGGGSGGGGSGGGGSQVQLVQSGAEVKKPGSSVKVSCKASGGTFSSYAISWVRQAPGQGLEWMGGIIPILGTANYAQKFQGRVTITADESTSTAYMELSSLRSEDTAVYYCARWGGGAFDIWGQGTMVTVSSTRGMRTEDLPKAVVFLEPQWYRVLEKDSVTLKCQGAYSPEDNSTQWFHNESLISSQASSYFIDAATVDDSGEYRCQTNLSTLSDPVQLEVHIGWLLLQAPRWVFKEEDPIHLRCHSWKNTALHKVTYLQNGKGRKYFHHNSDFYIPKATLKDSGSYFCRGLVGSKNVSSETVNITITQGLAVPTISSFFPPGYQVSFCLVMVLLFAVDTGLYFYV

SEQ ID NO: 10348 - protein, 475 aa, synthetic construct
MALPVTALLLPLALLLHAARPDIQMTQSPATIENTSLSASVGDRVTITCRASQGISSWLTWYQQKPEKAPKSLIYAASSLQSGVPSRFSGSGSGTDFTLTISSLQPEDFATYYCQQYDSYPITFGQGTRLEIKGGGGSGGGGSGGGGSQVQLQQWGAGLLKPSETLSLTCAVYGGSFSAYYWSWIRQPPGKGLEWIGDINHGGGTNYNPSLKSRVTISVDTSKNQFSLKLNSVTAADTAVYYCASLTAYWGQGSLVTVSSTRGMRTEDLPKAVVFLEPQWYRVLEKDSVTLKCQGAYSPEDNSTQWFHNESLISSQASSYFIDAATVDDSGEYRCQTNLSTLSDPVQLEVHIGWLLLQAPRWVFKEEDPIHLRCHSWKNTALHKVTYLQNGKGRKYFHHNSDFYIPKATLKDSGSYFCRGLVGSKNVSSETVNITITQGLAVPTISSFFPPGYQVSFCLVMVLLFAVDTGLYFYV

SEQ ID NO: 10349 - protein, 479 aa, synthetic construct
MALPVTALLLPLALLLHAARPEIVLTQSPDSLAVSLGERATINCKASQSVDFDGDSYLNWYQQKPGQPPKVLIYAASTLQSGVPSRFSGSGSGTDFTLTINSLEAEDAATYYCQQSNEDPWTFGGGTKVEIKGGGGSGGGGSGGGGSQVQLVQSGAEVKKPGASVKVSCKVSGYTFTDYYITWVRQAPGQALEWMGWIYPGSGNTKYSQKFQGRFVFSVDTSASTAYLQLSSLKAEDTAVYYCANYGNYWFAYWGQGTLVTVSSTRGMRTEDLPKAVVFLEPQWYRVLEKDSVTLKCQGAYSPEDNSTQWFHNESLISSQASSYFIDAATVDDSGEYRCQTNLSTLSDPVQLEVHIGWLLLQAPRWVFKEEDPIHLRCHSWKNTALHKVTYLQNGKGRKYFHHNSDFYIPKATLKDSGSYFCRGLVGSKNVSSETVNITITQGLAVPTISSFFPPGYQVSFCLVMVLLFAVDTGLYFYV

SEQ ID NO: 10350 - protein, 477 aa, synthetic construct
MALPVTALLLPLALLLHAARPDIQMTQSPSSLSASVGDRVTITCRASQGISSWLAWYQQKPEKAPKSLIYAASSLQSGVPSRFSGSGSGTDFTLTISSLQPEDFATYYCQQYNSYPPTFGGGTKVEIKGGGGSGGGGSGGGGSEVQLVQSGGGLVHPGGSLRLSCAGSGFAFSSSTMHWIRQAPGKGLEWISLIGSGGGIYYGDSVKGRFTISRDNAKNSLYLQMNSLRAEDMAVYYCVRGYFDWVDYFDYWGQGTLVTVSSTRGMRTEDLPKAVVFLEPQWYRVLEKDSVTLKCQGAYSPEDNSTQWFHNESLISSQASSYFIDAATVDDSGEYRCQTNLSTLSDPVQLEVHIGWLLLQAPRWVFKEEDPIHLRCHSWKNTALHKVTYLQNGKGRKYFHHNSDFYIPKATLKDSGSYFCRGLVGSKNVSSETVNITITQGLAVPTISSFFPPGYQVSFCLVMVLLFAVDTGLYFYV

SEQ ID NO: 10351 - protein, 483 aa, synthetic construct
MALPVTALLLPLALLLHAARPDVVMTQSPLSLPVTLGQPASISCRSSQSIVHSDGNTYLEWYQQRPGQSPRRLIYKVSNRFSGVPDRFSGSGSGTDFTLKISRVEAEDVGVYYCFQGSHAPWTFGGGTKVEIKGGGGSGGGGSGGGGSEVQLVESGGGLVQPGGSLRLSCAASGFTFSSYGMHWVRQAPGKGLEWVAYITTRSSTIYYADSVKGRFTISRDNAKNSLYLQMNSLRAEDTAVYYCTREPLTGYYAMDYWGQGTSVTVSSTRGMRTEDLPKAVVFLEPQWYRVLEKDSVTLKCQGAYSPEDNSTQWFHNESLISSQASSYFIDAATVDDSGEYRCQTNLSTLSDPVQLEVHIGWLLLQAPRWVFKEEDPIHLRCHSWKNTALHKVTYLQNGKGRKYFHHNSDFYIPKATLKDSGSYFCRGLVGSKNVSSETVNITITQGLAVPTISSFFPPGYQVSFCLVMVLLFAVDTGLYFYV

SEQ ID NO: 10352 - protein, 473 aa, synthetic construct
MALPVTALLLPLALLLHAARPQIVLTQSPALMSASPGEKVTMTCSASSSVRYMYWYQQKPRSSPKPWIHLTSNLASGVPARFSGSGSGTSYSLTISSMEAEDAATYYCQQWSSHPFTFGSGTKLEIKGGGGSGGGGSGGGGSDVQLQESGPGLVKPSQSLSLTCTVTGFSITSDYSWNWIRQFPGNKLEWMGYISYSGHTSYNPSLESRISITRDTSKNQFFLQLNSVTTEDTATYYCTRGNWDVVYWGQGTLVTVSATRGMRTEDLPKAVVFLEPQWYRVLEKDSVTLKCQGAYSPEDNSTQWFHNESLISSQASSYFIDAATVDDSGEYRCQTNLSTLSDPVQLEVHIGWLLLQAPRWVFKEEDPIHLRCHSWKNTALHKVTYLQNGKGRKYFHHNSDFYIPKATLKDSGSYFCRGLVGSKNVSSETVNITITQGLAVPTISSFFPPGYQVSFCLVMVLLFAVDTGLYFYV

SEQ ID NO: 10353 - protein, 482 aa, synthetic construct
MALPVTALLLPLALLLHAARPEIVLTQSPGSLAVSPGERVTMSCKSSQSVFFSSSQKNYLAWYQQIPGQSPRLLIYWASTRESGVPDRFTGSGSGTDFTLTISSVQPEDLAIYYCHQYLSSRTFGQGTKLEIKRGGGGSGGGGSGGGGSQVQLQQPGAEVVKPGASVKMSCKASGYTFTSYYIHWIKQTPGQGLEWVGVIYPGNDDISYNQKFQGKATLTADKSSTTAYMQLSSLTSEDSAVYYCAREVRLRYFDVWGQGTTVTVSSTRGMRTEDLPKAVVFLEPQWYRVLEKDSVTLKCQGAYSPEDNSTQWFHNESLISSQASSYFIDAATVDDSGEYRCQTNLSTLSDPVQLEVHIGWLLLQAPRWVFKEEDPIHLRCHSWKNTALHKVTYLQNGKGRKYFHHNSDFYIPKATLKDSGSYFCRGLVGSKNVSSETVNITITQGLAVPTISSFFPPGYQVSFCLVMVLLFAVDTGLYFYV

SEQ ID NO: 10354 - protein, 486 aa, synthetic construct
MALPVTALLLPLALLLHAARPDIVMTQSPDSLTVSLGERTTINCKSSQSVLDSSKNKNSLAWYQQKPGQPPKLLLSWASTRESGIPDRFSGSGSGTDFTLTIDSLQPEDSATYYCQQSAHFPITFGQGTRLEIKGGGGSGGGGSGGGGSQVQLVQSGAEVKKPGASVKVSCKASGYTFTNYGMNWVKQAPGQGLKWMGWINTYTGEPTYADDFKGRVTMTSDTSTSTAYLELHNLRSDDTAVYYCARWSWSDGYYVYFDYWGQGTTVTVSSTRGMRTEDLPKAVVFLEPQWYRVLEKDSVTLKCQGAYSPEDNSTQWFHNESLISSQASSYFIDAATVDDSGEYRCQTNLSTLSDPVQLEVHIGWLLLQAPRWVFKEEDPIHLRCHSWKNTALHKVTYLQNGKGRKYFHHNSDFYIPKATLKDSGSYFCRGLVGSKNVSSETVNITITQGLAVPTISSFFPPGYQVSFCLVMVLLFAVDTGLYFYV

SEQ ID NO: 10355 - protein, 486 aa, synthetic construct
MALPVTALLLPLALLLHAARPDVLLTQSPLSLPVTLGQPASISCRSSQTIVHSNGNTYLEWFQQRPGQSPRLLIYQVSNRFSGVPDRFSGSGSGTDFTLKISRVEAEDVGVYYCFQGSHVPRTFGGGTKVEIKRGGGGSGGGGSGGGGSQIQLVQSGSELKKPGASVKVSCKASGYTFTNYGMNWVRQAPGQGLKWMGWINTNTGEPKYAEEFKGRFALSLDTSVSTAYLQINSLKAEDTAVYFCARGYGNYARGAWLAYWGQGTLVTVSSTRGMRTEDLPKAVVFLEPQWYRVLEKDSVTLKCQGAYSPEDNSTQWFHNESLISSQASSYFIDAATVDDSGEYRCQTNLSTLSDPVQLEVHIGWLLLQAPRWVFKEEDPIHLRCHSWKNTALHKVTYLQNGKGRKYFHHNSDFYIPKATLKDSGSYFCRGLVGSKNVSSETVNITITQGLAVPTISSFFPPGYQVSFCLVMVLLFAVDTGLYFYV

SEQ ID NO: 10356 - protein, 481 aa, synthetic construct
MALPVTALLLPLALLLHAARPDHIVLTQSPSSLSASLGDRVTISCRASQDISTYLNWYQQKPDGTVKLLIFYTSRLHAGVPSRFSGSGSGTHHSLTISNLEQEDIATYFCQQGNSLPFTFGSGTKLEIKRGGGGSGGGGSGGGGSQVQLKESGPELEKPGASVKISCKASGYSFTAYSMNWVKQNNGMSLEWIGSIDPYYGDTKYAQKFKGKATLTVDKASSTAYLQLKSLTSEDSAVYYCARRMITTGDWYFDVWGAGTTVTVSSTRGMRTEDLPKAVVFLEPQWYRVLEKDSVTLKCQGAYSPEDNSTQWFHNESLISSQASSYFIDAATVDDSGEYRCQTNLSTLSDPVQLEVHIGWLLLQAPRWVFKEEDPIHLRCHSWKNTALHKVTYLQNGKGRKYFHHNSDFYIPKATLKDSGSYFCRGLVGSKNVSSETVNITITQGLAVPTISSFFPPGYQVSFCLVMVLLFAVDTGLYFYV

SEQ ID NO: 10357 - protein, 481 aa, synthetic construct; identical to SEQ ID NO: 10356

SEQ ID NO: 10358 - protein, 481 aa, synthetic construct
MALPVTALLLPLALLLHAARPDIVMTQSPDSLAVSLGERATINCRASKSVSTSGYSFMHWYQQKPGQPPKLLIYLASNLESGVPDRFSGSGSGTDFTLTISSLQAEDVAVYYCQHSREVPWTFGQGTKVEIKRGGGGSGGGGSGGGGSQVQLVQSGAEVKKPGASVKVSCKASGYTFTNYGMNWVRQAPGQGLEWMGWINTYTGEPTYADAFKGRFAFSLDTSTSTAYLQINSLRSDDTAVYYCARDYGDYGMDYWGQGTTVTVSSTRGMRTEDLPKAVVFLEPQWYRVLEKDSVTLKCQGAYSPEDNSTQWFHNESLISSQASSYFIDAATVDDSGEYRCQTNLSTLSDPVQLEVHIGWLLLQAPRWVFKEEDPIHLRCHSWKNTALHKVTYLQNGKGRKYFHHNSDFYIPKATLKDSGSYFCRGLVGSKNVSSETVNITITQGLAVPTISSFFPPGYQVSFCLVMVLLFAVDTGLYFYV

SEQ ID NO: 10359 - protein, 477 aa, synthetic construct
MALPVTALLLPLALLLHAARPDIVMTQTPLTLSVTIGQPASISCKSSQSLLDSDGKTYLNWLLQRPGQSPERLIYLVSKLDSGVPDRFTGSGSGTDFTLKISRVEAEDLGVYCCWQGTHFPYTFGGGTKVEIKGGGGGSGGGGSGGGGSQVQLQQPGAELVRPGASVKLSCKASGYTFTSYWMNWVKQRPGQGLEWIGMIDPSDSETHYNHIFKDKATLTVDKSSSTAYLQLSSLTSEDSAVYYCARNLYLWGQGTSVTVSSTRGMRTEDLPKAVVFLEPQWYRVLEKDSVTLKCQGAYSPEDNSTQWFHNESLISSQASSYFIDAATVDDSGEYRCQTNLSTLSDPVQLEVHIGWLLLQAPRWVFKEEDPIHLRCHSWKNTALHKVTYLQNGKGRKYFHHNSDFYIPKATLKDSGSYFCRGLVGSKNVSSETVNITITQGLAVPTISSFFPPGYQVSFCLVMVLLFAVDTGLYFYV

SEQ ID NO: 10360 - protein, 480 aa, synthetic construct
MALPVTALLLPLALLLHAARPDIQLTQSPSSLSASVGDRVTITCKASQSVDYEGDSFLNWYQQKPGKAPKLLIYAASNLESGVPSRFSGSGSGTDFTLTISSLQPEDFATYYCQQSNEDPLTFGQGTKVEIKRGGGGSGGGGSGGGGSEVQLVESGGGLVQPGGSLRLSCAASGYTFSSYWIEWVRQAPGKGLEWIGEILPGGGDTNYNEIFKGRATFSADTSKNTAYLQMNSLRAEDTAVYYCTRRVPIRLDYWGQGTLVTVSSTRGMRTEDLPKAVVFLEPQWYRVLEKDSVTLKCQGAYSPEDNSTQWFHNESLISSQASSYFIDAATVDDSGEYRCQTNLSTLSDPVQLEVHIGWLLLQAPRWVFKEEDPIHLRCHSWKNTALHKVTYLQNGKGRKYFHHNSDFYIPKATLKDSGSYFCRGLVGSKNVSSETVNITITQGLAVPTISSFFPPGYQVSFCLVMVLLFAVDTGLYFYV

SEQ ID NO: 10361 - protein, 488 aa, synthetic construct
MALPVTALLLPLALLLHAARPDIVMSQSPSSLAVSVGEKVTMSCKSSQSLLHSSNQKNYLAWYQQKPGQSPKVLIYWASTRESGVPDRFTGSGSGTDFTLTITSVKSEDLAVYYCQQYYSYPWTFGGGTRLEIKRGGGGSGGGGSGGGGSEVQLQQSVAELVKPGASVKMSCKVSGYTLTDHTIHWMKQRPEQGLEWIGYIYPRDGITGYNEKFKGKATLTADTSSSTAYMQLNSLTSEDSAVYFCARWGYSYRNYAYYYDYWGQGTTLTVSSTRGMRTEDLPKAVVFLEPQWYRVLEKDSVTLKCQGAYSPEDNSTQWFHNESLISSQASSYFIDAATVDDSGEYRCQTNLSTLSDPVQLEVHIGWLLLQAPRWVFKEEDPIHLRCHSWKNTALHKVTYLQNGKGRKYFHHNSDFYIPKATLKDSGSYFCRGLVGSKNVSSETVNITITQGLAVPTISSFFPPGYQVSFCLVMVLLFAVDTGLYFYV

SEQ ID NO: 10362 - protein, 485 aa, synthetic construct
MALPVTALLLPLALLLHAARPEIVLTQSPGTLSLSPGERATLSCRASQSVSSSYLAWYQQKPGQAPRLLIYGTSSRATGIPDRFSGSGSGTDFTLTISRLEPEDFAVYYCQQYGSSPFTFGGGTKVEIKRGGGGSGGGGSGGGGSQVQLQESGPGLAKPSETLSLTCTVSGDSITSYYWSWIRQPPGKGLEWIGYIYYSGSTNYNPSLKSRVTISVDTSKNQFSLKLSSVTAADTAVYYCARDQRRIAAAGTHFYGMDVWGQGTTVTVSSTRGMRTEDLPKAVVFLEPQWYRVLEKDSVTLKCQGAYSPEDNSTQWFHNESLISSQASSYFIDAATVDDSGEYRCQTNLSTLSDPVQLEVHIGWLLLQAPRWVFKEEDPIHLRCHSWKNTALHKVTYLQNGKGRKYFHHNSDFYIPKATLKDSGSYFCRGLVGSKNVSSETVNITITQGLAVPTISSFFPPGYQVSFCLVMVLLFAVDTGLYFYV

SEQ ID NO: 10363 - protein, 475 aa, synthetic construct
MALPVTALLLPLALLLHAARPDIQMTQSPSSLSASVGDRVTITCRASQSISLWLNWYQQKPGKAPKLLIYAASTLQSGVPSRFSGSGSGTDFTLTISSLQPEDFATYYCQQYYTSPYTFGQGTKVEIKRGGGGSGGGGSGGGGSQVQLLESGGGLVQPGGSLRLSCAASGFTFSSYAMSWVRQAPGKGLEWVSVIRSSGSSTYYADSVKGRFTISRDNSKNTLYLQMNSLRAEDTAVYYCARGGGYFDYWGQGTLVTVSSTRGMRTEDLPKAVVFLEPQWYRVLEKDSVTLKCQGAYSPEDNSTQWFHNESLISSQASSYFIDAATVDDSGEYRCQTNLSTLSDPVQLEVHIGWLLLQAPRWVFKEEDPIHLRCHSWKNTALHKVTYLQNGKGRKYFHHNSDFYIPKATLKDSGSYFCRGLVGSKNVSSETVNITITQGLAVPTISSFFPPGYQVSFCLVMVLLFAVDTGLYFYV

SEQ ID NO: 10364 - protein, 478 aa, synthetic construct
MALPVTALLLPLALLLHAARPDIQMTQSPSSLSASVGDRVTITCRASQSISSYLNWYQQKPGKAPKLLIYAVSTLQSGVPSRFSGSGSGTDFTLTISSLQPEDFATYYCQQSGTFPPTTFGQGTKVEIKRGGGGSGGGGSGGGGSQVQLLESGGGLVQPGGSLRLSCAASGFTFSSHGMHWVRQAPGKGLEWVSVISGSGSNTGYADSVKGRFTISRDNSKNTLYLQMNSLRAEDTAVYYCARQWGSYAFDSWGQGTLVTVSSTRGMRTEDLPKAVVFLEPQWYRVLEKDSVTLKCQGAYSPEDNSTQWFHNESLISSQASSYFIDAATVDDSGEYRCQTNLSTLSDPVQLEVHIGWLLLQAPRWVFKEEDPIHLRCHSWKNTALHKVTYLQNGKGRKYFHHNSDFYIPKATLKDSGSYFCRGLVGSKNVSSETVNITITQGLAVPTISSFFPPGYQVSFCLVMVLLFAVDTGLYFYV

SEQ ID NO: 10365 - protein, 470 aa, synthetic construct
MALPVTALLLPLALLLHAARPMTQSPKFLLVSAGDRVTLTCKASQSVNNDVYWYQQEPGQSPKLLIYWASTRESGVPDRFTGSGSGTDFTLTISSVQAEDLAVYYCKQSYNLYTFGGGTKLEIKRGGGGSGGGGSGGGGSESGRGLVQPGGSRKLSCAASGFTFSTSGMHWVRQAPEKGLEWVAYISSGSTTIYHADTVKGRFTISRDNPKNTLFLQMTSLRSEDTAMYYCCARSGQFGNYFDYWGQGTTLTVSSTRGMRTEDLPKAVVFLEPQWYRVLEKDSVTLKCQGAYSPEDNSTQWFHNESLISSQASSYFIDAATVDDSGEYRCQTNLSTLSDPVQLEVHIGWLLLQAPRWVFKEEDPIHLRCHSWKNTALHKVTYLQNGKGRKYFHHNSDFYIPKATLKDSGSYFCRGLVGSKNVSSETVNITITQGLAVPTISSFFPPGYQVSFCLVMVLLFAVDTGLYFYV

SEQ ID NO: 10366 - protein, 475 aa, synthetic construct
MALPVTALLLPLALLLHAARPQSPSSLAVSAGEKVTMSCKSSQSLLNSRTRKNYLAWYQQKPGQSPKLLIYWASTRESGVPDRFTGSGSGTDFTLTISSVQAEDLAVYYCKQSNLYTFGGGTKLEIKGGGGSGGGGSGGGGSQVQLEESGPELVKPGASVKLSCKASGYTFTEYIIHWVKQRSGQGLEWIGWFYPGSGSIKYNEKFKDKATLTADKSSSTVYMELSGLTSEDSAVYFCARHDGYSYFDYWGQGTTLTVSSTRGMRTEDLPKAVVFLEPQWYRVLEKDSVTLKCQGAYSPEDNSTQWFHNESLISSQASSYFIDAATVDDSGEYRCQTNLSTLSDPVQLEVHIGWLLLQAPRWVFKEEDPIHLRCHSWKNTALHKVTYLQNGKGRKYFHHNSDFYIPKATLKDSGSYFCRGLVGSKNVSSETVNITITQGLAVPTISSFFPPGYQVSFCLVMVLLFAVDTGLYFYV

SEQ ID NO: 10367 - protein, 478 aa, synthetic construct
MALPVTALLLPLALLLHAARPDIQMTQSPSSLSASLGERVSLTCRATQELSGYLSWLQQKPDGTIKRLIYAASTLDSGVPKRFSGNRSGSDYSLTISSLESEDFADYYCLQYAIYPYTFGGGTKLEIKGGGGSGGGGSGGGGSEVQLQQSGPELVKPGASVKMSCKASGYTFTSYFIHWVKQKPGQGLEWIGFINPYNDGSKYNEKFKGKATLTSDKSSSTAYMELSSLTSEDSAVYYCTRDDGYYGYAMDYWGQGTSVTVSSTRGMRTEDLPKAVVFLEPQWYRVLEKDSVTLKCQGAYSPEDNSTQWFHNESLISSQASSYFIDAATVDDSGEYRCQTNLSTLSDPVQLEVHIGWLLLQAPRWVFKEEDPIHLRCHSWKNTALHKVTYLQNGKGRKYFHHNSDFYIPKATLKDSGSYFCRGLVGSKNVSSETVNITITQGLAVPTISSFFPPGYQVSFCLVMVLLFAVDTGLYFYV

SEQ ID NO: 10368 - protein, 483 aa, synthetic construct
MALPVTALLLPLALLLHAARPDTIVLTQSPASLAVSLGQRATISCRASESVDSYGNSFMHWYQQKPGQPPKLLIYLASNLESGVPARFSGSGSRTDFTLTIDPVEADDAATYYCQQNNYDPWTFGGGTKLEIKGGGGSGGGGSGGGGSEVQLQQSGPELVKPGASVKMSCKASGYTFTSYVMHWVKQKPGQGLEWIGYINPYNDGTKYNEKFKGKATLTSDTSSSTAYMELNSLTSEDSAVYFCARPIYFDNDYFDYWGQGTTLKVSSTRGMRTEDLPKAVVFLEPQWYRVLEKDSVTLKCQGAYSPEDNSTQWFHNESLISSQASSYFIDAATVDDSGEYRCQTNLSTLSDPVQLEVHIGWLLLQAPRWVFKEEDPIHLRCHSWKNTALHKVTYLQNGKGRKYFHHNSDFYIPKATLKDSGSYFCRGLVGSKNVSSETVNITITQGLAVPTISSFFPPGYQVSFCLVMVLLFAVDTGLYFYV

SEQ ID NO: 10369 - protein, 477 aa, synthetic construct
MALPVTALLLPLALLLHAARPDIQMTQSPSSLSASVGDRVTITCKASQDVGIAVAWYQQKPGKVPKLLIYWASTRHTGVPDRFSGSGSGTDFTLTISSLQPEDVATYYCQQYSSYPYTFGQGTKVEIKGGGGSGGGGSGGGGSEVQLVESGGGLVQPGGSLRLSCAASGFDFSRYWMSWVRQAPGKGLEWIGEINPDSSTINYAPSLKDKFIISRDNAKNSLYLQMNSLRAEDTAVYYCARPDGNYWYFDVWGQGTLVTVSSTRGMRTEDLPKAVVFLEPQWYRVLEKDSVTLKCQGAYSPEDNSTQWFHNESLISSQASSYFIDAATVDDSGEYRCQTNLSTLSDPVQLEVHIGWLLLQAPRWVFKEEDPIHLRCHSWKNTALHKVTYLQNGKGRKYFHHNSDFYIPKATLKDSGSYFCRGLVGSKNVSSETVNITITQGLAVPTISSFFPPGYQVSFCLVMVLLFAVDTGLYFYV

SEQ ID NO: 10370 - protein, 478 aa, synthetic construct
MALPVTALLLPLALLLHAARPDIVMTQSQKSMSTSVGDRVSITCKASQDVITGVAWYQQKPGQSPKLLIYSASYRYTGVPDRFTGSGSGTDFTFTISNVQAEDLAVYYCQQHYSTPLTFGAGTKLELKGGGGSGGGGSGGGGSQVQLQQPGAELVRPGASVKLSCKASGYSFTTYWMNWVKQRPGQGLEWIGMIHPSDSETRLNQKFKDKATLTVDKSSSTAYMQLSSPTSEDSAVYYCARSTMIATRAMDYWGQGTSVTVSSTRGMRTEDLPKAVVFLEPQWYRVLEKDSVTLKCQGAYSPEDNSTQWFHNESLISSQASSYFIDAATVDDSGEYRCQTNLSTLSDPVQLEVHIGWLLLQAPRWVFKEEDPIHLRCHSWKNTALHKVTYLQNGKGRKYFHHNSDFYIPKATLKDSGSYFCRGLVGSKNVSSETVNITITQGLAVPTISSFFPPGYQVSFCLVMVLLFAVDTGLYFYV

SEQ ID NO: 10371 - protein, 484 aa, synthetic construct
MALPVTALLLPLALLLHAARPQSVLTQPPSVSGAPGQRVTISCTGSGSNIGAPYDVSWYQQLPGTAPKLLIYHNNKRPSGVPDRFSGSKSGTSASLAITGLQAEDEADYYCATVEAGLSGSVFGGGTKLTVLGAGGGGSGGGGSGGGGSQVQLVQSGAEVKKPGASVKVSCKVSGYTLTELSIHWVRQAPGKGLEWMGGFDPEENEIVYAQRFQGRVTMTEDTSTDTAYMELSSLRSEDTAVYYCAIVGSFSPLTLGLWGQGTMVTVSSTRGMRTEDLPKAVVFLEPQWYRVLEKDSVTLKCQGAYSPEDNSTQWFHNESLISSQASSYFIDAATVDDSGEYRCQTNLSTLSDPVQLEVHIGWLLLQAPRWVFKEEDPIHLRCHSWKNTALHKVTYLQNGKGRKYFHHNSDFYIPKATLKDSGSYFCRGLVGSKNVSSETVNITITQGLAVPTISSFFPPGYQVSFCLVMVLLFAVDTGLYFYV

SEQ ID NO: 10372 - protein, 484 aa, synthetic construct
MALPVTALLLPLALLLHAARPQSVLTQPPSVSGAPGQRVTISCTGSGSNIGAPYDVSWYQQLPGTAPKLLIYHNNKRPSGVPDRFSGSKSGTSASLAITGLQAEDEADYYCQSYDSSSISTIFGGGTKLTVLGAGGGGSGGGGSGGGGSQVQLVQSGAEVKKPGASVKVSCKVSGYTLTELSIHWVRQAPGKGLEWMGGFDPEENEIVYAQRFQGRVTMTEDTSTDTAYMELSSLRSEDTAVYYCAIVGSFSGIAYRPWGQGTMVTVSSTRGMRTEDLPKAVVFLEPQWYRVLEKDSVTLKCQGAYSPEDNSTQWFHNESLISSQASSYFIDAATVDDSGEYRCQTNLSTLSDPVQLEVHIGWLLLQAPRWVFKEEDPIHLRCHSWKNTALHKVTYLQNGKGRKYFHHNSDFYIPKATLKDSGSYFCRGLVGSKNVSSETVNITITQGLAVPTISSFFPPGYQVSFCLVMVLLFAVDTGLYFYV

SEQ ID NO: 10373 - protein, 482 aa, synthetic construct
MALPVTALLLPLALLLHAARPDIQMTQSPSSLSASVGDRVTITCSASSSVSYMYWYQQKPGKAPKLLIYLTSNLASGVPSRFSGSGSGTDFTLTISSLQPEDFATYYCQQWRSNPFTFGQGTKLEIKRGGGGSGGGGSGGGGSQITLKESGPTLVKPTQTLTLTCTFSGFSLSTSGMGVGWIRQPPGKALEWLAHIWWDDVKRYSPSLKSRLTITKDTSKNQVVLTMTNMDPVDTATYYCARIVSFDNDVVSAMDYWGQGTLVTVSSTRGMRTEDLPKAVVFLEPQWYRVLEKDSVTLKCQGAYSPEDNSTQWFHNESLISSQASSYFIDAATVDDSGEYRCQTNLSTLSDPVQLEVHIGWLLLQAPRWVFKEEDPIHLRCHSWKNTALHKVTYLQNGKGRKYFHHNSDFYIPKATLKDSGSYFCRGLVGSKNVSSETVNITITQGLAVPTISSFFPPGYQVSFCLVMVLLFAVDTGLYFYV

SEQ ID NO: 10374 - protein, 477 aa, synthetic construct
MALPVTALLLPLALLLHAARPEIVMTQSPATLSVSPGERATLSCKASQSVSNDVVWYQQKPGQAPRLLIYYASNRYTGIPARFSGSGSGTEFTLTISSLQSEDFAVYYCQQDYTSPWTFGQGTKLEIKRGGGGSGGGGSGGGGSQVQLVQSGAEVKKPGASVKVSCKASGYTFTNYGMNWVRQAPGQGLEWMGWINTYTGEPTYADDFKGRVTMTTDTSTSTAYMELRSLRSDDTAVYYCARIGDSSPSDYWGQGTLVTVSSTRGMRTEDLPKAVVFLEPQWYRVLEKDSVTLKCQGAYSPEDNSTQWFHNESLISSQASSYFIDAATVDDSGEYRCQTNLSTLSDPVQLEVHIGWLLLQAPRWVFKEEDPIHLRCHSWKNTALHKVTYLQNGKGRKYFHHNSDFYIPKATLKDSGSYFCRGLVGSKNVSSETVNITITQGLAVPTISSFFPPGYQVSFCLVMVLLFAVDTGLYFYV

SEQ ID NO: 10375 - protein, 477 aa, synthetic construct
MALPVTALLLPLALLLHAARPDILLTQSPVILSVSPGERVSFSCRASQSIGTNIHWYQQRTNGSPRLLIKYASESISGIPSRFSGSGSGTDFTLSINSVESEDIADYYCQQNNNWPTTFGAGTKLELKGGGGSGGGGSGGGGSQVQLKQSGPGLVQPSQSLSITCTVSGFSLTNYGVHWVRQSPGKGLEWLGVIWSGGNTDYNTPFTSRLSINKDNSKSQVFFKMNSLQSNDTAIYYCARALTYYDYEFAYWGQGTLVTVSATRGMRTEDLPKAVVFLEPQWYRVLEKDSVTLKCQGAYSPEDNSTQWFHNESLISSQASSYFIDAATVDDSGEYRCQTNLSTLSDPVQLEVHIGWLLLQAPRWVFKEEDPIHLRCHSWKNTALHKVTYLQNGKGRKYFHHNSDFYIPKATLKDSGSYFCRGLVGSKNVSSETVNITITQGLAVPTISSFFPPGYQVSFCLVMVLLFAVDTGLYFYV

SEQ ID NO: 10376 - protein, 477 aa, synthetic construct
MALPVTALLLPLALLLHAARPEIQLVQSGAEVKKPGESLRISCKGSGFNIEDYYIHWVRQMPGKGLEWMGRIDPENDETKYGPIFQGHVTISADTSINTVYLQWSSLKASDTAMYYCAFRGGVYWGQGTTVTVSSGGGGSGGGGSGGGGSDVVMTQSPDSLAVSLGERATINCKSSQSLLDSDGKTYLNWLQQKPGQPPKRLISLVSKLDSGVPDRFSGSGSGTDFTLTISSLQAEDVAVYYCWQGTHFPGTFGGGTKVEIKTRGMRTEDLPKAVVFLEPQWYRVLEKDSVTLKCQGAYSPEDNSTQWFHNESLISSQASSYFIDAATVDDSGEYRCQTNLSTLSDPVQLEVHIGWLLLQAPRWVFKEEDPIHLRCHSWKNTALHKVTYLQNGKGRKYFHHNSDFYIPKATLKDSGSYFCRGLVGSKNVSSETVNITITQGLAVPTISSFFPPGYQVSFCLVMVLLFAVDTGLYFYV

SEQ ID NO: 10377 - protein, 485 aa, synthetic construct
MALPVTALLLPLALLLHAARPELQMTQSPSSLSASVGDRVTITCRASQSISSYLNWYQQKPGQPPKLLIYWASTRESGVPDRFSGSESGTNYTLTISSLQPEDFATYFCQQSDSLPITFGQGTRLDIQGGGGSGGGGSGGGGSEVQLLESGGGVVQPGRSLRLSCAASGFTFSSYGMHWVRQAPGKGLEWVAVISYDGSNKYYADSVKGRFTISRDNSKNTLYLQMNSLRAEDTAVYYCAKDMGWGSGWRPYYYYGMDVWGQGTTVTVSSTRGMRTEDLPKAVVFLEPQWYRVLEKDSVTLKCQGAYSPEDNSTQWFHNESLISSQASSYFIDAATVDDSGEYRCQTNLSTLSDPVQLEVHIGWLLLQAPRWVFKEEDPIHLRCHSWKNTALHKVTYLQNGKGRKYFHHNSDFYIPKATLKDSGSYFCRGLVGSKNVSSETVNITITQGLAVPTISSFFPPGYQVSFCLVMVLLFAVDTGLYFYV

SEQ ID NO: 10378 - protein, 484 aa, synthetic construct
MALPVTALLLPLALLLHAARPELVMTQSPSSLTVTAGEKVTMSCKSSQSLLNSGNQKNYLTWYQQKPGQPPKLLIYWASTRESGVPDRFTGSGSGTDFTLTISSVQAEDLAVYYCQNDYSYPLTFGAGTKLEIKGGGGSGGGGSGGGGSEVQLLEQSGAELVRPGTSVKISCKASGYAFTNYWLGWVKQRPGHGLEWIGDIFPGSGNIHYNEKFKGKATLTADKSSSTAYMQLSSLTFEDSAVYFCARLRNWDEPMDYWGQGTTVTVSSTRGMRTEDLPKAVVFLEPQWYRVLEKDSVTLKCQGAYSPEDNSTQWFHNESLISSQASSYFIDAATVDDSGEYRCQTNLSTLSDPVQLEVHIGWLLLQAPRWVFKEEDPIHLRCHSWKNTALHKVTYLQNGKGRKYFHHNSDFYIPKATLKDSGSYFCRGLVGSKNVSSETVNITITQGLAVPTISSFFPPGYQVSFCLVMVLLFAVDTGLYFYV

SEQ ID NO: 10379 - protein, 482 aa, synthetic construct
MALPVTALLLPLALLLHAARPDIQMTQSPSSLSASVGDRVTITCRASQSISSYLNWYQQKPGKAPKLLIYAASSLQSGVPSRFSGSGSGTDFTLTISSLQPEDLATYYCQQSYSTPFTFGPGTKVDIKGGGGSGGGGSGGGGSVHEVQLVQSGAEVKKPGSSVKVSCKASGGTFSSYAISWVRQAPGQGLEWMGGIIPIFGTANYAQKFQGRVTITADKSTSTAYMELSSLRSEDTAVYYCATFALFGFREQAFDIWGQGTTVTVSSTRGMRTEDLPKAVVFLEPQWYRVLEKDSVTLKCQGAYSPEDNSTQWFHNESLISSQASSYFIDAATVDDSGEYRCQTNLSTLSDPVQLEVHIGWLLLQAPRWVFKEEDPIHLRCHSWKNTALHKVTYLQNGKGRKYFHHNSDFYIPKATLKDSGSYFCRGLVGSKNVSSETVNITITQGLAVPTISSFFPPGYQVSFCLVMVLLFAVDTGLYFYV

SEQ ID NO: 10380 - protein, 476 aa, synthetic construct
MALPVTALLLPLALLLHAARPYIHVTQSPSSLSVSIGDRVTINCQTSQGVGSDLHWYQHKPGRAPKLLIHHASSVEDGVPSRFSGTGFHTSFNLTINDLQADDIGTYYCQVLQSFGRGSRLDTKGGGGSGGGGSGGGGSRAHLVQSGTAMKKPGASVRVSCQTSGYTFTAHILFWFRQAPGRGLEWVGWIKPQYGAVNFGGGFRDRVTLTRDVYREIAYMDIRGLKPDDTAVYYCARDRSYGDSSWALDAWGQGTTVVVSATRGMRTEDLPKAVVFLEPQWYRVLEKDSVTLKCQGAYSPEDNSTQWFHNESLISSQASSYFIDAATVDDSGEYRCQTNLSTLSDPVQLEVHIGWLLLQAPRWVFKEEDPIHLRCHSWKNTALHKVTYLQNGKGRKYFHHNSDFYIPKATLKDSGSYFCRGLVGSKNVSSETVNITITQGLAVPTISSFFPPGYQVSFCLVMVLLFAVDTGLYFYV

SEQ ID NO: 10381 - protein, 481 aa, synthetic construct
MALPVTALLLPLALLLHAARPDIVLTQSPLSLAVSLGQPAIISCKASQSVSFAGTSLMHWYHQKPGQQPRLLIYRASNLEAGVPDRFSGSGSKTDFTLTISPVEAEDAATYYCQQSREYPYTFGGGTKLEIKRGGGGSGGGGSGGGGSQVQLVQSGAEVVKPGASVKISCKASGYTFTGYFMNWVKQSPGQSLEWIGRIHPYDGDTFYNQKFQGKATLTVDKSSNTAHMELLSLTSEDFAVYYCTRYDGSRAMDYWGQGTTVTVSSTRGMRTEDLPKAVVFLEPQWYRVLEKDSVTLKCQGAYSPEDNSTQWFHNESLISSQASSYFIDAATVDDSGEYRCQTNLSTLSDPVQLEVHIGWLLLQAPRWVFKEEDPIHLRCHSWKNTALHKVTYLQNGKGRKYFHHNSDFYIPKATLKDSGSYFCRGLVGSKNVSSETVNITITQGLAVPTISSFFPPGYQVSFCLVMVLLFAVDTGLYFYV

SEQ ID NO: 10382 - protein, 477 aa, synthetic construct
MALPVTALLLPLALLLHAARPDVVMTQTPLSLPVTPGEPASISCRSSQSLVHRNGNTYLHWYLQKPGQSPKLLIHKVSNRFSGVPDRFSGSGSGTDFTLKISRVEAEDLGVYFCSQSTHVPPLTFGAGTKLELKGGGGSGGGGSGGGGSEVQLVQSGAEVEKPGASVKISCKASGSSFTGYNMNWVRQNIGKSLEWIGAIDPYYGGTSYNQKFKGRATLTVDKSTSTAYMHLKSLRSEDTAVYYCVSGMEYWGQGTSVTVSSTRGMRTEDLPKAVVFLEPQWYRVLEKDSVTLKCQGAYSPEDNSTQWFHNESLISSQASSYFIDAATVDDSGEYRCQTNLSTLSDPVQLEVHIGWLLLQAPRWVFKEEDPIHLRCHSWKNTALHKVTYLQNGKGRKYFHHNSDFYIPKATLKDSGSYFCRGLVGSKNVSSETVNITITQGLAVPTISSFFPPGYQVSFCLVMVLLFAVDTGLYFYV

SEQ ID NO: 10383 - protein, 475 aa, synthetic construct
MALPVTALLLPLALLLHAARPEIVMTQTPATLSVSAGERVTITCKASQSVSNDVTWYQQKPGQAPRLLIYSASNRYSGVPARFSGSGYGTEFTFTISSVQSEDFAVYFCQQDYSSFGQGTKLEIKRGGGGSGGGGSGGGGSQVQLVESGPGVVQPGRSLRISCAVSGFSVTNYGVHWVRQPPGKGLEWLGVIWAGGITNYNSAFMSRLTISKDNSKNTVYLQMNSLRAEDTAMYYCASRGGHYGYALDYWGQGTLVTVSSTRGMRTEDLPKAVVFLEPQWYRVLEKDSVTLKCQGAYSPEDNSTQWFHNESLISSQASSYFIDAATVDDSGEYRCQTNLSTLSDPVQLEVHIGWLLLQAPRWVFKEEDPIHLRCHSWKNTALHKVTYLQNGKGRKYFHHNSDFYIPKATLKDSGSYFCRGLVGSKNVSSETVNITITQGLAVPTISSFFPPGYQVSFCLVMVLLFAVDTGLYFYV

SEQ ID NO: 10384 - protein, 478 aa, synthetic construct
MALPVTALLLPLALLLHAARPDIQMTQTASSLPASLGDRVTISCSASQDISNYLNWYQQKPDGTVKLLIFYSSNLHSGVPSRFSGGGSGTDYSLTISNLEPEDIATYFCHQYSKLPWTFGGGTKLEIKRGGGGSGGGGSGGGGSEVTLVESGGDFVKPGGSLKVSCAASGFAFSHYAMSWVRQTPAKRLEWVAYISSGGSGTYYSDSVKGRFTISRDNAKNTLYLQMRSLRSEDSAMYFCTRVKLGTYYFDSWGQGTTLTVSSTRGMRTEDLPKAVVFLEPQWYRVLEKDSVTLKCQGAYSPEDNSTQWFHNESLISSQASSYFIDAATVDDSGEYRCQTNLSTLSDPVQLEVHIGWLLLQAPRWVFKEEDPIHLRCHSWKNTALHKVTYLQNGKGRKYFHHNSDFYIPKATLKDSGSYFCRGLVGSKNVSSETVNITITQGLAVPTISSFFPPGYQVSFCLVMVLLFAVDTGLYFYV

SEQ ID NO: 10385 - protein, 480 aa, synthetic construct
MALPVTALLLPLALLLHAARPQFVLTQSPSASAALGASAKLTCTLSSAHKTYTIDWYQQQKGKAPRYLIQVKSDGTYTKATGVPDRFSGSSSGADRYLIIPSVQADDEADYYCGTDYTGGYVFGGGTQLTVTGGGGSGGGGSGGGGSEQLKESGGGLFKPTDTLTLTCTVSGFSLSYYGVNWVRQAPGNGLEWIGTIGGSGDTYYASWAKSRSTIIRNTNENTVTLKMTSLTAADTATYFCVRYANIGYEYFNVWGPGTLVTVSSTRGMRTEDLPKAVVFLEPQWYRVLEKDSVTLKCQGAYSPEDNSTQWFHNESLISSQASSYFIDAATVDDSGEYRCQTNLSTLSDPVQLEVHIGWLLLQAPRWVFKEEDPIHLRCHSWKNTALHKVTYLQNGKGRKYFHHNSDFYIPKATLKDSGSYFCRGLVGSKNVSSETVNITITQGLAVPTISSFFPPGYQVSFCLVMVLLFAVDTGLYFYV

SEQ ID NO: 10386 - protein, 479 aa, synthetic construct
MALPVTALLLPLALLLHAARPDIQMTQSPSSLSASVGDRVTITCRASQGISSWLAWYQQKPEKAPKSLIYAASSLQSGVPSRFSGSGSGTDFTLTISSLQPEDFATYYCQQYNSYPPTFGGGTKVEIKGGGGSGGGGSGGGGSEVQLVESGGGLVQPGESLRLSCVASGFTFSRYKMNWVRQAPGKGLEWVSYISRSGRDIYYADSVKGRFTISRDNAKNSLYLQMNSLRDEDTAVYYCAGTVTTYYYFGMDVWGHGTTVTVSSTRGMRTEDLPKAVVFLEPQWYRVLEKDSVTLKCQGAYSPEDNSTQWFHNESLISSQASSYFIDAATVDDSGEYRCQTNLSTLSDPVQLEVHIGWLLLQAPRWVFKEEDPIHLRCHSWKNTALHKVTYLQNGKGRKYFHHNSDFYIPKATLKDSGSYFCRGLVGSKNVSSETVNITITQGLAVPTISSFFPPGYQVSFCLVMVLLFAVDTGLYFYV

SEQ ID NO: 10387 - protein, 478 aa, synthetic construct
MALPVTALLLPLALLLHAARPQSVVTQPPSMSAAPGQQVTISCSGGNSNIERNYVSWYLQLPGTAPKLVIFDNDRRPSGIPDRFSGSKSGTSATLGITGLQTGDEADYYCGTWDSSLRGWVFGGGTKLTVLGGGGGSGGGGSGGGGSEVQLVESGGGLIQPGGSLRLSCAASGFTFSNYAMNWVRQAPGKGLEWVSTINGRGSSTIYADSVKGRFTISRDNSKNTLYLQMNSLRAEDTATYYCARYISRGLGDSWGQGTLVTVTRGMRTEDLPKAVVFLEPQWYRVLEKDSVTLKCQGAYSPEDNSTQWFHNESLISSQASSYFIDAATVDDSGEYRCQTNLSTLSDPVQLEVHIGWLLLQAPRWVFKEEDPIHLRCHSWKNTALHKVTYLQNGKGRKYFHHNSDFYIPKATLKDSGSYFCRGLVGSKNVSSETVNITITQGLAVPTISSFFPPGYQVSFCLVMVLLFAVDTGLYFYV

SEQ ID NO: 10388 - protein, 479 aa, synthetic construct
MALPVTALLLPLALLLHAARPQSVLTQPPSASGTPGQRVTISCSGSRSNVGGNYVFWYQQVPGATPKLLIYRSNQRPSGVPDRFAGSKSGSSASLAISGLRSEDEADYYCATWDDSLSGFVFGTGTKVTVLGGGGGSGGGGSGGGGSEVQLVESGGGLVKPGGSLRLSCAASGFTFSDYYMSWIRQAPGKGLEWVSYISSSGSTIYYADSVKGRFTISRDNAKNSLYLQMNSLRAEDTAVYYCARGYGKAYDQWGQGTLVTVSSTRGMRTEDLPKAVVFLEPQWYRVLEKDSVTLKCQGAYSPEDNSTQWFHNESLISSQASSYFIDAATVDDSGEYRCQTNLSTLSDPVQLEVHIGWLLLQAPRWVFKEEDPIHLRCHSWKNTALHKVTYLQNGKGRKYFHHNSDFYIPKATLKDSGSYFCRGLVGSKNVSSETVNITITQGLAVPTISSFFPPGYQVSFCLVMVLLFAVDTGLYFYV

SEQ ID NO: 10389 - protein, 478 aa, synthetic construct
MALPVTALLLPLALLLHAARPDIQMTQSPSSLSASVGDRVTITCRASQDVNTAVAWYQQKPGKAPKLLIYSASFLESGVPSRFSGSRSGTDFTLTISSLQPEDFATYYCQQHYTTPPTFGQTKVEIKRGGGGSGGGGSGGGGSEVQLVESGGGLVQPGGSLRLSCAASGFNIKDTYIHWVRQAPGKGLEWVARIYPTNGYTRYADSVKGRFTISADTSKNTAYLQMNSLRAEDTAVYYCSRWGGDGFYAMDVWGQGTLVTVSSTRGMRTEDLPKAVVFLEPQWYRVLEKDSVTLKCQGAYSPEDNSTQWFHNESLISSQASSYFIDAATVDDSGEYRCQTNLSTLSDPVQLEVHIGWLLLQAPRWVFKEEDPIHLRCHSWKNTALHKVTYLQNGKGRKYFHHNSDFYIPKATLKDSGSYFCRGLVGSKNVSSETVNITITQGLAVPTISSFFPPGYQVSFCLVMVLLFAVDTGLYFYV

SEQ ID NO: 10390 - protein, 491 aa, synthetic construct
MALPVTALLLPLALLLHAARPQSALTQPPSASGSPGQSITISCTGTSNNFVSWYQQHAGKAPKLVIYDVNKRPSGVPDRFSGSKSGNTASLTVSGLQTDDEAVYYCGSLVGNWDVIFGGGTKLTVLGGGGSGGGGSGGGGSQPQLQESGPTLVEASETLSLTCAVSGDSTAACNSFWGWVRQPPGKGLEWVGSLSHCASYWNRGWTYHNPSLKSRLTLALDTPKNLVFLKLNSVTAADTATYYCARFGGEVLRYTDWPKPAWVDLWGRGTLVTVSSTRGMRTEDLPKAVVFLEPQWYRVLEKDSVTLKCQGAYSPEDNSTQWFHNESLISSQASSYFIDAATVDDSGEYRCQTNLSTLSDPVQLEVHIGWLLLQAPRWVFKEEDPIHLRCHSWKNTALHKVTYLQNGKGRKYFHHNSDFYIPKATLKDSGSYFCRGLVGSKNVSSETVNITITQGLAVPTISSFFPPGYQVSFCLVMVLLFAVDTGLYFYV

SEQ ID NO: 10391 - protein, 486 aa, synthetic construct
MALPVTALLLPLALLLHAARPELVLTQSPGTLSLSAGERATLSCRASQSVSSGSLAWYQQKPGQAPRLLIYGASTRATGIPDRFSGSGSGTDFTLTIGRLEPEDLAVYYCQQYGTSPYTFGQGTKLEIGGGGSGGGGSGGGGSLEQSGAEVKKPGSSVQVSCKASGGTFSMYGFNWVRQAPGHGLEWMGGIIPIFGTSNYAQKFRGRVTFTADQATSTAYMELTNLRSDDTAVYYCARDFGPDWEDGDSYDGSGRGFFDFWGQGTLVTVSSTRGMRTEDLPKAVVFLEPQWYRVLEKDSVTLKCQGAYSPEDNSTQWFHNESLISSQASSYFIDAATVDDSGEYRCQTNLSTLSDPVQLEVHIGWLLLQAPRWVFKEEDPIHLRCHSWKNTALHKVTYLQNGKGRKYFHHNSDFYIPKATLKDSGSYFCRGLVGSKNVSSETVNITITQGLAVPTISSFFPPGYQVSFCLVMVLLFAVDTGLYFYV

SEQ ID NO: 10392 - protein, 466 aa, synthetic construct
MALPVTALLLPLALLLHAARPDIQMTQSPSSLSASVGDRVTITCQASQDINNYLNWYQQKPGKAPKLLIYDASNLQTGVPSRFSGSGSGTDFTFTIEDIATYYCQQYTFGPGTKVDIKGGGGSGGGGSGGGGSEVQLLESGGGLVQPGGSLRLSCAASGFTFSWYSMTWVRQAPGKGLEWVSSIVPWGDFTQYADSVKGRFTISRDNSKNTLYLQMNSLRAEDTAVYYCAKGPGWGSFDLWGRGTLVTVSSTRGMRTEDLPKAVVFLEPQWYRVLEKDSVTLKCQGAYSPEDNSTQWFHNESLISSQASSYFIDAATVDDSGEYRCQTNLSTLSDPVQLEVHIGWLLLQAPRWVFKEEDPIHLRCHSWKNTALHKVTYLQNGKGRKYFHHNSDFYIPKATLKDSGSYFCRGLVGSKNVSSETVNITITQGLAVPTISSFFPPGYQVSFCLVMVLLFAVDTGLYFYV

SEQ ID NO: 10393 - protein, 476 aa, synthetic construct
MALPVTALLLPLALLLHAARPDIQMTQSPSSLSASVGDRVTITCTASLSVSSTYLHWYQQKPGSSPKLWIYSTSNLASGVPSRFSGSGSGTSYTLTISSLQPEDFATYYCHQYHRSPLTFGGGTKVEIKRGGGGSGGGGSGGGGSEVQLVESGGGLVQPGGSLRLSCAASGFSLTKYGVHWVRQAPGKGLEWVGVKWAGGSTDYNSALMSRFTISKDNAKNSLYLQMNSLRAEDTAVYYCARDHRDAMDYWGQGTLVTVSSTRGMRTEDLPKAVVFLEPQWYRVLEKDSVTLKCQGAYSPEDNSTQWFHNESLISSQASSYFIDAATVDDSGEYRCQTNLSTLSDPVQLEVHIGWLLLQAPRWVFKEEDPIHLRCHSWKNTALHKVTYLQNGKGRKYFHHNSDFYIPKATLKDSGSYFCRGLVGSKNVSSETVNITITQGLAVPTISSFFPPGYQVSFCLVMVLLFAVDTGLYFYV

SEQ ID NO: 10394 - protein, 480 aa, synthetic construct
MALPVTALLLPLALLLHAARPDIQMTQSPSSLSASVGDRVTITCKASQDVGTAVAWYQQKPGKAPKLLIYSASYRSTGVPSRFSGSGSGTDFTLTISSLQPEDFATYYCQHHYSAPWTFGGGTKVEIKGGGGSGGGGSGGGGSEVQLVESGGGLVQPGGSLRLSCAASGFTFSRNGMSWVRQAPGKGLEWVATVSSGGSYIYYADSVKGRFTISRDNAKNSLYLQMNSLRAEDTAVYYCARQGTTALATRFFDVWGQGTLVTVSSTRGMRTEDLPKAVVFLEPQWYRVLEKDSVTLKCQGAYSPEDNSTQWFHNESLISSQASSYFIDAATVDDSGEYRCQTNLSTLSDPVQLEVHIGWLLLQAPRWVFKEEDPIHLRCHSWKNTALHKVTYLQNGKGRKYFHHNSDFYIPKATLKDSGSYFCRGLVGSKNVSSETVNITITQGLAVPTISSFFPPGYQVSFCLVMVLLFAVDTGLYFYV

SEQ ID NO: 10395 - protein, 476 aa, synthetic construct
MALPVTALLLPLALLLHAARPDIQMTQSFSSLSASVGDRVTITCRASQDISNYLNWYQQKPGKAPKLLIYYTSRLHSGVPSRFSGSGSGTDYTLTISSLQPEDFATYFCQQGNTLPWTFGGGTKLEIKRGGGGSGGGGSGGGGSEVQLVQSGGGLVQSGGSLRLSCRASGYTFTRYWMLWVRQRPGKGLEWVAEINPRNDRTNYNEKFKTRFTISVDRSKNTLYLQMDSLRAEDTAVYFCALGGGYAMDYWGQGTLVTVSSTRGMRTEDLPKAVVFLEPQWYRVLEKDSVTLKCQGAYSPEDNSTQWFHNESLISSQASSYFIDAATVDDSGEYRCQTNLSTLSDPVQLEVHIGWLLLQAPRWVFKEEDPIHLRCHSWKNTALHKVTYLQNGKGRKYFHHNSDFYIPKATLKDSGSYFCRGLVGSKNVSSETVNITITQGLAVPTISSFFPPGYQVSFCLVMVLLFAVDTGLYFYV

SEQ ID NO: 10396 - protein, 476 aa, synthetic construct
MALPVTALLLPLALLLHAARPDIQMTQSPPSLSASVGGKVTITCKASQDIDRYMAWYQDKPGKGPKLLIHDTSTLQPGIPSRFSGSGSGRDYSFSISNLEPEDIATYYCLQYDNLWTFGGGTKLEIKRGGGGSGGGGSGGGGSQVQLVQSGAELVKPGASVKMSCKASGYIFTNYNIHWVKKSPGQGLEWIGAIYPGNGDAPYSQKFQDRATLTADTSSSTTYMELSSLTSEDSAVYYCVRANWDVAFAYWGQGTLVSVSSTRGMRTEDLPKAVVFLEPQWYRVLEKDSVTLKCQGAYSPEDNSTQWFHNESLISSQASSYFIDAATVDDSGEYRCQTNLSTLSDPVQLEVHIGWLLLQAPRWVFKEEDPIHLRCHSWKNTALHKVTYLQNGKGRKYFHHNSDFYIPKATLKDSGSYFCRGLVGSKNVSSETVNITITQGLAVPTISSFFPPGYQVSFCLVMVLLFAVDTGLYFYV

SEQ ID NO: 10397 - protein, 477 aa, synthetic construct
MALPVTALLLPLALLLHAARPDIQMTQSPASLSASVGETVTITCRVSGNIHNYLAWYQQKQGKSPQLLVYNAKTLADGVPSRFSGSGSGTQYSLKINSLQPEDFGSYYCQHFWSNPYTFGGGTKLEIKGGGGSGGGGSGGGGSQVQLQQSGASVKVSCKASELVRPGTGYAFTNYLIEWVKQRPGQGLEWIGVINPGSGGTNYNEKFKGKATLTADKSSSTAYMQLSSLTSDDSAVYFCARYRSYDWYFDVWGAGTTVTVSSTRGMRTEDLPKAVVFLEPQWYRVLEKDSVTLKCQGAYSPEDNSTQWFHNESLISSQASSYFIDAATVDDSGEYRCQTNLSTLSDPVQLEVHIGWLLLQAPRWVFKEEDPIHLRCHSWKNTALHKVTYLQNGKGRKYFHHNSDFYIPKATLKDSGSYFCRGLVGSKNVSSETVNITITQGLAVPTISSFFPPGYQVSFCLVMVLLFAVDTGLYFYV

SEQ ID NO: 10398 - protein, 477 aa, synthetic construct
MALPVTALLLPLALLLHAARPDIQMTQSPASLSASVGETVTIICRASVNIYSYLAWYQQKQGKSPQLLVYNAKILAEGVPSRFSGSGSGTQFSLKINSLQPEDFGSYYCQHHYGTFTFGSGTKLEIKRGGGGSGGGGSGGGGSQVQLKESGPGLVAPSQSLSITCTISGFSLTSYGVHWVRQPPGKGLEWLVVIWSDGSTTYNSALKSRLSISKDNSKSQVFLKMNSLQTDDTAIYYCASHYGSTLAFASWGHGTLVTVSAATRGMRTEDLPKAVVFLEPQWYRVLEKDSVTLKCQGAYSPEDNSTQWFHNESLISSQASSYFIDAATVDDSGEYRCQTNLSTLSDPVQLEVHIGWLLLQAPRWVFKEEDPIHLRCHSWKNTALHKVTYLQNGKGRKYFHHNSDFYIPKATLKDSGSYFCRGLVGSKNVSSETVNITITQGLAVPTISSFFPPGYQVSFCLVMVLLFAVDTGLYFYV

SEQ ID NO: 10399 - protein, 485 aa, synthetic construct
MALPVTALLLPLALLLHAARPDIVMTQSHKFMSTSVGDRVSVTCKASQNVGNNVAWYQQKPGQSPKVLIYSASYRYSGVPDRFTGSGSGTDFTLTISNVQSEDLAEYFCQQYNTYPFTFGSGTKLEIKGGGGSGGGGSGGGGSEVQLEESGGGLVQPGGSMKLSCVASGFTFSNYWMNWVRQSPEKGLEWVAEIRFKSHNYATHFAESVKGRFTISRDDSKSSVYLQMNNLRAEDTGIYYCTRRIGNSDYDWWYFDVWGAGTSVTVSSASTRGMRTEDLPKAVVFLEPQWYRVLEKDSVTLKCQGAYSPEDNSTQWFHNESLISSQASSYFIDAATVDDSGEYRCQTNLSTLSDPVQLEVHIGWLLLQAPRWVFKEEDPIHLRCHSWKNTALHKVTYLQNGKGRKYFHHNSDFYIPKATLKDSGSYFCRGLVGSKNVSSETVNITITQGLAVPTISSFFPPGYQVSFCLVMVLLFAVDTGLYFYV

SEQ ID NO: 10400 - protein, 477 aa, synthetic construct
MALPVTALLLPLALLLHAARPDIQMTQSSSSFSVSLGDRVTITCKASEDIYIRLAWYQQKPGNAPRLLISAATSLETGIPSRFSGSGSGEDYTLTITSLQTEDVATYYCQQYWTTPWTFGGGTKLEIKRGGGGSGGGGSGGGGSDVQLQESGPGLVKPSQSLSLTCTVTGYSITIDYTWNWIRQFPGNKLEWMGYITYSGSTDYNPSLKSRSSITRDTSMNQFFLQLNSVTTEDTATYYCARLGRRYALDYWGQGTSVTVSSTRGMRTEDLPKAVVFLEPQWYRVLEKDSVTLKCQGAYSPEDNSTQWFHNESLISSQASSYFIDAATVDDSGEYRCQTNLSTLSDPVQLEVHIGWLLLQAPRWVFKEEDPIHLRCHSWKNTALHKVTYLQNGKGRKYFHHNSDFYIPKATLKDSGSYFCRGLVGSKNVSSETVNITITQGLAVPTISSFFPPGYQVSFCLVMVLLFAVDTGLYFYV

SEQ ID NO: 10401 - protein, 476 aa, synthetic construct
MALPVTALLLPLALLLHAARPDVQLQESGPGLVKPSQSLSLTCTVTGYSITSDYTWNWIRQFPGNKLEWMGYITYSGSTSYNPSLKSRNSITRDTSKNQFFLQLNSVTTEDTATYYCARLGRRYTMDYWGQGTSVTVSSGGGGSGGGGSGGGGSDIQMTQSSSSFSVSLGDRVTITCMASEDIYIRLAWYQQKPGNAPRLLISAATSLETGVPSRFSGSGSGKDYTLSITSLQTEDVGTYYCQQYWSSPWTFGGGTKLEINTRGMRTEDLPKAVVFLEPQWYRVLEKDSVTLKCQGAYSPEDNSTQWFHNESLISSQASSYFIDAATVDDSGEYRCQTNLSTLSDPVQLEVHIGWLLLQAPRWVFKEEDPIHLRCHSWKNTALHKVTYLQNGKGRKYFHHNSDFYIPKATLKDSGSYFCRGLVGSKNVSSETVNITITQGLAVPTISSFFPPGYQVSFCLVMVLLFAVDTGLYFYV

SEQ ID NO: 10402 - protein, 476 aa, synthetic construct
MALPVTALLLPLALLLHAARPDIQMTQSSSSFSVSLGDRVTITCMASEDIYIRLAWYQQKPGNAPRLLISAATSLETGVPSRFSGSGSGKDYTLSITSLQTEDVGTYYCQQYWSSPWTFGGGTKLEINGGGGSGGGGSGGGGSDVQLQESGPGLVKPSQSLSLTCTVTGYSITSDYTWNWIRQFPGNKLEWMGYITYSGSTSYNPSLKSRNSITRDTSKNQFFLQLNSVTTEDTATYYCARLGRRYTMDYWGQGTSVTVSSTRGMRTEDLPKAVVFLEPQWYRVLEKDSVTLKCQGAYSPEDNSTQWFHNESLISSQASSYFIDAATVDDSGEYRCQTNLSTLSDPVQLEVHIGWLLLQAPRWVFKEEDPIHLRCHSWKNTALHKVTYLQNGKGRKYFHHNSDFYIPKATLKDSGSYFCRGLVGSKNVSSETVNITITQGLAVPTISSFFPPGYQVSFCLVMVLLFAVDTGLYFYV

SEQ ID NO: 10403 - protein, 478 aa, synthetic construct
MALPVTALLLPLALLLHAARPDQIVLTQSPAIMSASPGEKVTISCSASSSVSYMYWYQQKPGSSPKPWIYRTSNLASGVPARFSGSGSGTSYSLTISNMEAEDAAAYYCQQYHSYPTTFGGGTKLEVKGGGGSGGGGSGGGGSEVQLVESGGGLVQPKGSLKLSCAASGFSFNTYAMNWVRQAPGKGLEWIAHIRSKSNNFATYYADSVKDRFSISRDASENILFLQMNNLKTEDTAMYYCVRQGGDFPMDYWGQGTSVTVSSTRGMRTEDLPKAVVFLEPQWYRVLEKDSVTLKCQGAYSPEDNSTQWFHNESLISSQASSYFIDAATVDDSGEYRCQTNLSTLSDPVQLEVHIGWLLLQAPRWVFKEEDPIHLRCHSWKNTALHKVTYLQNGKGRKYFHHNSDFYIPKATLKDSGSYFCRGLVGSKNVSSETVNITITQGLAVPTISSFFPPGYQVSFCLVMVLLFAVDTGLYFYV

SEQ ID NO: 10404 - protein, 479 aa, synthetic construct
MALPVTALLLPLALLLHAARPDIQMTQSPSSLSASVGDRVTITCRASQSISSYLNWYQQKPGKAPKLLIYDASNLETGVPSRFSGSGSGTDFTFTISSLQPEDIATYYCQQYDNLPLTFGGGTKVDIKRGGGGSGGGGSGGGGSQVQLVESGGGVVQPGRSLRLSCAASGFTFSSYAMHWVRQAPGKGLEWVAVISYDGSNKYYADSVKGRFTISRDNSKNTLYLQMNSLRAEDTAVYYCARAHNSSSWSFDYWGQGTLVTVSSTRGMRTEDLPKAVVFLEPQWYRVLEKDSVTLKCQGAYSPEDNSTQWFHNESLISSQASSYFIDAATVDDSGEYRCQTNLSTLSDPVQLEVHIGWLLLQAPRWVFKEEDPIHLRCHSWKNTALHKVTYLQNGKGRKYFHHNSDFYIPKATLKDSGSYFCRGLVGSKNVSSETVNITITQGLAVPTISSFFPPGYQVSFCLVMVLLFAVDTGLYFYV

SEQ ID NO: 10405 - protein, 488 aa, synthetic construct
MALPVTALLLPLALLLHAARPDVVMTQSPLSLPVSLGDQASISCRSSQRLVHSNGNTYLHWYLQKPGQSPKLLIYRVSNRFPGVPDRFSGSGSGTDFTLKISRVEAEDLGIYFCSQSTHVPYTFGGGTKLEIKRGGGGSGGGGSGGGGSEVRLQQSGPDLIKPGASVKMSCKASGYTFTGYVMHWVKQRPGQGLEWIGFINPYNDDIQSNERFRGKATLTSDKSSTTAYMELSSLTSEDSAVYYCARGAGYNFDGAYRFFDFWGQGTTLTVSSTRGMRTEDLPKAVVFLEPQWYRVLEKDSVTLKCQGAYSPEDNSTQWFHNESLISSQASSYFIDAATVDDSGEYRCQTNLSTLSDPVQLEVHIGWLLLQAPRWVFKEEDPIHLRCHSWKNTALHKVTYLQNGKGRKYFHHNSDFYIPKATLKDSGSYFCRGLVGSKNVSSETVNITITQGLAVPTISSFFPPGYQVSFCLVMVLLFAVDTGLYFYV

SEQ ID NO: 10406 - protein, 479 aa, synthetic construct
MALPVTALLLPLALLLHAARPSYELTQPPSVSVSPGQTATISCSGDQLGGKYGHWYQKKPGQSPVLVLYQDRKRPAGIPERFSGSSSGNTITLTISGTQAVDEADYYCQAWDTNLGGVFGGGTKVTVLGQGGGGSGGGGSGGGGSQVQLVESGAEVKKPGASVKVSCKASGYTFTGYYMHWVRQAPGQGLEWMGRINPNSGGTNYAQKFQGRVTMTRDTSISTAYMELSRLRSDDTAVYYCASPRGRGSAFDIWGQGTLVTVSSTRGMRTEDLPKAVVFLEPQWYRVLEKDSVTLKCQGAYSPEDNSTQWFHNESLISSQASSYFIDAATVDDSGEYRCQTNLSTLSDPVQLEVHIGWLLLQAPRWVFKEEDPIHLRCHSWKNTALHKVTYLQNGKGRKYFHHNSDFYIPKATLKDSGSYFCRGLVGSKNVSSETVNITITQGLAVPTISSFFPPGYQVSFCLVMVLLFAVDTGLYFYV

SEQ ID NO: 10407 - protein, 482 aa, synthetic construct
MALPVTALLLPLALLLHAARPNFMLTQPHSVSESPGKTVTISCTRSSGSIASKYVQWYQQRPGSSPTTVIYEDNQRPSGVPDRFSGSIDTSSNSASLTISGLRTEDEADYYCHSYDSNNHSVFGGGTKVTVLGQGGGGSGGGGSGGGGSEVQLVESGGGVVQPGGSLRLSCAASGFTFSSYAMSWVRQAPGKGLEWVSAISGSGGSTYYADSVKGRFSISRDNSKNTLYLQMNSLRAEDTAVYYCARTRSSGAFDIWGQGTLVTVSSTRGMRTEDLPKAVVFLEPQWYRVLEKDSVTLKCQGAYSPEDNSTQWFHNESLISSQASSYFIDAATVDDSGEYRCQTNLSTLSDPVQLEVHIGWLLLQAPRWVFKEEDPIHLRCHSWKNTALHKVTYLQNGKGRKYFHHNSDFYIPKATLKDSGSYFCRGLVGSKNVSSETVNITITQGLAVPTISSFFPPGYQVSFCLVMVLLFAVDTGLYFYV

SEQ ID NO: 10408 - protein, 478 aa, synthetic construct
MALPVTALLLPLALLLHAARPDIQMNQSPSSLSASLGDTITITCHASQNINVWLSWYQQKPGNIPKLLIYKASNLHTGVPSRFSGSGSGTGFTITISSLQPEDIATYYCQQGQSYPWTFGGGTKLEIKRGGGGSGGGGSGGGGSEVQLQQSGPELVKPGASVKISCKASGYSFTGYFMNWVKQSHGKSLEYIGRFNPYNGETLYNQKFKGKATLTVDKSSSTVHMELLSVTSEDSAVYYCGRSGNDDAMDYWGQGTSVTVSSATRGMRTEDLPKAVVFLEPQWYRVLEKDSVTLKCQGAYSPEDNSTQWFHNESLISSQASSYFIDAATVDDSGEYRCQTNLSTLSDPVQLEVHIGWLLLQAPRWVFKEEDPIHLRCHSWKNTALHKVTYLQNGKGRKYFHHNSDFYIPKATLKDSGSYFCRGLVGSKNVSSETVNITITQGLAVPTISSFFPPGYQVSFCLVMVLLFAVDTGLYFYV

SEQ ID NO: 10409 - protein, 475 aa, synthetic construct
MALPVTALLLPLALLLHAARPDILLTQSPAILSVSPGERVSFSCRASQNIGTSIHWYQQRTNGSPRLLIKYASESVSGIPSRFSGSGSGTDFTLSINSVESEDIADYYCQHTNSWPTTFGGGTKLEIKRGGGGSGGGGSGGGGSQVQLQQSDAELVKPGASVKISCKASGYTFTDHAIHWVKQKPEQGLEWIGYFSPGNGDIKYNEKFKGKATLTADKSSSTAYMQLNSLTSEDSAVYFCKRSYGNYDYWGQGTTLTVSSTRGMRTEDLPKAVVFLEPQWYRVLEKDSVTLKCQGAYSPEDNSTQWFHNESLISSQASSYFIDAATVDDSGEYRCQTNLSTLSDPVQLEVHIGWLLLQAPRWVFKEEDPIHLRCHSWKNTALHKVTYLQNGKGRKYFHHNSDFYIPKATLKDSGSYFCRGLVGSKNVSSETVNITITQGLAVPTISSFFPPGYQVSFCLVMVLLFAVDTGLYFYV

SEQ ID NO: 10410 - protein, 480 aa, synthetic construct
MALPVTALLLPLALLLHAARPDIVMTQSPDSLAVSLGERATINCKSSQSLLNSGDQKNYLTWYQQKPGQPPKLLIYWASTRESGVPDRFSGSGSGTDFTLTISSLQAEDVAVYYCQNDYSYPLTFGQGTKVEIKGGGGSGGGGSGGGGSQVQLVQSGAEVKKTGSSVKVSCKASGYTFTDHAIHVWRQAPGQALEWMGHFSPGNTDIKYNDKFKGRVTLTVDRSMSTAYMELSSLRSEDTAMYYCKTSTFFFDYWGQGTMVTVSSTRGMRTEDLPKAVVFLEPQWYRVLEKDSVTLKCQGAYSPEDNSTQWFHNESLISSQASSYFIDAATVDDSGEYRCQTNLSTLSDPVQLEVHIGWLLLQAPRWVFKEEDPIHLRCHSWKNTALHKVTYLQNGKGRKYFHHNSDFYIPKATLKDSGSYFCRGLVGSKNVSSETVNITITQGLAVPTISSFFPPGYQVSFCLVMVLLFAVDTGLYFYV

SEQ ID NO: 10411 - protein, 479 aa, synthetic construct
MALPVTALLLPLALLLHAARPDIQMTQSPSSLSASVGDRVTITCKASQDVSIAVAWYQQKPGKAPKVLIYSASYRYTGVPDRFSGSGSGTDFTFTISSLQPEDIAVYYCQQHYITPLTFGGGTKVEIKGGGGSGGGGSGGGGSQIQLVQSGHEVKKPGASVKVSCKASGYTFTNYGMNWVRQAPGQGLEWMGWINTKTGEPTYAEEFKGRFVFSLETSASTAYLQISSLKAEDTAMYFCGRGGYGSSYWYFDVWGQGTTVTVSSTRGMRTEDLPKAVVFLEPQWYRVLEKDSVTLKCQGAYSPEDNSTQWFHNESLISSQASSYFIDAATVDDSGEYRCQTNLSTLSDPVQLEVHIGWLLLQAPRWVFKEEDPIHLRCHSWKNTALHKVTYLQNGKGRKYFHHNSDFYIPKATLKDSGSYFCRGLVGSKNVSSETVNITITQGLAVPTISSFFPPGYQVSFCLVMVLLFAVDTGLYFYV

SEQ ID NO: 10412 - protein, 482 aa, synthetic construct
MALPVTALLLPLALLLHAARPQAVVTQPPSASGTPGQRVTISCSGSSSNIGSNTVNWYQQVPGTAPKLLIYSNNQRPSGVPDRFSGSKSGTSASLAISGLQSEDEADYYCAAWDDSLNGWVFGGGTKLTVLGGGGSGGGGSGGGGSQMQLVQSGAEVKEPGESLRISCKGSGYSFTNFWISWVRQMPGKGLEWMGRVDPGYSYSTYSPSFQGHVTISADKSTSTAYLQWNSLKASDTAMYYCARVQYSGYYDWFDPWGQGTLVTVSSTRGMRTEDLPKAVVFLEPQWYRVLEKDSVTLKCQGAYSPEDNSTQWFHNESLISSQASSYFIDAATVDDSGEYRCQTNLSTLSDPVQLEVHIGWLLLQAPRWVFKEEDPIHLRCHSWKNTALHKVTYLQNGKGRKYFHHNSDFYIPKATLKDSGSYFCRGLVGSKNVSSETVNITITQGLAVPTISSFFPPGYQVSFCLVMVLLFAVDTGLYFYV

SEQ ID NO: 10413 - protein, 476 aa, synthetic construct
MALPVTALLLPLALLLHAARPDIQMTQSPSTLSASVGDRVTITCRASQNINKWLAWYQQRPGKAPQLLIYKASSLESGVPSRFSGSGSGTEYTLTISSLQPDDFATYYCQQYNSYATFGQGTKVEIKRGGGGSGGGGSGGGGSQVQLVQSGAEVKKPGESLKISCKGSGYNFSNKWIGWVRQLPGRGLEWIAIIYPGYSDITYSPSFQGRVTISADTSINTAYLHWHSLKASDTAMYYCVRHTALAGFDYWGLGTLVTVSSTRGMRTEDLPKAVVFLEPQWYRVLEKDSVTLKCQGAYSPEDNSTQWFHNESLISSQASSYFIDAATVDDSGEYRCQTNLSTLSDPVQLEVHIGWLLLQAPRWVFKEEDPIHLRCHSWKNTALHKVTYLQNGKGRKYFHHNSDFYIPKATLKDSGSYFCRGLVGSKNVSSETVNITITQGLAVPTISSFFPPGYQVSFCLVMVLLFAVDTGLYFYV

SEQ ID NO: 10414 - protein, 481 aa, synthetic construct
MALPVTALLLPLALLLHAARPQSVVTQPPSVSVAPGKTARITCGRNNIGSKSVHWYQQKPGQAPVLVVYDDSDRPSGIPERFSGSNSGNTATLTISRVEAGDEADYYCQVWDSSSDHVVFGGGTKLTVLGGGGGSGGGGSGGGGSEVQLVQSGGGVVRPGGSLRLSCAASGFTFDDYGMSWVRQAPGKGLEWVSGINWNGGSTGYADSVRGRFTISRDNAKNSLYLQMNSLRAEDTALYYCARERGYGYHDPHDYWGQGTLVTVSSTRGMRTEDLPKAVVFLEPQWYRVLEKDSVTLKCQGAYSPEDNSTQWFHNESLISSQASSYFIDAATVDDSGEYRCQTNLSTLSDPVQLEVHIGWLLLQAPRWVFKEEDPIHLRCHSWKNTALHKVTYLQNGKGRKYFHHNSDFYIPKATLKDSGSYFCRGLVGSKNVSSETVNITITQGLAVPTISSFFPPGYQVSFCLVMVLLFAVDTGLYFYV

SEQ ID NO: 10415 - protein, 480 aa, synthetic construct
MALPVTALLLPLALLLHAARPDIVLTQSPASLAVSLGQRATISCRASESVDNYGNTFMHWYQQKPGQPPKLLIYRASNLESGIPARFSGSGSRTDFTLTINPVEADDVATYYCQQSNEDPPTFGAGTKLELKGGGGSGGGGSGGGGSQIQLVQSGPELKKPGETVKISCKASGYIFTNYGMNWVKQAPGKSFKWMGWINTYTGESTYSADFKGRFAFSLETSASTAYLHINDLKNEDTATYFCARSGGYDPMDYWGQGTSVTVSSTRGMRTEDLPKAVVFLEPQWYRVLEKDSVTLKCQGAYSPEDNSTQWFHNESLISSQASSYFIDAATVDDSGEYRCQTNLSTLSDPVQLEVHIGWLLLQAPRWVFKEEDPIHLRCHSWKNTALHKVTYLQNGKGRKYFHHNSDFYIPKATLKDSGSYFCRGLVGSKNVSSETVNITITQGLAVPTISSFFPPGYQVSFCLVMVLLFAVDTGLYFYV

SEQ ID NO: 10416 - protein, 478 aa, synthetic construct
MALPVTALLLPLALLLHAARPEIVLTQSPGTLSLSPGERATLSCRASQSVSNTYLAWYHQRPGQAPRLLIYGASSRATGIPDRFSGSGSGTDFALTISSLEPEDFAVYYCQQYSNSWTFGQGTKVEIKRGGGGSGGGGSGGGGSQVQLVESGGGVVQPGRSLRLSCAASGFTFSSYDMHWVRQAPGKGLEWVAVISYDGTNEYYADSVKGRFTISRDTSKNTLYLQMNSLRAEDTAVYYCARERYFDWSFDYWGQGTLVSVSSTRGMRTEDLPKAVVFLEPQWYRVLEKDSVTLKCQGAYSPEDNSTQWFHNESLISSQASSYFIDAATVDDSGEYRCQTNLSTLSDPVQLEVHIGWLLLQAPRWVFKEEDPIHLRCHSWKNTALHKVTYLQNGKGRKYFHHNSDFYIPKATLKDSGSYFCRGLVGSKNVSSETVNITITQGLAVPTISSFFPPGYQVSFCLVMVLLFAVDTGLYFYV

SEQ ID NO: 10417 - protein, 477 aa, synthetic construct
MALPVTALLLPLALLLHAARPELTQDPAVSVALGQTVRITCQGDSLRSNYANWYQQKPGQAPVLVIYGQNNRPSGIPDRFSGSSSGNTASLTITGAQAADEADYYCDSRVSTGNHVVFGGGTKLTVLGQGGGGSGGGGSGGGGSEVQLVQSGAEVKKPGASVKVSCKASGYTFTSYAMHWVRQAPGQRLEWMGWINAGNGNTKYSQKFQGRVTITRDTSASTAYMELSSLRSEDTAVYYCARDISYGSFDYWGQGTLVTVSSTRGMRTEDLPKAVVFLEPQWYRVLEKDSVTLKCQGAYSPEDNSTQWFHNESLISSQASSYFIDAATVDDSGEYRCQTNLSTLSDPVQLEVHIGWLLLQAPRWVFKEEDPIHLRCHSWKNTALHKVTYLQNGKGRKYFHHNSDFYIPKATLKDSGSYFCRGLVGSKNVSSETVNITITQGLAVPTISSFFPPGYQVSFCLVMVLLFAVDTGLYFYV
